United States Patent Application Publication US 2006/0134663 A1 - sequence listing, part 131

SEQ ID NO: 438835 - DNA, 413 bp, Homo Sapiens
  misc_feature (318)..(318): n is a, c, g, or t
  misc_feature (324)..(324): n is a, c, g, or t
  misc_feature (355)..(355): n is a, c, g, or t
  misc_feature (389)..(389): n is a, c, g, or t
ttttttttcaggcatcaatatttattaacacaagacaaaggaaacacattcaatgagttaatagaacactgtccagccagatgttaaatttaaaaacgtatatctagtctaacttcaaataaataaaaaaactttatacataattacacagtactgtagtttgaatttgacacgggtaaatatcttggacaggaaagtaaacaaaacaggcatttagggactaaaaaattattcttatatctttaggtctcttcctctgggacaaggtaacatgggcccaactacatacacctaaaccaggaaatgttcggtatggantggatnaaggaaagggcctattgtggtatttgggtgncattgccggcttcttggctccaaattactcttgnctttttacatccaaggccggacaa

SEQ ID NO: 438836 - DNA, 1128 bp, Homo Sapiens
  misc_feature (1)..(1): n is a, c, g, or t
  misc_feature (3)..(3): n is a, c, g, or t
  misc_feature (21)..(21): n is a, c, g, or t
  misc_feature (35)..(36): n is a, c, g, or t
  misc_feature (43)..(43): n is a, c, g, or t
  misc_feature (46)..(46): n is a, c, g, or t
  misc_feature (48)..(48): n is a, c, g, or t
  misc_feature (52)..(53): n is a, c, g, or t
  misc_feature (56)..(56): n is a, c, g, or t
  misc_feature (66)..(66): n is a, c, g, or t
  misc_feature (79)..(79): n is a, c, g, or t
  misc_feature (87)..(88): n is a, c, g, or t
  misc_feature (105)..(105): n is a, c, g, or t
  misc_feature (125)..(125): n is a, c, g, or t
  misc_feature (146)..(146): n is a, c, g, or t
  misc_feature (165)..(165): n is a, c, g, or t
nantgaacatcagcaacttgntatttttaaacagnngcatggnccncnaagnnccncctgctctgnccctgcctgcctnctgcttgnngggtcctgatctcagtncatttttgcctacaatcttnagcctacatgatgcccatganacatttttgtttgcagagnacaacaatgacaaatatgattgttaaggaggtgtaacttacagtatctaggtaaaaacctttcattttccagaaggtcgacaaatgactttactgatgtaaaaacatgctttaacatacattttgcttaaaatcaaatagaatgtttttaaagaaatacttcagtccaacatacatattacatcagtaatcttactgctcacaattattttctaatgcccaacacctttagttgttttcagttatccagaatacataagaaattgttactaaaactatagatataactctgcgaaatgttaaaaaaagaacaaagataagggaaattatacaaagaatcattaatctcttagttattttaaggcaatagagccagtaaaaaaatcatttcaaaactgagtaaaataaactaaatgtagttttttagatattcattaaaacacagaaaatgcttggttgtctttgtagctacaatacatttctatgttttgtaataaattggtaatttcaaagtaacagcttttccaattctaaggaattactctgccaaaataaggtttaaaataaaatacataaaatggcttagtttatcctaatctgatataaatttgtgattgattgacagcaagaatattaatgggaacgtacataaatgaagcaaagcagtcatcacattcttatgaactagaaataacatcataaaaacatgttcattttcataaaattttacatttttgtacatacactcctcctaagtttgtacttttgatatgttcagaatgtggctatactatttacttatggggcagtaaatctttagagccagtataattacatcaattagccaaaagagggcgcagaaacaacaccagtagatatgcttagcaaactgccagttggtttttctctagtagtctaataagaattaacaaaacccacaggagagttaggtacgctaactggg

SEQ ID NO: 438837 - DNA, 1544 bp, Homo Sapiens
  misc_feature (724)..(776): n is a, c, g, or t
gggaaataattaaacagaaggttaccatgtcagccagtggctatactgtggttagtgctttcagaaatgtaaatatcttgtagcatattctgaaataatagagtaagttcttctcagagatgttaatatcatgtttttcatgttctaattagaatactttattacttacaaactcagaaatacgaacagaaatacagcagacgaacatatttattggtactgaaaagagacgtagtaaattaaatagaagaaatatatttataaagcttagtgaaacacaaaattagaatgttcatgtcaggcacaagggttggatttgtgcaagctaatttggccacatttggcctggtgacagaactgttcataaggaagtaatatatagataaggtaggtagatatcagttgaatgccttgtattgtatacattcctttcaaataaagaccttgagaaaacagcagagccaagtgaagatcacctaaagaactttgtggctaatttatacttcatgtagtagcagtgggtactgggcagggtctctttcccactctgatgatttgtgctcttatttttcctagatttacctcatctagggcatattcttttccctcttcctctttacctttcctggtcctgatccctctgtactcagttcccctaaattattggactacaaactaatatactagaaaagcatacacttattttatttgaatgcagaaatgnnnnnnnnnnnnnnnnnnnnnnnnnnnnnnnnnnnnnnnnnnnnnnnnnnnnncttaacactgtaactttcagtattccccagttagcgtacctaactctcctgtgggttatgttaattcttattagactactagagaaaaaccaactggcagtttgctaagcatatctactggtgttgtttctgcgccctcttttggctaattgatgtaattatactggctctaaagatttactgccccataagtaaatagtatagccacattctgaacatatcaaaagtacaaacttaggaggagtgtatgtacaaaaatgtaaaattttatgaaaatgaacatgtttttatgatgttatttctagttcataagaatgtgatgactgctttgcttcatttatgtacgttcccattatattcttgctgtcaatcaatcacaaatttatatcagattaggataaactaagccattttatgtattttattttagaaccttattttggcagagtaattccttagaattggaaaagctgttactttgaaattaccaatttattacaaaacatagaaatgtattgtagctacaaagacaaccaagcatcttctgtgttttaatgaatatctaaaaaactacatttcgtttattttactcagttttgaaatgatttttttagctggctctattgccttaaaatacctaagagattaatgattctttgtataattttccttttctttgttctttgttttacatttcgcagagttatatctatagttttagtaacaatttcttatgtattctggataactgaaaacaataaaaggtgc

SEQ ID NO: 438838 - DNA, 516 bp, Homo Sapiens
ttttttttcaaaatctccaagcaaatgggacttccatgacctcaccattttggttaagaacatcagaatccggcttcttcagaagcgcatctagccagcataatgatggatagcctctgccttttccttctaaaacacgacctccttaagaagtatgtctcagcttcttcataatctcaaaaagggagaaacctgactgggggaggtggttgatacatgaaaaactttattccctccgtcacagactagataaaaattaattttgtgttcactaaatttagatgtgccgacacttccctttacttttctagaatcttgcatctcttccagagagctagatttctggctctggtaaggttagtcctatgagaccctttaatggtatctattcctggcttgccatttggatgtcttaaaccattaaaaaggaaatccctgactgacttactgtagagtcgagtctttttcatttttggctcatccttttactaaggttttgtggtgggttgttgaacc

SEQ ID NO: 438839 - DNA, 912 bp, Homo Sapiens
tccacttcgctcgtccttgtgagcttgtacagatccacttgggtggccttctggctaggtcccggtcggcggccatggcgtgctttgacccaccccctcttctgccggcctgccccagggctcgtggcgcgttcttcgttaaggtccctctgggcccaggtcccagccgtgtgtggtggtccactcccaccttgggcaccaatggctcgatgttgcttccacatggccgttaagaacgtgcaccatggttagcgtgtaactccggcacgggccttcctcccaggggttgccgtacgcgaagccagtcatcggcctcgcgtccatctgccaggccctcggagatcttctggttttaaagtcccatacgtcatagctgaatcccgtagccataggcgtccaggcccagtgttgccatggagtcaagtaagcaggtctgccaggccggcccaggcccccagttgcccagccccgcatcctcctcaatttcctccagctcctccatgtccaggcccagctggtaggtggcctcgtcacaggcattctctaaggccaggttcaccatggtgttctcgtagcgtccagtcccatatagaactctaaagacaggtagtagatcctcttggggtccttctcatagtagtgctgctgcgtgcggatccagcgccccacgaggtggtcgcgcacggtatgggccagagcaaaagtagtagtctcgtggggtggccacattgcggtcctttacgagtgtgaaatgcaggtgccggttgaagttctttttcagctcagtcacgttctccacgccggccaggccacgcacactgatttgctttcttttctcttggtctgacaggggccgggacatggctgcaggagggcgggccaggactggactgatggtagaggggacggcgg

SEQ ID NO: 438840 - DNA, 931 bp, Homo Sapiens
  misc_feature (594)..(687): n is a, c, g, or t
  misc_feature (754)..(834): n is a, c, g, or t
  misc_feature (857)..(876): n is a, c, g, or t
ctcggaattgaaagtaatttctttattgatagacatttacactagaattagaaatgtcagtagaaaaataaaatttaaataattttctattgtacaaagatttgatcattttgactgtagcagttagtgaaataacataatataaaaagttaagctgatctgagtcacaaccagccttatagagtgcacaaaaaagaaatgcaagtacacgacatttctgcatatggtctgctaatggcaccgatgcttcacattccaggaaatggttacttagggaaggttgatatgtgctgcagcataataggaacttaattcaaaccagagcaaccagaaaggatactggaggccaaagccgaaataccgatttgaagtcttaaaaaaaataaggaacggtttaaaggtaattaatgaacttttcctcacctagtgtaaacatttcataagaagtaatattttgtggtcaccaaaaaagcacagatacctcttttagaatattcatgatgctcttgtgtatgaacttaagtgtttcatgaaatgctttcacctccaaaccccgtattcaagaatcaagaaggccaagcacgatggctcatnnnnnnnnnnnnnnnnnnnnnnnnnnnnnnnnnnnnnnnnnnnnnnnnnnnnnnnnnnnnnnnnnnnnnnnnnnnnnnnnnnnnnnnnnnnnnntctctactaaaaataccaaaattagctgggccttgtggcgggtgccagtaatcctagctactcagcnnnnnnnnnnnnnnnnnnnnnnnnnnnnnnnnnnnnnnnnnnnnnnnnnnnnnnnnnnnnnnnnnnnnnnnnnnnnnnnnnagacagagcaagactccatttcnnnnnnnnnnnnnnnnnnnntcaagaaatcagcttttatggtcaggaggctgcctccctccctctcttgcatttc

SEQ ID NO: 438841 - DNA, 2167 bp, Homo Sapiens
  misc_feature (1931)..(1931): n is a, c, g, or t
  misc_feature (2057)..(2057): n is a, c, g, or t
tttctgctgcttaaaacacaactttattgatgaaacacaagtcttagaataacaaatataaactaatataaaagtgtagcttatgcatgatgtataaccaattcattgtcagtttaggtagaggaaagattaaaaaatctcaatctaggtaataagatcaaatcaataaattctttctgtgtacaaatactaatatttcatttggcatccttaaaatggttcatcctaaacccaaccattacaaccaacatcagtcactgttatgatatatgatagtcattattccaaaatagcagctgaaaagatctctttaccatatacgcacaatgaaaaacaaagaatttacaaatcacatcgtaccaactgcaaatatctcaatattgtttgggacagactccaaattagagtttggttaatactttcaggacttttactttcaccaccagatcattgtgatttgctagtgctttgattttcttaacacaaactccagactctttgaataagaaaaaaagtgaacttctgctgaattctttcctggatgatgcgagcccttcattttttatgttgtcatttatattctcaaatagggtaaggatattaagaagaatctctctatcccattctttattaaagagggaaatcaattctgatggtactttacaactgaccagctctcttgtcatggctggattttcagtaaagtttataattagtttcataatctgtatcttggtgaagtgatttcccaggaataacaaagcaaaaaagtctggaaaagaataggaaagcaaatgttggtaatgattagtcacagtcatgttggttaacagtcttagcccagccatctgcacagctgagtccaagcgacagaccatggtgtcatcacacacttgactgatgtacgtcttaatcttgccctgattttctgcgttcacactcaagttattaagggcattgtaagtcttttccctaattatggggtcttttgtttttatcagttttgcaataattgggacaccacccaattcacgtatggcattctggttaaatgaatatgctgcattgttacccagagtgaccaaggctacttcttgaataaaaggatcatttgttcgctccaggatgttgaggaccttttggaggtcgggagcactcagaatatcatcaattttataaggaaagttgaacttgcctctccggacaggccatgttgtagctggagccctggtgctcttacttcgggcctttcccttggattttccacttgccctgcccccggccctagatccactcctggtggggtggcagcctccacccctgcctcctgggcagggtaaactcggtgcaagggtcctgttcccagagatggtacccaccctagcccctttgcctgcctttgcacttgcctgttccttcagcgtgttgaaaagggccttggccttggcctctaggccacctccgctgtgggatcctgaatgggccttctcttttacacccggacaatcctcgagtcccaaactcacctcaggcttgacctctgaatcaccctgaagtttggccccagaccctgccccagcgttagttttagctcctttcacagtctcaaccccaatctgtgaggtgtccgtagactcctcgtcttcgtcccagattttctcgttctcgtttcttccccaagccagtctgtatacacagtagcaggcaccagccccgataaccacaccagcggccacgcagccagcttcccgagtgcggcccatggtatagctgggacaaatctcttaacccgagcacaaaacaggctcgctctggcccagagaagcgcgcacacgtcgcgggcggagtctgcagctactgcgggccggctctgaggcagctcgacttggttcttgacaactttgcgtttcttcctgctccaagggttgganctgcctccggccccaagatctgcagggattccaggcagactattcctttgttcccaaatggcacagcgtcctactgctgggatccaggcagaacctcgtcctccttcccccagccacaggccctcntcgccctctgggctataggaagagtgcaaccggaccaaacgaagactaggattagaaggacgtctgcacgcgtcggctccagctcacgtgagggccacgtcaaccatccc

SEQ ID NO: 438842 - DNA, 1079 bp, Homo Sapiens; identical to SEQ ID NO: 151940

SEQ ID NO: 438843 - DNA, 501 bp, Homo Sapiens
  misc_feature (483)..(483): n is a, c, g, or t
ggtagcagagttcttttattccagaaatattttaatacaatcgtagtacagttatgaagtcacattcaatccactgaatatattcaaggtattaataaaaatattatacatctttattcactatcttaatataattaaagtatttggttcttataggtaagattaattaccatattcattcatatatgcactgctagtcaaacaacatggaaatgaatgtatggattatgatagtgggggttcagtcctttttgatctgaagtctaagtttcaaaagtgaatgttttcttttttaaatgtcacaatatttgaatcctagaaagaataggcaactaatttaaggcaagatattgaaacttttatacaactttaatttgaaaaaagaaatgatcaaagatcatacatgccttaacatttagatacctatagattcatataaaggcagtaataaaaatatcagtgccagttccacattgggttccncagtagagaaaataatag

SEQ ID NO: 438844 - DNA, 906 bp, Homo Sapiens
  misc_feature (254)..(277): n is a, c, g, or t
  misc_feature (867)..(867): n is a, c, g, or t
actaatggtccatatgtagttaaacccatgagtatggtatatgaatgtcttttttaaatgttaaaatgtgttgtctatttaataagttaattaaaatgcagatcaaagcaccaccatttgctttttccacagatcattaacatttccttaaagtatgtaagtacctttgcaaatgcaaatgtactagtaattttcacttaagcttttgagaccgaattccattccaccagttatcacttagccactgtaatttnnnnnnnnnnnnnnnnnnnnnnnntgtcttggtagaggtcgttaattagactcaacatgtactgcctttttgcagtctattatgacagtgtcttttaggcacaaataatagaggctaaaaaatgtcctgtccacttccattataagaaatctggattcatatctaagtgtatattataatactgtacagttaagagttcagaacaagtggtaatgttttctcttaatttaactcattttgtgccttctttactcattcaaacacacatacattttacatatagtttatttctttatgaaatgctaatcttcagcccgtaccaaaaagtagagtggagcctctttgcactactactatcaataaattttaaatcagttggatttttaagcattttttaaaagctgacattaaagtaaatctaaaaaaagtttaacaaactggccaagacactaatttttatgtataatcacaatattttatactcacctttattgactaaaaataattatgctacatgttgtccctgcatcagaagaattatttcttcttgccagtgttttgggatttgaagataatggttcactcaaagaacctattattttctctactgaggnacccaatgtaggacttgcactgatatttttattactgcc

SEQ ID NO: 438845 - DNA, 713 bp, Homo Sapiens
cctttgatcctttttaatatattcagagcacagaatttattgaacataatatggagacagctagtacaaaagtttatgccttggcagggcaggtttcatcaggctgataatggaacatgggagaacatgctgtaaatggctcttttggtctggaccctgcagaaatacatctccttctctctgggaaacatcatgtcagctgccaagccatgaatttattacatatcagaaaaccaaaatgtgcaacagtaaagagtcctttcctgcaccaactttttaaattacttccatgtcaaaacagcaaatacaatgaaaaatacataaaggacaaattatgaaaactaaagcattctaagacatctcttaagatactcagttcctaacatgttaacatacattgaagactataaacacacacatcagaaactgtgggaatcttttttcaacatagggagaaagacgtagaatagggagagaacagcatgggttactgaaaccatttattcagaaagcagaggaaaggcgaaaggaacactgaaatagatcatttttagtttcttataggaagttccaaatggcagcagttgataaatcgtctttaaaaaggaaacgacagcaacagaaatgagaaccaaatatattttgcatttttctctcggtgtatcatcttgagtcaccttacttaggctacacaggaatgaaagatatcaaaa

SEQ ID NO: 438846 - DNA, 763 bp, Homo Sapiens
  misc_feature (235)..(243): n is a, c, g, or t
  misc_feature (692)..(692): n is a, c, g, or t
  misc_feature (727)..(729): n is a, c, g, or t
  misc_feature (731)..(732): n is a, c, g, or t
agtctatttcttaaaaacaaaagaaagacgggaatgcaggcagccagttcggagaaacagccaggacttttttgtatgacatggaaaaaccggcaagtcaacgtgtgaaacgtgcacactcatttctcatcttcttaaaccctaaaaagccccgcaatcttgttagcactaagcctggatgaaattgtgttaagatatctgattagtctcccttagttggcattttccaaagggnnnnnnnnngggaacctgttttatttcagtcagacatggctttgggtatcagtgaaacgaagctctgacagcagctccacctgcagaaggccaggcgcactcctgcagctcatcagaatgcaagcaggaaagcaggccagcaagcgagcatctgtcctgcacccacatccattagccaagtgattacatctccatcagccctggggtgtaataaagcaattgtaatcgggcattgttacaggatcaatgtttcctggtttaaagataaacatcagcatttatctagcagcagaaagcgattctcccacagtactgttttattcaactgacatcttttaatcaaagcaatccatatcgtggcaacattccaaggtatcataactgcaaatatttatggcaagttagataatggctacatttttgttgctacacttttcttccttttctacggatttaangcagacattttctaataaactaattccattaagannngnnaatctcaagtaattatattcatgaagacaac

SEQ ID NO: 438847 - DNA, 930 bp, Homo Sapiens
  misc_feature (708)..(708): n is a, c, g, or t
ccatgaaatacagcttgtacttgcaatagtacttgggtgttgaacttgttaagagtgcttatcctttttttcagatccatctatcatttcctagttgtatgtggttgtgtgggttatttctcctcttttacattgattttctcacctgcaagtgaataatagtaacactttatgagcagggttattgcaagtagcaaggagaaaatatatatttaccatttgccacaatccctggggaagtgcagtcaatacattggaaagggtcctcataagagtttgatgatcattctcagaaagctagccagagaaagtctaaatggtaaaggttccagctcattatcttcttcccttttctcaagttttctctccatctgacatgtgagctcagtatttaccattgccctttctacaaatttaaccaagtttatttaaaaacataatgaccttctatcccaatttacattttctttggtgtagaggacgcctttaccttgatgtgtggagacaagccgttgatttgtaagaaacaccaattatcagcttccacttgtgcttcacaatctgctgagtcgctttaacacttttgatgaaattgagcaaggccttgtgatctctcctgtgccagccgtgaagtgtccactgcacgcagcttggcagaactattttcagggccataggatgttatggctgtgtggccagggagcattntattccgctgttcgattcctatgtatttattagtgccgcaattgcataggtaatgctatcgacactttttgagcagccttgagagaacactatgaatggctctagtaccagcacttcggtgcccctaagtctccatgctgaactgatagttactttagcagcccctgatcagcacttaatggtctactcttatcaaggcttcttttttttggacacccccct

SEQ ID NO: 438848 - DNA, 385 bp, Homo Sapiens
tttttttccatgaaatacagctggtacttgcaatagtacttgggtgttgaacttgttaagagtgcatatcctttttttcagatccatctatcatttcctagttgtatgtggttgtgtgggttatttctcctcttttacattgattttctcaccagtattaataattatcaccaaataactattacagaaaacttcctcagaaagtaaaattagagtgaaggtatcacaggttggcactattttcattcccgaccaagaaactgacacctgagaaagtatctctttgttgcaggtttttggaaatgggctatattttttgaatcataaccgatatgtactgccataaacaagaggatttcaagccagctccatactggttagtcat

SEQ ID NO: 438849 - DNA, 850 bp, Homo Sapiens
cccccaccccccttttattttcaaagtctcttcctgctcctaacaaacaggctttggtctgcagcaaggcctaggcatgactattcaaacagagggagaggagacagacagctgaatggctcagcttctctctggtggtggtttctggctggatagaataagcctgacgaaacctagctattgtaagctagtttcttcagttattcttttccctatccctgtctaagctagatatatacagagaggtccagttttatgaatgcttattagatggaattttataagtctaatgcagtatcagaatagcaaatatgtgtattgcccagtttaatttactgaggtcaaattatcatgggcacttggctatcccctcctacccatgcacttatctgtaggtgtgttatcaactgatgattttctggagtttttgacccattaccatttaagatatacagagaattttatggtagtttagcccactattctgagctaaacaggtctaactcagaacttctatatctttaaaacacaacaagattaatctgctattacaaggaacatccttaaaattattgacaggtacactcaactttgcccagtaacggtgcacgaagtaccatattattcccttatactactatacactatcacgagaacaggtatccaaactggactacacacacgtaatgaaggccttcttatgcattgccctcactcataacctatccttcagcaggttggtgaacctggcagtcactgaatggaaaggtcctcctctgccccatatgaccattctgaggtcatgtctggtatcttgatgccatatagaacttggagccgttcgcgacac

SEQ ID NO: 438850 - DNA, 462 bp, Homo Sapiens
acgcaaacgctccccaggattaccaaatttcttcgggaggaaggccaccaccacctcttgcgtccaaatcctccacggtcacgatcccggtcccggtccccaaagcctcctccgcgcatggtcccaaaaggatagagatctgggagcggggcacggatggccgggctcgggagggcctgcggctccggtctggtgacgaccgatggcggcggcgcctccgctgttggggcgccggcaggcgcagcgctctctcgctccgacgcgctgtctcccgtcgcagacgccaccgtcgccgcctctctcgtcggagacgggagcaaacacagagaatcggggctacaaagccggtgggcaggtttggctacgctcaaaccgggcagtgccgcggtttaggcgtctccctcgtgccgcattcgccacccaggcctcgctaccttagtaccgcgagattactgccacgtt

SEQ ID NO: 438851 - DNA, 1723 bp, Homo Sapiens
  misc_feature (454)..(454): n is a, c, g, or t
agttggagccgactcagcggcggccgccattttgtgcagtcgctgggaaggaaggagacgcctaaaccgcggcactgcccggtttgagcgtagccaaacctgcccaccggctttgtagccccgattctctgtgttttgctcccgtctccgacgagagaggcggcgacggtggcgtctgcgacgggagacagcgcgtcggagcgagagagcgctgcgcctgccgccgccccaacagcggaggcgccgccgccatcggtcgtcaccagaccggagccgcaggccctcccgagcccggccatccgtgccccgctcccagatctctatccttttgggaccatgcgcggaggaggctttggggaccgggaccgggatcgtgaccgtggaggatttggagcaagaggtggtggtggccttcccccgaagaaatttggtaatcctggggagcgtttgcgtnaaaaaaagtgggatttgagtgagctccccaagtttgagaaaaatttttatgtggaacatccggaagtagcaaggctgacaccatatgaggttgatgagctacgccgaaagaaggagattacagtgagggggggagatgtttgtcctaaacccgtgtttgccttccatcatgctaacttcccacaatatgtaatggatgtgttgatggatcagcactttacagaaccaactccaattcagtgccagggatttccgttggctcttagtggccgggatatggtgggcattgctcagactggctctgggaagacgttggcgtatctcctgcctgcaattgttcatattaaccaccagccatacttggaaaggggagatggcccaatctgtctagttctggctcctaccagagagcttgcccagcaagtacagcaggtggccgatgactatggcaaatgttctagattgaagagtacttgtatttatggaggtgctcctaaaggtccccagattcgagacttggaaagaggtgttgagatctgcatagccactcctggacgtctgatagatttcctggagtcaggaaagacaaatcttcgccgatgtacttaccttgtattggacgaagctgacagaatgcttgatatggggtttgaaccccagatccgtaaaattgttgaccaaatcaggcctgataggcagacactgatgtggagtgcaacctggccaaaagaagtaagacagcttgcagaggatttccttcgtgattacacccagatcaacgtaggcaatctggagttgagtgccaaccacaacatcctccagatagtggatgtctgcatggaaagtgaaaaagaccacaagttgatccaactaatggaagaaataatggctgaaaaggaaaacaaaacaataatatttgtggagacaaagagacgctgtgatgatctgactcgaaggatgcgcagagatggttggccagctatgtgtatccatggagacaagagtcaaccagaaagagattgggtacttaatgagttccgttctggaaaggcacccatccttattgctacagatgtagcctcccgtgggctaggtttgtatagataggtgtctctgtcaatggtatatgtatcttttggtttaaagattcgtcatttcaaattcagacttcaagtttagaaagttgtatatacatgtggttagataaatatttgaaagaaaaaaatacaaagcgtgattctccccattccctgcccctccccgggataca

SEQ ID NO: 438852 - DNA, 1126 bp, Homo Sapiens
cggattcttattcccggtcatttcaaggattaactaaattaacagtacgtctttcaccaaaaaatgcaggactggatttttaagggctcactgaatagatatttttatgcttttaaagaaaatacaaagttgcagtttcctgcagggtgtggcgtggaccagtgctgccgaccatagctcagagagcctgcccctgcctcactgcactgcagcctcctcggaggccgcacctccactccactccccacgcgccccctgcctcccacccaggtccacctgccacctggtgaccaccttgagtacagaagtgaaagtggggagagtattttattcaagtcacagcagaactggaaaaaaactcttctgttttaccaacttcttgtgtttcagaaacatattctgttcaaaacttttgaagccctttcggtgtctagtctgcagatgtttttgtatgtgtgcacctctgaccatgtgtgtacatatgtgtcttgctggaaaggacatattcgctgtccccgtgctgctgggagggccgcctcacagcctcacggttcccagccccagcacagtggaggcaggcgtggctgcattcccctcacgctaccctcccagcggcttgtagccgtcactggccagacctccagggtgcggaatcaaataggaagcatgcagagactcggcagcttttcctctgatgtgtaagttatttggaacgcgtgctgtgtcccgcgatgtccctgatgtactgtgcaggcgcggtgcctccgtctcgtcgcacagctgcgcgcccttgtgtgaccctccccataaaggcactttacagcttcatgtttcatccactgtcacttttttttaactgctgatgtaaatggaattttaaaagcagagttctttattgtatggatgacgtttgaataaatatcagcaactcctgccatctgcctttgtctgtcaagacacagaacgtctcagcggtcggggtttccagggccgcagtgcactgtgcttgcacatggtaagtcattgttgggacggagaagccggcagtgggcagggcccagcgtgcggctcaggcaccgagcaaccgctttgctttcttctgtcagacggcgatgatgactagcac

SEQ ID NO: 438853 - DNA, 867 bp, Homo Sapiens
  misc_feature (19)..(19): n is a, c, g, or t
  misc_feature (774)..(775): n is a, c, g, or t
  misc_feature (806)..(806): n is a, c, g, or t
gctgcagaattggcacgangccacacattccacatccgtactgtgtgtgttttccacttacaagcttccataagcaggcacaaaactgagaaggaaggggtattatccctgccctgattatctggggcagggctttgcctcacagaggcaggagagaagaattgggcagattctttactgaactcattgggactactgtgctagttttgatgttttataatgctggcatttaattactggagagattggattcttggttgatgatttagtatttgtgaattgtgaaagttcaggagctgtgtagaaaatgttagtcaatcaactttattattgtgctaaaaggggacattcttatactgtcctgtctaaactgttctccagtatagacttcctaggcactaaatatccaatatttaaaggaacacagcaggtaaggaatgaagcctctgaaatagtactcatggatttatacatggcagatcttactgtctctacacatttggaagtgttcgttggtttaaagaaatgatagaggttttgaactactgacagtcttaaaggtgaatttaaaaactgttcatactttttatggtgtaaatttcctttgctcgatgtcagtgattcagataactcttgaccttgagatgatggcttttcacaggtttcttatattttatatctcttctgaacatgaattgtcattttagatttttgacatttgtatcaaaagagaagttgaggaaatcttcagaacactggtaacttttagttttnntatagacttcagaagtgtttatttatatgtncggtaaatgctctcgcatatgcagtacctcttctgccagcaaatccaagggaccatagcct

SEQ ID NO: 438854 - DNA, 193 bp, Homo Sapiens
atactatttaatgtttaaatgttttctgtaaattaaacatcaatagacttgataatcatatttcaggaacatttttttccattgaattatttacatatactgttgtactgtaaggctttaaattaattttaatattttattattttaattagcatttgaaatgtatagtgttcaataaatggattgctaaatt

SEQ ID NO: 438855 - DNA, 730 bp, Homo Sapiens
  misc_feature (480)..(581): n is a, c, g, or t
atctgaggagaggagcaactgaccccacttgcagcagtcaaaaagaccctctaagaagacaggaatgaaaaagggcaaaagaaattcacaagaaacaagaagtagatgataattctttaacacaaaacatttacatttgagtacatcatccattttgacaattcaccagctgagacttcggaccttcattaactaaaaagtgctcagcatttccttcctgggagactcccagtgccaatctgtaaccttctgggccagcgctgatgtgtaaaggtccagtcattcaggcccctactctggggtttgaacaagctcatatgagcacatgggctcaaaaaacaaagcgttgctaaaactctctaaagtactgtcatgtcatggcctcatctctggggacagggtagggcttggtgagggaaggctctgaaagagaccagtgccgtttggttgtgtagggttttgtgtgttggttacacatgnnnnnnnnnnnnnnnnnnnnnnnnnnnnnnnnnnnnnnnnnnnnnnnnnnnnnnnnnnnnnnnnnnnnnnnnnnnnnnnnnnnnnnnnnnnnnnnnnnnnnngatgcatgttttaaatggttttacttcttcaccctcatctgcagcgtggataggtgagtgagaacgccattctaaccagggatggtagaggaaggatgtgctcacagacatctcaaagcaaactttatgccagcttttctgagagtttt

SEQ ID NO: 438856 - DNA, 2021 bp, Homo Sapiens
  misc_feature (94)..(94): n is a, c, g, or t
  misc_feature (587)..(631): n is a, c, g, or t
cctagatctcagtttttactcattcacttatgtcacttggggcagcttcacttaacaagcgagagggtgaactgtgtaagtgatgtagtgcctntaggaaaaaacataccatgtaagtcttcaatactactttattttcaaaggttaggtgaatcttgttaatttattatagaaataagaattcttgctgtctttatgtgttacaatagtcttgggttgggaaaatctgttggtctgatttctacttaagaatgaatgtctaagattttcaaacagcaaaagttcacaataattaagtttctgtgttcttgatattcttctgctattatcagtcttagaccactccagagttcttctttattttcttttccttttggtcaaatagtagaaaaatgtgacttgctgctgagccctgctcttcacacctgcttgcctttactcagctagtatttatttcaagagatgattcctgcctaggtcatcaccagtggggaaggttaatctttcatttttcccacagaaacctgaataagggaaatttcagaaaagaacagccacaaatctgtttgaaacctgatagggtgacnnnnnnnnnnnnnnnnnnnnnnnnnnnnnnnnnnnnnnnnnnnnnattgaaatgaaaatcatgcaaatgatcatcttaaactggacataagggaaagggctcattttagcatagataaaataaaaaacagaggaaacataatttttatagactattagatttagaaagaaataatagagttcatctagtccaacctcctactggtgaataaacactgattttgtgtttatagaaaaaacctatttgaagttggaaaacagggaatttgagtttgaaaatgctttgttgcctaattatccttttgctttatctactgtagatttttttccctactcactcaagttatatctaagtaaagctttatatctataaagacttaaatatatttttgtatttatgaattagagccatcatgatgttttatatgatcaaatgaatcatacataggaggggaatgtttttacttaggttgctagaagtcatttagatgaatcaccgtttgattattatggaggacagttttaaaataaaattttgcgtctccttgcaatgcaaaataccaccccacaggttccatttgggctggagcttatctgatcaccttctgccacaaataagtgaacatatatgtatgtgttcgggtgtcatgttcaaatgcttttaggtttatgtataaatctgtactttgttgtttttctcgttaatttttgttcttagttgttaaaaattaaggaggtaatacttactcaagtttcatagtataaagaaccaaatgaatgatctttgttgtcttgaaaaaaatcccagctcttaaaggatattcactaagtatagtgaagtcgtcattccacccagggagctaggtttgaaactaaactgttgcttcaatttgcagatgaaaatgagagattaatggttgattttcttagagttcagttgtgttaaacttcactgtccattttgccttcattactagtatcataccacattcttataaattcaccagcaacatttctgtataagtgtctgtcaagttgagttacattgatttcagcaggtaacaaactttgtaatgtagagtgttatgtttccagaatgtgtattgttagctcagccattcttatgtaggcataggcatgattaccgtgatgtagagagctataattagcattgaaaaaagaaaacatgagatacagtaaagaaaaagtagctgcataactggctgggtgtatttaatacattaaaaaatggataagtcttattctgtcagtcctgtttcagagatctgaaaattgtcaatgctttgtccattgatgtggatatccaggtcagtcctgtttgggcttttagaaaccagaggagttggaaattcagggacagtcttgtcaaaattctccatcttgatttgatattcacctttggaacctcgggtccc

SEQ ID NO: 438857 - DNA, 530 bp, Homo Sapiens
  misc_feature (273)..(415): n is a, c, g, or t
gtcagaaacttgcatttgagagcacgtgttaaaattctatagctgattataaaccataactagtttccaaattctgaagacgccaggcagagagagacaaacatgctccaaattttgttcataggagtataccttgctcaattattaaatgatgtaaatagctcaaaataaatttcattgacttttgcttgatatttgtgaatattttagctcttcatgagtcctgtacgtttttcctttattccaatgtcataatctccaaagctgtcagannnnnnnnnnnnnnnnnnnnnnnnnnnnnnnnnnnnnnnnnnnnnnnnnnnnnnnnnnnnnnnnnnnnnnnnnnnnnnnnnnnnnnnnnnnnnnnnnnnnnnnnnnnnnnnnnnnnnnnnnnnnnnnnnnnnnnnnnnnnnnntgtggtgggatgtgttttcctcttagagtgctcttaattgtcgcagataggatcttctgtctgttttcttgtattttcttttctcttgatccatgccagaaagaaaaggcccgct

SEQ ID NO: 438858 - DNA, 792 bp, Homo Sapiens
  misc_feature (522)..(713): n is a, c, g, or t
cattccagttcgcatactaaatgcaggcattctcatgcagtacagcacaactagttccaaattctgtagatgccaggcagacagagagagacaacatgctccaaattttgttcataggagtatacctgctcaattattaaatgctgtaaatagctcaaaataaatgttccatgacttttgcttgatattcatgaacattccagctcttcctttattccaatgtcacaatctccaaagttatcagaaacttgcatttgagagcacgtgttaaaattctatagctgattataaaccataactagtttccaaattctgaagacgccaggcagagagagacaaacatgctccaaattttgttcataggagtataccttgctcaattattaaatgatgtaaatagctcaaaataaatttcattgacttttgcttgatatttgtgaacatttcagcgcttcatgagtcctgtacgtttttcctttattccaatgtcacaatctccaaagctgtcagaagcccccgtcnnnnnnnnnnnnnnnnnnnnnnnnnnnnnnnnnnnnnnnnnnnnnnnnnnnnnnnnnnnnnnnnnnnnnnnnnnnnnnnnnnnnnnnnnnnnnnnnnnnnnnnnnnnnnnnnnnnnnnnnnnnnnnnnnnnnnnnnnnnnnnnnnnnnnnnnnnnnnnnnnnnnnnnnnnnnnnnnnnnnnnnnnnnnnnnntctgtctgttttcttgtattttcttttctcttgatccatgccagaaagaaaaggcagtattattcctgctacgtccgct

SEQ ID NO: 438859 - DNA, 416 bp, Homo Sapiens
  misc_feature (33)..(33): n is a, c, g, or t
  misc_feature (61)..(61): n is a, c, g, or t
  misc_feature (287)..(287): n is a, c, g, or t
tagtaaggtcctatagctttacgtgaagacaanttagtccccaacagaaaaacacaagaangaaggctatttgtccacagatatccacacaagagggattcggatacaatgggggaaaggtgccttgaaaatacacacccacttctgtttgcaaggcccatttacaggaatcccagatagtgcacatgttaaaaaggcgggggtggggacaatgcccaataacccttcgtgccattgggagagacactgaaacagaaaaacctagacaacttattgcattctaaatncgttctccggcatatatcaaaattttattttttgtaaaacggatacaataatagaatgttaatctacattatttgcttgccatattcaggcatttctctgtatacttcaatgcactttgtattttgaga

SEQ ID NO: 438860 - DNA, 981 bp, Homo Sapiens
  misc_feature (662)..(662): n is a, c, g, or t
  misc_feature (964)..(964): n is a, c, g, or t
ccgaagagtcctcagaacgagggtactttccacgttttgaagagccagcccctctgtcttacgacagcagaacacgttacgaacaggcacctagagcatccgccctgcggcacgaagagcagccagctcctgggtatgacacacatggtagactcagaccggaagcccagccccacccttcagcagggcccaagcctgcagagtccaagcagtattttgagcaatattcacgcagttacgagcaagtaccaccccaaggatttacctctagagcaggtcattttgagcctctccatggtgctgcagctgtccctccgctgataccttcatctcagcataagccagaagctctgccttcaaacaccaaaccactgcctccacccccaactcaaaccgaagaggaggaagatccagcaatgaagccacggtctgtactcaccagagttaagatgtttgaaaacaaaagatctgcatccttagagaccaagaaggatgtaaatgacactggcagttttaagcctccagaagtagcatctaaaccttcaggtgctcccatcattggtcccaaacccacttctcagaatcaattcagtgaacatgacaaaactctgtacaggatcccagaccctcaagaacctcaactgaagccacctgaagatatntgttcggtccaatcattatgaccctgaagaagatgaagaatgttatcgaaaacagctgtcatactttgaccgaagaagttttgagaataagcctgctgcacacattgctgccagccatctcttcgagcctgccaagccagctcattctcagaatcaatcaaatttttctagttattcttcaaagggaaagcctcctgaagctgatggtgtggatagatcatttggcgagaaacgctatgaacccatccagggcactccccctcctcctccattgccctcgcagtatgcccagccatctcagnctgtcaccagcgcgtct

SEQ ID NO: 438861 - DNA, 502 bp, Homo Sapiens
caaaaataaaaatatgtcttgaaaaatgaaatagattttaactcttcatccagtgctatggcaagtttaactgcactggaggtggtattccttttctacttttattcctatttatgtatttatttttaatcatattctcactgtgctaaatacagtcttcccactaattgttgaatgaaaattaagggtgaaagtctgtgttgggaagtgtagctccggatggtggagaaccagtgcttcttaggagcccttccctttatgggatagggccagggggtccctatcttacgtggcagtcctaagctactcttgagtgatagcagtcacaacattggggatttcccattcctctggaaagtacccacagctaaacactacttcatttccccaatttcagtattttactggaaatcacttacctacaattctgttaggatattatgttgagttcgggaggacatttctctgtttgcaaggacagtttagttgctctctgtcatag

SEQ ID NO: 438862 - DNA, 966 bp, Homo Sapiens
cacaattcaactgctcatcccaatctttaacactataattcattggtgtctctagttctccatcattatcatccctataatccgccctatctatataatgggctacctcggctgtgtattgaccataactgcaaaacttactttcatcatcttcagaataggattcaatctagggtttcatttgacctcttttaccataaccatcactactactgacactatttaaactatcatttgaagatctcttgtattctaatttggcataaggcatagaacatgtcctatttgaattttccgacttagtgaaattgtaagtgtttgaatgtgtatgggcagcagagcttcttctaagtgcatttctctcatctgtcacacaatgtaattcagtggtagacccagaacttctgtcttcctgagaggtatgaatggctgacacttcttccatgactttggcaatctgggctgcagtggtggagatctgcaaacctcgctttgaagaagttcctggattttctgttgctggatggtagttgcctagaccaattccgcgttctctctccaaacttctatctttttcagaacgagaactatctaagcttcctcttgatgaagaggagctgggtaacactgtagtattcaaatatggtgaaaggacagtcatgttgccagtattaaaattgtctgacctattatcatcatgtcgattggtgtcaaaaacataatcaccatagagactttgcttgtgtctctgcttactacgatgagatgccttgggacttaagttgtctatattgtcaaaagtttctgataagtgctgagcatctaattctgcttctagggctttttgtttcctaacatgaagagatggcaagcttgagccaggagacataatattgggatccttgtacttcgcaggcctatttgccatgagattccttaaagctgcagcacttcccatagcaatca

SEQ ID NO: 438863 - DNA, 298 bp, Homo Sapiens
  misc_feature (120)..(120): n is a, c, g, or t
  misc_feature (148)..(148): n is a, c, g, or t
  misc_feature (173)..(173): n is a, c, g, or t
ctgaacttcttctgatttttcttccctctcactaactgctgataaatacactttttccaaaagcttggaacagtcttttcctttcttatgattattccagtctttctccataatgtcttnaggtccctaaaagcgctgcgggttcctnagatctcaaagcgatccttcagccnaagtgccctttaacggggagaaaaggcagcgcctgccaggagagaaggcagcgagcggagcgtctgcaggcgcacgcggcggtggagagctgggactgcaggaggcgcaggacccgttcgcctgg

SEQ ID NO: 438864 - DNA, 1035 bp, Homo Sapiens
  misc_feature (16)..(16): n is a, c, g, or t
  misc_feature (26)..(26): n is a, c, g, or t
  misc_feature (32)..(33): n is a, c, g, or t
  misc_feature (37)..(37): n is a, c, g, or t
  misc_feature (44)..(45): n is a, c, g, or t
  misc_feature (48)..(48): n is a, c, g, or t
  misc_feature (53)..(54): n is a, c, g, or t
  misc_feature (57)..(57): n is a, c, g, or t
  misc_feature (61)..(61): n is a, c, g, or t
  misc_feature (63)..(63): n is a, c, g, or t
  misc_feature (70)..(70): n is a, c, g, or t
  misc_feature (78)..(78): n is a, c, g, or t
  misc_feature (86)..(86): n is a, c, g, or t
  misc_feature (90)..(90): n is a, c, g, or t
  misc_feature (95)..(95): n is a, c, g, or t
  misc_feature (102)..(102): n is a, c, g, or t
  misc_feature (105)..(105): n is a, c, g, or t
  misc_feature (116)..(116): n is a, c, g, or t
  misc_feature (119)..(119): n is a, c, g, or t
  misc_feature (121)..(121): n is a, c, g, or t
  misc_feature (133)..(133): n is a, c, g, or t
  misc_feature (174)..(174): n is a, c, g, or t
  misc_feature (191)..(192): n is a, c, g, or t
  misc_feature (195)..(196): n is a, c, g, or t
  misc_feature (199)..(199): n is a, c, g, or t
accttttggatttttnacgagacgtngccttnnaaancagaacnncanagatnntcntgtntnatcccanccaggtgngggtgaanatcngccanaggctcnccntggagctatgnttnanacagccccgaangtctgtcacaaatgtgctcgtttgtggtacacataacgctntctggaggcttaccttnnacnnggnatcatgaaaagatgatttgacgctgtttctcatggtctccgacctggtttttcttaggtgttcctctgaacttcttctgatttttcttcctctcactaactgctgataaatacactttttcccaagcttggaacagtcttttcctttcttatgattattccagtctttctccataatgtcttcagccctgagttcttttcctgcttggcaaaaattccagcacttcttgtctttttggctagcacattggcatctattctcacggtctgttgcctttgtgggaagtaaattctccaaggctctcttggacctagggcttccaagtccatacggaacaacgtgctcgggagtgttgacccaaatgatgtccaggtggcagaagtagacacactctttatccatcagggacgagcaggagcagcgcttggaccggcggagccgccagggtggactgggagtgggtttctccccgccgttctcacccaccgcgctgagctcagcgcctaagactgctgtttctggagctccttggcaagccacaaacagcagagagaaaatcatgagcaaataatccattctgaaaaaaagggatcaaaaacctcccgttcaaactgaacccaaaggaaaacgaagaaaaacagcttcaggtccctcaaagcgctgcgggttcctcagatctcaaagcgatccttcagcccaagtgcccttttaacggggagaaaaggcagcgcctgccaggagagaaggcagcgagcggagcgtctgcaggcgcacgcggcggtggagagctgggactgcaggaggcgcaggaccccgttcgcctggcgcagatgcag

SEQ ID NO: 438865 - DNA, 482 bp, Homo Sapiens
  misc_feature (27)..(27): n is a, c, g, or t
  misc_feature (74)..(74): n is a, c, g, or t
  misc_feature (77)..(191): n is a, c, g, or t
  misc_feature (392)..(392): n is a, c, g, or t
ggatgatgccaatgtttggtgttgtcngatttaaattatttttaaattattttttaaattcaccattctaattnttnnnnnnnnnnnnnnnnnnnnnnnnnnnnnnnnnnnnnnnnnnnnnnnnnnnnnnnnnnnnnnnnnnnnnnnnnnnnnnnnnnnnnnnnnnnnnnnnnnnnnnnnnnnnnnnnnnnattctggtatggcaatagagttgtctcattgagggtttaatttatactgctgtaatgactaatgaagttgagcaaacagagcatgtatctgaagccttgtacatttgtatattcttcatatagtgcttactcaagtgatttgttgatttgtctatttggttgtcagtcttattcttgtatttataggatttctttatattntgcttacaagccttttgacatatgtgtgtattgtgattatcttttcaactgtggccagcattttcactttccttatggtacatttgataa

SEQ ID NO: 438866 - DNA, 441 bp, Homo Sapiens
  misc_feature (392)..(392): n is a, c, g, or t
atgagccaccacacccagccaacgtatgctttttcttgaggaagggtatttcatatactgagggcgcacaaaagccaaacatcaacaaccactagtcatatataggccccacattttctcctctaagagaagaaaggaatgctcatttcagtccaacagtaggcggatgctgcttcaacactgcattgtgcttaatccagcccttccatttggataaaaccctccttctctgtgaacgttaatgcataagaaacaacacaatacctagaatatctagtttagcatcctaacataaaaagctggagttctaacctcctgggaaaactggtaacacagtttttcataacaacatttaacatatgggtcacaatggtacacaaacaatgtaaatnaagggataaagtgaatgctttacaaatgttccaagaaaccatgtttccc

SEQ ID NO: 438867 - DNA, 517 bp, Homo Sapiens
  misc_feature (119)..(119): n is a, c, g, or t
  misc_feature (128)..(186): n is a, c, g, or t
  misc_feature (361)..(361): n is a, c, g, or t
  misc_feature (438)..(438): n is a, c, g, or t
  misc_feature (466)..(466): n is a, c, g, or t
  misc_feature (472)..(472): n is a, c, g, or t
  misc_feature (481)..(481): n is a, c, g, or t
  misc_feature (492)..(492): n is a, c, g, or t
gaaacacaatcctggcacagaagtttgtttggtgatggccatcaggttatttacttcaaatggttcgggtgaaaagaaagttttgtgtatagaaagagaaaaagcaaacaggtaaaatnttaactctnnnnnnnnnnnnnnnnnnnnnnnnnnnnnnnnnnnnnnnnnnnnnnnnnnnnnnnnnnngttcttatcttaaaaataaaattttaagatctttcaatttttaaaaaagaagatagattttacttgccaacagagacatctagttctctaggactaactgccaatgatccgtgggctcagggcaggtgctggcctgggaaaggcactgcttgtgctgtccctacctaaccatggncatttatgcccaacgaaaacccagctctttccggggtaagcaggtaggaccccttattcaacggtgccagaccttgnctgtaaattctggtcagctggggatggnaatgtnctaacttcntgtaccatttnttcttaaaacctggtagtattaatt

SEQ ID NO: 438868 - DNA, 970 bp, Homo Sapiens
ttttggcggcgcaacccggatttggggccagacagaagcggcgtcccctctccgggggagtcattggaggggcggcccccccgcgggcgatgaatcgggggattaatgcggggccgggtctatgcgttattatcgctcacagtttttgcgtaatacgttgccgtttcagtcgtggtgtcgcgcatttgttttcggtttgggggttatgggatggtctgtttttgtccaaaataagcccagaccattaaacaagtgaaactccaacaaataagtcttctccaacagcgagaaaaactgtacagttactcaaagctgattctgccagtggggccggggacagaagtgggtagggagggtgaaatcatggaggagggcctggggagggggctggagcgggagagggtcagggtcctgcccatcagagtggggccgcctgcgtcctgcacactctgctgtcaggtggggtggggggcagctcttgcctccctgtgtgtgtgagacggtgtccctcaccacctcccagtgccaggcacagtcagctcaccctgatggagagtgaacaagacaggacaggctggggagaggggagggtcccatgagagggacaccctgctgattccaaacgaggtggcccatccatcccacttcctgcagctagtgggagggggactggagaagccctgggagattgaggggatgagcaaaggcacagaaacatggagggccggggtgggggacttgcataggttgatgagtgtgcaagaggtacataaataaacctgacaccccacccagcccggcactgggagaggaagtggggacccagagccaggttcccagggccaccctaccccctggcttcttccccctccctgggctcagagcagagggaagtccacagaccaggagggcgggggcaagaaggtctggggaatggggtgatagtgcagggagggtggtggttttaaaa

SEQ ID NO: 438869 - DNA, 924 bp, Homo Sapiens
tcagttgtctctttatttcttagccaggatctaaccagtttttctgctcagggctttcctgaaacaaaagtccaaagtagtctttctccaagagattgaggtgttcacacactttgtcaaataacacttgtcccttggcatgtttctccaggtcacagctgtattcggtgccatctaagagggtcactttacactggacagttttggtcttcttggtgactttttgagatgccttctctgctttcagctcattggtctgcacttccttggtctccctttttgctgctcctccttctaatttgtcttcctgtgtttcttttaccttctcttctctctccttacttactaattcagtaggctgcatctccactttgctcactgagggtttttcttccttgctcactgagggtttttcttccttgacttcaactttaatctcttgtttcttctgagccatttcttcagcatcacccttagcctgtctctgttcttctggaaggggttcctctttatctaagacctgttcttcaacaacagcttgggtaggctcttttatatctcctccatctttggccactactaagtatatgacttttgcttcttaagccatggcggtatgaaccgagaaatacccctgctctccgatgtttccttctctctcttctggcggcgtagactactttggctttcagctgcaggaggtggctgggaacctttttcctcctctggatcggaagactgattctgctgattttctgctacttctttaggtttttccttggttgcatctgttcctaactggctagagtccttcttcacttcagacacagagcctacttcagtagtcatggccacagcttatgtttctgctcagggctttcctgaaacaaaagctgtggcatcgataaacaccgggtaccgagc

SEQ ID NO: 438870 - DNA, 1742 bp, Homo Sapiens
caatttcgataaaatgtttttcgcctcgcattatagtacgcccagttttcatttttttcacaggtgttttgttttgtatgtttaatttatagaaacggctccctctcttatcttttgttactggggaatacagtttgagcgcagaacgtatacttgcgggataaattaatatgtttttgtatgttctagagttgtgagtgttcccccgtcttattatcacagcaacgcaaaactagtccgggtgcattttatgtctgatactatagtaataacagatacttgtttgtatttattatgataagtattgagttcactactgacatgtgaccaaacggtgttcgttagatttgttctaagttttattatttatttgtttgcttatgggttcacttaatgaatcataggcatgcaactgtttaacactagcatattcgtcttcgtaaatagtttattgtacatggtcataggccctgtcaatgccaagaagggggcatgaaagtcagctctgaccgtaatctcatttccagcagccctccccaagttggaagaaatcacaagctgcaaaagagccagcccgcccaaatagtcattcttaaattttgttgtgtccctccgcccacccatccccgtaaaattgcacaatggaatgatcgtgttccctactgaagacttcccctcctaatagtaagcaagcaaaggtttccctagtctgccccatattgaactgtagaagaaggcagcccagcccaggatggggggaagcgagaagggaaagcaggacgagtgagtctggatgtccgggcaaacatgcttagaaaaggatgtggtagtgtgtaggcctctgaaggcagaaacagcaggggaagggtgaaacagtggtgggtgctcttcccagagacacttccaggtggcacttccaggtggcacttccagagacattgggtggttgcacttccagagacatcaacccatggatgcaatgttcccagttctctttcttaggttttcttgaggtagttctgacaggctcttgccatgtctttcaagaagttaggaactccattcttggcggcccagttaatgagccaggacggaatttggccacccgggttatcgaagtaatacatgaaaactttgctccccttcttgccgtcactctcaatcgccaggctctgcttgtattgcttcacccggatcaccccagacctctcgccaagctgaggcatggaggtgctccgggccaggatcacatggatcttcctcccttccatgtccaggtctcgccgctgccgaaggtagacatagtctctgttggacatgggaaaagggtacttcacttcccagtagaccacagtctctccgttgcattcttgttcatagagttctttaacatactggtcccattgttttctgtaatctgagtccatatagatgtctgccagtagagttggtgagcagtcctccagaacaccaaagactttatactcataaagtccagtcttcttgtccagcagccggtagatgctgatgcccgaggtctccactaggagctgccagtcggccccggccagagcgggctgctggagctcggcgcaggcctcccagaactgctcctccgagaagcttccggcggccagctccatccttccgcagtccgggctcctccgcctggagggcaggccgcggacacccttagtgtgggcctgggggcggggtgaccgggctgccccggctgccccggc

SEQ ID NO: 438871 - DNA, 631 bp, Homo Sapiens
  misc_feature (359)..(359): n is a, c, g, or t
  misc_feature (523)..(523): n is a, c, g, or t
  misc_feature (525)..(525): n is a, c, g, or t
  misc_feature (538)..(538): n is a, c, g, or t
tgattggttcagcatatcctgggacataaaagtactcactactgggaaaaactttttcaaatttctaggttgaggagaagagttttcattgtccaaacactggcagggcactgacatcaaggcagaaaacctacttgggaatgcagatatctgtttttgtgatcattggcacttaagacatagaaaagatttccatgaaaaacttttttcttttcccttgggaagtcctcatggtatatatattttaagtgcaatggaatttttaaatttaaagatataactttatgtaattgaggaaattaggcctagctctaggctatgttacagaaaatatagtcattgaatgatacagacatatnaaaggtagtagttgtctcattattaattccctgctgggagagcagatgagtcataccctataagaagtatgcatgccttctaacctatgtccccaaagctgtcatttgcataagctgcaggccatagattcctgattccctcagtaactgaccctacgacaatngnactgatccacggnactctagattttcaggctaacccaccaacaacccctggtttccttgggattttctgaaaaaggatggttgaaaaattgagttttcacttcccc

SEQ ID NO: 438872 - DNA, 544 bp, Homo Sapiens
  misc_feature (530)..(530): n is a, c, g, or t
ttttttttccataaaggatcttccttcttccccaagttagagtgaagaaaacaggaaaaaaataccttcagcttagggtggaaaaggaaggaaaacccaagatgagtgcaggtgacgaccgggcggcccccacagggtctctgcaggaccacaggagccaagactcaggcataagagcatcaccctttcagcagccaaggcgggtggcaccttcccctccatggtcactggaggctgtggggccatagctgcagagaacgcaggcggcgggagaccctctcagcctctcttcttccaagctcagtttcttgagatcttccagaatacccacaaaaaagagggtgaacctttaacaatgccccagaggagcttcgtggctacagggggcctcctgacccccaacccagccctctcagccaggcctcaggaggctagtgtgacctcaaaactcagagcccccgtgagacacagggccagccagtcccatgccttgcaaaggggaacgttcctcccaggtgtggatttggggntcacgctttgcttt

SEQ ID NO: 438873 - DNA, 307 bp, Homo Sapiens
  misc_feature (205)..(218): n is a, c, g, or t
cacagccgggcagtcttgccaagtgcctgctggaggctgtgccggcaagaggcctgcagcaaggagattcccttccctcgggccattatcaatactgtctttatctggaggtggggaagcgcagccctctgagacagcaggacaatggtcagttcagagagggtgagggcagcaaacgcttcagaggacacagaagccagaggannnnnnnnnnnnnnacagctgggtcagcctggaaaatccatctattagggactttttggcagccaagacttggaactcgggatgagacctaatgggctattgc

SEQ ID NO: 438874 - DNA, 640 bp, Homo Sapiens
  misc_feature (13)..(13): n is a, c, g, or t
aggttgggaagcncagcccctctgagacagcaggacaatggtcagttcagagagggttagggcagcaaacgcttcagaggacacagaagccagaggaccccccccggccccacagctgggtcagcctggaaattccatctattagggactttttggcagccagatggcagcaatagcccattaggtctcatcccgagttccaagtcttggctgcaaatgagcctcagttcgccttactggagagcacccccagattcctgggcacagttcatttccagccctttctagatctgatcttttagggggaaagacagcttaaaatgttcttttcattttaaagaaaattattctgtctgcttaagttggaggctacttactctttcacctgacattttctttccttttattcttccagatcaggaatgaaatttccatgctgctcataaagataatattattgtactaattatttttattaccattgtaattatgatcattatgttgatattttagtcagggttttaaatgcacatttattccaagtatctttgtgttttctctttaatatttaaacttattctctctgtgagtatataagtagactggagggacatccagatgtccagttttgtcaggcaaa

SEQ ID NO: 438875 - DNA, 435 bp, Homo Sapiens
  misc_feature (45)..(45): n is a, c, g, or t
  misc_feature (70)..(70): n is a, c, g, or t
  misc_feature (281)..(348): n is a, c, g, or t
cccgggcagaagacacaaccaaaaaagagaattttagaccaatanccttgaggaacattggatacaaaantcctcaataaaatagtggcaaactgaatctatatgactttagtgtaatatcattgaagacttagagagggttagtgtgagttagaaaaactctctatttttaatattctgcccagtctaaaatttttacctgtcataaactaaatctgtatatctctcacctgtcttatatttatttcagtacatggtattaaggggtggactctattttnnnnnnnnnnnnnnnnnnnnnnnnnnnnnnnnnnnnnnnnnnnnnnnnnnnnnnnnnnnnnnnnnnnnggataacacatatacatatttgcgcttttaggatttagtctttttttcccctttgacctttctgtactctagcattaacaccacatg

SEQ ID NO: 438876 - DNA, 945 bp, Homo Sapiens
cctatatgtaattttataggaattcttaactgaaagtagttatcaactgctacttatcaggagcagtgttattagggattttaagttaggcatgtagaaaactttctgacaaaagggctattgaactccagccagttcccagtgaatctccaggaggcaccttagaagtcttcacaagctgaataccatgtctttagggtgtccaaatgcttctgtcttgggggagagatgagagatgactgggtgcctttccactcagaacacagtagaccactcacttatttatgaccaagcctcacttcttttctattacagttccagattcttttttagtcttggaagttagggtaaataaaatttggtatggtttgatttttctcttagggatgttttctcatcttaactcttatgttatctttatggccaacagatttgctcagaatatatcatcaaaatatatgtattgtattttgtaaaggtgaaaggatcgaaataccactttgacagttataaaccagagtagatttgagaactgattgctcacatcacacttacgaatagtctcagaagcctttaagagaaacttacttctcaatggacacttagaagaatttgatgatcttactgtcataaaatcagtaatgaaattctcagcaaaactatttggtaaacattgcaccctgtatttttacccaacatcttgttatgaaaattatcaaatacattaaaaagttaaaataattttatagtgtactcactacctagatgctaattagcattacctatgcttgctttgtcacatatccattcatcatttcatattattatttgatgcattttaaattgcatatcattaactagagttcattgttggcttttttacataaaattagcatgcaatgaagtgcatagaaatatgtggttcactggaggtttggcaaatgc

SEQ ID NO: 438877 - DNA, 886 bp, Homo Sapiens
  misc_feature (837)..(837): n is a, c, g, or t
  misc_feature (854)..(854): n is a, c, g, or t
tggaaacgcgcagtatttgtccttctgtgactggcttatttcattgagcataacgacccccaagtttagccatgttgttgcttatggcaggatttccttcttttttcaggctgaataatatttccttatatgtatatgctgcatttttaaaaaccctttcatctactgacagacgtttagattatttccacatcttggctattatgagtaatgctacaacgaacgagggagtgaaaatatctctttaagatcctgatttcagtttttttgaataaatacccagaagtgggaatgactgggtcattcatatggtaattctaattaaacatagaattatttttaattttttgagaaacttctgtgctgctttccacagtggttgcatctgtttacatacttaccaatggtgcacaagggttccaatttctccacatctttgccaacttgttatctgtgtttgtttaaatgacagctgtatgagttgtcccttgcctccatgcaattctgaacttcagaaataagcacttggctcctttaatagctgtccgtcctatgttgtgtctacagccactgaatcctgtcctacattttctgattcattaactcattcaactaatagctattgaacaccatcaataagtcagccaccatgaagatgagtattttatattgaattctactaacatatcctgtatgtttactatgttgccagagaggatgctgtgtgctttgttttacattgttatctttactcttcacaagaaccatgtaaggtaggtattggtaaaatggggtaattttgggaaatgctttcaataatcgagtaggaataacttnttgctctatgtgtgganggatacgttttaaatcaagatatgggcttagg

SEQ ID NO: 438878 - DNA, 1890 bp, Homo Sapiens
  misc_feature (443)..(493): n is a, c, g, or t
tcaaaactatatatatgagatttatttcacattttctacctactcagtcatgtgagctgttgctacatttgtgaactttctgaaaccaagtgacaaatatccacaaaagatcatttacaatgtagacatcactaaagtctagatttaaaagtccagtgaaaatggcacacagttggcttacagaaataaaaaagtacaatatatttgaaatagtagggtttttgttttccatttatgcctacatcatggtgttacctgtggatatgttatcaacgatattgatatcagatactatgacccatgacatttagtatttttagcaataagaagcacacttaaatctatttcaaaaatatgacatgttaaattcttaggaaagtatcaactttacaaagtatcatacacctagaaaagtaaacatgaatttctcagtctaggttagnnnnnnnnnnnnnnnnnnnnnnnnnnnnnnnnnnnnnnnnnnnnnnnnnnnatcttatctagaaacttatacgatcatgtaaaagtaaatttatttattcagtattatacagaacaatggaaccagtatggcctgcagagatacagaggctgtgagaggaggttggcttagtcaaatgcctctgtccacactgacatggcacttacccagcacccgaacctcctcctcccaccacacggagaaccatttctgtacttataatatagtttctaaaaatagaacattgctgctataaaaataaatgtatttaaaaaaaaccacgggtttaaacaggaacacagaatttggggttttaaggctcttcctgggggaggagcttccacttcactgagggatcaaaatcctcctcaaaatcacccagctcctgctccttggagagctccaggaaaacctgctccagggtagactgtgagaggctgtactcctctaggtcaaagctctgtttaaccttctctaatttgaagaaagcttgggctaaaggttgcacatcttccactggcaacttataaaccatcagagaggagtacctttcctgccgagcagcctgggggaaaagcctcaggatctctgcatggaggggctccacttgtgccaggttcttcaccttcatctccagcaggtaatctttgccaaatttgcttttcaggtgttggatggaaccgatacatctcaacctcccagataccatgatggccactcggtcacacacggcctcagcctctgccatgtagtgggtggttaggagggcacccctttccgtgtttctaaaggtggcccggatggcctgccacatttgctgctgcccctcggggtccatcccggtcgacggctcatccagaagcaccactgacgggttccccagtatgctcaggacaaagcacagctttctctttattccctctgacaaggtcttcaccggagacttcagctggtcctgcagcttgagcgcatccactaaccgtgtgatggcaacctcagcatcccctttcctcagccctttcacggcggcgtacacctccaggtgctgcctcactgtcaggttgggccacagcgcgttctcctgagggcagtaccccaggaactccagggcatcccctccaccgctaccctttcagtagcacctacttgtccagcagttggttttgtgtctccagttatcaccttaatggatgtgcttttaccagctccattgtgtcctaataatcctaaaacttcaccttttctaacacagaaggagacatttctcgtggctatcttattcttcctcttggaaaaacagcctttcctcttccctgcatactccttgcgtagacagctggcaatgatgactggcttctcatcaaaattagtagaattcaaggcatttgctatcccgagaattccggacc

SEQ ID NO: 438879 - DNA, 1043 bp, Homo Sapiens
  misc_feature (12)..(12): n is a, c, g, or t
  misc_feature (14)..(14): n is a, c, g, or t
  misc_feature (18)..(18): n is a, c, g, or t
  misc_feature (21)..(21): n is a, c, g, or t
  misc_feature (23)..(23): n is a, c, g, or t
  misc_feature (25)..(26): n is a, c, g, or t
  misc_feature (29)..(29): n is a, c, g, or t
  misc_feature (32)..(32): n is a, c, g, or t
  misc_feature (38)..(38): n is a, c, g, or t
  misc_feature (40)..(40): n is a, c, g, or t
  misc_feature (42)..(42): n is a, c, g, or t
  misc_feature (49)..(49): n is a, c, g, or t
  misc_feature (51)..(52): n is a, c, g, or t
  misc_feature (67)..(67): n is a, c, g, or t
  misc_feature (70)..(70): n is a, c, g, or t
  misc_feature (77)..(77): n is a, c, g, or t
  misc_feature (81)..(81): n is a, c, g, or t
  misc_feature (100)..(101): n is a, c, g, or t
  misc_feature (147)..(148): n is a, c, g, or t
  misc_feature (170)..(170): n is a, c, g, or t
  misc_feature (519)..(520): n is a, c, g, or t
  misc_feature (522)..(522): n is a, c, g, or t
  misc_feature (527)..(527): n is a, c, g, or t
  misc_feature (530)..(531): n is a, c, g, or t
  misc_feature (533)..(533): n is a, c, g, or t
  misc_feature (536)..(538): n is a, c, g, or t
actttttgcttntncccnctntntnnacnctnttttgncnanatctgantnncggggaactctttcncanagaagcnacanacgtggggctggctgggtnnagaaggctgggcccgaactcggggtcgaggggccatgggtactggnnaaggtgggttatgtgcccgcancagagtggatggtggtggtggccgggcccgttcaccacggtgggtgcggaggtgcttgactcgggctgagctgtcagcaaaacccttgccgcattcaggacagaggtagggtttctccccctgtgtgcacacgatggtgtttcaccaggtcagagcttcggcggaagcccttgccacactcagggcacttgtggggcttgtcgcccgccagtggtgggggtggctccccagcctgtgggcccccaggctctggctccaagccaggcaggccaaaaggctcacccgagtgtgagggacttcgaggtgtcagcggggggctggtgcccagaggaggtgggggtgggctggnncncagancgnncnggnnntagcctgggaagctgaagtcctggggctccatgtgagtgaggcggtggcgaagaagggtggagctgaggctgaaggtacggtcgcattccgggcaggcatggggcctctcgccactgtgggtgcggaggtgtttgactcgggcggagctgtccgcgaaacctttgccgcactctgggcagaggtagggcttctcacccgtgtgtacccgcaggtgcttcaccaggtcggatccccgggcaaactcctttccacacacatcacagccaaagggcttgggccccaagtgactacgctggtgactcaggaggctgcagctgagcacaaacctcttgccgcaatcagtgcagatatatggcttgtcctgggcttcggtccctgggtcgctgccgtggctgcccgagatggctgccgtcggggcaccactggtcgggggggctgctccccccggtgtgtccgctggtgcttgatgcgggcggaactgtcgccaaagccgttgccacatat

SEQ ID NO: 438880 - DNA, 546 bp, Homo Sapiens
ggtaatgtaaggaatgtgggaaagcttttgctaactcttcacatcttactgtacatatgagaactcacactggtgagaagccttatcaatgtaaggaatgtggaaaagcctttattaattcctcttcctttaaaagtcacatgcagactcatcctggtgtaaaaccctatgactgtcaacagtgtgggaaagccttcattcgatcctcatttcttattcgacatttgagaagtcacagtgcagaaaggccttttgaatgtgaggaatgtgggaaagcctttagatactcctcgcaccttagtcaacataaaagaatacatacaggggagaggccatataaatgtcaaaagtgtgggcagccttcagtatctcatcaggccttacagtacacatgagtactcacactggtgaacggccctttgaatgtcaggaatgtgggaaagcctttactcggtccacatatcttattcgacatctaagaagtcatagtgtggagaaaccatataaggaatgtgggcaacctcttagtaatatcctcatgcctta

SEQ ID NO: 438881 - DNA, 409 bp, Homo Sapiens
atgtaacagcctattttttggacgatataggaaccacgacctcttaagtctcttagttctcctactttatacccatgaggtagaggcaggtgcactccagtgaaggagaagcctcaattcaggttgtactttggatgaaacatcccctcaaggcgtagaggaaggctgagaggttctgcccagtctcgtgtttagttgcaggaagaggtaatgtcagatctgagcaggtcagggagactccctcgaaaaggtcttcccaggctgacaagagggcttttcctcttcctcacctcccttaggtgagggctgaaagcagatctcctcacatggggacctcgctaggaggtcttttctgagtgggtcctctgatgcctaattaagtgatatcctctgctgaagctttttcgac

SEQ ID NO: 438882 - DNA, 1553 bp, Homo Sapiens
  misc_feature (804)..(837): n is a, c, g, or t
  misc_feature (864)..(914): n is a, c, g, or t
  misc_feature (1065)..(1100): n is a, c, g, or t
  misc_feature (1122)..(1204): n is a, c, g, or t
  misc_feature (1333)..(1343): n is a, c, g, or t
  misc_feature (1501)..(1511): n is a, c, g, or t
ttccctcctctgccccttgttttatccaacgttcccgaacaccccctaagtagcgaggcctgggtggcgaattccgcacgaggcagcgtcccaggaaagatttctgctgcggcatctgcgggcgcggcttcgggcgccgcgagaccctgatgcgccatggtcgcatccacacgggcgagaagccccaccagtgccccgtgtgtgggaagcgcttccgcgaatccttccacttgagcaagcatcacgtggtgcacacgcgcgagcggccctacaagtgcgagctctgcggcaaggtcttcggctacccgcagagcctcacccgccaccgccaggtgcaccggctccagttgccctgcgccctggccggggcagccggcctcccctccacccaaggcacaccgggggcctgtgggcccggggcctcgggcacgcctgcagggcccaccgatgggctgagctacgcctgctcggactgcggcgagcacttcccggatctctttcacgtcatgagtcacaaggaggtccacatggcagagaagccatacggctgcgacgcctgcggcaagaccttcggcttcatcgagaatctcatgtggcacaagctggtcccacacgcccgcccccgaagcgtctgctcccgcccgcacccggcgggcctggtaccccccgggaccgcctccagcgggcaccggatgccggcccaggcgtggctgggaccacctggcctggcagcgggactgttgggtgggcctccccctttgccccgcactccgccaatgcgctggtctcgcgatgtttgtattnnnnnnnnnnnnnnnnnnnnnnnnnnnnnnnnnnttcgtcccgcttttatttggttacatnnnnnnnnnnnnnnnnnnnnnnnnnnnnnnnnnnnnnnnnnnnnnnnnnnngtgcctctatctcgccaccattatgtactcccctcttattatatttttagctccccgcgtgtttcggcgcgcgcggacgcccacacgcgccactgtcacgctctcctcaatcaccaaaatttttacacacccccgcctctatgtcttattnnnnnnnnnnnnnnnnnnnnnnnnnnnnnnnnnnnntatccacacccggtgtttatannnnnnnnnnnnnnnnnnnnnnnnnnnnnnnnnnnnnnnnnnnnnnnnnnnnnnnnnnnnnnnnnnnnnnnnnnnnnnnnnnnaatatttcctgtcagacattatgcccggtccccgctgcgtcgcatcatctataattttgtggtttggatcacgcgcgcccccgcctgcttctgattttttcgcccattcccccctcacgattatatttnnnnnnnnnnnattcactctctctatttgttgccgaccacgccagcgtatcacgccccccgccctcataagaatggttatttatccctttgtgcccccccttgttcgtttctgtcgcgcgcccctatcacccgccccgcccccccttaagtctccaccgacctttattnnnnnnnnnnnggattttttcgcccgcccctcaccccatccgtctgacctcta

SEQ ID NO: 438883 - DNA, 560 bp, Homo Sapiens
  misc_feature (56)..(56): n is a, c, g, or t
aaacttttcaccacatggcacaaattggtcaccccggtctcggtggagcaggtcgncggcccggagcagaacacccacgtcttgctctgggaggagtgtccgcgcgagggcaagcccttcaaggccaaatacaaactggtcaaccacatccgcgtgcacacaggcgagaaccctttcccctgccccttcccgggctgtggcaaagtcttcgcgcgctccgagaacctcaagatccacaaaaggacccacacaggggagaagccgttccagtgtgagtttgagggctgcgaccggcgcttcgccaacagcagcgacaggaagaagcacatgcacgtccacacctccgataagccctatctctgcaagatgtgcgacaagtcctacacgcaccccagctcgctgcggaagcacatgaaggtccatgagtcctccccgcagggctctgaatcctccccggccgccagctccggctatgagtcgtccacgcccccggggctggtgtcccccagcgccgagccccagagcagctccaacctgtccccagcggcggcggcagcggc

SEQ ID NO: 438884 - DNA, 1366 bp, Homo Sapiens
actctagagtatccccgtcgcgtgtgctcagtctcttaaatagggttttgttcgatgttttgtttctgattttaaacgtaccattcgttaaaattggaagagagcgcactgtggccggctgtgtggtggactgcggaggaggagggcgataaggagcttgtggtcgggttgtctgtggagggagacacgatggtgggaggcgtggaggattcgtagccagagctggcggccggcgaaggctgcgagccctgcgaggaggattcgtggaccttcatgtgtttgcgcagcgaactgggatgcgtgtaggacttgtcgcacatcttgcaaagatagggcttgtcgctcgtgtgcacgtgcatgtgcttcttgcggtcgctgctgttagcgaagcgccggtcacagccctcgaactcgcatttgaagggcttctcccctgtgtgagttcttttgtgtatttttaaattctcggagcgcgcgaagaccttgccacagccagggaaggggcagggaaagggcttctcgcccgtgtgcacgcggatgtggtttaccagtttgtatttggctttgaagggctttccctggcgcggacactcctcccagaagcagatgtggttggtctgttccgggccgccgacgtgctccacggtgacgtgcgtgaccagctcgtgcatggtgctgaaagttttggagcagaggctcggggtcgcggtgccgtcggccgccagccacttgcagatgagctcctgtttgatgggctggcgcatgtagcggaagaaagcgccaggaccgtggggcgcagcgaggttcaccgtcaggttcatgcccccgtagccatgcagggctgcggcagctgccagggcgtcgctgcgggccgcaggcctggcgggaagggctccggccgcgcgtacatgtctccagggagccccagacgcaggagtccattcaaaggacggctgggggaggcctggggaggctcctcgtggaggcccgggaacaccgaggggctggaggcggcggtgagctgggggccatggtgtccagagctgctacttgactctttaagagtgtttcggtaaagccgtaatcgtttcctcatcaccaaggatgtcttgtatctcattttctgactttgagcctcctgtaaaggccccctcccggcacccgccttgctcatttttcgcgagggaagctctgggccacgacttccattcttgtgcccacggtggggcacccaggcaattcacaaggagagaagggaaggcaggcaggcaacaaactgctcctggttcctgtgccagtgggagccccatttgtaccccttttccctcctcctgggaagaagggatggactcatcctcagcccgct

SEQ ID NO: 438885 - DNA, 1166 bp, Homo Sapiens
  misc_feature (38)..(38): n is a, c, g, or t
  misc_feature (74)..(108): n is a, c, g, or t
catgagacaaatgaacgaacaaaccaaccaggaagtanattgaaccaagcatttcctaattctagtccatagcnnnnnnnnnnnnnnnnnnnnnnnnnnnnnnnnnnntgttcataagaaggagagaaagatactacttatccgtcagacacatgcatcctcatgtggtcgttgaactgctcgatttggtcaacgtttgctgggcagacggacgcagacggtaacgtggtcccctccgtgcaggccaccacgcctggggggccagcgcgggcacctgggggtgtgcctgcagggggggtcccattgctggcactgtgcagggccacgtgtcgctccaggagggtcttgtgagagaacttctttttgcagatgtagcactcgtaggacttctctccccggtggaggcgcatgtgcacgttgagggagctcttctgggtgaagcgcttgttgcagatactacactggtatgccctcactcctgtgtgtgtcaccatgtgcttgataaggtaatcctttaaggagaaggagcgccaacagatgctgcattggtggggcttctcacctgtgtgtacgaacatgtgcttgacgtagttctgtttggcggtgaaagtcttgttgcagagagtgcactcataaggctttttttcgccttgcccactggctgtgctgtggcctgcggatgaggccaggggctgtggcgctggcagctgtgcagtaaaggtcgacagaccgggctgggactactgtcacaaactgggtctgctggcctgccaaggggcatgtggcaggctgaagaggaacaggcttgagagccactgtcccgcgtggcctgggtaagtgcacgacaggcatagaaagtaaggtgtagccaagctgattcccaatagacctgcggtgttgcatgggtcacaggctacagaggacaatccactccacgagtatgaatcggatgaagggggtttctctagatctatgggcgctaaagagtatatgatgcctgcgggttaccatatagcaatattatggtagttgaccccgatttggaaacgtgtgtagtgaaccgcagaaaggggcaggtatgagtattgaacgaccattattgtaatcggaaaacgatatatcagctgttaacaagattactataaccagcgcacaggacacactac

SEQ ID NO: 438886 - DNA, 1631 bp, Homo Sapiens
cgcgggcgagagggacaggagcgtgacctccccatcccgaggggccggacgctcgggcgcctccccgctccccccactcggaggccgcgcgcgccgttagccccttcctcgctcccccgccccagtcccgcagtccgggaggcgggggtcggcagccggctgagtgggaaccgcgcggtgtctgaggaggcagtcggcgaccggtttccacttcaagcgtgacccttttgcctgtgggatgagctccagcatggggtgaggtacagaagagagacttgaagagcgtgccttgggactcaagcgccaaacctgtaccctagcgagtgtcctactccgcatccgtaatggaaggaaatgcacatcttactccagaggcacaagaggaggacatcccatgcggctactcctgcccagcgtggtggggcagcagaagctccagagcccagacttgcaggctcacggtgcagggtgaacctggccacagctcaccctggaacagccacaatgtctgccccttagagaagaaccctgaaatcagaccagtttttgcggcctccccctttcctctctgttacagtgccctttccaggccttaagagaagtaaaacttagctgcagcgtcaggaggtggaccccagagtgtgagtggcacgcttccctgtgaacccgtcctcaccatgtttgccacatctggggcagtggcagcggggaagccttactcgtgcagcgaatgtggcaagagcttctgctacagctcagtgctgctgcgacatgaacgagctcacggcggtgacggccgcttccgttgcctagaatgcggtgagcgctgtgcacgggctgctgacctccgagcgcacaggcgcacgcatgctggccagaccctctacatctgcagtgagtgcggacaaagcttccgccacagcggccgtcttgacctacacttgggcgcacaccggcagcgatgccgcacttgcccctgccgcacttgcggccggcgcttcccgcacctcccggcgctgctgctacaccggcgccgccagcatctgccagagcggccccgccgctgcccgctgtgcgcccgcaccttccggcagagcgcgctgctcttccaccaggcgcgggcgcaccccttggggacaacctctgaccctgctgccccaccccaccgctgcgcgcagtgcccgcgagccttccgaagcggcgccgggctgcggagtcacgcgcgcatccacgtgtcccggagccccacgcgaccccgtgtctcagacgcccaccagtgtggcgtgtgcggcaagtgctttggcaagagctctacgctgacgcgacacctgcagacgcactcgggggagaaacccttcaagtgcccggagtgcggcaagggcttcctggagagcgccacgctggtgcgccaccagcgcacacacacgggcgagaagccgtacgcatgtggcgactgtggacgctgcttcagcgagagttccacgctgctgcgccatcggcgcagccatcagggcgagcggccacatgcgtgcgccacttgcggcaagggtttcgggcagcgctccgacctggtggtgcaccagcgcatccacacgggcgagaagcccttcgcgtgccccgagtgcggccgc

SEQ ID NO: 438887 - DNA, 447 bp, Homo Sapiens
ccggtgacactgcccgcgccagactgaccactagccgacgcgggcgagagggacaggagcgtgacctccccatcccgaggggccggacgctcgggcgcctccccgctccccccactcggaggccgcgcgcgccgttagccccttcctcgctcccccgccccagtcccgcagtccgggaggcgggggtcggcagccggctgagtgggaaccgcgcggtgtctgaggaggcagtcggcgaccggtgaggggactgaagggcaggggagggcaagggtggctcggggcagcagtcctcagctgtggctagtcttctcccatctgcctcgggcgactggtgtctgcggcggtcgggagcgccgcccgggctgcgagtgacgcggggatactgcggggcgagcgattggccggacacgtccgcgcggcctgctcctcccaggccttcccctc

SEQ ID NO: 438888 - DNA, 1233 bp, Homo Sapiens
gggcggccgtttggcaaaattttggccggcccccggtgtagcagcaagccccgggaggttccggaaaaccccccgccggcatgtgccggcaggggccaagtgcgggcatcgcttccgggtgtgcggcccaaagtgtaggttcaagacggcccgctgtggcggaagctttgtcccgcactccactgcagatgtagagggtctggcccagcatgcgtgcgcttgtgcgctcggaggtcagcagcccgtgcacagcgctcaccgcattctaggcaacggaagcggccgtcacccccgtgagctcgttcatgtcgcagcagcactgagctgtagcagaagctcttgccacattcgctgcacgagtaaggcttccccgctgccactgccccagatgtggcaaacatggtgaggacgggttcacagggaagcgtgccactcacactctggggtccacctcctgacgctgcagctaagttttacttctcttaaggcctggaaagggcactgtaacagagaggaaagggggaggccgcaaaaactggtctgatttcagggttcttctctaaggggcagacattgtggctgttccagggtgagctgtggccaggttcaccctgcaccgtgagcctgcaagtctgggctctggagcttctgctgccccaccacgctgggcaggagtagccgcatgggatgtcctcctcttgtgcctctggagtaagatgtgcatttccttccattacggatgcggagtaggacactcgctagggtacaggtttggcgcttgagtcccaaggcacgctcttcaagtctctcttctgtacctcaccccatgctggagctcatcccacaggcaaaagggtcacgcttgaagtggaaaccggtcgccgactgcctcctcagacaccgcgcggttcccactcagccggctgccgacccccgcctcccggactgcgggactggggcgggggagcgaggaaggggctaacggcgcgcgcggcctccgagtggggggagcggggaggcgcccgagcgtccggcccctcgggatggggaggtcacgctcctgtccctctcgcccgcgtcggctagtggtcagtctggcgcgggcagtgtcaccggttgctgggaagactgggaggccagcgagcagcgtaccaaccactcagcctctccggccccagctggagccgggaagcatcccgaaaattccggaccggtaccagcctagatgggaaa

SEQ ID NO: 438889 - DNA, 918 bp, Homo Sapiens
agcgggccagacactgagccgccgtcaaggattcagcagtctgccccctgaatttctctgctactccagattctcagattcctgtggctgagacagtgaggaaatgctgcagaatgttcataaacaatatgtttttcttgatcagattcatcatattcaaaccttcacaaacaacttggatatcctgacaattattatagaatggatgctccttgcattctccccagcctttcctgaaaatgggaaaagtgttcttggataatgccaccaacttttaataatgttttttgtgaattatctatgctcccgtttttacccctttactgggtcctgagttgctttctcaactttggggctgtatactggcatggggtagtgtgtttatcaaggtgctgtcaaaagccaaggaacaatattttggggtttctcaaataccttcccttggccaggccccagccccttcagtaacttcagggtctgagccctttgcctaggctgttgctgctggacctgttgtgtgcttcatcacattacccgctttgttcttccagcccaagtctggctgggttcatgtcagtgactcaggaaagctgggtttcggaggaaggcgtggtatagtctaaacgcaggcgacttctcactgccccatcctgccttggtcatttcctaatgcattccccagacaaggatccccatctaaggccagcgaacaggcttggggttcctttccctcagagcagtgttgatgggttccagggctaaatggcgaggctcccttttgagtccattcctgtttgtgctcccaggcgacttgtttggttctctcctgagctttccaagtgggtcatgagaccccttcctttttccgggatgcccatggtttgggctgctggggaaagggaatctcggggatggtac

SEQ ID NO: 438890 - DNA, 485 bp, Homo Sapiens
cagccccactagcctcatcctaagttgtctctggagttccccaatgagcagacttaacagtgtggctcagcaatgtctcacattcatcaattcactggatagcttaaaggattcttttctactgaccagagaggagtcagatctaagacacgcctcctaaacacaggagtgagagtgaactggaagactcatgtggcccccaaccattatgtttccatgggttgctctcccaggtgtgctctttgatgtcgaacaagggatgagctcttttggaacatttttccacactgaggacaccggctgggaccctccctgctatggagtctctgatgtactgccaggtgagagttctgcttgaaggacttcccacattctggacactgatatggggtctccttagtgtgaattctctggtgcttggtcagacaggagctgtccctgaaggctttgccacactgattacactcatagggcttctcaccagt

SEQ ID NO: 438891 - DNA, 507 bp, Homo Sapiens
tcacgtgtgtcacgtgcgtaagcacatggtgcccacaccaagacatgccttcacctgcgagactgcggaaagtccttcaagcgcagcatgtccctcaaggtgcactcactgcagcactcaggggagaagccgttcagatgtgagaactgcaatgagcgcttccagtacaagtaccagctgcggtcacacatgagcatccacattggccacaagcagttcatgtgccaatggtgcggcaaggacttcaacatgaagcagtacttcgatgagcacatgaagacccacacaggagagaagccgtacatctgcgagatctgtggcaagagcttcaccagccggcccaacatgaagcggcaccggcgcacgcacacgggcgagaagccgtacccgtgcgacgtgtgtggcctatgcttccgcttctccaacatgctcaaggcccacaaggagaagtgttccgcgtcagccacaccctggcggcgacgggtccccgctccccaggcctgcctc

SEQ ID NO: 438892 - DNA, 1112 bp, Homo Sapiens
  misc_feature (118)..(118): n is a, c, g, or t
  misc_feature (146)..(146): n is a, c, g, or t
  misc_feature (148)..(150): n is a, c, g, or t
  misc_feature (152)..(152): n is a, c, g, or t
  misc_feature (158)..(160): n is a, c, g, or t
  misc_feature (163)..(163): n is a, c, g, or t
ccgggggtgtttaaaaacgccgggcccagggccctaagtttaaaattgcggctcccctataaggggccccctttgtacaaggaaagctggggtacgcgtaaagcttgggccccctcgnagggatattctagagcggccccgccccntnnntntttttnnnttnttttgacctctgctaagtttatttcaaacaagggacacttgaagttagtttttcacccctatgacaaagaacacacgtgagctcacaggccctctatgcttctccccttctggaacagaagacctgctctagaactcattttaaggggctgatctgaggttcttcccataagcagtgactacagctaatcccattaaatgcttcccagaaagcacttctaaaactggatctccaatttagactttttccccgatgggtccaaaggaaggatgagtggaaacatgaagactattctttctcctgaggcagaatcaagaatttaagccattgtgcaatccaatccaagatatcctccaagtccaaagccatgtccagattctctcctctccaatccaagaaaaaaggagattaacaggggtatcctcttagacacaattcctcttgatggagctgagtatttttgtgactgggctgggagatagaaatggggaaagagagtttggttactggctattgaaagggcttctttcctaagtgggatctttgatgtttgtcaaggctcgagctccagctgaaacttttcccacagtgcgaacatttataaggtttctctccagtgtgaaccctctgatgtctattaaagtttgatctctgaatgaaacttttctcacagataggacatttatagggtttctctcctgtgtggattttctcgtggttgcgcaatcctgagaagtcactgaagcctttcccacagtaatcacatttacagggcttctctcccgtgtgagttctctgatgcttcacaaagtctgaactccgcagaaaggcttttttgcagatggtgcactgaaagtatgtctctccggtgtgagttctttggtgaaaaataagctgagaattcctataaaaggtcttcccacactccctgcaggtggatcccgagaat

SEQ ID NO: 438893 - DNA, 539 bp, Homo Sapiens
gggacggcccccgacgtggacggcctgccggccacaacgctctgcagcagatgatgtcatcggtgggccgggcgtggcgcgcgggggggacaagcgacgaggattcgcgggccgacgacaagggcgtcatggactactacctgaagtacttcagcggcgcccacgacggcgacgtctacccggcctggtcgcagaaggtggagaagaagatccgagccaaggccttccagaagtgccccatctgcgaggaaggtcatccagggcgccggcaagctgccgcgacacatccgcacccacacgggcgagaagccctacgagtgcaacatctgcaaggtccgcttcaccaggcaggacaagctgaaggtgcacatgcggaagcacacgggcgagaagccgtacctgtgccagcagtgcggcgccgcctttgcccacaactacgacctgaagaaccacatgcgcgtgcacacgggcctgcgcccctaccagtgcgacagctgctgcaagaccttcgtccgctccgaccacctgcacagacacct

SEQ ID NO: 438894 - DNA, 1043 bp, Homo Sapiens
  misc_feature (286)..(286): n is a, c, g, or t
cccctccataagggtttctcggcccggtgtgaaactccgctggttcctgaatcaggggttattttccgattggaattgccttccccacattcccttacctttcaaaagggcttctcccccagggggaattccgctgatgctgagtcaaggctgtgttggagcttaatcgtttttccacactctttccattcataaggtttcttccccagtgtgcattcgctgatggtgagtgaaacttgatctgcaactgaaagttttccaacattcgttacattcatagagcttnctccccagtgtggaacctctggtgctggaggaagacagagctgctactgaatggccttgccgcactccttacattcatagggcttttctccagtgtggattctctgatgctgaatcaaggctgtgtctgaacttaaaccttttccacattctttacatttaaatggtttctttccagtgtgaattatctgatgccgaataagtaatgagttatatctgaagtattttccacattctttgcattcaaaagacttttcaccagtgtgacatttctcatgtcggtggaagtctgccatttgaatgaaatatctgccacattgtccacattcataagatatctgaccactaggatttgtctgatttgtagtgagttgtgtgctgacgctaatattttttcctaatttctcaaacttctctccattcttgacctcataggcctcatggtgcctggctgaggtatctgtgaaatgtctcctctttgactttgtcttaattatccaatgaccttgtggctgctctaggctgctcccaaagtcaaggtgctgggaaacattccctggcaggccccccaccatcagtctgaaggactctgtttctttggacacatgatcctttggagttaatccttccttctcagttctggcctcatcccctggcgccaagcggtctggaacatggctggcgtcccagcttcacacactgcctcagggttcggagaagtgaaaccggacatcccgggaattccggaccggtccagc

SEQ ID NO: 438895 - DNA, 650 bp, Homo Sapiens
aacattttcagattttattaatctcacttttaatgactaaatgagtgaacaaacaatatcaagtgaatgggaaatcttttttccaaatgatgttaataactcctcactcattttcttatttattcattatgtgctgggcagtctcctcagttgtcctttggttttgggaatgtcctcactcaatacttccctttcacattcagtcctgattcacaagcaggcctgtgcatgttatattgcagggtcaagctgaaaaggcaaggtttcttcaactggcttgagagctatgaggtaggctgtttcttctttcgctttgtcctattgtgggttctctggtgcccaataaggtgtgagctctgggtgaaggcctttccacatttgttgcatgcatatgggcgctccccggtgtgagtcctctgatgtctgatgaggtgggagctctggcggaaggcttttccacagtcctgacacttgtagggcttagcgccagtgtgagtcctcaggtgctgggagatggctgagcgatcattgaaggtcctcccacactcctgacattcaaatggtctctctccagaatgaactctctgatgcctgtgtgagggaagagctctgaacaaatcctttcccacagtcttgacacacatagggcc

SEQ ID NO: 438896 - DNA, 627 bp, Homo Sapiens
ttttttttgcgcagtcaaaccttttaatgatgtggttctggtggggtttataaagggaggtggacccctgggaagatgctttcctgaaccacaacccccacacttgggtcaccatttcctcttcctcctccttgtgtgggtggccggagacctgtaggaccttccctccctttagggttctgtaaggccccttctcagtcctcagagtccattcttctcttgtgctgaggcctgcagtgggaccatatacttctggtgctcttgttgctgtcgcgtctgtttccctttcctgctctccaggtcctgcaccgtgtctggcagtggctggcccagggtctctggcaggaggacagtgacagcgctggcggccacaggaacagcaccgtagatgaagagaggcatggaggggtagagctcggcagtcatgctcaccagtgggctcacgatgctgcccactcgggccatggtgctgcccattcccatgcctgtctgccggatcattgtgggatacagttccccagtatacaggaagatgcagttgaaggaggcagccagacaacccttccccagcacagcaagagaggttcggacaatggactggtcctggggtatcaccccattgagcag

SEQ ID NO: 438897 - DNA, 1680 bp, Homo Sapiens
  misc_feature (162)..(162): n is a, c, g, or t
  misc_feature (396)..(396): n is a, c, g, or t
  misc_feature (440)..(440): n is a, c, g, or t
  misc_feature (454)..(454): n is a, c, g, or t
  misc_feature (625)..(635): n is a, c, g, or t
cgtagtgcgagatgagtgaatgtcaggcgctaactattccatcgtctggatgtgttagatgagtattaacagacctagtcattcatttactgggtttcgcgggctcgggttagtctgtcgtggatagtaatacatgtttggcggtctcttgtgcaggggatntggtgtattatgttatgacattaataaagaggtagatgcagttttggtccgcaagtacaggagcgatataggactatgtatgtagttgaaggtttgggggcggatgcagtggatggcatggggcgtgtgtaggggaaggataaggtgagtgtagaagattgactcgcgaatgtatttgttgttcaatgtgttattgattcgcataagctatagattttaaataggtatagcacngttttgttccgtcatctagtatgtgttcggggagatgcagtggngtggggcgatagtntacggtgcagtgcgacgggaggtcttggatggtacttcgggatgcatatggtgtggggtggtcggatggatatggtctattgattgttagatgttcggatgtgtgaataggaggattgggcatggtgtctgtatgtgatagagggagtgggggggaggtatagagagggtnnnnnnnnnnnagtgagtatagaggatagtggagtgatatagaggaggatgggtggaggagcgcaagttattatgatatgagagattacgtgaggagatttggcacgggggtcagggtagcctgtgggtatgggagggagtacgggcggtgtgagttgatgaatgtgactgctgattgaaagagagtggaagggagaaagaatgtaggaatatgtgcgcggtgtgtcggtttgttgaagttgtggtgcggaggatggcgaggagggatgtgaggtgggatggtttactggttagaggagagtcagagtcagatccgggagagggtagggatgatggtgtgggtggaagggaagggtttgttttcaattgtatagtaaagaggaagtttgaagaggttcagctctcaatatgcagtggggctgcaaaggtgttttctggattcaggtcaagggccaaaggcaggctccccgtaggggatggggaaccacagacagtaagaatcaggaaggaccagtcccaccggctcctgatcatggagtgagcccaacacgaagagcaaagccagggctccctaggcagcctacagaggcccccgtacttccagggcccaagacgggaaatggatgaggaagcgggtggacatgactgtcaatatctcatcaggacaaaatgagaaagagcagtctgagaggaagtccataagagactcacctggcctgcacggctaaccataagtcccgggctgagtcatgataattaggcacctaaaccctgttaattagccttaatcggcaggatttcagcttcctcctcctgccttccaacaccagcacctgagtggtgagcacccacccaggtagcaatgccagggaaaagcccaggactgaggtcctctccagaaatagcaatggattttcctttcatatgtgaattttcattaatttgaattcctaatctaggaatacgctgatccgacagaagagatgcatttggtaatgcgtttctaacaatagtataccttgacaaagacaagtcattctcagacctaaagccgct

SEQ ID NO: 438898 - DNA, 779 bp, Homo Sapiens
  misc_feature (58)..(58): n is a, c, g, or t
aagcattttcatgtgctacatgggaggtgagctttgcctctactgcccaggggacccnaattatccatacatatacaagacaacacgtggataaatacgaccacacatttctctgtacatttcatgcaagctgggcactatgtgaaaagaacatagtacgaaagcaccctttccagggctcaaactctcacaatacaatggctgattaagtacgcatgaataagcctgcacccatcaaaggtcgtgtgctggcatcacagtgaaactaagggctgccggtgtccttatttttcttgtagcaattgcagggatgttgatgttccaaccaatggcttgccggtcaaacccacaggtgaacatgattgcacatcggggtggatcttcactccattgccgagcagcataccattctcctgtgagccctgtcggctgctccgcgggaatgccgcaccaggcgcactcctgacatatcaaacagtctcacttgtcggttgtcatgggggagggctatgatctaatggccgtatcacatagcattgatcctgttaactggcagcagtccgtgcgaatagttgcaatagggggatctcatatttttcaagtcccagactttcacctgtgcggtcatcgctgcctgataccacgttgtctcccacggtgaacacggtcagaagtcacagagtccagtgtgtgcctggataacattcaccgagtggatggaggggtccctgaaatcccagaggcggaaagtcgtgtcacgggaggaggtcaccacgagc

SEQ ID NO: 438899 - DNA, 1354 bp, Homo Sapiens
  misc_feature (929)..(929): n is a, c, g, or t
gcagagatggaaaggattattactgtttattaacacaggaaagcacaggagcctgcttccaaagagggactgtcccgtaattgagagatgctccaaggctgaccatcctccttctcctgctgcacacccagcagccatctatggctggatttggagaatttctggtcaaaccggtgagtatgaggagagcagggcagttggggagagaggtcccagcccaattctgcccagagaagctcccaaaagagagggaagtgtcctgatgaagagcccatgaaaggggtgagacccaggaggctgtggagattgctgcgggctcctctggtcagtaaggaaccctgacaagatccctaggatgggggtcccttagtctcactgaagttcttgtaacttgggatgggggccaggtcagcctcctctgatacccgaagctacacatctggccttccccccttctagaggaggggtcttagatggtgctgtgggagcagacaagccctcagcaggttgcaagcaggtcccctccgaaacccctcctgctggaatcctccagatgtgaggagtaggagcagacagatcaaggctgggacatctggcagggtttaacatccacagctggagggtgagacctctccctgtggatctggagaaataccttcgggctccagcctattgctgcccttgccttgtcatccatgacagggttccgcgccctgtccagcctccccgggtccccctcagctgctatagcctgacgtgtgagtgctgggcctgcgcagccaaacatctgggcaggtctggctggctattgggcagcaccacagggctgccatcgcctggcccccctcggcccttccaggacaagctgctgtgatgggaagcgggcaatgatgggtcatacactgtctccctcagcgccagccacaggngtgtcccgcttcccattgagctggcctcgctcaaggactggctgcccagtgtcatccaggtcatctggggacacacccacggaatctggtacacgggcactgggctcagaggtgcttaggcaggtctcatcagagacgctgagcccctccagggtgctggctgaggaacagaagccatcaggaggatctgcagccttggccttaggagagtgggctggggcttctggtgaggctggcaggggctcaacctcctccccttgggagtcctgcctggcccgggttttggggctggggccagcctgcttatagggggaggaggtctgcagggcagggcactggctgaagactgcctggtggaccagtaatagcttccttgtggaggcaggggctggtggtggttcgttaacagcacggaccatgatgga

SEQ ID NO: 438900 - DNA, 475 bp, Homo Sapiens
  misc_feature (462)..(462): n is a, c, g, or t
tctaggggcatgtcatcattttaatgatgtgatctttggtgtttccctcattagctgtagactatcccctctcctcccaccacaatgtttctatgatgagttacaaacagaaaggaaatcacattttcatactaaaaacaaaatgatcagagccttgatttctccactagaaactacacgtacagttaagagtccacatgcaacaccttaaatcacagactgagacctcacattctgacctggagtctcctccccttccccagccttgggctagctttggcctaggctcaggtaatactgacacccacaggcgctgctctgagggccttgcggggagaagactggtggacaagccctgggggctggccagcctacaccccccactcctgagtgaggacctgcccactgtcccttgaccccatcctgtatcaggcaagcaggcgcccccttaccccacagtantcccccattagta

SEQ ID NO: 438901 - DNA, 1210 bp, Homo Sapiens
tcagaaaaggcaaagtttattccagtgttgacagagagagggtgagccttgcacagcaattctaaaaacatgtcatctccttcacctaagaggtaagaaccggctgtaagtcatggggtcactaaaccggccgcagttacagtaagcagaagaggtcacggctcaggccttctcagactttccctgggacacacggctctctgggggggcccggcgaaaccactcggaccaggagccatcgtacacggccacatcaggcttgccgcagaggtaggcagccaaggccacgtggcaggcggtgactcccttgcggcacgtggcaatgagaggctgcgagagatccaccttcttggtctggaacagagcacggagctcttctgggcccttctcgaagccatcctcagtcaggaagtccatgaaaggcatgttgacggcaccacggatatggcccgagtccagtcctactgcatccggctccggctcggtgcccaggaaccgcccttgagaccttgaatccaccagctggaacctcttagattcaaggttctccagcacctgctcgtaggtcttgagcagggagcggtccagtgtggctttgaagacggccggttctgggcgtgagggctcggatgtcaccgggtggccctccttcagccagttccggaagccaccattgagcactgatacggtgcggtggccaaacacacggaacatccaccagacccggggagcatagaagctgcccaggtgttcaccatcatacaccaccacgtgcgtgtggttgctgatgcccaggcggcccacatactcggcgaagccagcctcgctgggcagcatcatctcgtagggcgacgccgtgtcccggcactcttctatgtcaaagaaagaggcgccgggtacgtggcgctcgaggtactccttgcgggcctctcgggtgcctggtgagtaccaggacgcgtccagcacccgcaggccgggccccagcttgccagtcctgatggactccgccagccacttggtggagaccagcgcccggtagagcacctgatgaaccatggcttcagctctgcgtgtcactcgccccggacgccgcgctggcgctcgccccggccggctggagaagttggccggttcaaacccccggccgcagctccccaggcggcgcgcaccatcgcgccacaaccagccccgggaccctgcgccgccagaa

SEQ ID NO: 438902 - DNA, 665 bp, Homo Sapiens
gctctccagttttccaagagttcccaaatgtagttaatggcctcacagtgatttaagctaatgatttttagtatcctagaatgcaagtcacttagatttatagctttaataaaaatacatttcagaaaccatttttacacgtctcctctcctctggctttgttttcatcacgcataaaaatttggggacaggtagaggcaggggcacatgcaggggatggcaaagctcttccttgtcctcaggcctctgcccccagcctgcagagggagaccgggaggtcagaggagcaggccgaggagaggcctgccccagggatccagcctatcctctctgagagtcaggagccaggtcctcctttgcttccaggctccctgccctgagccagcgggccgcatggagtccgtggggaggctgccaccctgccttcactctgaggttgggccgaacagcagatggcagcacacctggcaacgctgagttctagggctggtactcagacccctgtgccttcttcctgggtccactggactgtgccagagccatggcagccaataagcaccatctccaggctgtggggggtcccagggcaaggccaggccccctgaccctggtgggggctctccagtgctggtagcctcagcctggctcacaggctctgcgggccc

SEQ ID NO: 438903 - DNA, 569 bp, Homo Sapiens
  misc_feature (433)..(433): n is a, c, g, or t
  misc_feature (462)..(462): n is a, c, g, or t
  misc_feature (468)..(468): n is a, c, g, or t
  misc_feature (480)..(480): n is a, c, g, or t
  misc_feature (488)..(488): n is a, c, g, or t
  misc_feature (512)..(512): n is a, c, g, or t
  misc_feature (523)..(523): n is a, c, g, or t
  misc_feature (556)..(556): n is a, c, g, or t
aatataaaaatttggggacaggtagaggcaggggcacatgcaggggatggcaaagctcttccttgtcctcaggcctctgccccagcctgcagagggagaccgggaacatgaggagcaggccgaggagaggctccccagggatccagcctatcctctctgagagtcaggagccaggtcctcctttgcttccagggctccctgccctgagccagcgggccgcatgggagtccgtggggaggctgccaccctgccttcactctgaggttggggccgaacagcagatgggcagcacacctggggcaacgcttgagtttttaggggttgggtactttaggacccctgttgccttctttcctgggggttccatttggacttgttgccagagccattgggcaggccaattaaggcaccatttttcagggttttttggggnttccaggggcaaaagccaggggccccttnaacctnggttgggggttntttcaatntttgtagctttaagcttggtttanaagttttttcngggccattcttagcccttttcttaaaaaagaangaagggaagcaag

SEQ ID NO: 438904 - DNA, 841 bp, Homo Sapiens
  misc_feature (39)..(39): n is a, c, g, or t
  misc_feature (368)..(368): n is a, c, g, or t
  misc_feature (377)..(377): n is a, c, g, or t
cacggcccagtgcttgtacctggggacgaggcccaggcngcacacgtggcacgagttgaccaacccagagacgtctgggtaaggagaaggccccaggactgaggagggcgggccacctctaggtggttccagacggtggggccggcctggggtcctggtgggagtctgcaccgacacacagtgccgcaggccccgtgaaagcacctaccgtgcaggtacagcgaggcccaggaccgccagctggcaggtcccgaatcaggccttggcgccacagctgcgggggagcccggcctacctgatggtctgggtggatacgggacggagcccggcctacctgatgttctgggtggacacagggggttgggccngcttacctnacgttctgcgtggggttccacctctctgagggcagctccccgctctgggggtcgtcccccgccgggtggaggatggagatacacacgtcccccgtctcgtagatgttagggtgccacatcttggtcaggaaccgaaaggctggtggagagtatgggtagtcgatggggaacttgaggcgcgccttgaagtagccgccctcgtagtaggtgttggggggcccgaagatggccacctcccagttgtatagatcgccctcgtccaccagtgtcacgcggaatccctcgaccggctcttcctgcagccccttgagctccagcagcagcgccttctgcgagctgggcactagcggccgagccatggcggcggcggaggggcccggggtcggagcagcgcggggccgcgcgaccaccgcgagttcgcgagacgggccgggccgcgcaccgtccgggggggagccaccggg

SEQ ID NO: 438905 - DNA, 819 bp, Homo Sapiens
tgcagtaatcccgcggtattaggtagcgaggcctgtggtggcgaattcggcacgagggggcgtgcgtgctgttgtgcgcagaggaggaggcagtgctgtgcggccccggtggctcccccccggacggtgcgcggtgcccggcccgtctcgcgaactcgcggtggtcgcgcggccccgcgctgctccgaccccgggcccctccgccgccgccatggctcggccgctagtgcccagctcgcagaaggcgctgctgctggagctcaaggggctgcaggaagagccggtcgagggattccgcgtgacactggtggacgagggcgatctatacaactgggaggtggccatcttcgggccccccaacacctactacgagggcggctacttcaaggcgcgcctcaagttccccatcgactacccatactctccaccagcctttcggttcctgaccaagatgtggcaccctaacatctacgagacgggggacgtgtgtatctccatcctccacccgccggtggacgacccccagagcggggagctgccctcagagaggtggaaccccacgcagaacgtcaggaccattctcctgagtgtgatctccctcctgaacgagcccaacaccttctcgcccgcaaacgtggacgcctccgtgatgtacaggaagtgggaaagagagcaaggggaagggatcgcgaagtacacagaccatcatccggaagcagtgtcctggggaaccaagggtggacgcgcaaccgtgacggccatgacaggtgcccaccaacgcttggccgattactgcgttaagaccaggccgccgcgcag

SEQ ID NO: 438906 - DNA, 1634 bp, Homo Sapiens
  misc_feature (50)..(186): n is a, c, g, or t
aaaaaaaggttttaaaaaatttttggggggcgggggggccccacagttcnnnnnnnnnnnnnnnnnnnnnnnnnnnnnnnnnnnnnnnnnnnnnnnnnnnnnnnnnnnnnnnnnnnnnnnnnnnnnnnnnnnnnnnnnnnnnnnnnnnnnnnnnnnnnnnnnnnnnnnnnnnnnnnnnnnnnnnnnctctcataaagtagttttatttagatttcaaacaaaccaaagcagggaaaagagtcggccacggtgaatccgtccactctgtgctggacgtggctccaggacctggagctgacaggcaggaccgggcccctcggaccgctacacctgggcctcccaggctggtagtgtcaggaaacggccccccgcccacgttcccagcagcgcccccgtggctcctccggggtgcggccagtccggaagctgggggaccccggtagaagtcgggctcagctcccctcccgaggggacaggtgggccggccgctcccaccctgggcccgtccaccgagccccgagtgacgtgagtggcggtggggcagcccctcttttctgaagcacgtgaaaacccagaacagacatggggagggagaaaaagccaaaacgaaacaaccagaggagacggggaccagcacaaaacctccgtgaggtagtctgtcgtctaaggagccacgggtccggccctagtgaggtaaactcggcaagtttattctggtggtgtcaggactcctccgtgccagagtcatcctcatcgtccccgaagcagctgtcggcctcctcctccacctcgccgtcctcgtagtagtcgtcgtagaagaggtctgagccctcgtcgggcgccggcgccttggtcttcacgcagtactcggccagcgtggtgggcaccttcacgccgtcacgctccgcgtccaccttggtccccaggacctgcggatgatgtctgtgtactcccgatccttccccttgctctctttccacttcctgtacatcacggaggcgtccacgtttgcgggcgagaaggtgttgggctcgttcaggagggagatcacactcaggagaatggtcctgacgttctgcgtggggttccacctctctgagggcagctccccgctctgggggtcgtccaccggcgggtggaggatggagatacacacgtcccccgtctcgtagatgttagggtgccacatcttggtcaggaaccgaaaggctggtggagagtatgggtagtcgatggggaacttgaggcgcgccttgaagtagccgccctcgtagtaggtgttggggggcccgaagatggccacctcacagttgtatagatcgccctcgtccaccagtgtcaacgccggaatccccctcgacccggctccttccatgcaagcccccattgagcatccaagcaaagcagcgcccttctgcgagctgggcaacatagcaggccgagccaatgcaggcggcggaggggcccaggggtcaggagcagcagcaggggccagcagcagacacaccagcgagttcgcgagacggaccggccagcgcaccgtccgggggggagcacaccgggcacgccgcactgcactcctcctctgcgccgcacgccgccgcccgggaccccgagcgctccagcagctctgg

SEQ ID NO: 438907 - DNA, 476 bp, Homo Sapiens
  misc_feature (20)..(20): n is a, c, g, or t
  misc_feature (51)..(51): n is a, c, g, or t
aaaccttcaaggcccgtttnaaaccgcgtcccaaccttggtccccccaagnaactgcggaatgaatgtcctgttgtaactccccgaatccttcccccttgcctctctttcccaacttccctgtaacatccacggaaggcgtcccacgtttgcgggccgaagaaaggtgttgggcctccgttccaggagggaagatcacactcaggaagaatggtccctgacgttctgccgtggggttcccacctctctgagggcagctccccgctctgggggtccgttccaccggcgggtggaggatggagatacacacgtcccccgtctcgtagatgttagggtgccacatcttggtcaggaaccgaaaggctggtggagagtatgggtagtcgatggggaacttgaggcgcgccttgaagtagccgccctcgtagtaggtgttggggggcccgaagatggccacctcccagttgtatagatcgc

SEQ ID NO: 438908 - DNA, 338 bp, Homo Sapiens
  misc_feature (81)..(81): n is a, c, g, or t
actgccctgtttccattgatggttgagtttctgggcccaaagttaaaactcttcagcctgggcttcgggtccctttcccanacataaaaccccacccttcacatttctctgtctgctcctgtgaggatcctcagcttcttctcagcttctcttcattttcctctcagctactcctcagtttctatgccccatgtcctgaaacgacttccaagtattcacttagagcacaggttctcaaagtgtggtcctcagtccagcaacagcagcatgacctggggacttcttaggaatgcatggttttggtccccacctcttgggtcagaaacccttggagtgga

SEQ ID NO: 438909 - DNA, 463 bp, Homo Sapiens
agagagaactggtattgctataagatatgtaggagagtagcatttcattcttctctagctggtggtttcacggtgccagggttttctgggtgtccaaaggaagacgtgtggcaatagtgggccctccgacagccccctctgccgcctccccacggccgctccaggggtggctggagacgggtgggcggctggagaccatgcagagcgccgtgagttctcagggctcctgccttctgtcctggtgtcacttactgtttctgtcaggagagcagcggggcgaagcccaggccccttttcactccctccatcaagaatggggatcacagagacattcctccgagccggggagtttctttcctgccttcttcttttttgctgttgtttctaaacaagaatcagtctatccacagagagtcccactgactcaggttcctatggctggccactgcacagagctctccag

SEQ ID NO: 438910 - DNA, 494 bp, Homo Sapiens
acatacaaagtttggatttttattgaaatcttgttaggtatcaaacaaattctgctttcttcagataaaaatattctctcagatgtctccagataactgctaagtctaaattggtccttcaatgtcttatttttattgtcctcgtgaaatgttcatatacagttaagatgttcccaaaaggatttttatcgtgtaaaggagcgtacatgacgacctctaccactgcctccactaacaaactttcctcttgagcctccactgccgctatttgcactagcccagggaaggtccaagtcccccacgacctctagaagcacggtcccgaggactttggcggtaacctgtagaactaaggggtcgtaatggtggaagagggcctctgttaaaattgctctggcctccacgactttcattgtaatttcctcgaggagtattctgagcactccaactggagcctcttgttccttcccacgactggtagtttccttttgagc

SEQ ID NO: 438911 - DNA, 287 bp, Homo Sapiens
  misc_feature (86)..(86): n is a, c, g, or t
  misc_feature (218)..(218): n is a, c, g, or t
  misc_feature (258)..(258): n is a, c, g, or t
gataaaagagaaacagcgaagtttcaagagaaaaacttgaggtcttaataatttttgggcaacttgacagcagaacagggtaaaantgagttagctacaaaggctcatcagaaaatggcaatagattccagagagatttaataactacttacaaactctgctataggtgacaaatctgaccatgataaaagcaccgtaaatgatataggtaacactgngcatatgaaaactcagactgtgcactagataaaaaggaancccagcatacagtgttaccacatgtaaat

SEQ ID NO: 438912 - DNA, 1949 bp, Homo Sapiens
  misc_feature (1274)..(1286): n is a, c, g, or t
  misc_feature (1758)..(1758): n is a, c, g, or t
  misc_feature (1786)..(1786): n is a, c, g, or t
  misc_feature (1848)..(1848): n is a, c, g, or t
  misc_feature (1857)..(1857): n is a, c, g, or t
  misc_feature (1873)..(1873): n is a, c, g, or t
  misc_feature (1927)..(1927): n is a, c, g, or t
aaacccaatgatctcaatacctctcaacgtgggcacacatctgtaatacacttttattgtgcaactttaaatgtgtgtgcctttctccattaattgactgtagtttaatatttttaaatagtgctctgtgtaaagatgatgcagtttgtgagtcagatttcatactggagcttaatatactcaaaacctaagcttccagtggtattacttgtgatttttttatgagatagagaattacatgaaattctagtaatccagtttccacacaaaattatttcaataagcacatatccaagcaatttgtacagaccttgtttaaagcactgcttcttatagggctcaattggcagtctcaggagcttgggatgctaccaacagggcatttaggttttcatttttatgaaacaaaaggcaatctggaaatagctaaatttattttaaggattttattctctgatgtcccgtcaaactaaatgcttcaaacccctatagctacagcttaacttctgcacttgctattcagtattaataaggtggcatgcttgattcttattgtttttaaaaatgagaaaatttggagagagaatactattatgtcaacggtacaagactctgaatcttgaagatgtagatggatataatatttagactttatatacacccatagatatgtatttatatatgcatacgttttgtataaatttacaattgactttttgtattctcttttctgtcattacaagaatgagatggaaaccaaaatagttgttccatcctcttacccaaagaggatactgaaaagtccggtatgtgcatgcacttgtttctctggggtcaaatctgaatgactttctctttaataatgaaaggggagagtcctggttagcttggaaaattggtaattagataagcttcctttcctaggttagtgactcaaatgtagcaatgataataaagttatgaccatatcaatgtggtctaaatatctagatggaaagcaaaaatatccagaagaggtttagggccatctagaccacaaacctggaacctggattgtggtttagatttttttcattttcaacctatatgttgtgtagaaatacaatttatatctgcatagctaaaggtaaagtgaaaatatgaccattatctgtttagtttgagaaatcatttttggataatatggataaattagctttaagaaacttctttgacatctgacttttccaccatttctatctgtatcaattgtattaattagataatggttaaannnnnnnnnnnnnatcatgtagacatatgctttcatgcttttctgtgggtgaaagttgaacaattgctagctgatattatgtggaagttacaggttaaagtagaaccagaaattttaatataatctgatcaggttccttagtcccattcccatgtgaatctgaactttgaatttgaatctgaaaggcctacttatttggggccattttttgttgggaacttgtgattgtaactcacagatgtttcagttcatattagaataaattgcccaatctataagagagtgtttaatcattgggatgaatgtaaatctgattctgatttggttatttatttgataacatttgagaaacagctaatgtggcttgacatcaatacttattaatgtcttcaccctaataatacaattggtgtcatgtatgaatgcttagctgacaataagaatttaatcaactttatttggagacaatgacttatcaaggaggntcctacccatttgtggtagggatatttncccttacagttgtgattacaagggattgtttctatagagagatgaacagcaacaacagtgancactgatgnacaacagaaaaactgnacttttgaacttgagtatatccaatagatagaaggaaaaaagatattagaattncatggaaattttgttttgcttt

SEQ ID NO: 438913 - DNA, 1349 bp, Homo Sapiens
gcggccgccgcagctgcctcctcctccatctcctcttcctcctggctcataagggccagctcgttctcgtagcagaaggcactgggagggggcggtggggcgggcagcacggtgatcttactctcctgcagctcccgggccgagcagcagggcgtgccggccacctcgtaggtcttgtgaaaacgcgagtagtccaccttgtagtggctcttctcctcgaagaccacaggctcaaagcggtggccccacaggatctcgctggccaggtaggagctgcgggcctgggtggtcatggccgtggcctccaccatgccctccaggatgaccacgatctcaaagtcctccgactccagctcctccttgcccatgccataaagcgggctgtcctcgtcgatctcgtggacaatgatgatgggcgacaccaggaagatgcggtccaggccgatgtcatagcccacgttgaggtcccgctggtccaggggcaggtactcgccctcctgggtcatgtagggcttgatgagctgggcccgcacgtgggcctccacaatgtggctcttgcgcaggttgcccacgcgccacatgaggcagagcttgccgtcgcgcaccgaaatgaccgcgtggtggctgaacagcaacgtctgcgcccgcttcttgggccgcgccatcttggccatgatggtgccaatcatgaaggagtcgatgacgcagcccacgatggactggaccaccacagcgatgactgccagcgggcactcctctgtcacgcaccggaacccatagccgatggtcgtctgcgtctccaccgagaacaggaaggcacccaggaagccgttcacgtgcatgatgcagggcttgggggccaccggggctgctccgccaccacccgccgccgggccccccgccgcaggcacccctgggctggcctccaggtcaccgtggaagaaggcgatacaccagaagaggaggccgaaaaagagccaggagacaaggaaggccgcggagaagatcatgagcatgtagcgccagcgcgtgtccacgcaggtggtgaagatgtccgccatgtagcgctgcgacttgttgctcaggttggcgaagtacacgttgcattggccgttcttcttgacgaagcggttgcggcgcttccgccggggcacgtgggcctggccgttgcggctgtgtccgtgcatgtcctgaagccggcgtggtcacctgggaagacgcagggccgctgggcggagggtccgacgagagtccgggaggcggcgagcgggcgctacatcccaaggcgcgatccggcgggcggcgtcccgggcgcggagaggggagtccatcccgggaattccggaccg

SEQ ID NO: 438914 - DNA, 470 bp, Homo Sapiens
gggaaaagggaaagattactataaatttaacttcaacaagctggtgatgcccaactacccattcatcaacattcggtcaagtggtgtggttcctcagagtgcaccaccagtgccaacagcctcttcccggttccatttcccacctctggacacccattctccaaccaatgatgtgcagccgggacggttctctgctagctccctaactgcttctggccaggagtccagtaatggtactgatagaaagactgagctttcagagctggaggatggctcagctgctgactggcgccggggtgtggatcccgtgtcctccaggaatgccattggtggaggagggattggccatcagaaacgcaagcctgacataatgcttcctctgtttgctaggccagggatgtaccctgacccccacagtcccttcgctgtctctccaatccctggccgcggaggtgtcctttcgtcccccg

SEQ ID NO: 438915 - DNA, 1196 bp, Homo Sapiens
  misc_feature (814)..(876): n is a, c, g, or t
ggcttttatcatcataaaaaatatttattataaaaaattatcacatttctctgtacatagcataaagacaaaaacacaatgtatacattaataaattaagtgggcctgagtattcagtatccatctactagaatcctaaagctcttccccagatttcacaaaggccaatgtagattatttctattttatcaaagttcatttgcacagttggtgtaattgagatactaacatttcttttttctagtgttttaaagatagttcacagtatttgagttaattaattaatcaactgatttaaatctttggtaaatacaagtatttacatgtaaaaatgtttagctcaaatttcagtaaaaaactgaaatgacaaataacctactgcaaactgttttgtataatcagaaatgcatgagctggactcccaccattaagaaatgtcactgtctaggacttctgatgataaaaactgaaatccacaaaaaaatagttgagcttctattaccattaccagaagcaccacaacactaggccaccatgaaattacacacaaatgtcaaattcaacatataaaccatagtgattattttacaatgcagaaaaatcctcctttttttctatatgccagtttaaatgttaattgacacgggtaagtttattatctcaaagcctactatcttgtaagagtgagaggcatttaaagaatccatactgctttcaaaacaccagttcttcctcttgccaatgacatatcccagaaaatacagattttttttgaaataatttgtggggaaaatagaaaaatgccgtgccttcnnnnnnnnnnnnnnnnnnnnnnnnnnnnnnnnnnnnnnnnnnnnnnnnnnnnnnnnnnnnnnnttctctaagagtaatcagcacaactggtctgccaaccttcaaattataccttaactctcccaaaaataccatatgcatttcaggtgtcattcattatctctcagtcacaacaactgacaaatgaaagcatgctggcatgagaatctcttacgtccaggctatttgcttaaaataattactctaaaaggtacttaaattctaatgttcttgagccatttgagaattagtaatttttaaacagacatattaatgctggagtgtagaggatatcattaaatatatcaaaaatatatcttttaagcctagaaaatggatgcccc

SEQ ID NO: 438916 - DNA, 1144 bp, Homo Sapiens
  misc_feature (156)..(156): n is a, c, g, or t
caatatggcccagtttttaaaaggttaaattgaacagcggggtaaagttttattattctcaaaaagccctacttatcctgttaaggagtgaagaagccatttaaaaggatccatactgcctttcaaaaacaaccaggtccttcttctttgccaatngacatatcccaagaaaaatacagatttttttgaaataatttgtggggaaaatagaaaaatgcctgctttctgcttccctctcttcctatatcctttctttccttcctgccttctttcatttttccatttcttcttctctaagagtaatcagcacaactggtctgccaaccttcaaattataccttaactctcccaaaaataccatatgcatttcaggtgtcattcattatctctcagtcacaacaactgacaaatgaaagcatgctggcatgagaatctcttacgtccaggctatttgcttaaaataattactctaaaaggtacttaaattctaatgttcttgagccatttgagaattagtaatttttaaacagacatattaatgctggagtgtagagaatatcattaaatatatcaaaaatatatcttttaagcctagaaaatggatgcctttggattaccttcatttcagggtagagaaaagcccttcctactgaattaggctctgaacatgtgatttctttccctaacactagtttttccaatctactaatttatttataaacaaagcaaagtaagagatatttttgctgttactttggcaattctctctctccaatccccaacatcccgagttcagtgcacatctaacaattcactcaagactaggcacctgacaataagtgtttacttagtgtgtaaagtgaacaagaaaagcagcataataaaggagctgtgtttttatcagaggagccttccttctgagtttttacataagttgatgccttcactgcaactttgaatacaatgctttgaattttgaaacacttgaataaaatgtttgaatgctttgaataaaattcctcctctttcagagtaaaccttattttagtcaccagcatttccttccatagcacataaatatgttcaaaatgtacattgacatatatttgtaaccacatagtgtaaactaagttttaatccttcc

SEQ ID NO: 438917 - DNA, 710 bp, Homo Sapiens
  misc_feature (32)..(32): n is a, c, g, or t
aaatctggctgtccctctgtctccatggtgcnagccctcctttaggctcagttccaaagggagaggaggctaagttaaataagaaactgagagaaacatggagcattattgatttattagaaaaactagtaaatgggtttcctctggttggtggaagcacggttgagcaggtggaggacaggacccagctggccccagggccagccccagattgcatggtctgtgcccaacagggttgcattcctctgcagccgccgcctcctcatttcctccctgagcttgtttgtccaagccaccaagccatgtggtcccgctggcttcatcctcctctggattcctgcccccctcccatgaagggaggaagaggattcagggtcagcctaggggaccctggctccctccgataggcaggaaggaggagggatgcggaggagaggctgagccttccacgggcctcctgttaggggtgttggtggaggccaggttggggagggaagcctaaggaccctccacacctcccacagccagagtcagttgaggctgggacaaaggggaaggagagagggaaggaggaccgcctgaccttgcccagaaggagcttcctctaaactgcccctgggaaggaacctggtatgcttgtgtggactggagctgtgtcaacctcgtttgggaatactggcaaaagaactgagagttgaataaggaaagaa

SEQ ID NO: 438918 - DNA, 1141 bp, Homo Sapiens
gtaaacagattacatttgaacacctaaataagtatttgtttcataatcattacatgcttgtttatgatttacaaagatttggtagagaaaagtacagtccttaaggcatatatatgccaatgcattaaactactcagcttttgtgccagctcaggtgttcataggaacaggaatgtggaataccagctttttactttaattatacttttatgctgaatttttcttccagttaaacctttaattacactagtatgtaaagtagttactgagaaaaataagtttttgatttcccttctgttggatctgtaacatttttaaatggagctatttaacacatgacatgctaatgttacttaatggattcctatgtatttcattaaaaaaaagtctcccacctgtgttaagacagctaaatatttcttgatgttggcttgaggaccaagtgagccatcttgccagttaagcatgttttatatcagaggaccaaatttttaagaagagaatttgtacatttcttgagcttccccatgtgaagcttgggttcagtactatcctattactatccatcttcataatgagtgaagcaaactgaaagggaattcataatcttttttcttatctgaacagaaaaactaatgaaaatcaacaataaatctttattttaattttcattcaacagctgaaaaaccatgtctgttgaccacattggaccattgcctagttaaaatccataaaattccctataaaccaatgaaaagaaacttgtctggcaataatttccaacattttaaattctaatttttagttacaaagaaaaaggatagaatgaggcttttcaaggaattcttgctcatcccttcaattatttggcaggtaaaacagtcctagaattcagcttcctttttggttttattactattaaatagatactttcatataaatggaaacacttttcctcaaaacattaattcaaaacatactccttatattaaggattatagcaccatattttttgtatattccctatgtgtaactttttcctgttggtatgtgatatttttcatttaatatgactatctgctggtgttgggggccaatagatttgtgaatattctgtgggatgtgtctatgtatagggtgt

SEQ ID NO: 438919 - DNA, 562 bp, Homo Sapiens
  misc_feature (530)..(530): n is a, c, g, or t
gtttgtgcaactgtccttggcctttagaaatgacagctacactctggaatctacaattagccaggctgaaagggaacgcaacctgacagaggagaacactgagaaagaactggaaaacttcaaagcttccattacgtcctcagcttcactctggcaccactgtgagcaccgggaaacctaccagaagttgctggaggacatcgctgtcctgcaccgcctggctgcccgcctctccagccgagctgaggtggtaggcgccgtccgccaggaaaagcgcatgtcgaaagcaacggaagtgatgatgcagtatgtggagaatctaaagaggacgtatgagaaggaccatgcggagctcatggagtttaaaaagcttgcaaatcagaattcaagccgcagctgtggcccctctgatggggtccctcgcacggcacggtccatgtccctcacgctgggaaagaatatgcctcgccggagggtcagcgttgctgtggttcctaagtttaatgccctgaatctgcctgggcaaactnccagctcatcatccattcctccttaccagctt

SEQ ID NO: 438920 - DNA, 820 bp, Homo Sapiens
gtggacaaaatattggaggtgtgcaaaagctgaggtaaagagagacacagtaggaaggctctttctcattccagcaggaagagtttggtgccttggaccgagatctctccatgggcactgtgcagggtttgaactctggctgatgagggttgctagcaggagaaaacagtaccttttagacaagcaggaatccctgtgttctcttctctgctcccttcctgactgcagaagtatggggtccctcgcatcggcactggtacctatgatccctcacgctgggaaaggtatgcagtgttcacaggtaataccagggcgtccctgtgtgctagtttcacaggaagatacttgagagctggttacactgcttcatgagatttcagagaatgctgagccttgttcttggaggtcatttcgtaatgaactgctcttcacgtcaccaagggcctagaaacctgtagaactgtagacaagcagccttgaaaagaggggcagcatggaagccatggtccagcctgagggcaggaagggcttcactcagcaagagtgacaggaagagacttcttggagcccaacatgttcgaccaaagccatggctactcagtgcgtgccttggtcgaccagcggggacgctccgactttccgctccggagatggcaccaggacgagatgggagtctgccaaggctgtttccatggcacacctcatgaaggcccctgctccgggagcgtgacagtgcgatactctccttcgccggccacttttcgtctcggatgaccatctgggctcgaaagccctcaggagctgcggagcgcgggtcggt

SEQ ID NO: 438921 - DNA, 511 bp, Homo Sapiens
  misc_feature (22)..(22): n is a, c, g, or t
  misc_feature (100)..(101): n is a, c, g, or t
gcagctgtcctcccgcagacanccgtagcgcacctcatggcggcacacgtcgaactggaagtgctcctggaactggcggatcttggagtacttgaggagnntgagcgggacgatgtgcaccaggcacttgttgttgtagaagctgtgcttggcagccaggttggagcagacagacggagagtccttggtgcctttgctgatgatccggggtttactgtcaaagcagatctcgcagaggaaggtgaagatgccctggtgctccttcaggagtttggcgattggtgaggctgccgcgcttaacaccccccagcgggtcgaagagcaggtcgcggttgagggtgcccttccgctcctcggtccacacgtcgatctcctcctttgcacaggtagtaggagcccacgaagctggtcttagtgggccggggccggatccgcttccaggtctggtcctccgagctccggagccggccgagcaggatgtcccgcttgcacttgtgctcaaggcctcacg

SEQ ID NO: 438922 - DNA, 603 bp, Homo Sapiens
gagttttaaagccttttatttgtttacacattctctaaattgcagacaaaagattcactacgtgggtagtcaacattgctaaccaatcacagaacaagatactaaccacagcaaggaaggggtaggggcttgtgactcagtctttgagaacgtgcgagcattccatgggatatcgaggggtcccaaagaagaaggctgctcgatccccacattcttcatctcatcagcgacaggtctccctcccagaaccccatcaggacaggagaaaaggcagcaagagaggtggggtggtcctggcacgtgggccaccagtcttctgaatgaagagtgagtcccgggtcaggagtccacatcaggtgtgggctgcttccaatctgtaggttctcctggagattgtcacaatctgccagctctctgggaatcacagaaccatcatgtccccttaggatggcagaagatgtggcacagcctcaatctccaacactgaaacactgagagagcttgatacgttccttaggcagggcagaaacatcacagcacttcacgttaggaaccacgaaagagtgggaacctgacacacgtggggatgtgccccggacgcgt

SEQ ID NO: 438923 - DNA, 706 bp, Homo Sapiens
  misc_feature (566)..(643): n is a, c, g, or t
aatcagcctgtttcatagaagcctttgttgtttgttctgatgagatttttacctgctgtacttgagacatcagtaaaaagtaaagtagaggttcctcttcaaaggactttcctccccatctaattaggaataaatagtaacttctcttagaagcaaaatttattcaaagacctgtgctaacattcttaaatatctgctagccgtaataaagaaatcaatgtactttatgttcttagctcccacaatttagcctaaatatttgccctggcatgcttatactggtccaagcaagcattaggtcatagcctgttcctcttccttatttggaggtgtttttacctttctcagcattccacaagttacttcctcctccctttgttctcctctacctttgcctcttttaaaaagttctaagttgctagccaatcaggacaaatacagaaagcgaggtcctgttctggccagtggaaaccagatacagcagtaaggtgaacgcgtcaggttataaatgaccctgtctcctttgttcggtgtactctcctggctaaactgctggtgagtgtacnnnnnnnnnnnnnnnnnnnnnnnnnnnnnnnnnnnnnnnnnnnnnnnnnnnnnnnnnnnnnnnnnnnnnnnnnnnnnngtaacagcatttctaacaatgtgacccactacaggctgaggacctttttgtgacctaagacag

SEQ ID NO: 438924 - DNA, 1283 bp, Homo Sapiens
tcacaaaggcagtgtagactttaattcaggttgacaggtgggaagagaactaggatttgcttccaagggtgtccagatgagaagaccatccttcagggaggggcagagagggcaagagggtgcgggtggcctggtggcagaatagggcgaggagcaggggcgtagccacacagtgcaaaattgccagggcttctgccaggttcagcagcaggtccagagcctgctgggccagacatgttgacaacagcaacagcttggacctcaccaggaaatccagtcctagaaccaccccatgaggccaccagaaaataaaccaggcccacaggatattcatccaggggcctggccccatacccaatgccttcttcagccccttggctccaaacaaacccaatggcaacaagacaaagatggcaagacaggctacagtgtgtgtggcctgcaaagccttcagctccgtgctgtatatcagggtgcagagtccaccagaagcaccactggccagggtgacaggcagtgtcagtagggcagccactccccaaattcccacagtgagccccagggtgaggcctgggacctggcctgcacccagtctgtggcccagggaggcatggcaccctagcagcaaagcctgggcaaaggctgagccataccagacacagtagcccaggctacacagggcagagctgcgagtgctacctagccctggggccaagacgggcaccacaatgctgaagagggcactgcccacagccagctgtgccaggacaggccagccagggcagagctgccagcggaagagaggtctgaaaagcatgaagaggacagtgctgctagctaggatacccaggacactggtgaggatgaagaagggcagtgcagagtcatccagcaggttacaggagtggcagggggcagctgcttccaggttggcatcatagtctccatctgggaaggaatcattcacaccataggaagaattccatacatcttcgaagtccagctgacttgagttctcagttgagggggagagctccgccctgtgcagacagttccccatggcaccgtttggttcaggcccgcagacagaagggctgggacggctgtcagcgcctgtgcttccaagataagagccaaggactaatgagggccatcaggttctgggcagggacagggggcatcaggaagccttaccccacgcccactgcctgcacaagcctcaggcctatgggggtcactggccttggtcttcctgatcggaagaattccggaccggtccagcc

SEQ ID NO: 438925 - DNA, 419 bp, Homo Sapiens
  misc_feature (377)..(377): n is a, c, g, or t
  misc_feature (387)..(387): n is a, c, g, or t
ttttttttagccatttacgggtttctcataagacatccagtcacttcttttcccttgccctttcctaacactgttcctaacatttgggtaccaccccttagctcctgcgacccatgtggttttggagaaagctgatcacactcacggtgacaggccatggttggaagtaacatgttccacttttcacgaaaagtaatagatctgaatatcattcatggttaacaatagatagtgtgacatttgggtatgacctgctggtaggaaataggggcatgattccctggaagtaagtcacttacaccaacccaagttctaatttctttaagatgtaggtaaaggacaaaattgtttctttgctatttttaaaatgggaaggnaagggttttngcagagtttcaaggggtggatatggctctagg

SEQ ID NO: 438926 - DNA, 1089 bp, Homo Sapiens
caggggccccttgggtttaggtcctggggcccctgggggccaagttgaaaggggaggcccagggggtgagaggaaaagggcaagggtttggaagaaggttgggccttctccctgggccggttttgaggaaaggccaggggttggaagggtcagccaggggttgaaggagaagccaggggtggaaggaggccggggctctcccaggagggccatcacttgtcggcgtgctgcagcagcaggtccactgcctctgcgaggttgtccacgtacccatcagccttcacttccggatggtgctcgtcactgggcctgaacttcccggtgcgcacctgcagcgctctcattccacaccgctgggcaccgccgacgtcgcccacgatatcgtccccaatcatgacggcctggtgggcttccactcctatcgcttgcagggcagacttgaaaaactcaggagaaggcttccccaccacctcggctttgatgccacaggcatactcaagcgccttcatgtagggaccaacgtccagcatcaggccagaggtctccttgtagtaacgcccttttcccagtgatatgagcacaggtttttccagctccatgagcacctggaaggcgttattcatgttttgataagaaaagctttctcctgcgtctgcaattaccacacagtttgggttggatgtgtcgatctgatcaaattctgagcggactccgtcatggatgagcaggtatggtcgcaggcctcgctccttcaggatctggcaggcagctggtgccggggcggtcacctcctgctcagagatgtcaaatcccagcctctgaagctgccccaccagctctgcccgggacttctgcgactcgttggtgcagaacctcaccttcagccgggaacgcttcagtctggccaccgcctccaccgagccggcgatggccgtgccgccgcccgcgccgctgtcgtacagcacgcccgagatgtcaagcagcaccccgcgcacgccagccagccgcttgccccacggtgccatggcgcccggccctgctcctcagctccgcgtcccaaccgacgcctgatcccgggaattccggacc

SEQ ID NO: 438927 - DNA, 1556 bp, Homo Sapiens
  misc_feature (323)..(358): n is a, c, g, or t
  misc_feature (995)..(995): n is a, c, g, or t
  misc_feature (1005)..(1005): n is a, c, g, or t
ggtgtggcgtacgtggggggcaggtggtcgatcacttcttgtggtagcgcgtctcggatgattcgtttagttggttcgttgtttgcgttgattgaaagtcacgacgtattggacatcggctggtgtgcgcgactggttcgatgacgctgtttgtctaggaatggtgcgctccgagtgcgccggtcagctgtgattgtagcggccatcctcgtccattatattggggcgctccttgtgttggtatagttatgcatggggtacgtctttaatagtgttggcgcccttgtcttgataagatctctttatagtcataggtgtccacnnnnnnnnnnnnnnnnnnnnnnnnnnnnnnnnnnnnctggtcaaggcagagtttactgaactgttagtttcctcctgcacacaccgggcatgacaccttcaagtctgtccagcagtgggtccagaaagtaccctgtgtgccttggacgcagaggctacagttctcactgtgtggcatgggagccttcacagtgccctcgggagctgcccctggtctttgtctgcaaaggtgactgggaggatagaaaaagcagcgggctggcattgtttcgggggtggggtggtgggcagtgtgcctgggcagtcgcagggaggctgacttggttctgggctgcaagatctgtgcataggaggcccctgggtttcttccaggctcttcactgaaatgcaaagagtctgaagaggaggcagtgggcatagtgcccctgaatctggttaggtggagtttactgcatttaaaggcccatggtgagtggtgagttctgggatttgggagattcccagaggcctgacaggcctgtcccaccctcctggacttcactacagggagctgaagtcagggcccaggcaggggagcaggccacccaggtagggaacaaatgcctgcccatgcagggcagagggcagaaggcagggctgtcagggccttggttggtctgggcactggggcaggnaaaggggagncaggggtggaggagaggcaggggtggaggaggtggggctctcctgggcgggtggaggagaggcaagggtggaggggaggcaaggggtggaggagaggcaggggtggaggaggcggggctctcccaggaggccatcacttgtcggcgtgctgcagcagcaggtccactgcctctgcgaggttgtccacgtacccatcagccttcacttccggatggtgctcgtcactgggcctgtccccatctcccactgtatgctccttccacagggcgagttgctctctcttctgagcatgcagaatgtgccccccaaccaccccatgccatcaaagctgggggctgctctgccacttcatctgcaggtgccagtgttgacttcgcttcctggagggacaggccaggtttcctgccctcagtggtcccccccacaggcctgacccagagcaggcacccaggaagtgcccaccaaatgaataaacaaaggcccccagctgggcaggccagtgcctgtcatcagtgattcctccccctcatgctctgtcagctgaatccgct

SEQ ID NO: 438928 - DNA, 853 bp, Homo Sapiens
  misc_feature (452)..(533): n is a, c, g, or t
  misc_feature (545)..(600): n is a, c, g, or t
taattgcagacgcaggagaaagcttttcttatcaaaacatgaataacgccttccaggtgctcatggagctggaaaaacctgtgctcatatcactgggaaaagggcgttactacaaggagacctctggcctgatgctggacgttggtccctacatgaaggcgcttgagtatgcctgtggcatcaaagccgaggtggtggggaagccttctcctgagtttttcaagtctgccctgcaagcgataggagtggaagcccaccaggccgtcatgattggggacgatatcgtgggcgacgtcggcggtgcccagcggtgtggaatgagagcgctgcaggtgcgcaccgggaagttcaggcccagtgacgagccccatccggaagtgaaggctgatgggtacgtggacaacctcgcagaggcagtggacctgctgctgcagcacgccgacaagtgatgnnnnnnnnnnnnnnnnnnnnnnnnnnnnnnnnnnnnnnnnnnnnnnnnnnnnnnnnnnnnnnnnnnnnnnnnnnnnnnnnnngcccaggagagnnnnnnnnnnnnnnnnnnnnnnnnnnnnnnnnnnnnnnnnnnnnnnnnnnnnnnnnagtgcccagaccaaccaaggccctgacagccctgccttctgccctctgccctgcatgggcaggcatttgttccctacctgggtggcctgctcccctgcctgggccctgacttcagctccctgtagtgaagtccaggagggtgggacaggcctgtccggcctctggggatctcccaaatccccagaactcaccacttcccatggggccttttaaatgcagttaaacttccacctaaaccagattccagggggca

SEQ ID NO: 438929 - DNA, 509 bp, Homo Sapiens
ggctatagagcatttattgcaaacaaaattgaggtaaaagaagctgacccagaacccacgcccgtccaggctggggaagtctctactcgccccacaccaggccccgagcaccgcgggcccgaagcagcccccagaggacagacgggccctgcgcactgaggtagctgcatcttaagcccccatgagtacaactgcccagggctgcccaattcccagaggggaggaggagagagaggcaggcagggggagccccggcttcaggtggggcacaccccacaccctcaacaaacctcccagcctctcgggctgggcacttcctgcctggccacccagccagccatggggcagcggggtggccaccagaggcgggcgtgctggggtgcgaggtcactgctgctccaggcagtcctcggtcaccccctgggcagccagctcagccagcacgttctgcaggtagttggggtcgggatagccgtggcccgatcccgggaattccggaccggtaccac

SEQ ID NO: 438930 - DNA, 1151 bp, Homo Sapiens
cgaatcggtatgctcaggacggtgcctggggagcctctggcagcggactgcaggagccaccccatcagcccaagtccacctctgttttgttcacctcggtcatgttttggaccttgcaccaggtgctgggacgtggcagaggacaggccctgggaaccaacagtgtcctaccatggacagccagggccagctaagctaagccatcccgcccaacacagaagacatggcagttatttctcagcagcaccacgctgggtgaggccagttgttccgcttactctgctccgaactgtaaccccaggctcagaagcagccggcaaaagggggatgctggccacgccccacctctaaggccatcaccctggaggtggaagtcactgggctggagggctctccatgtcccccagcagccgccctcagaacacagtggccagagcaccaggctgggtccaggcctccaatccaggccttccctgtccctagaactggggctggaggagtgggtgctcagcccttcctgccctccatccccagcctgcctttctcttcctttggatgctccatcctccttggtttcttgcactgctctcaatcctcccaccctagcctgggggtggtccttggtcctcaggggtatccggggagaaattctctccctgtgcatgacacctgtcatccatgtcgtaaccagcggctccatcttgtggggtggtgactgagggtgacaaatgagatttggctccgtcgtggatgtggatgtgggaggaatgttgcgagtgacacgtgtggggtttctaatccacagtggtccctgcctgggccccgaaggggccatgggaaacctcccccaatgggctccgaatttagccaggcccaagccagaacttgaatttccaaaccaaaaagctttttttggccccacctctggaaaattggggccccgcccacttttcctggccaatgggggcccgttcttggagaactggccgcccccgaggccacccccacaagaccactgttcctgggcgagtctcgcccggaaacgccgcggcaaaaaaggcaccgccagcggggcccttctaccccaaggcaaaggggcgcggggcacatgccaataccccaaggagaccccacaaagggaaagcgtggtg

SEQ ID NO: 438931 - DNA, 420 bp, Homo Sapiens
ctttaaatctgcagtgacgcgatgttctcaaaaactccttcttcatctctggcagggtttctctgaatctcctttgcccactggcctacattatagaagtgctgtatgcggaccctgccattgtcatcatggacgcaggccatgaccatcatcaccacccattttcttgtctgaagagaatccaactgctacccaaccatctgtgtctgcactcagctcaaattctacatcagcccctatcatccggtagctgaggaaatagtcacaggtctctgcattacagcctggtttgccatatctaaagcatcccttagtttttccacagtcgtccactttgattttggcaaatggatccacaggaggagcagtagggaaggggtaaccctcctccgacaggtagcgcaggtcgtagaactcccc

SEQ ID NO: 438932 - DNA, 693 bp, Homo Sapiens
  misc_feature (486)..(486): n is a, c, g, or t
  misc_feature (594)..(594): n is a, c, g, or t
  misc_feature (607)..(607): n is a, c, g, or t
  misc_feature (613)..(613): n is a, c, g, or t
  misc_feature (621)..(621): n is a, c, g, or t
atatatatttctgtgtgcacttatacacacatgcacacataatgtcctttggtttatttttagaccattaatgtgaaatgaattttcgatgatttccatttattttttcttgaaatctaaactggtttaaaaagacctttgcaacaagtaataaatttcttttaaaaaatcatattattacactttaaagcatgatatagagaaggtcacaaggtgttagagaagacagaaatccatgccaatatgggagaaaagaaagcaaatggggttttcagatttctctcttaaagtggccaccttcagggaattgaacctagtgctctgtgttgctggcttgaaggaaaggtgctccaggctaagctctctgctcccacaggaagggagatggtccctggagaggctgaagacaaagcatttcttgggaatggatgtgcattgggactggggatgagaagcaatctctgggtaggtcactttggtaatgtnctagttgggaatggagtggtgacttttgggattgacccataacttcgggttgcatgttaaatggtctcagggactgcttagttgccgagaaggtgactgtgtgctttncctcacagaggtncttctnctcacctnccttcaggcctcaggttctccgggatgaattgcatggccctctcttggcagaagagctctcgttccgaaatt

SEQ ID NO: 438933 - DNA, 1015 bp, Homo Sapiens
  misc_feature (361)..(376): n is a, c, g, or t
  misc_feature (871)..(871): n is a, c, g, or t
  misc_feature (885)..(885): n is a, c, g, or t
  misc_feature (891)..(891): n is a, c, g, or t
  misc_feature (925)..(925): n is a, c, g, or t
  misc_feature (935)..(935): n is a, c, g, or t
  misc_feature (950)..(950): n is a, c, g, or t
  misc_feature (961)..(961): n is a, c, g, or t
  misc_feature (983)..(983): n is a, c, g, or t
gcacgagggaagcatgagtgctggatattttactaccaatgccaagataattcactctactcagccggcgtggcaaatataaaacttacagagcgtggctgtgctctcaccagctgctgctctgagttatgttaaaatccgctagagcagcccaaatttttctcagtttgtatagagttcatcccagccccaattttctggggctcctcacatagctacccaaaagagaaaaaaaattaagacaagcctggcaacacacctggtgaagagtagtttactagcttttcaaacaagaatgtcccttttcctaagtcactttgaggtgtctcaatctgatctgagtgagaggcgacaggagtannnnnnnnnnnnnnnnacagctttacacacacagatgtgggctttgatttccaagtaatataatggaagagaaatctcatactcccccacagtttgatgtcattaatgtgttgggaaaaaggcctctgtcccggaagagtcatgggaggtgaaaggggcacgtttgaagatgcgagcgctatcttcacatagttctccagttgtatggagcctcttctgccaagagagggccatgcaattcatcccagaggaacctgaggcctgaaggaggtgagagaagacctctgtgaggaaagcacacagtcaccttctcggcaactaagcagtccctgagaccatttaacatgcaacccgaaggttatggtcaatcccaaaagtcaccactccattcccaactaggacatttaccaaagtggaccttaccccggaggatttgctttcttgattccccagttcccaatggcacatccctttccccaaggaaatggttttgttctttccaggccttttncagggggacccatntttccntttcctgttggggaagcaggaggagttttaggcntggggggggnaactttttccttttnaagggccaggngaaccacagggggatttggggnttcaattttccttgaagggttgggccattttt

SEQ ID NO: 438934 - DNA, 1121 bp, Homo Sapiens
tcattctcccaaagtgctgggattataggcgtgagcacgtgcgcccagccttacttatttttaaatcagattttttaatcaactaaaacagctatgagttaagtacctgccctgcaaaaatttttagaaaaagttttaggattatgaaattaagaattattttccttaactggaacagttctaaaatttatctgatacttctctaacaagtgagtgatctcatgtaaccccagtttgtatcttaaaggctgcagcatagaattgagctgtataacagtgttagaactgtcaagtgataatcacagaacagtttgtatcggttttataattctcatgtcttgatcagatctgaaggaaataggcataccctccaacattctaaaaattatttatttttattagggatttgtttattaaagttccacggagctgctttatgggtcagttggggctgagtagtaggatatcttaaagacatgcagtgaaagtgaaccctgtcatatcatggtgcctctttcaaggttcctctgtaagttcctcatcttgcagaattatttcaataccaaggtatggttgaaccagctgtccagccttaactctatttagtgccccattactaatgttcttttaactggtttgtatgtgttttaactgtccagtgtttggattttacctcttgatagctccatttgtccctggtgctgcttttaaggatgtagggccatgtgatcaggtatcaagttgagtaggtacgcagttggcctggtgatgtatctgtgcctgttttatcttctcccaggaagagctgctttggtatagttgtttacttggattcatacaaagaacagggcaagcaatcttggaaagctttctgaagcttataagaaccctgaagggggtttggagggggaacagtaacaaaggctgcctttaatgtctttggtcacaaagcacatagatgtatgttctgtaaagactaaagtgattgttataccaaggcttcctgaccttcgggagagactcaaaaaagcagagaggagcacaaagtgaagttaatttggttggcttgctttatctggtttctcattttctttcaatttaaacctgaacataacaccctt

SEQ ID NO: 438935 - DNA, 636 bp, Homo Sapiens
  misc_feature (44)..(57): n is a, c, g, or t
  misc_feature (70)..(225): n is a, c, g, or t
  misc_feature (623)..(623): n is a, c, g, or t
ctttgggggcgccccgcccaaaaaaaggtttaaaaaaatttttnnnnnnnnnnnnnncgcccaatttttnnnnnnnnnnnnnnnnnnnnnnnnnnnnnnnnnnnnnnnnnnnnnnnnnnnnnnnnnnnnnnnnnnnnnnnnnnnnnnnnnnnnnnnnnnnnnnnnnnnnnnnnnnnnnnnnnnnnnnnnnnnnnnnnnnnnnnnnnnnnnnnnnnnnnnnnnnnncacttcatgcattttattgatagtctatattttaaatctgcagtatgacatcttacatagggaaaaaagcttcttcctaaaagataactattaataatcaaaccagctttaatatgattgacctttcaaggtcttgttttgctttaaacaagttaacttttagcagttgtaaagcactgtacaaaagaaaactgtgtacattctcaaaatttaatacagggcttcccaaccaggggtctgctgggatagggtatcggagaagggtgttatgttcaggtttaaattgaaaggaaaatgaggaaaccaggataaagcaagccaaccaaattaacttcactttgtggctcctctctggcttttttggggtctctcccgagggtcagggaaggcccgggggnttaacaatcactt

SEQ ID NO: 438936 - DNA, 629 bp, Homo Sapiens
tagagctgtctggattgaactaaaagaagggcatgaggttccctgggtcctgaatgttttcccaggcccctgaggcaaatagcccttatagttgttcaatagcctcattttcattactgattgttggttaatagtgtcccagtttggacctcttcctagcaattggtcttcatctatataagcaacaggattagtagcctgattttttcgtacctgttcttgtaccccatcaatccaccaggttttaaactggagatactgagagggtgaaagggaagatttagccagaatttcccaatcataagaaataagtctatttccatgagcaatggaatttaataatgttctcatataaggagagttaggtccatattgtttaactcctgcttgactgcctttcccggccggcatttgttgtaacattaccggatattgccatgcctcaagatctccctgttttctggctgtagcaatggtctcatgcagtgcactatcttgtccactaggtggtaccgtaagatcaaacgccatcgccgtgggttgatatagtgccttgctatttggcacaggacgcaccgcctgagatccatactgaacctctggagacggcggatactgagggtgtgctc

SEQ ID NO: 438937 - DNA, 513 bp, Homo Sapiens
  misc_feature (237)..(263): n is a, c, g, or t
  misc_feature (272)..(368): n is a, c, g, or t
  misc_feature (411)..(427): n is a, c, g, or t
ttttttcagttgtgggtgaagtttattaaggcaatactgaataccagagcatttcaacaaggcttaccacacaggccccagtacctttctactctacaatgaggctcagaagctcagtgtaccaccccatccccaggaggcccacttagaccagaaatcccaagtccattagctacaggctgatattcagggacatcggtgtaaacaaagaagtgggatatgaactatatccctgannnnnnnnnnnnnnnnnnnnnnnnnnngagactaannnnnnnnnnnnnnnnnnnnnnnnnnnnnnnnnnnnnnnnnnnnnnnnnnnnnnnnnnnnnnnnnnnnnnnnnnnnnnnnnnnnnnnnnnnnnnnnncctaactgggataacagacacctggctaccatgcccggctcannnnnnnnnnnnnnnnnagtagagacggggtttcaccatgttgggcctgggctgggtctcgaacacctgacctcaggtgttccgcccgcctcagcctcccaaa

SEQ ID NO: 438938 - DNA, 437 bp, Homo Sapiens
atgagccactgtgcccggcctttatgctgagttttaagggctgtatgagacaccaggtggtgggagggagctgttttgagagcagggaatttaggatacttaggaaattagaaaattagagaagtcataggatcttggaactaagggagaaccttagagtcctgtggagcagaacccagcatttgtatgtggaggaaacggagggcccagagaagttgtgacttatccgggtcactctgcaggtctgggtgtcccacccgagtccatgtcagggctctttctgcacaccaagccccatgcccacctctgtgtgactggctgtggtgggaggggcctcctaggcttagaggtgctgggatcccttttcagtccagaaataatgagcttagagggtctggaagtagcatgggactaaaacccagggaaggatccacagg

SEQ ID NO: 438939 - DNA, 1155 bp, Homo Sapiens
  misc_feature (1126)..(1126): n is a, c, g, or t
tcttgtttgcactttgcttctttttctccccttcgtcatcctcattgacccccaagagagtaaggatgattccagtctgagagttgacaccaacagctgtcaccaccatccggccagaaccttccatgacatgggtccctgagagcaacatggggtctttgtccagggacttcttgacatggtcagattcccctgtcagagagctctcatcaatcttcagatcattcccttggatcaggattccatctgcaggcagcagatcaccgtatttgacttgggcaatatcaccaaccacaatctcagccacagggagctggatgagttgaccgtttcggatgatggagaacttttgctcctgttcaatgcggcactgcagcccccggaattgcttctctttgctccaatcattaaaggcagtcactaacaccacgatgatcactgagaaaaggatggctgccccctcaatccagccagcttgtgcctcattttcatcttctggggtagttgcgacttgaccacacagttcattttcttcaccagcagggcgataaaaggacaggaccagggagatgatggctgcaatctccaggatgatgagcgtgacatcttgaagagcttcccacactaattctaagaaagtcttgggctttttggggggggatcacgttgtgtccaaacacctgcctacgtttctccagatctgcagggttcccagacagaccttccacaggggaggttttcagtctactgcagagattctgtacacctccagtaggtggacattaatctgggtcagtgcatcccttgaacgcagctccatgagcttcctcagttccattactgtgcagccaaagtccccttcacggctctcggccatcgagttggcaggcaagacacggtctgatgggttcgtcattttgcctgctgttagcaagccccttcaaccagagaagatgtagcgtttcccttcaactgaccagtgtctcctgcttccctgtctcaacttcttcctacttcttgcttctctgggggcccagtgagggaataaattgaatatatcttgtgcaataagctcccgagtagccgtccgaagtctagatcctttcttccgtatgaagtctggcancgagaggaggaagaggatgggggaactga

SEQ ID NO: 438940 - DNA, 345 bp, Homo Sapiens
gcagggtcctggccctgcgtcaggccgctctttcaaagctcgatggtatcactgagggcgctgcgggattccccaggcttgccgcgcggctggacctctccctggccgtccccctgccgagcggcggtagaatcaggggctggggtcggggcaggcagtagctgtaccgtgctgggcaactcatctaggggcagactgtccactgatgacagcccgtggcgccaggggttccaactgatcttgagtgaacccctggagaagctgtcgagggagctgccagaagccgcagcggctgccccgtcgggtgcttccactacgtgctgtgggaccggcccgcgcacgcgc

SEQ ID NO: 438941 - DNA, 383 bp, Homo Sapiens
  misc_feature (332)..(332): n is a, c, g, or t
  misc_feature (342)..(342): n is a, c, g, or t
  misc_feature (355)..(355): n is a, c, g, or t
  misc_feature (361)..(361): n is a, c, g, or t
agaggatttatttggacagggctgtgctgagagtcccaccctcaccccacaatgggcgggggcactggcatcgaacaccaagctgagtgagaagggctcctccaggcctcgcagggagcttgctggcttctcctggctcacagcagactgggcccgactcccatcggaggaaggccagcatcctagggcagccagtggagggctggcagagggctgtgcctgggaggtcactgtgctatcttccaaccacactgtgtgagtctcagataccatatgtggaatctgcatcaggaaggtcagcttgaggtcattttaaaagggattcttccggnaaaaggagcnccgcatcgggcgncttaanccggcgtttcggttcatcccga

SEQ ID NO: 438942 - DNA, 467 bp, Homo Sapiens
  misc_feature (354)..(354): n is a, c, g, or t
  misc_feature (364)..(364): n is a, c, g, or t
  misc_feature (380)..(380): n is a, c, g, or t
  misc_feature (427)..(427): n is a, c, g, or t
  misc_feature (443)..(443): n is a, c, g, or t
  misc_feature (454)..(454): n is a, c, g, or t
gctcaaaatgctccgtttattgctctattcaatgaccacgagcgaattataaaaagacaccaaatgtctctgtctgccgtgggataaatatttaaagtcagcaataaaaacacgtggctccaagataatacatgttgccaaagagtcatgcatgccctcctgatgggctctcaacacacgcatggacatgggaacacacgcagagcaacacgcagtgaggacttctgggaaggctttcccacagtgacacagaaaaatgtctcacgtagatctgggctgagtccccacccaaaccttgagctcccctcccctccccaacagggcctagatcctctgggttctccatgccccatntgccccctancttgccagtgcctcanaggctgggggaaccttcctgagggcattttgacaaccagagggccancttgggttttgattgnccatttccaanttaggagaatttt

SEQ ID NO: 438943 - DNA, 2016 bp, Homo Sapiens
  misc_feature (643)..(643): n is a, c, g, or t
  misc_feature (648)..(648): n is a, c, g, or t
  misc_feature (655)..(655): n is a, c, g, or t
  misc_feature (657)..(657): n is a, c, g, or t
  misc_feature (933)..(933): n is a, c, g, or t
  misc_feature (1099)..(1135): n is a, c, g, or t
aaaacaaaccagctttaataccaatatagttctctcttaaataccgtgtttcccaggacaaatgcaggggcaggctcttggcagaaagagtagaaaggaaatgtggaacaaaatggaatggatggcccaggcccagggtccctgccttgggcactagggactgggctgcctcggggatgggggagtgacagcagctccccctggtccagttattgcagaggcgtcgggggctcccctccctccccaggcctgaaacatttctcaggattacttctgaccttcagccccagcagggccagggcctgggctcctctggtctaggatgggcccctttgcccaaaagggcctgcagctaaggcgtggggttgggcggggagcccctggacaggcccgctgctcttagtaggtgctctggtggcccgtgaggatgtagaggttgctgtgcgcctctgggttgtcagtgggaatgctctccaggatgatgtctctgtgggccccaagcactcggaagatccttgtttcatctgtgatctcctgggtcacctcattggtatccaggcttcggccttgcatcccatggctccagaaggccagcacactgtcctgcaggcacaccacagtctcgatggggaaatcaaaggtnagctnaggtgcnantttggccgtgggctcgcccctgcatgttgacaatcctcacacagcgttcaaagctgactaggattgtgtccctgtccacctggatcacctgctgggccgagcctgggatcccctcaggtgggatgaggatgtcgggcgtcaggccagcctccaggggcaggacatggaacaggacgcggcagccggggccctcaggcccctcggccccaagacacacttgcggcagctccttcccatccagcaccagcggctccagcatcccagctgggctgggcnagagggctggagaagttcttcagcagcagaaacttctgcagcggctcataccactgcagcaggagcaggctggtgggcagggcggccagcaggaaggtggcacccgtgtagggcgttccgcactggcaggggagcaggcagtgggcaccgggctgggcctgcgctnnnnnnnnnnnnnnnnnnnnnnnnnnnnnnnnnnnnntttcttacccacacgacactgcaagcagcctttggtgtcaggaatcttggtggacagagcaaagcgcctggggatgatgcgctgggtgaggcggttggtggggatggagaggggaacctgttgctgtagcctccgctgctcaaacaggcctgggaggtcatgggcccagatgtgcgtggatttccctgagagtgacagcagcacgttgttcacgcagtagagccaggagcagcgatgtgaaatcagcttctccagcgtatcctcatgcagttcatgcaggttgagtgtgtagatgccttcctcggcccctaccaccaggaactggtcccgagtaacagggtgaatcccaggtgacagccagcgtggatccgcagggggcagccattgaagaccttggagaagcaggcgcccatatgcaccttgggagttggggggagcccgtggcaggatgacctctcaggatcctcccgctgcttcatggtggcccaggccgtgggcagcagtggggagctgttggggcctgaaggaggtgggggcagggttcctgggggactggacagaggctcctctgctggagggtcagtggggagtggccctaggaacggggcccgcttgatggttcccatggtatcgtctggggagtccagctcctggaattctgaggctgaccgaatagtcagactcctttcctccagggcctcctggaccgactgcagcaggctcccactcaactcttcctttcccagtagtgtccactcttcctcccacggctcattcagtgggtcagtttccttcctgcgtggggcgccaaatttcacctggtgaaactggatctccgagggggtcctctcggctgggccgtgctgcccccgggagtgaat

SEQ ID NO: 438944 - DNA, 588 bp, Homo Sapiens
  misc_feature (46)..(46): n is a, c, g, or t
atccagtttccccaggtgaaatttggcgccccacgcaggaaggaanctgacccactgaatgagccggtgagtgggcaggccttgaggggaaggtggtgcccagaggtggggcagggaggtcggatggaggccgagcagctcaaatcaagggagatttgaagctgggtggcctcgggccttgggccttggactgtccaagcaagcctgtcctacccagggccctggagggttaggggcatccttcctgggccaagttcttttaggtgggtgtctggaaggtagcacagagaccctgcctttcccaaaaggaggccgtcatgtgcctgagccctcaccctaccctgctcagcctcgttttcccacctgtgtgtccccagtggtctgactttctgtctctgccctcatcggctctgtcactggtctctcctcaccccccagcctgtctcttcctccctcgctgtctgttgccctttctttcacagtcttcagctctgcctcccactgtctgtctctctcatcttctgtgtgtttccatctcacctttcccgtctgtctgtctgtctgtcgggctagtcgggggggtaccga

SEQ ID NO: 438945 - DNA, 1300 bp, Homo Sapiens
  misc_feature (352)..(447): n is a, c, g, or t
  misc_feature (594)..(608): n is a, c, g, or t
gcaggagagtagtggtagttaggtgggatgagggatgagggtggtgggtgctcggtgtgcgggtcgcagatagtgatcggcggctgctggttgataggagcgttgaggatgtatgatgagttgagtggatcgagatgtgaggtgttgtggtgttgtgagtagatcggtggcgtgtggggtagactcagtgtgggtggggtgagtgcgcgttattgcacggtggtcccgggggaaagaaaagttgtttcatagaatcagtactccaggaacgcccaacctgtgtccagccgcgcgcagcgaattatgtcgagctagggtttacacagtagtgcgcgtgaaaagtgtgaaaagnnnnnnnnnnnnnnnnnnnnnnnnnnnnnnnnnnnnnnnnnnnnnnnnnnnnnnnnnnnnnnnnnnnnnnnnnnnnnnnnnnnnnnnnnnnnnnnnaggtgtgtcccagtcgcgacgttggttaaacgacgggccagtgcctagcgttataatatcgactcactatagggaccaccttggacaagaaaactgggtaagcgtaagcttgggccccttcgagggatactttagaacggccgcccnnnnnnnnnnnnnnnccgggctaggtctgctttttattggccacgcatccagccgccagcctcagggcacacacctggcagggggcaggctcgggtaggctgccctcgctgggtgggcagtgagggggcagcggctgctgggtgtcaccctgcagcccctcaggtggacctgtattgtccccagggcctgcccacgctgggcagctggcactgggaggggttttctgttgatgtgatggccaagtttcagctgcagggcagaggcctggcagtggcagcaaaggcagaccgccccccactccaacttcaggggctggacatgctggaacgggggccagaccccatgggaggggaccctggcctgccatggcactgcctgccagcttacccctgcctagggcccccaactcagccacctccaagcagtaaagacttgcaaagcattgcattttgattaaaccttgctgggctgaagggcaggctgagctgtggtggacactggcaggacgcagcagcgcccccgactggtcccttggcatggctgcaccgggcgcatgcgggtgtgggccagggttgcctttaggaagcacggtgggagtctggcacagtgcaggcggtccaggagggcaccaggcctggcagggcactggtgcctgtcgaggttcccagcgcactactaccccaatgaaggctccacgagggacccg

SEQ ID NO: 438946 - DNA, 452 bp, Homo Sapiens
  misc_feature (407)..(407): n is a, c, g, or t
ggaagaaactgtgtgtgatccagtaaggcctcagccagggcccaaggcaaagttgagagagcccaggccacaggacatgctgccattctgccaagagaggctcttctgggggccaggctgggactgggcccggaaaccaaaactccgtgccttacccagccggggccctcctggagccttcttggggtgttgtggctgggaacccgacaggcaccagtgccctgccaggcctggtgcctgctgggaccgcctgcacgtgccagcctcccacctgcttcctaaaggcaaccctgccagtgtccaccacagctttgcctgccctttagcccagcaaggtttaatcaaaatgcaatgctttgcaagtctttaattgtttgggaggttggctgagtttgggggccttaggnaggggttaagtttggcaggcattgcattggcagggccagggtccc

SEQ ID NO: 438947 - DNA, 720 bp, Homo Sapiens
ttctggagaccacagaactcaagtgtgtgtttctcctcttttgggtcccctttaagtagttgggatattttggacctggagataacaccagttacccatccttaccagggaatgttgccatcaattccagttgaaaataatagaaaagactgaatttttatatgcttcacttaggctttcatttgagtagactctaaaaattctgccttgcttaagttctaacactgcctctcagatttcagttttggacattgcacaactaagaccttttaaacgcatttgcttgctaactcggaagacacatagtctgcagcaagacattcctatattgaagaaatgagagaaaattttatgctgcatcaggtggagagcaaggctcaacggtggttgcattagttccctcggaagtattgaaaaaactttgaaatggaagacaattttttgcacctatgttctggagtaccagatgtctgggttctttcttctgccttagataaaatgatcatgctcagtgtaacaaagggaattgtttagcttaccttaatcttgatatcagcctctacagaccctttattctaagctatcgagcttcttgaatgcattttgttgaccacgagtgaccctaagcatttggggacttgtcactggaagttggatgagcacttggtgctggacaagcattgcttacatactttgctccagaattttgacaccagtggc

SEQ ID NO: 438948 - DNA, 1527 bp, Homo Sapiens
  misc_feature (126)..(126): n is a, c, g, or t
  misc_feature (256)..(256): n is a, c, g, or t
  misc_feature (368)..(368): n is a, c, g, or t
  misc_feature (372)..(372): n is a, c, g, or t
  misc_feature (385)..(385): n is a, c, g, or t
  misc_feature (614)..(670): n is a, c, g, or t
gggaagtaccgggcgcggggtacgggcgcgaaaatagtgggcgggaaataaatagcggtgccggcgcgagaacagatatcgcgcggcgccataactgagcgtgtgtactggcgcgtatctcatgcnccgcatagtgcataaatagtggacaataatcgcggtatatattctgcgcgcggcgcggatgaataataggcgcgaatgcgcggatctaggcgcgcgtccgcgcccggtataatatagggcgtgatccaancgagtgatggcgaacagcgtggacaacacgggtgggtataagagaacggcggcggcataacggacacactagagtctccgcgcgaggagtacgaggggggcctacgcggtanaganagcgcggaacganacggcgcgcgcgccttaaacgcgcacgcggcgcggctgtccacgaatcggcgggcgaccagcgcggcgacccgcaatacgcgcgcaatcataggtggaaaaatggagaggtggggtggtacggcaaacggggcgggcgacggccggttagcggtatcgggacgcggaataaaacgacgtgagatcggcgcgtgcggggaaaggtcttccaaatgaaggtaacggcggannnnnnnnnnnnnnnnnnnnnnnnnnnnnnnnnnnnnnnnnnnnnnnnnnnnnnnnncgacgaaggcggaatgcaggaggggccggcggaacaggggtggttggagagggcacacggttgggggcggtggttcgcagaggacgggacgggcgctcggtgttctcgcctgatcactcggcaaggctttcgagtggtgtgggagcgggagtccgcgtgcttcttgttttttggtaggtttctggcagagttttgggatgggtatgtgcaccggtggtttgcgcgcactcttcgtttggagtaaatacatttattgatacccatttcatatatagttcaatgaaataatctataaatataaaaagcatttttcttttggatatcaccatggtccatgtaaatactcaagtcagaatcatctgcaggaagcactccaagtcacactgttagctttacagacctgaatatacatattgcattaaacagtggcacttatgtactcaagtggtccagtggctttggaatatatgtctactgggcatgtggaatagaaataatgtgttaggtttaaatcaatggaaagggtatcaaccatcaacaaaaggcaacaattatggaattcatatcctagggcaaaggaaagtaccacagttgacacttggtgtcagaatactggagacaaagtatgtaaaacaatgcctgttgcagcaccacgtgctcactccaactcccagtggacagtcccccaatgccttagggtcactcgtggtcaaccaaatgcaatcaagaagctcgatagcttagaataaaaggtctgtagaggctgatatcaagattaaagtaagctaaacatttcagtgacgcaatgagtttctcccctactgtgggttcgtgtatcctctagagtcagctatcac

SEQ ID NO: 438949 - DNA, 422 bp, Homo Sapiens
gctttgatagctagttgtctaaaagtgctgtttattaaataatccacctttttccccacttaaaacatccctcttaccatatactaaattcctgtagccctgggtctgtttctggactctcccgtctgtctgaccccctccaggtcacactgagtgaggtaatggtggcgtgagaatcctctgggaatctggcaggatcacccccgagcagtccaccccccaactcattatcatcgttcagagtggtcttagtgttctcacacattcactctgccaaatgcactttaggaactgtcaaattccaaagtttcaatctcattggaattacactgaatttatcagctgatttggggaaaaccagtatgtggacaggaacatgatgtgtatcattgggttgacttacagaatactcttaacaggtc

SEQ ID NO: 438950 - DNA, 831 bp, Homo Sapiens
  misc_feature (744)..(780): n is a, c, g, or t
gatacctatcaccaccaccctggatttcctagccccagggtgagggctatgaggggtcagggttcaggttccccaggaccctagtccttgtccccttccctggtgctaaataaaagtgaataaatactaaataaatacaactggggcccaggccctccctgccttccccctccctcctgtgacccgcagggcagagggggcagtttagatggagggctgtctgtcagccccttccatccactaacccatcactgcctcccagggcaggaaaccagggcagggccagcctgcgcattagggcagagaggaggggcaggtctcacgcccacagccccttcccacttgagtcttagcatgaggcagcaacagaagctctctctttctcccagctaagtccgaggccccggtgcccagaaagggcagccgggatagtgaggttatttcctgcccgcccaggggcgccgccgaaggatctccagaatctgtgctcttcggtgcagccagtcctggggagtggggcgtggcgttgaaggggtcggccggggcacgaagaagctgtatcggaggcgtgtgtcctgggggttgccagccactaggacttgcagtgtcaaaggctgggccagtggcccatggcctgacagtgtctctgaggctgcagtggccccgctgtagcgcaagctgactgccccaggcagtaccccatccgctctcgacgaattcgagctcggccgatttggcctgatnnnnnnnnnnnnnnnnnnnnnnnnnnnnnnnnnnnnncgccgccaccgcggttaatccaggtcgccctatagtgagtcgatcaggtct

SEQ ID NO: 438951 - DNA, 511 bp, Homo Sapiens
ttttttttcagtttctcaacttaactttatttcaataatttaatagaaaattaaaataataaataatatgaaacagactgataacgctgagctgggcaggcccaggccagtctagtacaaagttaaggaggtagggaggatggtggggaggagggggcggactaccctgcaggacgcgggaggctgctcagactgtggtgatgtcaggaagggccgcacactttggcatggacgatgcactaaaaaaagagaaagggaattctaaatccctcttaaccagctggagagggaaggacgcagggccagggtggggacaagtgttggcttcggaaggctctgagtggtggggccggaatgtaccatgttgttagcaatggggttgggacgggtggagaagggccaaagtgagctgtgccatgcaatgaagggacagaggaggacccacgacttggccagcagagccggggcaaaagtctgggaaggggagggaaagagagagggactgggtccc

SEQ ID NO: 438952 - DNA, 593 bp, Homo Sapiens
aaagatattcatcacagcattatttaaatagtggaaaaatcaaaaaccgtcttaagtattttacagtagggaaatggtcagataaattatagtaaatggacaatgactaaatagtacaattgttaaaaacatgtttctgagaaactcatgacatgggaaaatgcttaaaatatcaagggagaagacgatgcaaacggtgtgtgtcggatgttcctattttagtttaaaaagtgaacaaatggcagggcaggatatacggcaaaatgctcacagtggtcttctctggccggtgagcctacagctgatcttgtcagagacaaacgttagttttactgagtcacccagagccctgtgctggtgcctgagggtttgttccatgggacagtctccacaattcctctggggaagggccacaaatcccacagtgtgtcccaagagggctggagtaggcggagtccccagcagctgtggcatgaccagccatctctctcaaaacaattgttaacaagccttctgcaagttaaggttccacatggtagccgtggtacagaggcatttctctagggtgggagaggcttgtgctctacaccagg

SEQ ID NO: 438953 - DNA, 396 bp, Homo Sapiens
gtgtctcttttaaagaaaacatactttattttggtctaaattgtgaaaatacccaaaacatttgatagaaattgaactctgtcaacagtgttatttatactaagatcaggacagttccttgagatcatactgttttattactaagtttggcctttgttttacaaatgtaatgttcatatttatttgaattttaagattggttaaatgttaatgaaaagcaatccaattgttaatttttagtagtgccttttctctgtatgccttaattttattttatattaataattcaagttacccaccaaaatgaagattttttccaaaatcagtaggcttcacaagttcatttggccttagactgtgtattggtccttaaatgtttcttaatgcctgcctcct

SEQ ID NO: 438954 - DNA, 1109 bp, Homo Sapiens
gcggccgccacagaggtggtgaacatcttgcggtccctgggtgtggtcttccggctgagcaacactgtgctggggctcacgctgctggcctgggggaacagcattggagatgccttctcggatttcacactggctcgccagggctacccacggatggcgttctccgcctgctttggcggcatcatcttcaacatcctcgtgggtgtggggctgggctgcctgctccagatctcccgaagccacacagaagtgaagctggagccagacggactgctggtgtgggtcctggcaggcgccctggggctcagcctcgtcttctccctggtctcagtcccattgcagtgcttccagctcagcagagtctatggcttctgcctgctcctcttctacctgaacttccttgtcgtggccctcctcactgaatttggagtgattcacctgaaaagcatgtgactgaagccgcttagtgctgtggcctcactgcaggcaggagccccgcccctcctgccgggggaggcccagggaccggagcatttctgcaaggcccttgtgggcacgagagtgcggcccttgctgctggagatctgaggtcactgctgtgagctgggagaactgctgtgtacctcttgctgccagcacccaacagccttgccgtggggaccttggaaacctggctttgctctggacaaagggttccagagagaagctagaagtcccccttgaatgacccccagagcccctctgagaagggctggagtttggggggaaggggatggctggatgtgctccaggccatgctggaggtacccccgaggcacaggcactgcccgttccccttgcctgggcttcagggcttctggcaccttctcaggacacaagtggctgcccaaccctgactcaaaaaatgaaggtgggcttggacccctgggaatcagggcccccgagggctggaactccagaagccccaccatctgccacaaaacagaattcgaaaactaccttaattttggaattttctcccttggccacgttaattaaagccaaaaaagcaccgggggggcttaatccgtgggcaacccaactttcccttggaacccacctggctttct

SEQ ID NO: 438955 - DNA, 1362 bp, Homo Sapiens
ggctgtgggtccctaatcaccagtcctttcacttttccccaggggttagcttgtgttcaaaatgcatatgacctgcgctgagaggacaacagggggtcaggaacctggggttctctggggggcagactaagacgactccgggatccagacctttctgcaccttcagatgggagctccaggcagctaaggggccgaggagaatgggcagagatcatgctacaaggggaggttctggggatgaggcagtaatccccaccctcagtacaggtctgggttcgccgaactccttgagcctcagtcctttggcggtcccgggctagggccacagcagcatcaaaggaaagactacccccattcctccaagaggatcgagaagctcgggacccccaagccctttctccaggagtcccatcaagccggccaggcctcgggcatggatttgcaggtgccacatgaatcttgctacacattgcactgggcatcttggcaaactgtggcttggggggcaccacaggcacagagcggacctgttggacctgaaccagagtggaagctagacgcatgcccacgccacccaggccaagagaacaggggcatagacagccgtctggactgggctgcccctcaggctccatctcctctggctgaggtggctgtggggctacctcttccatctcagaagagtgaggattgccctctttggcacagtcaacctccagggacgctacacctgaaccttcagagagggtgtcctcttctaaatagtaccctccagccctctggtctcttccctactcccttctctcaatctgacttttgtctcttggcttcccccagcctcccctctatcctcactggcctttccagcctccaccttggtctctggacttccctctgcctcttccctgatgtctagcctgcctccagtctcagcctgcttgtcctccccaatttcgcagcatgcctgctcttccccagcctgtcccagagcctgccttccacatcctgctgcctctccctccagactccctgaacccttccagattggggttttaggtcccagaaggggacttaggtcatcataggcactcaggaaaacttcctccccattttcctcctcaacttcaggcctggggccagcggagtccacggaacagcagcaggggcccaagacaaactgtgcctaatccagagacagttcatccaggggtggctccacagagaactcctccacctgtaggcacagcattgtagactcaggacacaggagccctgtccaccctgactccatgccacccccaaacccagcacggctctccttacctgaggcccaactcccaggagctcctccagaccacatga

SEQ ID NO: 438956 - DNA, 853 bp, Homo Sapiens
attactagatatttgtatgttaaattatgtgggttttcaaatttgtggagaataagtaatagtgacattagtttaaggacagtgtttcatcagggcattattttaatgaatcttatatttaaatgtctgtttcaggaattcatgtgaatctttctttttatagaggacccacaggcatgaattatttactcctccggtgataggttctcaccctgatgaaagcggaagcaaattccagcttaaaacaatagaaaccttattgggtagtacaaccaaaatcggagatgcgattgttcttggaatgataacgcagttaaaagagggaaaattttttctggaagatcctactggaacagtccaactagaccttagtaaagctatatccttcacttgtctgtattttttaaaatctgcattacgtgaattggggaaattgattatatatccttctaaaatttacctatttgggttctcaatgtaacttctctatgttgctggtgtaggaatgtagagatataatcctaaacagggacagaacaactttaattttctcttatttggagaatctagatgaatcactgacgaaatttatatcatggtaagaatgatccaccctgtcaatattaccaagaattaaacatgaggacatttaaaactaaaattttttaagctctttctaagctgtggtctattcacagtttcaaatgggaagtctttaaatttattatttagaagccttgttggactcaaaatgtatgttgactttattactgcctcaagaatagaattattttcctcaactgttgtgtaccagttccatagtggtttatacacagaggcatgctttgtctcc

SEQ ID NO: 438957 - DNA, 3594 bp, Homo Sapiens
gtatctttaaggcaattagaagatttattgaatattggttaaaagtagattgacaatgacattaaagaataaagtgtaatttatttggtgctactttgtgaatgcttccaagtacaaatcatctcacaataccatatacaacatactttcaatcacaactcaaatataaaataacctacaaaatcacattgctataatcaatatacaataattgtatttttaaaagaagaaaaaacgttagcaattttaagttaagttgcagtaacttttttcaaataaaatattagcaccataccagataaaataatctaaaactattggccttctcattcttcttaaataactaaatagaaactttttttcaaagcacaaatattaatttgtaaaatcagttctacagtagttaatatttctttctttattgtttcttttttgcatttttccctataaggaaaaatatgaattaaaaactttcacgggatatgaaaatcaaacatataaatctgacccaaccagtactgtccttcagcaatgagttccgacagaagcaaaagtggacatttcacggcgtatggtactgaaaggcgagagttcgagttccgtggtgtactcgttgtcattgtcatcactggtcaccgttgaagacttctgaatgcattcctcacagcaacagcagcagcactccatgaaggcccgactgaagggtttgcagagacagaaaaggaggactggggtgacacaggacttaaagaacaaaaggaactggctgatgatattaaggaggtccattgtctgctgtgaaacccctgtagccatgtaggcagtaacaatgttgcagatattttcaggaataatgcaaaatccatataaaatggtcagtgccactactgtacagttcatctgactctctagttgaatctgccgtttattccctcgggtacaggctttctctgctttgcggattttcctcgcagtcactagagagcaggtgatggtgaaaagcgtgggcaaacaaaagtaacagccaaaataccaccacagtctcgcactgtcgtaggtgagggctagaacatagatggtgtctggtaaatcaggagagatcttaataatgcacctttctgccggagctcggccactaaaccccaaatcctccttgctcagctggcggagaacaacttctggaagtgctaacaatagagctcccacccatataacagcaagtttggcagttgttgaggaacagttttcgatcatttcgtagtacatctgtacgttggtggcagcacggaagcggtctatgcacagagcacataaggtgaaggtggtgactcccagagaagcgacctctatatagggcacgatcttgcaggagaagtcctccagcagccacttcttggtcagctcgtggaagatgaccagcggaaggcagaagaagatgatgagaaagtcccagaaggccaggttggccaagaggggattggaaatgcttccgcatgtagtagttgtggcacaacgatgcacatcaccgcccagtgttgcccaatgatgccggtcccgaagatcacccacggaccagacacatgacccgcgtaggcctcacataggactcctggttcagcggttagaaggggttcttcaagtctcacacgccgtttcgtgctgtttccccggcggggacaccccaggctcatggattccttcaccccaaggatccattctgggccagcagcccggccacgggagtgcaattgtccacccttcgtgccccagccagtccattggccgtcttggacaggggcttgtggtgggaaccctggagtttcccggctctccttggccagtaaaaaagatcgctggctccggggactgtcttcacactctgctccatggctacgcccggaaatgccagcgcctctgggacccttctcttcctcctctgagatctgaaggaagagctggagggccgtggggttccctctccccaaagtttcagaaggctcctgaccccgagcacctttccacctccaggggccaggtggcctggttggaggtcccgggggtccggctgccgacgcctccgcccctctgcctgcagccgggtcacggcccggggccgccggcaggtcccaggagggtcccgcaagaaacgctgccccctgctcctccctgggtgctcgggctcgcagaacgtctcttgcagaatttcccggtccccaggcgtccctgccgcggcgctggatcactgtaggtgcacagctctcccccagacaagtttcgtttctggacgcaggggcgaccccgagggcagaagaggcagacaccttgagcagtagcagaagcagtagccgcgacatgcgggcgagaagcgcgcccggggctcgcatggcttggtgagggcacacccggcagccgcagctcctgcttagttaggatcgacacctgctgccgaagttgctgctgagagttaggcacatgtcacatactcacccccgcccgggtagcggggaaccggagattagggtgatagcggaagatcggtcttgggggtcacacacacgccccctataatccttcctcctttggcatcttgtgcatttctcagccaagttgagtcccagcaaggtatgccctccaaggttcctagagggaataggctactcccggtggctgaccttgaaaagttgcaatcaacacctgactgttgattactgttgagactcgggggagcccagacgaagccccacactcctcactgcctttgggtgggggtggtggccttcttggtaacagttgctctgcctatttacatcctttcgacagcgtttgatccagttgcaagccgaggtctctagaggaaaagaaaaacaagtccccctcccccagacgactcgcagtcacaaccccgctcccagctcgctggaaacacgttgcaaacagtccgaagcagcgctgatgcgccggcgaaactcttgccccacctaaccccagcgacttgcgagcctactgctgccgaggagaagcgggattccaaccccgcggccactgccaaagttgcttctcctccagctcaaagttgacgacggggcgaagcaggctgctggacggcgtgccgccgcagagaaggaaatcgtggggagaagggggagaagagggcgccgctcgtcggtggacagtgccgctagccgcgggagctagtcactgccacagcgggctcagcccggacgggaagggtggtgcctggaaccgccgcgggccaggcagtgcgcggccgggaaggggaggtggcccggcctcgcccccgcgctccagccgctgcgcgcgcccgcgaagctcgactctcggctcgttgcctcctcccactccttcgcctcctcctcggagagatactggtttgtggggagacgggatccctggtggttcaccactcactaaacccacacacgtttcattcaagccatttgtagcggcttccactcggaggagctgggagggaaccaagggcggaggcgcggagcctgcgcggctcgaggctagggatgggcgggacaggttattccccagctgtcgatccctacatcccagaccgtaccagcc

SEQ ID NO: 438958 - DNA, 354 bp, Homo Sapiens
atctgtggaataatctgcgggctaacacggataactcagtataagaaccacccagttgatgtctattgtggctttttaataggaggaggaattgcactgtacttgggcttgtatgctgtggggaatttcctgcccagtgatgagagtatgtttcagcacagagacgccctcaggtctcttgacagacctcaatcaagatcccaaccgactttttatctgctaaaaatgggtagcagcagtgatggaattgctcatacagaaggcattctcaaccgaaaccacagagatgctagctctctgacaaatctcaaaagagcaaatgctgatgtggaaatcattactccacggagcccc

SEQ ID NO: 438959 - DNA, 442 bp, Homo Sapiens
  misc_feature (419)..(419): n is a, c, g, or t
gatccctggcctctacccatgagatgccagtagcatcaccccagttgtgacaaccataaatgtctccaaacatggccaactgtcacctggaagacaaactcatgctcagttgagaaccactggtctaagagtaatcccatcccttcccaattagtggttcaggaataggcacgtgacccaatcctgttgaatgggtcatgaggaaaggcctgctagtaagttcttggcaccttctcattggtgtcagagagctaaggggagcaggctgtcactcttccactggatgtgaacaaggaagcacacaccctgacggccactggcagccatcttgtgaccatgaggatattcgcagctaatgctgtggacagaggaagcctcaccctgatgtcactgttggcaagctgaatcagccagctctnaagagggcctagactttgaacca

SEQ ID NO: 438960 - DNA, 1297 bp, Homo Sapiens
  misc_feature (384)..(409): n is a, c, g, or t
  misc_feature (863)..(863): n is a, c, g, or t
tccttttaaaggggggaagaaaaaaaatgccccccattccccgttttttaaatttaaggaaagtgttaaccctggcaaggaattatgtttcaaaaaaaatttttttgaaagggggaccccaatccagaaacttcaaataaaaaccttatgaaataaaaaacttaggggcttatattattaattgtaccaattaatgagttaaaaatgccacttaaagtctattaaagaaattggaaatatagttctgcaaaggttattcaaagaatattttttcaaatgtacaaacaacaataaaaccacacaaaaaaagccttgggcaatgtgcaactttaaccacttttaaaatggattcatttataccatttcaatgcaaagagaatatcnnnnnnnnnnnnnnnnnnnnnnnnnntcttcagtgtctgactcacattttgtccccaaatcttcacatttaatagttacattttgaatgtataagctagagttctaaatgtttctcatagtttgtgtctacatttatcataagaatcatatttgaaaactactctgctaagaactaaaactagtacttcaaacgtttaaaaataaaatcttcacaaaagttcacaattgtgttcatctcaatgtccataaattactaaaaaagaaacaagtcacatgttcagatactttttctcaggtatgagtctattctgatgtgtggccaagctgcaccttcaatatttggcactgacagtctatctagacacaatttatcagcagaaaactgtaagaaattctataaacctttagccattcaaaaccatcatgtttcattttctcgtcctaacatgcaattcagttattccaaagtcatttggggnttgcaaggaggtgatttaggtgactggtacaaaatgaagcttatatgaaaactggttaaggattcaaagcacactagctctgaaatattaatcttaacaccagacataaatggggaggtatgacttgcacaaaatactttcaattactttggttacactcttcatgatcttgcatgtttagctgcttgcagtgcatgcatgcatcctctttgctacgtcataaacataggtgacgtctggtcgcttctctggatctgggttgatgcacatattaactaactgtcggagttcttctgaatagtgatctgaaggaagaggtgggtagtcacactgttctatcttcttacacagtgagtataaattcattttgtcaccatagaaaggaccggacgcgtgggttgacgatatcccggaaattccggaccgtaccagcc

SEQ ID NO: 438961 - DNA, 1089 bp, Homo Sapiens
  misc_feature (53)..(88): n is a, c, g, or t
  misc_feature (93)..(93): n is a, c, g, or t
  misc_feature (429)..(437): n is a, c, g, or t
  misc_feature (509)..(529): n is a, c, g, or t
acaggttactgaattgtctacctgccagcattctgatatagcaacaaaaagcnnnnnnnnnnnnnnnnnnnnnnnnnnnnnnnnnnnntggcnattgagctctagggtggatgagggtttatggtcctctgatcataagctccattctaaaaactggtcactgttagctgaaattgctttggttccccaaatgccttggaactccagacgcacccgcagggcctgaggtaggcttcatagagttctaggacttccgtgtgcgttgccaccagatcctgcccagcaatggcctttcccttctaaggtcattagattcagccaaaagcgacctcttctctagtccggtgttacgaacagaagttctgagttgtgctacaaaagtagttccatctttttggtgtaattttcatgtttttaatttgaaaaccnnnnnnnnncaactttttataagttttttaagggccctgcttagtcagtgtacagggtggagtcagaggcagcttttcagnnnnnnnnnnnnnnnnnnnnncaatttcaccaagcggtagtaattgttgttttactagttatacatttagaatataaaggaggcatcagaaaacacactctctaaagccacttccttgtgcacagagtctgcacagggagagcacaggcatctccctggaaaagcacctgccaatgacgaatttcatggaagaacataggcaagaaaggaagcctctttctgagacacagtctctgagaggtgagcctagctttgctcttcctacagggtatgcttgggccatacacaatgctcgccttactttaaagctattttgccacagtcctgttaaatagtgtggacgtccttttgcagtctggtgtgcatgccatatgatcaggacagcttttccactttactcggtttcctacaagcaagtaggaaatacagtgaatttaccctaaaatgtccaatctgtatttatgtaccttgtcagtgttttgctgttggttttctaaaacaatctcagtggcctttttaaccttgttgttaaagcccgtccactcatccactgcatcttccaggatcttctcctggtcctg

SEQ ID NO: 438962 - DNA, 417 bp, Homo Sapiens
  misc_feature (377)..(377): n is a, c, g, or t
taggaggtctggaggaatctacttgttacccaggaggcagtaggttgctagtgaatcgagattggcgccattgcacttccagcctgggcctagagcaaggttccgtctcagaaaaacttggaaatctgttgggaagtagggggagggcaaggtttaaacctatgcaggtgtgtcaattagacttgttccaacttgtagaacctggattttgcatgtaattgaaatgttccaggacatagtctggcagtttcatatagggagttttggtagatgccaatacattgcagataaccatacttggttacattaggggaatgagcatgggataggtgcctcccagttggtaggatagcatgaggaggtttcaaaagtaaccnctttaagggttatgtccagtatttgctaagtaaccaaggt

SEQ ID NO: 438963 - DNA, 532 bp, Homo Sapiens
tagactacaattaacattcactttattcagttttgtcctctcaacttagaaggcaacaaatgaccacattaaaaagggagcatttcagaatatatatacataaaattggtctgggtaccctaaggtgtttgcgttgatagaaaattgacaccccaaactaagtgttctacttagcttctacaatagttattcctagaccttagattagtcattacatttttatttaaggtactatgttactttcatgactacaaaatgaggcactcgtacaaaacaggaatgaaaacatacatatactgtcttgtctttatgtcgtattaatgccaaagatattgtcagggattattttaaagaagcccttactcatgatggctatttttaaaaatggcacaggacagtaacaggctgaaaagaaaacacctggttgaggggacaaattaagtaaatacaagacagcttaaccaaggaagtcagcgaatctccacaaatgaggcttttaataatactttactggtaagacattttagttggg

SEQ ID NO: 438964 - DNA, 3064 bp, Homo Sapiens
  misc_feature (153)..(154): n is a, c, g, or t
  misc_feature (156)..(161): n is a, c, g, or t
  misc_feature (165)..(165): n is a, c, g, or t
  misc_feature (188)..(188): n is a, c, g, or t
  misc_feature (193)..(193): n is a, c, g, or t
  misc_feature (196)..(205): n is a, c, g, or t
  misc_feature (256)..(256): n is a, c, g, or t
  misc_feature (258)..(258): n is a, c, g, or t
  misc_feature (266)..(266): n is a, c, g, or t
  misc_feature (273)..(273): n is a, c, g, or t
  misc_feature (285)..(287): n is a, c, g, or t
  misc_feature (1003)..(1003): n is a, c, g, or t
  misc_feature (1053)..(1053): n is a, c, g, or t
  misc_feature (1058)..(1108): n is a, c, g, or t
aaggctacaaactttatattgccaccacatttcttatgtttaaagtggttgtggggaagtaaccttggatacaaaactactatgctgttgaatcttacccaggcttgttgtaaaatattttttgtacaatggaggtagagtggataggtcaannannnnnncgcngcgacaggacttgattagtgtcngcacnccnnnnnnnnnncaggttttcaggttctagcagacctagaaataaactacaaatactagattnangctcaggnatggcanttaatacatttnnnatttttagttttcagttttccccatttgttcctttataaatgtaaaattgtgcatctgatgtctctttcctcaaataagtgtgttctaaaaatacctactgagtgaaatggtaaaaaccagatgatggaaagagaaacacgacatccgtttcatcaattttacctgattgtttctcgaaaccagcctgtttgtttttgcttatttttagtttgaaatataaataactacaacaatgcatatttcagttgccttcattcttaaattctgaataagcatcttacttttctataaaacattacagaaactcaaaataataatcaatggcttctccaattccaaatattcaacttaatggagacagcatcttttacatttaatgaaaacagaggatttgaacacgttctatgcagacatggttttactatagatttgctgttaccttatttttttaagggggtggtggtagggagatacagaagtcaggctagcccagtgcttgggagttacagcactcaagacaccctggcctctacagagcatcactgaagccactgaagactgtctctaccagccttttgtcttccaagactataagatgggcataggcctgagatataagcttcaggccaatgggtttttatgggctgtttaagaaccagtactaaggatacattcttttatgtttttccttctaaaaatgtgacacaaaagaatnatttacgccaaccgctttttattatcgagtttcagaaacctttcacaagntggtnnnnnnnnnnnnnnnnnnnnnnnnnnnnnnnnnnnnnnnnnnnnnnnnnnnctttacaaccacagctaatgtaattttttccattgttcccagtcagctccaaacccattgtgtgcaaagcccatttttttccatgcatctaaatgatagatacaggctatgaaattctttattctatttgtagcagcttatgcaggtgcagccaaacacaaagcttcaggacaaattgtacaaactttacaatgtgggatttaaatttaaaatatgaaacataaaaatctacacaaaactgataaaaatcaagcacagataccaggattgaaacttataataatccatgtgtgaaagggagtcttgtttcctttcaagtgctttattctgctatggaacagtcaaaatgaagatgtaaagctttgtggttagtttaaattatacactctgtagatactataccaattttaaaagttatacatagaccaacagatgtccctcagttcatctggattgataagacactccagctggattgctgagaacaaatcaggcaaatgtggaaagaaaatccacctgtgcaatttgtttgcagagtttactgatgggcacactgcactccaggtccatgatggctgctgctttcttcatcagagctatcattaataggcttcacgcctctgaccacctcctgagcctcgagtgctatcaaattcctgaagctctacctcctctgtttctccaattatgttaggaacttccggtctagatggcagaagatcttctagttcagaaagcttgtctgggttgatccagttgttttcaggaaactgcacatcaaactttatgtaaagatcacctttttcaaagggattacgatactgcggcatcccttcacctcgaactacacgaacacaccctggttcaattactttgccaggggggtatttcaccacaatctgacgtccatcaaggtgcttaaatgtgaactgaaatccacatagagcttcaacaagtcctattttatatgtcatgtgcaaatcattcccatctctctgaaatacctcatgttctttctcctgtagcaaaagaacaatgtctccgggttccactcctggggcctggtctgcttccccagtgaatgtaattctctgtccatgtttcatgcctttgtctacgtggacttcaagaatcttgacttcttaaatcaccttcttcccttcacattttttacagcggtctttttcattaattacctctccttctccattacaatcagagcacacagactgcatctgttgtaccatccctggagccagctgtctgatcatgatgcgcacacctcgacctcgacaagcactacacttttggacagctccagactttccgccttggccactgcatgcactacagagcacattcttgctaagttgtagtttggttgtcttgccattatacagatcttctaaagatactttgagtggatgcatcatgtcctctcctcttcttctgccatttcgacttctactctgattgcccatgaagccgaacaatcccccaccaaaaatgtgagagaaaatatcatccatgccaccacctccgccgctgccttcccgaagaccttgctctccgtatctgtcatatcactcacgcttctcaggatttgatagtacttcatatgcaaaacttatttctttaaactataaagaaaaggtaaaaataaaaataattgcattttcaagtagaagagtggggagaagctacaggaatccagaatccatttaattttgtctcctgcatttggattcttatcaggatgatattccttggctaactttctgtatgccttcttcagctcgttctcgctggcgccgggcgggacgcccaggatgtcgtacagcttcgtgtcagccacgttagccatggcggccggccgggcagtgctcggggagaaggtggcgaagcagacagagcggagtcgggcccacaagcggcgtcggcggcggcacaggccga

SEQ ID NO: 438965 - DNA, 1087 bp, Homo Sapiens
  misc_feature (44)..(44): n is a, c, g, or t
  misc_feature (56)..(56): n is a, c, g, or t
  misc_feature (68)..(68): n is a, c, g, or t
  misc_feature (1010)..(1046): n is a, c, g, or t
tatattgtccaggttgcaaaaatccatttccccattcttctctngaaaataccctncatgtttctttnctccctgtagccaaaaagaaccaatgtctccggggttcccactcctgggggcctggtctgcttccccagtgaatgtaattctctgtccatgtttcatgcctttgtctacgtggacttcaagaatcttgacttctttaatcaccttcttcccttcacattttttacagcggtctttttcattaattacctctccttctccattacaatcagagcacacagactgcatctgttgtaccatccctggagccagctgtctgatcatgatgcgcacacctcgacctcgacaagcactacacttttggacagctccagactttccgccttggccactgcatgcactacagagcacattcttgctaagttgtagtttggttgtcttgccattatacagatcttctaaagatactttgagtggatgcatcatgtcctctcctcttcttctgccatttcgacttctactctgattgcccatgaagccgaacaatcccccaccaaaaatgtgagagaaaatatcatccatgccaccacctccgccgctgccttcccgaagaccttgctctccgtatctgtcatataactcacgcttctcaggatttgatagtacttcatatgcaaaacttatttctttaaatttgtctcctgcatttggattcttatcaggatgatattccttggctaactttctgtatgccttcttcagctcgttctcgctggcgccgggcgggacgcccaggatgtcgtacagcttcgtgtcagccacgttagccatggcggccggccgggcagtgctcggggagaaggtggcgaagcagacagagcggagtcgggcccacaagcggcgtcggcggcggcacaggccgagggagacagcgagggggaagcgggggcggggctgaactttccgctctcgacgaattcgagctcggccgatttggcctgatnnnnnnnnnnnnnnnnnnnnnnnnnnnnnnnnnnnnncgccccaccgcggtgaaatccatgtccccatatgatcttac

SEQ ID NO: 438966 - DNA, 425 bp, Homo Sapiens
  misc_feature (54)..(63): n is a, c, g, or t
gcaactgaaatatgcattgttgtagttatttatatttcaaactaaaaataagcnnnnnnnnnnggctggtttgagaaaaatcaggtaaaattgatgaaacggatgttgtgtttctctttccatcatctggtttttaccatttcactcagtaggtatttttagaacacacttatttgaggaaagagacatcagatgcacaattttacatttataaaggaacaaatggggaaaactgaaaactaaaaattttaaatgtattaaatgccatccctgagcctaaatctagtatttgtagtttatttctaggtctgctagaacctgaaaacctgaatgaaaaaaggtgtgctgacactaatcaagtcctgtgaggtttaaattattgacctatccactctacctccattgtacctcggccgcgaccacgc

SEQ ID NO: 438967 - DNA, 839 bp, Homo Sapiens
  misc_feature (57)..(97): n is a, c, g, or t
cagatgagataccagtacatataaagtaaaatgacatggatttaaatcaattgtgtnnnnnnnnnnnnnnnnnnnnnnnnnnnnnnnnnnnnnnnnncccagaaaacttttaagtgttgctggaatatcctgcctacagtgggcacctccttgaagaagctgatagcttttacacagtattagattgaaataatggacagaaacacattcttgtcaagaaagggggagagaagtctgtttgcaagtttcagagcaaaaagcaaaagtgaaatgatttgaggatttctgttctaatggagatgattctctgattgttagaaatggcaaatattgatgattgtgtgctattgattggtgcaggatacttggtatacgagtaaatacttgagactcgtgtcacttgataaatttttctttttggactaggtcgcacagttattaaaacaacttttaacccttcgccttcacacacatacatatcagggttgtttttctagttaaaaaacccaagtaagctcaaaattcaacctaaatgtcaggtgcaaaatttgcatttaaaccatggccattaaagtctttttccacatcttttatgccggttggggccttaaattttttaaaaattgaataaaaaagaaacctcaaccaaaggggtttttattttttcacaccccaaaactttaacggttttagggaaaacccctccccccctaagttaatcattttaaaaccaaactttccaatggggcctaaccgtgaaacacaaaaaagggggaaaacctttttccattataaggggaattaattttaggaagtttaaatccagtttgtttttccac

SEQ ID NO: 438968 - DNA, 879 bp, Homo Sapiens
cttctttcaccagctctggtatgtttgtagatgagccaacgtctccctgagaacgttagcagcctcgttttttacccgcttggtgagctgagtgtccatcatgaagttgtgcacgtgcttctcagccttggtgagctccagcttgcgagccaccacagccaccacgagcgcggtacagccagctcccatgatgccagtgagcaggcacacacccttcccgcagtaggtgtggggcaccatgtcgccgtagccaatggagaggaaggtgatggaaatcagccacatggcccccaggaagttgctggtcacttcctgcttgtcgtggtacctctcgcagacgcgcacggtccaggctgcgatgatccaggaggagatgctgaagaccagcagcacggtgccggggcagatggtcatgagtgtcttcatgacgaagcgcgtgttgaaggtgatcttgttgagggccccgatgctgcggctcgaggcgtccgtgaagattttgctgtgcagtagcatcacccggcccagcaggtagaggcgcaggaacatggggatggacagcagcacgtccacgtcggcctcggccaccgagggcgcgtacgtgaaggccagccgcgccgtccacgtgaagcggtagtggccgggcaccgggtgaatggcgcacactgccagctctagcgagatgaggaacacgcgctcgcaggtcatggcgatgcgccagtcatcagccccgttgtccaccatgaacagctgatctcccgggcatggtagaggacaacgagacccagcaggatggccgtggagaggctgatgaggcatttgagtgcgaatgagtacagagactccttggtgtacaccccccaggacagctcggtctccgtc

SEQ ID NO: 438969 - DNA, 1006 bp, Homo Sapiens
tttttcggttaaaaaggcccaaaactttatttagttttcagggaaatataagatgcatgtaaacataaaatacaaaacaaaacccaaatcttacagtctagaagcatgccaagacagagcattttctgcagaccaaagagtcccgtcaaagtgataaaggacacctggaaagtggcaggccaaggggctggtcccttccccaagggcactgcatttttgtgatgagattaaaaacaaaccaactccactattaaaaatgctagaaacatggagatagtttagcaccaccattgattctggaaatatttcagcactcaaatcgactgcactgagtttaatgtcctttctccagtttctctgctgaggaggaaagaaggaaaacctggaggaagggctcctcctgaccccacagagcccactaagagctgggaggggaattccatgaggaattctccaaggttctggagctccagagacatccaccagtccccacccagccatgcagtccacatgctcacgcttcagggattactgaagtctgccttgcccgggagtcacttcctgcagacctctgagtacctggtggggaaacccatttcccatcctgtgtcttggatttaaagaaaacctgttgcagataatgagttgtaaattcaaggagggtggctgtttgctgttctttctctgcagtaaactcttatggggagtgtgccttggttataaggcaacgcaaaatggtagggtatatccatggatgaatgttcatcacacccaatttaattcataccaggtggcaggctcagcaaactgaaccaccacaggtgtcagagatacttgagaatgactggtaccaacaagacgacaaaggaggttgccttcctcccagatgtgcccaatggagtctgaactctggttctaatttgtggaggtgggtccctactgtatgacccattgtggtcactgctctttgagccatacaacttgagagactggctttggattggac

SEQ ID NO: 438970 - DNA, 572 bp, Homo Sapiens
agcctggtggcgtccgcctttggtgaatctgacagcactgatggaagcagcgatgaggaactgagcggggaccagcaggccagtgcgggtggctctggggggctcgagcccttggagggcagcagcgtggccacccctgggccacctgtcgagagggcttcctactacaactccgcgttgggctgctgctctgatgggaagacgccctcgctggacgcagagggctccaactgccccgccaccaaggtgttccagggcgtcctggagctggagggcgtcgagggccaggagctgttctacacgcccgagatggctgaccccaagtcagaactgttcggggagacagccaggagcattgagagcaccctggacgacctcttccggaattcagacgtcaagaaggattttcggagtgtccgcttgcgggacttggggcccgagcaaatccttccgcgccattgtggatgtgcactttgaccccaccacagccttcagggcacccgacgtggcccgggccctgctccggtagatccaggtgtccaggcgccggtccttgggggtgaggcggccgc

SEQ ID NO: 438971 - DNA, 696 bp, Homo Sapiens
cggccagtcacgaacatggcaagggatgatatggtttgagttgaaggctgaggctgaacaaatccatatagtgaaatattgctgagtttcttgagagagacgcattccttccattatctgctgcactgtggtattatttccatgcttcaattcaacagaacgatatgacccatccattctgtatattcgaactttttcatatggtttgttaattgcttccttcaacaattttgcagcttcttcccagttgttttgtttgttttcttcacaaatatttaatggagatcttccttgttggtctgttatatgtctatccgtttctgggtggtttaggagaatctgtactatttcagcatgtcctcctccagcagcaaaatgaagaggagaactaagttgtccatttaaaaggtttggattgcactttcctttctctaacaatatgcgagtggcctcaacttttccataccagcatgcataatgaatgggtgcccagtggtcactatctaactggttgactgaaaatctttcactgagaagacggcttagtaattctgaatctccttcacaggcgcttcggtggagaggaaaatcatctacccactgtcgttccttgtcttctgtgacactgctcatgcttctctgccagtttttcctgtttagggtatttggatttttgagtagtctggagctcctaga

SEQ ID NO: 438972 - DNA, 388 bp, Homo Sapiens
  misc_feature (94)..(94): n is a, c, g, or t
gcgtgagccaccgcgcctggccagaacagccttttattggaagtagataccatctaggactttcctagctagataggagaaaacaactggcttnaaagcttcagtaacaagctagtctcttattacaagccaatgcagatttgaatttaagttgaagccaatgcttatttaccattctgaaaatcctagtgcccttcagagttacattaaatctactctgagctctgcctgtgctttataaatggaatatgaaagcccgaataacagcacatctgtttacagcatggtctactcagtattttaacctctcttttgagacctgctcagaaaaaggtttcctttcaacatattaccactcgactgggcgcagtggttcatgcctgcaatc

SEQ ID NO: 438973 - DNA, 1191 bp, Homo Sapiens
  misc_feature (856)..(856): n is a, c, g, or t
  misc_feature (1149)..(1149): n is a, c, g, or t
  misc_feature (1168)..(1168): n is a, c, g, or t
caactcaggttagcaactgcaggaaaactttcttcattttcactgaattttaaagagagaatcctgtctctatttctcagagaaacttaggtgaaaagtaaaagagaggcaaaatctctttccttcatgagatacttttatttttatctctttctctactcatgtgcttaactggtgaaatgattctgtagaaatagatccttctgattctgcatctcatttccttatggcaactacaacaggaggaatccagctggaaatgccactaaccccacaatccagcacctgagagaggaagccagtcggagcgccgtgctgggctcactcactctggcctgcgcactggggttgtcacatccattttccactggctatggggaataatatttggttaaggctgttgaagcccttgcttttgaggttttacattatttggtaatgaaagccgttttttcttccttccccaggcttatgtgaagaagcccacgcccactctcaacaaaacagactcctccttgggaagcatctccagccctgggacagacacctcgctgtgacttagggagggacaggattagcccaggaataaaagcatttttagaaattgttttctgcaccttcagaagctacaacactccttgtaccctttcagatggaagggatcagaggtgacagaatcgtgtatttctacatttatctgcggaagatgaaatacaataaaaagtgagaagtgttcaaattccaccactaggaaaagaaacatcttgggtagagatgagttcgcctttttgctgctgctgctgaagtggcttcaaattgttaaaagctctggttgcccagggcattgccccaaacncagcaaaacctggctctgcaagtgttttctacagctccccaggtgactagagcctatgaccagtttgaggacagggcaataaagggaactctgatttctctcgctctctctctacaaatgtgagcttgaggcctttccaccctttacattacattacagacaagaaacaacatatttctttaaattaaatcatctctcttatatatgcatccatcttttgttgaatacaagaggctccttttaaatatatacattcagtacttctacatttatgtattcatttaaactctgtnctgtagtaaaatatgcatngttttaattcataaggatttcct

SEQ ID NO: 438974 - DNA, 517 bp, Homo Sapiens
  misc_feature (47)..(47): n is a, c, g, or t
  misc_feature (483)..(483): n is a, c, g, or t
  misc_feature (496)..(496): n is a, c, g, or t
ttttttttcatgagatacttttatttttatctctttctctactcatngtgcttaacttggtgaaatgattctgtagaaatagatccttctgattctgcatctcatttccttatggcaactacaacaggaggaatccagctggaaatgccactaaccccacaatccagcacctgagagaggaagccagtcggagcgccgtgctgggctcactcactctggcctgcgcactggggttgtcacatccattttccactgggctatgggggaataatatttgggttaaggctgttgaagcccttgcttttgaggttttacattatttgggtaatggaaagccgttttttcttcccttccccaggggtttatgtggaggaaggcccacggcccacttttcaacaaaacaggacttctccttggggaaggcattttccagccctggggggacaggacacctcgctgcgacttaggggaaggggacagggntaggccagggggntaaaaggattttttaggaatt

SEQ ID NO: 438975 - DNA, 909 bp, Homo Sapiens
gtccaaccacgttcagggcaaaactttcccgccctatttaacttcaatatgtgcacctttttacaggcaccttctcgtggtagatgatagaggaccacctccgctcctgtgctgttggaggtccgagaatgatgcctcaagaagagaacatacagctgcccgtatatggtagccattgcgatgtctctttcggaaaggctgggtttagttgacttaggcgcagctggtaattcaatctcaaatttgggcagcttcgacatagtgccagccctaaagtgaaaaggctgcaggacattctccaggaccgtggtagacagcaagatcacggcgctctcggggcagtacatgtaccaattcacattgagattgtggctcttcaagagtttcagactccgtttctctggtaatacctggtaaaattcgattccttgatctgttatgaagacaatttcagttgaactagtccagcagaatcctagaatgttggcattcttagtcttgcactcctgtgtgtattccagctgggaattatcagggataaaattacaaaaatccacagtctttgaggtcctctgaacagccaatatcttattttctaaggaaaacttaatgcacttcacttctcctttgtcatccattctaaatgagatgggattcctatcatctgggcctttaactaccacgccagtagctccaccagatcgaacagcaaaaacctgcttgttggcctcatcgaagaagacgcagttgacagggttcgccttctcgaactgcaccggccgctcgcacagctccagatagagtcctcctcgcccatggcgggcgccgcgcccgcggcgggggccccgggggcggtcgccagagtggagcaggatgcgcggtggagcccggcccggactgtagcggcgg

SEQ ID NO: 438976 - DNA, 1067 bp, Homo Sapiens
aaagttaacggagccctcaaactttcccccggaacccggattttgaatttttcccgaagtcttgggattcctgatgatgccacgactaccagggtggtccaacaggttcaggggcaaactttcccgttcttattaaacttcaatatgggcatctttttacaaggccctttcttggtggtagatgatagagggcccacctccgttccctgtgctgtggaaggtccgagaatgatccctcaggaagagaccattcagctgcccgtatatggtagccattgcgatgtctctttcggaaaggctgggtttagttgaccttaggcgcagcctggtaattcaatctcaaatttgggcagctttcgacatagtgccagccctaaagtgaaaaggctgcaggacattctccaggaccgtggtagacagcaagatcacggcgctctcggggcagtacatgtaccaattcacattgagattgtggctcttcaagagtttcagactccgtttctctggtaatacctggtaaaattcgattccttgatctgttatgaagacaatttcagttgaactagtccagcagaatcctagaatgttggcattcttagtcttgcactcctgtgtgtattccagctgggaattatcagggataaaattacaaaaatccacagtctttgaggtcctctgaacagccaatatcttattttctaaggaaaacttaatgcacttcacttctcctttgtcatccattctaaatgagatgggattcctatcatctgggcctttaactaccacgccagtagctccaccagatcgaacagcaaaaacctgcttgttggcctcatcgaagaagacgcagttgacagggttcgccttctcgaactgcaccggccgctcgcacagctccagatagtagtcctcctcgcccatggcgggcgccgcgcccgcggcgggggccccgggggcggtcgccagagtggagcaggatgcgcggtggagcccggcccggactgtagcgaccgctgcgctgcggctctgggcccggcgcgacgccgcttcctgtgccacgcccccac

SEQ ID NO: 438977 - DNA, 3411 bp, Homo Sapiens
  misc_feature (3326)..(3362): n is a, c, g, or t
caggctcgcagctaatttgcaaaattttgagatgtatgattcctttatttttgacctcaacttactgagcaatgccgtagctatggaatagaagcatttgttgcactctttttgtgagccaggccctgtaggagggattgtggatggcaaaacctcaggttctgcccaaatcctccccttgggggctggagggtctctagttaattggcattccggtgcttaaggccacttttgggtagaggtttggcaaggatggagtgtccagacctatgatcctctaagaactttactttttaaaaacagccacccaaatggtggtggcgtggggagcaggtggtggtgaagggactggggtgtctggccatggccacgtacagaggagactctgtgagccctctccctgcctgagggacacttaactttatagcagctacatagggtcaacgggaggcccaccaagtccctgaaatccagggacagggaaggaagtggtggaggggaggctgacccacctctaaaaggttgtgccactatgagtagagcccccaggggagaggcctcagtagagcccccaggtcccctcaggtaagcagtggctcatcctctgcctcagctacccacacccccggctcagccagtggcaccagtagcacatcgtcctcatcttccagggccaggactgctgtgtggggtccaggggggctccgggttggtcctgggggccccaggctgggcaacaggcggcctcgcagggcctgcaccactccagacaatagtgatggctctaggggcagtgagggcagtggccctggggcttcagggacagtagtgggggctggagacgtgctagcagatgggaggggagccttgatgggcagtgggggtgcctgctccccatcttgcccacccactgccccgccctcacgggctggacctgtgccaccatctagggcctcaaggggagcagcagaaggtgtgacctgggatctggcctcagaggcccgagccggggtgttggttcgagggagcaagccccagcggcggagacggcgtaccaggcgtcgcatcaagcggccccgctgacgacggcgggcacctgggccacctcctggagtcatatcctggcgtaagatctgtagcagagaacgcaggttgcccagcactgagttatcattaggattctctgtaggaaagtcttctacaggtgggatggcaccctgggcaatgagctgcccgtaggaagggggtgcctgctgctgcacaatctcagcctccatccgggagaggggggcaaagatgctgtactcctgggtgcgaatggcatagagcttgcaggtgcagcccagggcgatgaccaggagcaggccgcacactaggctgccaatgactgcagctgtaatgaccttgcggggcagaacataggagcagtcccactcatcactgccgtccgcacagtctggctgcccatcgcacacccacgtctcatacacgcacttctcgtcccggcatcggaaattgccaggctggcaatgccgacagcgtctctcatctgctccatcagcacagaaagtctggtagttgcagcggtcagcaggcaggtagcaggctgtggcaccagaggtgccagcagcccccacagggggaagtgtccaggtgggcagcctgggcagtcctcctcatctgtgccgtcagcacagtcccatgagccgtcacagcgctgtgcctcactgtagcagcgctcacctaggccttcgccagctcccaggccagagcctaagccacagggtctgtcccaaggcaagcaatagccccgcacatggtaggtggcattgaagccacgaccattgctccaagcaactgtgtggtaggacacaacagcctggccagacagtgtctccacagtgacagccttgccattgctgaagtgggtgagactacgcagtagtcgggagctctcagggggcccagggcccgtcatacacatgcactgcatctccaaagcccaagtccagggctgtgaagcgcacggccagccgccggccatcatgggggtccagcagccaatggcaggactgggggtgggagactgaggctaggtgtgtatatccaggagaggagaagaccccatagaagtcctccaaggtgacattgcaaggcagggaggggacgggtcttggggtcaggccagggaaggggtctgagctgcaacctgcttcatcagagccatcgccacaggcatcaaccccatcacagcgctggacagcagatacacagcggtggttcaggcactgaaactcttcctgcaggcacatcagccaatcttggctgtaggagagcaggaagccctggcccatgggtgctctggccccagcatagctgtaagtgatggtgacgttgcccccgggcagctgcagagggctgggaggtgcctcacacagggagatcagtggctggagaggggagcgtagggttaagcgctctgagccacaggccaggtgtagcttctggaacctgatggtgacagtctgttccttgctgcccaggatgagccaggtgcagttggcaggggaggtgcggctgtcccggaccaggggcctctgtaaggtgccctgcacttctaagagcactgctggggggtcctcacaagcatgatttggaaaaataatccggtctggatgggccagagcgcctccaaggaggaggaggaggagggtggccaacagcatcctgggctgtccagaggtgccggaagggtcccggagcttctgtggtctacccgatggggtcgcggcggagccccgggcgcccaggctccctggtgccgcctccccaggggggctccatggcccgggctcgacccgtactctggatgccagggctgggggcggggaggcggcggcagcccgggagtaggggcggtgcctttcgccaactttggagttgttttctccgtccgccgccgcactcttctctcccggggccggctcctgaagccccgggtctcggcactggggcgcgccctcgcctacagcccgcccgcaggcagcgagcgcccctggtctggcctggtcgccacctgccggggtttgagaccacttcctcttcgggccaaactttgccgactgtcagcccccagggccggccgggtgctgctccactcctccagcgcgtccagccagcggagcgcgacagggaagcgggggaggggaagaggtggctcggcccggcgccccggcccttgcccaggcggtacccccgcccgccacaggggttggagtagcccggccgctctcgacgaattcgagctcggccgatttggcctgatnnnnnnnnnnnnnnnnnnnnnnnnnnnnnnnnnnnnncgccgccaccgcgtataatccaggttcgcctatagtagtcgatacatcc

SEQ ID NO: 438978 - DNA, 693 bp, Homo Sapiens
acaaacaccaatatgattttattcaaacacaggcaagaacaatgaccttcagagctgggtaaaaataataagttaaaagcatggttagaattttagacaatcagataaaaagtttgaaggaagtgatttccccttcctctcctaattgattaattcaacacagcataaaaataatttgtatctataaaatatccttgttcccacacaaatgaactggaggtggccctaggatttccttgactatgcacaatgcacacaatctacatgtccctcctccccaacttttaaggcaaaaatggtcctgcatcttcaggcagagggtgggctcatgccagcagtcagctgtggtcaaggacactggggggcgtttctccaccgaaagatgcctgcttggggtcccacttggggcgcggattccattttatttctagcctttgcctcaccacagaaaaaaggagctgaaattctggcaagtggacactggactggtttggggcactcctccagtctgggctgaccgggtctcttgaggcatccgtggcctaggcaagtggtggtttcaggactgttacagccctgaaggagccagacctggctgcctcctgcaagctggacaaagctgactgagggtgggcaggtgtctccttccccccagcccctcatgctgcgtcagtctttctgggagtactgaga

SEQ ID NO: 438979 - DNA, 754 bp, Homo Sapiens
  misc_feature (436)..(436): n is a, c, g, or t
  misc_feature (636)..(670): n is a, c, g, or t
cactgtaaaggcaataggcactaaaacaacatcgggaaaaatctaggaggacaaagagaaaggaaacagcaaaatagccccaaaaaaaatgagaccaaaggcaggaatgaaacattcacacatgcacccttcagtacaaaaaacaaggccaattttaatcaataagacactttttgaaaatataaaatcttcagactataaccacatcctcacgcattaaaaatgctcatcacattttacccttgctgggagtagcacacaagctcattgccccccaaacccttgtatatggggacaagtggggtcagtgcaacaacccattctttccctcctacgaaacagcggacacagcaagagcatcaacatcctcactttgatcggaatggtctttggtttgggcggtggggcaaaccttgggaaaggggcttaggaaggngagaggcagctcttccttcagctggctctcatcaggctgcagccccctccccgctcccacctccctgctgggaaaccacagcattatcacagcattattgtgacagccacgaacccattgcccacaacccctccaccctcggtcaccccaacctctggctctgagccctgttctgaccaaatcatgatgatgagtatttnnnnnnnnnnnnnnnnnnnnnnnnnnnnnnnnnnncggaaccaactttttctgtattttgtattgtatgttttcttcaacatgaaccaatcagtatcctgtcaataatgtcagccgatc

SEQ ID NO: 438980 - DNA, 1675 bp, Homo Sapiens
  misc_feature (68)..(102): n is a, c, g, or t
  misc_feature (660)..(678): n is a, c, g, or t
caagatactgattggttacatgttgaagaaaacatacaatacaaaatacagaaaaagttggttccgcnnnnnnnnnnnnnnnnnnnnnnnnnnnnnnnnnnnaaatactcatcatcatgatttggtcagaacagggctcagagccagaggttggggtgaccgagggtggaggggttgtgggcaatgggttcgtggctgtcacaataatgctgtgataatgctgtggtttcccagcagggaggtgggagcggggagggggctgcagcctgatgagagccagctgaaggaagagctgcctctcccttcctaagccccttcccaaggtctgccccaccgcccaaaccaaagaccactccgaacaaagtgaggatgtggatgctcttgctgggtccgctgttccgcaggagggaaagaaagggtagctgcactgaccccactgtccccatatacaagggttggggggcaagagcatgtggctactcccagcaagggaaaatgggagagcagtagaaaggggaggaagtgggaagagcagaagatcatatatattaaaaaagtgacttaagacttaaaattgaattagtatttgtacagaaaggtgcaggtggaatgactcactccggcctatgatcaaaattatatggagaaatcatggtggannnnnnnnnnnnnnnnnnnagtggtggcccgagtcgttaagtgcgattggttagagtggattccagtcgggtcattcaggcggaggaggcgggggcagcgggcaggcaaggggggctcagttgctgcagcactggctccggctggctgggttgttctcctggaggtccacacctcggtttcggcctggagcaccagttgcattctggggctcgttcttgggaagcttcttagctattgccatgaagatttcgttcacgttcattgcagtctttgctgatgtctccatgaacagcaaactgttgtcgtctgcataggcttgtgcttcctggaattccacggctctcttgctggccaggtctgccttgttacccgcgagtgcaatgacgatgttggggctggcctgcctctgtagctccttcacccagttcttggcccgtgcaaatgtatctgtgttggtgatgtcatagaccacgatggcagcctgggccccccgatagtacatgggggccaggctgtgataccgctcctgtccagctgtgtcccagatctcaaacttgactgttgtgtcatccaggcagacagtctgtgtgaggaaggccgctccaattgtgctctcctggtactcgtgaaactgtcccttgacaaagcggaggacgaggctggatttgcctaccgcagactcccccagcagaaccagcttaaattgacagatcttgttcccagcagctggtccattgggtcgtgctgcgcctccccgacccgccattgcccgtccagctgtagtggtccagagagcgtgcgggtggggactggtgctatgcaaagaggcacttagtggggagggggacctccaaggcggctccggggcggcggcgttacttggggccggggctcggacgggatccgcttctctccccgccggcggtgtcccaggctccggcctccacttccgcctttcagccgctcgacgcgtggtcgacgatatcccgtaacttccggaccgtaccagcacttt

SEQ ID NO: 438981 - DNA, 1099 bp, Homo Sapiens
  misc_feature (90)..(113): n is a, c, g, or t
ttagttattgttcaagaaagggtccaggtgggaaatgacttccctcccggcctagtgatccaaatttatttggagaaattcagggtggannnnnnnnnnnnnnnnnnnnnnnnaggtggtgccccgagtcggttaggtgcgattgggttagaggtggatttccagttggggtcatttcaggcggaaggaggggggggcaagccgggcaggcaaaggggggcttcagttgttgcaagcactggctcccggctggctgggtttgttcttcttggaggtcccacacctcggttttcggcctggagcaccagttgcattctggggctcgttcttgggaagcttcttagctattgccatgaagatttcgttcacgttcattgcagtctttgctgatgtctccatgaacagcaaaactgttgtcgtctgcataggcttgtgcttcctggaattccacggctctcttgctggccaggtctgccttgttacccgcgagtgcaatgacgatgttggggctggcctgcctctgtagctccttcacccagttcttggcccgtgcaaatgtatctgtgttggtgatgtcatagaccacgatggcagcctgggccccccgatagtacatgggggccaggctgtgataccgctcctgtccagctgtgtcccagatctcaaacttgactgttgtgtcatccaggcagacagtctgtgtgaggaaggccgctccaattgtgctctcctggtactcgtgaaactgtcccttgacaaagcggaggacgaggctggatttgcctaccgcagactcccccagcagaaccagcttaaattgacagatcttgttcccagcagctggtccattgggtcgtgctgcgcctccccgacccgccattgcccgtccagctgtagtggtccagagagcgtgcgggtggggactggtgctatgcaaagaggcacttagtggggagggggacctcccaaggcggctccggggcggcggcgttacttggggccggggctcggacgggatccgcttctctccccgccggcggtgtcccaggctccggcctacacttccgcctttcagccgcatcccggaaattccggaccc

SEQ ID NO: 438982 - DNA, 616 bp, Homo Sapiens
  misc_feature (35)..(35): n is a, c, g, or t
  misc_feature (45)..(45): n is a, c, g, or t
  misc_feature (491)..(525): n is a, c, g, or t
gtacaaatactaattcaattttaagtcttaagtcncttttttaanatatatgatcttctgctcttcccacttcctcccctttctactgctctcccattttcccttgctgggagtagccacatgctcttgccccccaacccttgtatatggggacagtggggtcagtgcagctaccctttctttccctcctgcggaacagcggacccagcaagagcatccacatcctcactttgttcggagtggtctttggtttgggcggtggggcagaccttgggaaggggcttaggaagggagaggcagctcttccttcagctggctctcatcaggctgcagccccctccccgctcccacctccctgctgggaaaccacagcattatcacagcattattgtgacagccacgaacccattgcccacaacccctccaccctcggtcaccccaacctctggctctgagccctgttctgaccaaatcatgatgatgagtatttnnnnnnnnnnnnnnnnnnnnnnnnnnnnnnnnnnncggaaccaactttttctgtattttgtattgtatgttttcttcaacatgtaaccaatcagtatcttgtcaatatagtcagccgatcggatcg

SEQ ID NO: 438983 - DNA, 537 bp, Homo Sapiens
  misc_feature (375)..(375): n is a, c, g, or t
  misc_feature (382)..(382): n is a, c, g, or t
  misc_feature (425)..(425): n is a, c, g, or t
  misc_feature (436)..(436): n is a, c, g, or t
  misc_feature (471)..(471): n is a, c, g, or t
  misc_feature (487)..(487): n is a, c, g, or t
  misc_feature (501)..(501): n is a, c, g, or t
  misc_feature (510)..(510): n is a, c, g, or t
cctgacatgccatagtttcagcattttcttgggcaatgatccaagctgaaggctggtctgagggatctgaagaagcgtatgagttggaagagagggacagaaaggaagaagacatgtgaagagagaaaaggaaggaagctagcagaggaatgccctccaatagagactgctgcctgaagctcagcccctctgaagataggtaggccaggctggcttggctgaggcagtgggttagaccagccctgcccattttcaaagtccacagacatcttggatgtcagaagccacaggttttgatctgagtggcaggtgagccatcctgctgtcagctgattctcacttggaactgcaggcaggggcaagcttttgcctcanggatcangaaggaaggttgcctgccaaaggggaaaagcatgtctgctggnacttcaagggntaggattatcctttcagagtaagaaccttgggggncttcaggtcttaaganggagtccggcctcnaaacccaanctgggttttggagcaacattctttact

SEQ ID NO: 438984 - DNA, 372 bp, Homo Sapiens
atatgtactacatttggtggaatacgcatgtacaattcttcaaaaatagtaaagagcaaaacaaacaaaaaatagtagaagcactggagaaatacactatggcataaactagttacgggtgggatgtcacatggaccatatctacactctgtggcaaccttcttacctgactccaaaggatcagataatcaaacaggaaattatggtaggaaatcagaaaattgaagtatgcattcatatcctaagcattttattttagctcaaaatataaaaatattcatcagttagccaagcttttgggatgagagatcatagcctcctctttgatagggggtttcttgggttttcttgatttcatgtttcagagttttt

SEQ ID NO: 438985 - DNA, 336 bp, Homo Sapiens
  misc_feature (313)..(313): n is a, c, g, or t
ggtttcaccagcgtttaatgtgctctgatgttgaccgtccctctgagtgttctggggaggagggggtggggcggagggtcaggaaagcaggctcagcttccagggtcagggagttgtgggcccagagggctgttcacagtggatgcaccctgccccctccctcgccagacccgagggtagggcagaggcacctcctcgccagcctttgggctgcacccacagggaatggaggggaggggcaccattaccactggacccaccaagaccccgccgcctggggtgggctgtccacaggccctttccgcccagcagnagtgacgtttagggccttcccag

SEQ ID NO: 438986 - DNA, 1526 bp, Homo Sapiens
  misc_feature (842)..(869): n is a, c, g, or t
gcggttagctgcgttgcggtctcctgggtgctgggtgctggtgtgtggttgggggttcgcactcgacaacccaccactatcatatccgctcgcaccatgtctcgtctgtcgtcgcgcgcgtactcggggtcctgtgttacgcggcgcgtggtccgcggtcgtgtgtctcgctggctctctgtctacatctcagtctgctcttcgtctgctctcgcacacactccagtcgaccctcccgcccaaccatcagccaagtacctcacctcctacactgcctctcgcctcgattcatcaccatctctcaacatatgtgactcgtctggtgcgcgtagctgatagcttgggcgtatccgggcttcggtgtctggctggggtgactgcggcgcctgttatttgagaccactaagctccgcgggggaaataaggagagtggtgcagataaaggtcactatcgtccgcggtgaggccgcaaagctgtttccaaggcgcacggcgaagggacataattgcagccgctaggggttttaacacccaggtaagaaccaaccggctgaaaaagtcggtaaaatgttgcgccttaggacgcgttatattcttcgcgtaggaaggttgtgcccacagtaatgggcagcaccccacgaagttatagggttgccctctgaccaaggagtcgccccatgtaggcaggtgtggccccgtcgaggcacgttgttgaaagcgccggcctcaggcctaggcctatttatatcgggctccctatagggggccacccttggagcaaaaaagctggggtaacgcgttaatgctgggccccttcgagggatatttttgccgcccccccnnnnnnnnnnnnnnnnnnnnnnnnnnnncaccacggtcaattttattgcttaggaaccagaccggtcacttccaaaggcccctcagaacgaccaacagctgaaacccgcggggcggactccgtgttgaaccgcggacagcggcaaccacagcagcgacacggacctgtgcttccaccaagaacagattccgcagcggacagcagtcacttgcagtggtagtatttatcccacacaaacacccagctaatgccttcacccggtccaggaactctgtagtgttctaaagtaaaatcaataaaacatacatttgtgtttcatcaacagactctctaatcaccttctaatgctgtacttactgctataggagaaaaatatttgcaacaaggttatgacatgggttgtctgtagcggagcaatgaggaaatgtacagttttgtttctctttaatatttttatatacagcccatgttaaaagcagtttctattggaagcaaactaggctatttctatttctcccatgatattattgttgtaacgtaggatacttggcaccataaaacagtaacaaaagacagacaaacggtttacaaaattcttaaaaggtacacccaggctatctttaaacttcacattcagttcttaatattacacagaagaacggcatgggagtaacggcccgctgcc

SEQ ID NO: 438987 - DNA, 439 bp, Homo Sapiens
  misc_feature (75)..(110): n is a, c, g, or t
  misc_feature (380)..(380): n is a, c, g, or t
agccaccacgcctggcctacatgatgtgtttctgtcctgcctgacctacatggtgtgtttctgccctgcgtattnnnnnnnnnnnnnnnnnnnnnnnnnnnnnnnnnnnnttctaaggacgtggccccatctggctttgtctctccagttgtccttgccctgcccccctccccagaggtgctgcccagtgctggtgtggccacacacggctacatcattgtgcaggcagagctccctgcctgcccagcctcagggctctgcatgctcacacctagatcctcatcttcctccatgtctctgcccagcatagccccgagcccctgggaagctggtacccctcagtgtgctcacacgtgggcaaggccgaggtggccccaggnagggcattaaccagggcacaaaccatgcacgctggcatgggtgcggggatcacacgaat

SEQ ID NO: 438988 - DNA, 632 bp, Homo Sapiens
  misc_feature (97)..(148): n is a, c, g, or t
  misc_feature (445)..(445): n is a, c, g, or t
tcaatgcttttctttttctgtcctttttttggtgaaaatacttgaccatcttcagatgttgtctctatgttacccctctctattccaacatcatccnnnnnnnnnnnnnnnnnnnnnnnnnnnnnnnnnnnnnnnnnnnnnnnnnnnncatcatgagctcgatcagatgtctctcgatcttcagactggtggtgtcctataatgtcctgtgcacgcattcttgagctttccaggatttctgtctgttctctctgtttatctacagaagaaactttctccttgagttcctgttcttcgtagcgccttgaactctctttcctttctggtttacgatcctcctctttccatctaccctgtctgtcttctgtgaggtgcgagggactaagagaacgagattcttgaggtcgtacaacttggctcaagagtctgtgttttttcatttttnatcatctccactgttgtaggcatcactgtccggagaatgttcacgccggcgctttcgggggactgtctagggctgggactcccttcatttctatagcgcttctttgattttctttcatcatgtccatctcttggattcctatcttctcggatctcttctcgcttttctctgcggccatctcgtcctt

SEQ ID NO: 438989 - DNA, 811 bp, Homo Sapiens
actgggcactaagttaccgttggacaagtatttgggtttaaagtccaaatggctttccctgaccgttgcatgtatgcgctgagcatctttggttgttccctgtcacaaggcagatggtttcagccaagcttcctggcatccagctctcatacatgtgattatctcgagcctccttcagggagaagactagaccacagttgtgttgccattcatccccgtaaggcacacaagattagcagctggtcttgagacacctatcttcatctcccgttccttggacatcacaaaggagtagaagcacatcacgcaggccatctccattcacatcagccaaattccaatggagacaggtccccaccttccctggggagcccaagtgtcggctccaggtgctgtgcagatctctgggaggacaggggatcaggaaagcacacaggagcaccaggatcatcgagatccccaaagtcaagcaggaagacagacgtgcgcacagtatgacaccagggaggaggccgccttctgtttcaggcccccaaggggttctgaggggtagccctccgtggtgacttctgaaagatgtggctttgcagcctctgcaacctcagcatctgagtcgggttctggcgcttctcccaaaggactcttcccatttttgacccctccattcttctgcaggttaagcaccagatcgtcttcgctctcatcactgtcagcctgggtaagtggatcatactcccctaggtctgggctcttcttccccggcagcttgagcgcctggacagcacggtcgccatggctgagaccccccgct

SEQ ID NO: 438990 - DNA, 883 bp, Homo Sapiens
gtttaacggccggtcaggaacccaacaattagtcccttctcgtccgagaggaaactctgtgagaagatgggaccgtgagcactctctttaacaaggacatttccttttcagcgaaagcagcgctctgatttaccaagtctggcggaccgcagcgctttaaaggaatgaggttccagcggtcgcgccaagcagcgtacgcagcctattttaagttatgctaccttcgccacagaaaccaagaacgttgtaatggtccggcaagtgcccacgtgtaattgttctccatcacttacccactctagttcgggaacacccttgtcgccgccgttccggtaacacctctccaacgctttcgatgcttctacttcttcgggaacaagacaagatggcgcccgatttgtctcacccggaagtaaagaataataacatccgttctgtcatctgaagccataccgtctctcatccaggtttgtgaacacgtgattgtgcggattgacatgtttcggcgccattttttttgtgggcaaaaccatctctactctggtcaacaccgggcaactgaaccattcctgcacgttactttttaacgtagctggcgccattcccgacccatctttatagtggccagaaagccaagaacgtaagtgttctacacatagggcgccttcaaattttttacctttagcaacgtgatcttcctttacaggggaagtatgttccctcctagaaacactcccgccttggagaagggggtcgagcttcgaaactccacttacagactacggaggaaccccagggttcaaaccaataccaaaccaattctggccagatgcttaacgcagtcaagttattagtgcgctggaacggcattccgggcatcaac

SEQ ID NO: 438991 - DNA, 1001 bp, Homo Sapiens
  misc_feature (199)..(199): n is a, c, g, or t
  misc_feature (236)..(271): n is a, c, g, or t
  misc_feature (295)..(305): n is a, c, g, or t
  misc_feature (368)..(368): n is a, c, g, or t
ggtagaggacagggcccttggtattgtgccccaaggcgggtcttgggaggaggtctccctttttttagggggaaaccaaaaaggtattaatagggaaagggggtttatgactttcaccattcagcattcccaaatgagagggtgattccctccatagtttcaagtgactattaaaaaggaataacccaagccatggagnatggaattagcatcaagaaatctacatcatactgtgnnnnnnnnnnnnnnnnnnnnnnnnnnnnnnnnnnnnttatgaaagatcttcactatctgnnnnnnnnnnngggaagaaaaaggtagggcggatggtaggggcagagtatatttgaccagactaattttgtcancacagtgacacaattttttctttaattggaggctagacatgttttactctgccagtgctgcttctgaaaaggccagaggttgcaatagagagacaaagaatgctctcttccctagatgccaagtgaggtttccagagtgttcccagcccctgtcagcctggttgccacattctgttgaagtttgaatccccttggaaattcccatgattgtttggaccagattccattgtagacatatcttgtccatttggcatcattcctggtggttgttctaccatgctttgctgtcctgaagcttctctttgggcaatccaagcttgggccaatgcagcccaatcaatctggcttggatcctgttggtgctggaatgactgcatccattgttgctggttcaagggccactgctgccaaggctgtcctccttgatcccacatcccttcttttaaaatatacttgattttctatctcagaggttcaccttctgtttaaaacttaggttgattcagactacagcttcgaagcatagcagcaagattatgtatgccccactctagttcgggaacacccttgtcgccgccgttccggtaacacctctccaacgctttcgatgcttctacttcttcgggaacaaga

SEQ ID NO: 438992 - DNA, 2516 bp, Homo Sapiens
  misc_feature (329)..(329): n is a, c, g, or t
  misc_feature (891)..(918): n is a, c, g, or t
  misc_feature (1598)..(1598): n is a, c, g, or t
taatctgtactcatgcggcttgccttcttaccagacctttgagatttctccacggatcgcgatcgactatgtttaggcttcttagccttcttttctttgctacttcctggagactcagaactgctccttccactagaatcagagcctgaatgttttttactatctttggtagtacttttcttactatcctgtctagaatcatgtcttatgattttaacagatatagaaccactcctagaaaatgttctttcactttctcgtttcctttttaatctatcatcctgactactgaacttaaaatctttttcttcccttttttgtttctcttntcttttatcctgttcacgttccctttctttgtctttctttttcctatctttatctatacttcgactcctctcctttttcctctcttgttctttagcctcacctttatgcttatgactgttcccactaagatttccacgttgatcatcaattttacgcctatctcgactcctactgcgactggcacgattggttcgtctatcccttgagcgacttctacttctacgtctctctcgggaaggactccgatttcgtcgtctttctctttcaatgctatttctattagatctccttctatctctaatctttaccctagccctattgctctctattttaattctgcgagaatagcttctactcctgctacgtctagctttgattgttggagatctactcctactgtgtctctttttccttttaggagaagaagaccgagaagaagtacgactactacctgagctagaactgtatgaagagctagagacagtactactagtactactagttctgctattgctactggaactaccactactagaacttcccgacctactccttccttgnnnnnnnnnnnnnnnnnnnnnnnnnnnnggttctaaaactgatgtggtttcatttggagttctcttcttttcattaaccacatcaccgtctgcttctcttgcttctagtagtgataaactattttgctctttatggataaattcattcatctcttttgtaaccctttctgtttgctgcttttcttcttccatctgtttatcatgtaatagctgctgttctttttcttttctccaaaaagcttcctgtttttgccggattcgatgccgtaattcttcatcatcagtgtcagatgactcagatcctctgtcactcctctcatcttcactgtctcctgatccataaccacccagtccaccgagtccagtgagggaagccagtgcactggactgtgccagctgttttgcaggagctttcgttgctttgcggtgtgcatctttggctacgtaataaatttcttcatctgtgacatccagcagaatttctgttagaagcatttttgtcagcaacatcatttgatactctttctcctcttcagtcatctcagggtcactgtgctcttcttgaggaactggggatggacttctggtgactttcccactacttgcagcctcaacattttcagtgtcttcttcttcctcatcactatcaaatttacttctctgaggtaaacgagggccatcccctccttcagcatcttctgtggcctntttttcttttttggacaattgtgaacgttgttgttccattctttctttctccaatttcttctgcttttcacgttccattttttcaagaccttcgcgaatccaagcgggaagagtcctgcgttttactgcgtcaatttgtggaggctcctgcttcacaggaagtgcaataggtgaacgctgacgatccctgaatgatgatggcctttctcttcgattctggggaggtgctggaggtcctggaggtcctggttgccaataaggaggatgaaatccaccttgcggtggaccaaaagcaggccccatgctgatagtcaaactggttcactggccccactgcaaaattatcgggtggtccaccaaagttgtgattgttctggttaaatatatgcctgttgtcaggggcaaattccgcactgtcgtgactgttgctgtcttcagaaggaggaacaatgtccattgggcctggtgttggtggcatccatggctgatctggaggggggtgtgggggttgctgatgcattccccattctggttgccacattctgttgaagtttgaatccccttggaaattcccatgattgtttggaccagattccattgtagacatatcttgtccatttggcatcattcctggtggttgttctaccatgctttgctgtcctgaagcttctctttgggcaatccaagcttgggccaatgcagcccaatcaatctggcttggatcctgttggtgctggaatgactgcatccattgttgctggttcaagggccactgctgccaaggctgtcctccttgatcccacatcccttcttttaaaatatacttgattttctatccactctagttcgggaacacccttgtcgccgccgttccggtaacacctctccaacgctttcgatgctcctacttcttccccc

SEQ ID NO: 438993 - DNA, 1211 bp, Homo Sapiens
  misc_feature (1127)..(1127): n is a, c, g, or t
  misc_feature (1132)..(1132): n is a, c, g, or t
  misc_feature (1192)..(1192): n is a, c, g, or t
acaattttaagttttgcttagtgctgcttgaaatcctagctaccttatctcttttcttcttggtcttctagacttcttatgaatttaaaatgctacctagaacttcaccttctttattaggtgcgtaacactccatcttaattaaatatgatggcagataggttcctgcatccatggcctaacgttggagtggaattttacaaaatgctcactagagatcactgcagtcatttcctaagtgcttcctttgccacagactggcctgggtcctttatttaccttccctcattcactttccctcggccaataccacgttcttgattttctttcttcactggaagaaagcagataaactcctctttggtctgttttcagaggccaggctgattcagatgcctgttgctattgttgctctccattgttgggaggcattccttttcacaagaatgttctgggaaactcttcagaggacgtgaaggaaataccctgaagagtcatgattaactattgactattttctgatttaaaactgctcacctgaaattgatacttttagactttacgatcagtaaattattcagaattcatgaagatgctgagtatgttaagtgtcactgcaggaacggagctgtggtgatcacgttttgcctgcctgtgcccatgtctcttcccttgagcttattctgttgctgattcatatcttgtgttcaattattttggaagcttttcagtcgacattctgtagagtgtgttctgaggaggaactgtgataagaaagtttattataaatattatgtaaaatatatggctctctctgcaccagttatatcttattggttggtcatatcactggaaactggaacctttgattagcaaaattaatattgaaataagaaatagttcttttatattgtgtcatttgggacactttcaagtacaaaatgggtaataataacttgggattgagggcaggaaacacctattttatgggctatctatctaaaacatctttaaaatgggccttctctgtgaatacactttctttttaaaagactttcactaaaatctatccttttaaaaggggaaaaacaaaagggggagagggttggaaaatggcggcgaccttngcccnggcactgtggtggatggctcccctcccccggggagacgtgggacgggggggacgaggggnaccccgcaggacggccctt

SEQ ID NO: 438994 - DNA, 416 bp, Homo Sapiens
  misc_feature (368)..(368): n is a, c, g, or t
  misc_feature (374)..(374): n is a, c, g, or t
gaggttggtggtgaactcagctattctgtcttccagcagtttcttttccttggccagcttgcagttctggtcctccaggatgatctgctcctcctccagctttttcagcttcgcctcggtggtcaccttctccagctgcagcttctgccgggcgctctcctcctcctccagctgctcctcaagctcctggatgttctgctgcatcttcttcttctccgcctgcaggtgctggcagcgctcctcctcctcctccaccctggcctctaggtcatggcagatctcttcttattccctgcttctttggcggtcaggcgggcccggagctcctcagcctcggcacacagctcggtttctgcctggagctgctnctgcanttgcaattttctctgccatgagctgagactgcagcgtctcca

SEQ ID NO: 438995 - DNA, 2710 bp, Homo Sapiens
  misc_feature (113)..(161): n is a, c, g, or t
aaagttttcagactttatttcacagcgattgacacagaaacatactagagttagtaacacggcacccagccccaccgccgcccgcttcatcgggtcctgctcctaggaggacnnnnnnnnnnnnnnnnnnnnnnnnnnnnnnnnnnnnnnnnnnnnnnnnnacgttgcagtttaaggcatttctggcttcggagccatccctgccacctctgcacctgccccttgaccttggtcagacactggctggcccctggtcattctgagacaaggacgactttcactgacgctgtggggaggatttgcagtgaggcagccctcagccgctctcaggcgagatgggaaagatgagacccaccactccaggggtcaaataaaatcaacacatgaagaacacagccatggccaggcccagatacccaggcaggcggcagaggtcaaccccatcccacagtgagctcctctcgatagcccctcgcagggcctggggtgtggcagagggatacggtcatgtccagggtggctgggcagggccagctgagggtcaggacacccagatcggccctggtctggcctctgctcctcagcagcctggggctggcgcaggcagcacgggagcaacgcagagctgtgcccagcagtaacattgtttggaagtcacagtattggcgcaggaggccgaggcagggtccagagcacacacaggaaggagcagctcaaataggggcttggaaaggccctgtggggtcacccggaggaagggccccatcagacctcagcagccccttcctctctgggacacgagtcccgcctgacggagcgagggtgattcaggagccggggctgcttcccggcggggacaccgtggggcaggcgcagtgcaaggcgggggctcagcaccttgaggcaggggtgtgtgtcctgaggctgccatccacgccgagccctccacgctgccacctcgcctgtccatccctcagcactaggtctgtctgcagcacggctgcctggacggaagggaggccgggccagcagtccctccggccaacactcaggcaagaaaatcatatcaaaaagcgacaagtttacaaaaatagaaaataattacagcgggcgcggggctctggtgccagctcatggggtggggcagggccgcagctctggcttggtgacggcgtcctccagcaggtgcagcgggtgccggcccaccaccacatcccgcaagcagcccacaaagcctgtgccgtaggccttgggcagtgctgggcccacgggcagctccggcaggcccccaagccacagggctccatcagtgtccagctgcgtggcgcccagcggggaggagccggtcacaggggcctcattgcccacctgcagggaaccttccctctgctccctatgtgccacgacccgcaaccagcggttggtgttgacgggcacggtggaacgcagcaccacgggctgggagcccaggttgtagctcagttgcaggtgcccgtccacaatggccagtgccacatagtctgcccgctccgtggccttgccactccagagcaccagcccctgcgtggcctcagtgcgcaggctcagttcaaagtggttgctctgcagtgccttctcgctctcggtcacagcgttgaggtactcgacaaaggtccgcccgtcaaaggccaaggtatccacgtcccccgctgacttctccaccagccccttctcgcagtgcggtcctgagaatcccccgggacacaggcacacataggcagcctccctcgggacgcaggaggccccattgaggcaggggtggcctgaggcccgggtgcaggggtgacctgcaaaggacgtgacgtccacctgccgcagcacgtgctccggggtcagcagctggcggcctccgagggagaccagctggatggcaccgtcgaagccagaggacacggcagcagcacgggccagcttgctgaagtcgggagcgccccctacgtagagcggctccttcaggttgaggacggtgtgcggaaccttgcgggatttcgggactcccccaacacacgggggccgtcgcccacacgcagggcacccttgcggccgtttcgctccagtgagaccctggtccaggctcccagggtgactggctccctgctcctgatgaccgctgcccccttgcccaggtcgtagcggaactccaggcggcggtcccgcagtgccagcgacacgaagtcccccttgccgtccgtcttctgcccgttgtagagcaggaggccgctggggcctcgtgccaggaacacgacctccagcgccatcttctcccccaggtcccgtgcaaaggtgtgcaggcctctcagctccaggtgggagaagccgttgaagtcagccaggaagggcccagagccgtcctgccccgaggctgtctggcagaaggtgccctcacgccccagggggcactcgcactgagcaccaccctcgggcagcacacggcagggcagccgcaacccatggcaggggttgggcatggcaggggctcattcatcatcggcacaggttggtccgacgcggccgggcagggcactggcaatggaaccattccagcctccaggttctggcaatggggccccgccatggcaggggttgggcaggcaggggtggtccccgcactcgcccacgccagagcttcgggtggcagcccccggcccaatgccaagtccaggcgtggttg

SEQ ID NO: 438996 - DNA, 152 bp, Homo Sapiens
ttttttttaaagttttcagactttatttcacagcgattgacacagaaacatactagagttagtaacacggcacccagccccaccgccgcccgcttcatcgggtcctgctcctaggaggactgggctggggctgggggtggggatgggatggg

SEQ ID NO: 438997 - DNA, 246 bp, Homo Sapiens
  misc_feature (45)..(45): n is a, c, g, or t
  misc_feature (70)..(70): n is a, c, g, or t
atgttgcccaggaggtcgccgcggagggggcttacatggtcgtgncgttggcagaagggctggcaggccnagtgccagccaggttgtaggccctcacgggtcaacatggtacttggtgttgggatgcaggccgctgactcgggcactggtgtccagccctgctgtcctcactcggtccgcagctgcttctttgtccccagctttccagtagcggatctcataccccaggaggataccattcatgtc

SEQ ID NO: 438998 - DNA, 2266 bp, Homo Sapiens
  misc_feature (194)..(206): n is a, c, g, or t
  misc_feature (402)..(493): n is a, c, g, or t
  misc_feature (1457)..(1469): n is a, c, g, or t
  misc_feature (2035)..(2035): n is a, c, g, or t
ccctgaaaaattgttcctcaatataatgtcccttgatgcgaccactttcttcacacccccctttataaacaccctctttttttgaacacccctaataacaccctgtaaattgttttatattttccccctgaaggggcctttcaataattctcctcctcaggagttgatatgtttcccccaccaaatagtatgtnnnnnnnnnnnnnagcaatgattttggggtttctcctccttccacacaagaggttttccccccgatacacgcacttgtttttctccacccacgcacggccgcgccgtgtgtttaaaacacgtgcgcgccgccctttggctcctgcggtcttttattatgcgccgccccccctctattggggcgcccctcttggtcaccccaagcggggnnnnnnnnnnnnnnnnnnnnnnnnnnnnnnnnnnnnnnnnnnnnnnnnnnnnnnnnnnnnnnnnnnnnnnnnnnnnnnnnnnnnnnnnnnnnatagggaacattttatttggaaagattttgagcatcattctcttttcattttttattaaggcagtaacattctttcttcctggaggcggaggggggaaatcatctgaggctacagtaagttcaatctgaagtcaaaaccaaccaatttgtattcagaagcagcaaaaatactggttatgggctgggaggagccacatgttggctttctgagtccactgccaaggaacagatccagagcaatgcatttcaattgctttgaaaaatggctaagttccattacataccaccactaaagaagatacctcattgatggagcttttcaccatgatagagggcgtcttgcattggttcacaatggcctgttgctttttagccttcagttggtttagggggaaattgctcaacctatgagacctgctcaaattcatactgttctggttttgctttggaattctttgtccagtaaattagctcttcataacgcagttccaccatttcttatccagcatagattcattctgcccttgacagctggctaggtgtgtgtgtatgtgagtaggggtgctattgattggcacatattgtcccccctggagtttaggggtggcagaaagcttttatagtaccaaaaaagtaaacattgataatatggcctgacaacaatcagatatgctaagctctagaagcaaaagcaaggtaggattgcctccaaatgttgacaggtattagccataccacagtaactagatctaatgtgagggctaaatgcctggagaggcagaaccctaaaggatgcttagttatagctccatgctgccgccgagtggcttgatgctccattacaccctccttggatccaccttccattaaggctgaaggctctagagggcagagtattcaagatgttagatctggtccaagcccaaattctagagttaaaagcagaggggttcttagtggctgnnnnnnnnnnnnncctgatgacatttgggactccagttttgaggaaaggctctgatgatgaggcttacttctgcaggctaccagagactcctgagacttcaacagcttgactgatttatcacacactccaagtggcccagagacaaggacggccagaagagatgggcccccccggaaggcatggttccaaaagtgtgaggagcaaagtcatgggaggcagggtaggaagaggggacagaaagaggggcttgcaacagatcaaatgctgacctccaggaacagggtttagggcaggtgctatgtttcccctcctggccctcatcttgaacaaagaaaagggaagccacaagaagctggtttgaaagattatatcaaaattaataccactgcagcttctatccttggctaatggcaaaagcgagaagggtacctggaaaataacttctttcttttcctctagattttcgaagaagcaaataaatcaagaatagaaacctatatataggaggttgggcctcctgcaaagatgaagcactttttgttaaatcaggagaagcttacttggctgcactattatgngctttttgggaatcttaatgagttgcacccaaagtgaacttttggaatggcttggattattccttgggaccatttgggccggcaggcaagaagtgagggaaccggcttcccaaccaggcccattgggcctaaaccctttttatttcttttcccaatggagcagggaaaccgggctaggaccttttgggggtcccttaaaccgggttttgtgaagggattacccttttgctc

SEQ ID NO: 438999 - DNA, 2885 bp, Homo Sapiens
  misc_feature (217)..(229): n is a, c, g, or t
ggctaaaatgccctgaaggagggcagaacccctaaaagggatggctagtttatagctccatgctgcccgccgagtggctggatgctcccattacaccctcccttggatccaaccttccattaaggctgaaggctctagagggcagagtattcaagatgttagatctggtccaagcccaaattctagagttaaaagcagaggggttcttagtggctgnnnnnnnnnnnnncctgatgacatttgggactccagttttgaggaaaggctctgatgatgaggcttacttctgcaggctaccagagactcctgagacttcaacagcttgactgatttatcacacactccaagtggcccagagacaaggacggccagaagagatgggcccccccgggaggcatggttccaaaagtgtgaggagcaaagtcatgggaggcagggtaggaagaggggacagaaagaggggcttgcaacagatcaaatgctgacctccaggaacagggtttagggcaggtgtgatgtttcccctcctggccctcatcttgaacaaagaaaagggaagccacatgaagctggtttgaaagattatatcaaaattaataccactgcagcttctatcccttggctattggcaaaggcgagaaagggtacctggaaaattacttctttccttttcttctagattttcgaagaaggcaaataaatcaagaatagaacccctatatatagggaggttgggcctcctgcaaagaatgaagcactttttgttaaatacaggagaggctacttggctgcactaatatgtgctttttggaatcttatagagtgtcaccaagttgaactttggaatggcttgaatcatccctggagcatctgtgccgggcagtcaggagtgagtgcaccgcctcccacccagccccattgggcctcacaccctcttcattcctttccccatgaggcaggcaaacacggtcatgaccattttggggttcacttcaaccaggtcttctggcagggcatacactcttgctccaatttttcgggccatagagatggcatattttgcattgttgagtttctcatcatcattcagattttctgtcttcagaaggtcatagttaatggaacctggttggatggcatcgatgaggtccagaacaggcagacttgtactaatcttcgggtccttgaaactagagatggatgaacttttctctgcttccctcaatgtttcattcacccagttgacaataatgtcatcattgaccttctggccaccaccaatttcttcgaggatattcagtgtataccttctcattagctgccaaatcaaggccagtgtgagagtgcggtttccttcattgagatcttgtccaccgatgccaaccagggagaacttcgcttgattcttccccaattctaccgcgtagttacaattctcaagcttcttcatattgcctcccagtttggggtatggcggtttgtttactctgttccagtcaacaggaactttgatcttttcatagagctggaagatgaccagggcatctgataagtcactgtacaaatgattgactcgagggttaacacccagggagttcatccagttcctaaatgtccgctcttctctcgtctcaccttcaagagccccccagtcaatgttctggttctctggtttgtgcagggcagggtatctgttaaagaggttggcaataaaagccaagttcaacttggggttccctcggacaacatctgtggctgtgacaaactgccggcagcccagcctctccgcctgctgcagcatgcattctgccctctggatgtcatccttctcccgcagtcctgacatgtcaataacaacagcaggaacaccttcttcatctccttttggagccacctgctcaagcaggtggtaataagcttttgagtccttgatgtcagtactgaagttgccaattttgttgcagcctgcattttccaggtggtaattagcccacctcagcaagagctcttcaggggagagtttcatcaaatcctccaggctctcaccttctctcaaaagagcaatcagagcttcatttctgctgagttcaatgtcagcaaacaacccaatcttgatgacttgccacagaagtcccaggaccagataaggcttcccctccttcaggtcctcagcccctatgttgaccacatggcacccgatgggtgaggcagagttcagagccaagttcagattttcctgaatggtgaaaggggttagcttctttttgttgattgttctttcatcaattgtgtctggcactgacaggttgatcattttacaaaggacaatgccatctccgacagcattaaagagatccattcgtgtttggggttcattgggatgacatgccgacaatcaggatcattttccagggctttgtttatccagttgacaaaggcatacttttcttcctctgaataggagtgttgggtgccaacgctagactgctctgaagtaccaccgattgcacaaatcccttccttcttattgattgcttttctaaaggtcttggcaacatctgtgctttttaggccatggaaaatcttgataaactcatcaaagctgatccttccatcttggtccagatcacctgtagccatcaggttttctgtaatttctcgtactctatacccaggcaaaggcaagcaagcagccttgaacaagtcattcaactcattgaagctgatgtatccattgccatcagtatcaactttggcaaaagcttctctgagctccatcatttcctcatcggacactgatcctctggccattttttattgctttaggtaacagatcttgcaggaaaaaagctgtccttggtagtactggtgtatgaccaggaacc

SEQ ID NO: 439000 - DNA, 1235 bp, Homo Sapiens
  misc_feature (1085)..(1140): n is a, c, g, or t
agctgctcagtgccatgcctaacacaagatggaactccacgatgagatatgtgtgaagacagggtgccatggttacaaacaaggactccaggtgcagactgtttggttcaaacctggaccagcggtatgaatttttgcaactctctgtattgctctttgcctcagttttttcatataacaactagaagtaaaaacaaggttattgtgaaaattaaatgaattaaagtaagtggagtgcctacaacacccccaggcacacggtcagcactgagcatgtttttcattactactcttaatgaggtaagaatgagaaaacaggcgccagccatgagcctggggtttatctggcaaaggcatcagagaccccacttttaacatcctccattcattcatttgaccctgataaggaaggagtcccatgggagaggagcaagcctccaccttggggccagacatctcatgatcaaagttgaactctaccactgttcagctgggtgactttgggcaagtgactttccctctctgatcctcatgttcctttttgataaaaacagcaaaatgtcaggcctatggggattcaaggagccaaaagaaaaatgtgtgtcttagtctgaatttcctggaagtagatcccgaggcaaagattcaaatacaaaaattttgtttggagataacgctaggatattaattcgactgccagttcttccttagggtgctaatcccaggaaacatcagtggaggagtggggaactgagacaggaaaggaatgcagcagttaaagggaccttcatcaagaaagtttccactgtggcagccaggactcagccctgccaggtacctctgagagacagcacagaacatgtgcttcagagtcatcatacccagagcaagggaccaggggtatttatccaccaatacccaccagtcactcctcaggatcctcccaagggcatgattcctccagaatgtcctgcctgcgctgcaagggtcagacctggggttgagggcaggacccttgacagcgcttccagcaatgagcagaaccacagcctgatgtgtacagtttcagtcacccagtcactccnnnnnnnnnnnnnnnnnnnnnnnnnnnnnnnnnnnnnnnnnnnnnnnnnnnnnnnntccaacaccaacaaagtatatacgtacatacacatacatgcatacatgactgttacccacttagatcctagtgactccatgggatagacgataag

SEQ ID NO: 439001 - DNA, 1914 bp, Homo Sapiens
  misc_feature (579)..(631): n is a, c, g, or t
cgtggagaagatattgtgtccgatacaactgtaacaacgcgtattcttcggacacgaatattctttggtgttcgagcaagttctaatcaacagctcggcgttgctgttggctaccactatacctagacgacatgtcctcgctcacgaggttatcgtggatgaatgactcttcacccgacagtgggtttgatacgaaacacctcctgttttgcaacggggcttggtatgtctgtgccgctacaattattttggtccgatcgctcaccacacatctcaaagaggtggtgtgttcccgcccacgtattgtgagtcccagcacattcgcgagctgagtttgtaggccctagacgcaccagcgcgtcgcgtttttggtaatacataagggatctccctgacctggcggtctccctgttgttattacacactctctcatctagtgtggggacgacccgtggttcaccataaaaagtgggctcgtgccccagtactcgtgccccgtcgcgccccagagtagtgagtctgcgagtccccgccccctctcttttcttttgttggtgtttctctttgtgttcttcttcnnnnnnnnnnnnnnnnnnnnnnnnnnnnnnnnnnnnnnnnnnnnnnnnnnnnncagtgctcagtcctctattggagattctgccccctctgggacagatgtccacgctgcccgcgactcctgagcacactcccatggcgggtggcgtgctctgggtgggtgtgcggcagtggccggtcagggtgtagggaaggggactgagaggggaccttggtgagcttgcatttgtgtggggatacacgtgaaggggtgtctgatcccaggactcagggcctcttcctcctggggggcacacagagccccttcccttcctcctcggggaacagccccggaatggggccttcccttggtgcctctaggtcctgccctccagcccatgtccccagaaggtggtctttccttggaggggtcagagactatagcccagggctctggggtcactgtgggaacatctgcctcagctcggcacgcacttctcctggcctgtttcttccactgggaactgggaccctaacccctcaaagggggatccctgagcgagggtcatgggcagggagctggtatggacgggtgtgtgcggggaggggtgactggcggtggctggggtgtcagggggctggggtggcctagtcgtctttatccttggcgccatgtttgaggatgcgggtgaactccacgtagttgaagttgcctttcttatcaatgggtgcctcccggtacatctcgtccacttcctcatctgtgaagcggtcacccatggtggtgagcagctcccggaggtggtcctcatggatgaaacctgaggcttcctcgtcgaagcaggcaaaggcgttgcgaatcacatcctcggggtccgtgccgttcagcttctccccaaacatggtgaggaacatggtgaagttgatgggccccggggcctcgctcatcatgccctccaggtattcgtctgtggggttcttccccagcgaggccagcatgtcgtgcaggtcctccttgtcaatgaagccatcacggttctggtcaatcatgttgaaagcctccttaaactcctggatctgggactggtcaaacattgcgaagacattggatgtggcccgctgtggccgcttcttggtggtcttggctttggcccgcttgctggacatcttggcttctggtgggtggggcttccctctctgagcaccgagagtcttcatctgggactggagacactgaggagctgcccagcagtagggacttaactgactcagtgcccgagagctctcttggtgcggagaaggcgcttgggctcgctgggtgcgtggacatccatacacccgggccgggaccagcctgct

SEQ ID NO: 439002 - DNA, 1070 bp, Homo Sapiens
  misc_feature (558)..(610): n is a, c, g, or t
agggaagccccacccaccagaagccaagatgtccagcaagcgggccaaagccaagaccaccaagaagcggccacagcgggccacatccaatgtcttcgcaatgtttgaccagtcccagatccaggagtttaaggaggctttcaacatgattgaccagaaccgtgatggcttcattgacaaggaggacctgcacgacatgctggcctcgctggggaagaaccccacagacgaatacctggagggcatgatgagcgaggccccggggcccatcaacttcaccatgttcctcaccatgtttggggagaagctgaacggcacggaccccgaggatgtgattttgcaaacgcctttgcctgcattcgtacgaggaaggctcaggtttcatccatgaggaccacctccgggagctgctcaccaccatgggtgaccgcttcacaggatgagtaagtggacgagatgtaccgggaggcacccattgataagaaaggcaacttcaactacgtggagttcacccgcatcctcagacatggcgccaaggataaagacgacttaggccannnnnnnnnnnnnnnnnnnnnnnnnnnnnnnnnnnnnnnnnnnnnnnnnnnnngtccataccagctccctgcccatgaccctcgctcagggatccccctttgaggggttagggtcccagttcccagtggaagaaacaggccaggagaagtgcgtgccgagctgaggcagatgttcccacagtgaccccagagccctgggctatagtctctgacccctccaaggaaagaccaccttctggggacatgggctggagggcaggacctagaggcaccaagggaaggccccattccggggctgttccccgaggaggaagggaaggggctctgtgtgccccccaggaggaagaggccctgagtcctggggtcagacaccccttcacgtgtatcccacacaaatgcaagctcacacaggtcccctctcagtccccttccctacacctgaccggccactgccgacaccacccagggcacgccacccgccatgggagtgtgataagagtggcggcagcgtgg

SEQ ID NO: 439003 - DNA, 1120 bp, Homo Sapiens
gggggtgggcggcttccgggtgggtttcccgccattgcccggttcagggtttaggggaagggggactgaagagggggaccttggtaagcttgcaatttggtgtggggaatcccctaaaaggggtgtttgattcccaggactcaagggcctttttcctcctgggggggcacaccagagcccctttccctttcttccttggggaacaagccccggaaatgggcctttcccttggtgccttctagggtcttgccttccaggcccatgtccccagaaaggtggtctttcttgggaggggtcagagactatagcccagggctctggggtcactgtgggaacatctgcctcagctcggcacgcacttctcctggcctgtttcttccactgggaactgggaccctaacccctcaaagggggatccctgagcgagggttcatgggcagggagctggtatggacgggtgtgtgcggggaggggtgactggcgggggctggggtgtcagggggctggggtggcctagtcgtctttatccttggcgccatgtttgaggatgcgggtgaactccacgtagttgaagttgcctttcttatcaatgggtgcctcccggtacatctcgtccacttcctcatctgtgaagcggtcacccatggtggtgagcagctcccggaggtggtcctcatggatgaaacctgaggcttcctcgtcgaagcaggcaaaggcgttgcgaatcacatcctcggggtccgtgccgttcagcttctccccaaacatggtgaggaacatggtgaagttgatgggccccggggcctcgctcatcatgccctccaggtattcgtctgtggggttcttccccagcgaggccagcatgtcgtgcaggtcctccttgtcaatgaagccatcacggttctggtcaatcatgttgaaagcctccttaaactcctggatctgggactggtcaaacattgcgaagacattggatgtggcccgctgtggccgcttcttggtggtcttggctttggcccgcttgctggacatcttggcttctggtgggtggggcttccctggtgcggagaaggcgcttgggctcgctgggtgcgtggaactgggccatcccgggaattcc

SEQ ID NO: 439004 - DNA, 1488 bp, Homo Sapiens
  misc_feature (3)..(3): n is a, c, g, or t
  misc_feature (60)..(60): n is a, c, g, or t
  misc_feature (113)..(113): n is a, c, g, or t
  misc_feature (170)..(170): n is a, c, g, or t
  misc_feature (172)..(172): n is a, c, g, or t
  misc_feature (263)..(302): n is a, c, g, or t
  misc_feature (397)..(447): n is a, c, g, or t
  misc_feature (1147)..(1147): n is a, c, g, or t
  misc_feature (1466)..(1466): n is a, c, g, or t
  misc_feature (1469)..(1469): n is a, c, g, or t
  misc_feature (1471)..(1471): n is a, c, g, or t
ggngctcttcactgggggcctcctgaaagtggagagtggggggtgaggagctctcatgtngcccccgcaacacccctgttgcattcagacacaggtggaggggctggacaggngcaccctgtgcctgcagcacagcccagggaaggcccatctttgcaccgtgccccccnanaggcgtggctcctcatttgcttgaatcctggcttcttggctctggctgtggctttggcctttttcaccgggctcttgtctctaacgctggnnnnnnnnnnnnnnnnnnnnnnnnnnnnnnnnnnnnnnnnagccacgctcgcctgcttctggggcaccagccttttgacttgtttgacagggctttgctcctccagagatatatctgcatcctcatcctcatcannnnnnnnnnnnnnnnnnnnnnnnnnnnnnnnnnnnnnnnnnnnnnnnnnncaggttaggtctgatgcttcataacgttcctggccactgaggaacacgggtcctgagccagcccggagctggaaagtaactgggggagaaagctgcactcctaccatggagaccatggggaggactgaggcctggagtgaggcaatggtgaccggctgcatcttcttgtcctcctggtttgctgggggcaggatctccacgcgatgcatctcctctttggctttctcccccaaagcaaatcgtatgaagcaacagcctgcagctctgcttcccctccagctggggtctgaaggtccaagtccgcctctcctgactgagctcgcagccccagagcacggtcgtcactgccttttcctccgtgctactggcgctactgagattcatggctccgggcagagaagcgggctggccgggcagctgcaaggagggcgcccgcgtgaggccttgctccctgaccctgaccctcgactggaggatgccagagaccagcaggcatcggcaggtactgaggggtcgctcgcggctggaggggacctgccacggtcaagggctcaccggcaactcctggaggacgagtacccacctcctagcggggtgcgcagcccggggctcgaccgggcgcgtacaggacagcgggactcacgggagagggagctgtccaccgagctcaggcttgaaaggccgcggggaggtcacctgntgcgcttgggcctgactcaaaagcctctgtgcacctccaccagacgcagagaaaggggtgtgcgcgcggcttaggtcccagctccccccacacagccttactgtcgctgctccgcgcggggccagtcacgccatcggcgctcccggagcgcagcgcaacctcatcccctctggccggaaggcggctgtccaagcccgggctaagaagccgtgagagcgagcgagccctgtctccagaacggtgagatctcccgcggagagccgcagcgggcaggtggggtggggaggtgagccgggaggcgaggcgccgcggcaggggncgntncgcacactgaggagcac

SEQ ID NO: 439005 - DNA, 490 bp, Homo Sapiens
  misc_feature (84)..(150): n is a, c, g, or t
ctcagccacgctccgcctgcttctggggcaccagccttttgacttgtttgacagggctttgctcctccagagatatatctgcannnnnnnnnnnnnnnnnnnnnnnnnnnnnnnnnnnnnnnnnnnnnnnnnnnnnnnnnnnnnnnnnnnaggttaggtctgatgcttcataacgttcctggccactgaggaacacgggtcctgagccagcccggagctggaaagtaactgggggagaaagctgcactcctaccatggagaccatggggaggactgaggcctggagtgaggcaatggtgaccggctgcatcttcttgtcctcctggtttgctgggggcaggatctccacgcgatgcatctcctctttggctttctcccccaagcaaatcgtatgaagcaacagcctgcagctctgcttcccctccagctggggtctgaaggtccaagtccgccctcgtgccgaattcgccacccaggcctcgctacctag

SEQ ID NO: 439006 - DNA, 1807 bp, Homo Sapiens
  misc_feature (65)..(65): n is a, c, g, or t
  misc_feature (82)..(84): n is a, c, g, or t
  misc_feature (103)..(103): n is a, c, g, or t
  misc_feature (113)..(114): n is a, c, g, or t
  misc_feature (129)..(129): n is a, c, g, or t
  misc_feature (133)..(134): n is a, c, g, or t
  misc_feature (139)..(139): n is a, c, g, or t
  misc_feature (187)..(187): n is a, c, g, or t
  misc_feature (251)..(251): n is a, c, g, or t
aagttccagatgtgtttccacacattgtaagttaaggcaaggctcagcaaatggttttgggaccngccaactttacaaatannnaatgctttgctttggaagnaaatgatgcnnaaataatagtgaagnaaannacggnaaggggtcttatagagtttatcacaaatcacactgtttgaatcaatgngaacatgtcacatttgcctatgtggcatcctctgtcttgatgatatggaaaagggtgacattgnacagcacctggtggccattgttccaggcatagagagctcgatctcttgcattgtagtcaagcatggatatgtgaaagtattggttatggaagggaatgtctgtgtactcatatgtggaggttttggtggaataggaataatacaccttggctccagttaagtgggagttggtgacatacagtgtcccacagatcatgaaagattcccctgcacttctcttggggtagccagtgctccagctcttcatcacctccaaggtatcttggttaagttggctgatgacaatattgcctgcattctggttagttgcatacacagcccacagcccgatttcatcagccattaggtcgatgtcagagaatccaccccatgtgtaggggtaaacattatgaaaaccagcatactccaggcttcgttgggcaagcactctccccatatcaaagctgtatttgatgatgatattactctgatacttgttaatatagagtgagccattgtagacaacatggttagttcctgcccacttgaaaggaaggttgtatgtccttgattcagccccactgacaaagtctgcaattgatttgtattcacgaacaattttattgttagtataactgtccatgtaccagactctgttgtttttctcagatgctaaagggtctgtcatccaagccccaaatcgggttcccagatgtccttgactgtaactgggcctgtgaattttcatcacgtttgcccacatgtttagcttttttcatgccagtcaacgaagtcttgttttcccaggctcagcactctttggtgtagttcctcgtagtcataggcaccaatttcctcctgaataccagtgaggacagcagacagattccttatttcctccttgaactgggtgattaacttagcatctgttttgtactgttccagcacggggatcaaaggcaggagctcgtccattttctctttcaactcctgaaaatgcttggtcataagtgtctttcgatcatcttcaatctgccgaaattttgccttcagccctttcatttgggtttccatttttaaaacatattggaaatctctctgagttctcaagtttaagacttcaatagactgggacatgttctgaaccttttccagtagttggcgaagttgcctgcttttggcatcccgggaacacaggttttgttctggagcaacaactgtgcaaatgcaccgcccatcaggatcctgagctgagctgtacacctgccacccttctttaggactaatctgagtcttggaaggatctaatccggcaaacaaagacagcagcaggaggttgagaaggttggacgtcgcctgcattctgatctgggtttttgcccctctttactctcttttatgtaggctctccactcactgcagagacctttccctcgtcagttgcactttctgcctgccagtcagagccgagtggaagcagaggcggcggcagcagcagtagcataacagcagcagcggcagcggcggcagccgccctccgctctcgacgaattcgagctcggccgatttggcctgat

SEQ ID NO: 439007 - DNA, 1045 bp, Homo Sapiens
  misc_feature (10)..(10): n is a, c, g, or t
  misc_feature (19)..(19): n is a, c, g, or t
  misc_feature (26)..(26): n is a, c, g, or t
  misc_feature (39)..(39): n is a, c, g, or t
  misc_feature (43)..(43): n is a, c, g, or t
  misc_feature (57)..(57): n is a, c, g, or t
  misc_feature (63)..(64): n is a, c, g, or t
  misc_feature (67)..(67): n is a, c, g, or t
  misc_feature (70)..(70): n is a, c, g, or t
  misc_feature (496)..(496): n is a, c, g, or t
  misc_feature (503)..(503): n is a, c, g, or t
ccaccacaangtccagacntcatttntgaccagctcgtncccnttcaaacacgagcnggcgtnncgntgnctgagcataggctgaggtcaggacagccactgccaatgtgaaactcacacccaccacctccacatggtgcttctcgcattttcaagcaggtgtctgcaggatttcaagtgacactccaaactttaggctcaggcagctcagggagtgggagtcatcggtagcaatgcacagaaccatcttggcactggggtggctctttaccacctttgccagctccatctcattgtcaaagctcagcagctggatccccatgcttggcagcatatttgatctgtgcaatttgcttacaggggttggcgcagatgatcttactggcagggattccaatatgctggaccaactccatctctgccttgttggcaccagcttatagcccagccccagctgggccagaaccttcagcacacctgggctgctgtgcacttnacagcanaaaagggccggactcgtggcaggcacttcagaaagcaaaagtgcttcctcactatggcacccaggtcagccacgaagaaggcagctacctcgtccgtggtggcctgtgaggcccccagagtgagttccttcagcaggtctcgggtactgaagccctcctccaccatcacaaagtccgattcactcaggtagccagccatgccttgcaggaggagctgacgggctggatggagccgctgctgcagccgccgccttagaaagtatgcaacacacaaactccgtcctccttcgcgggggccagagccaggcgcgctgctagggggggtcgccggtgacctcgaaacttgtgcaacaccccgaggaggagtggcagttgcggagccgaggcctcttaaaacgcatttacacggcttcggcccataggtctccccagggagtgaatcggatcctcggcgcctccgctctctcgtttccccgggctcgggtcccgcggcctgcgccccgccagcccagcagccacagacccccatcccgggaattccg

SEQ ID NO: 439008 - DNA, 1059 bp, Homo Sapiens
  misc_feature (13)..(13): n is a, c, g, or t
  misc_feature (16)..(16): n is a, c, g, or t
  misc_feature (29)..(29): n is a, c, g, or t
  misc_feature (33)..(33): n is a, c, g, or t
  misc_feature (37)..(37): n is a, c, g, or t
  misc_feature (39)..(39): n is a, c, g, or t
  misc_feature (43)..(43): n is a, c, g, or t
  misc_feature (49)..(49): n is a, c, g, or t
  misc_feature (59)..(59): n is a, c, g, or t
  misc_feature (66)..(66): n is a, c, g, or t
  misc_feature (68)..(68): n is a, c, g, or t
  misc_feature (74)..(74): n is a, c, g, or t
  misc_feature (77)..(77): n is a, c, g, or t
  misc_feature (83)..(83): n is a, c, g, or t
  misc_feature (102)..(102): n is a, c, g, or t
  misc_feature (104)..(104): n is a, c, g, or t
  misc_feature (107)..(107): n is a, c, g, or t
  misc_feature (113)..(113): n is a, c, g, or t
  misc_feature (115)..(115): n is a, c, g, or t
  misc_feature (122)..(122): n is a, c, g, or t
  misc_feature (127)..(127): n is a, c, g, or t
  misc_feature (136)..(136): n is a, c, g, or t
  misc_feature (173)..(175): n is a, c, g, or t
  misc_feature (276)..(276): n is a, c, g, or t
gaaaacccccccnccnttttgggaaaacntaanttananaaancccccnccccaaccanaagcaantntttttnaanccccgntgctttgctttgttccagntncanactgcntngcttttnccttntagaaaggntaactccctaaaggcaaagctatgacctacagctcannncttccaaacacagtgctcaatgaagccttaagctagtcccactgacactgcaacctatccctatggacaactgttcattgtagatgtgctaaaggccaaancatgtatgaggctgtgggtgagaccacattacttaaatgtggaagggacccttccagagttgcttccctgggactcagtttccctttcatgcaacacttttttactcatgcccacttggtgccaaacgttatgctaagggacagagatgaccaaacagtactgttgttctgaaggagcttgggtctggaagaaaagaaaccccttaagtacttacaagtccattcagcagatgttagatggcagtttctacaaggtgcaatgcaggggcatggagaaagaaaatagaaaatctgcctggggcgatcaggaaaggcaacactgatgagaagcaaggaatgactagaaaggggtaaagaggggagaggctgagagaaggatgctgcaggcagaaggaacagcctgggcaaaggcatggtaatagcatcattgggcacacagcatcattgggaaatgcaaattgagtcattcagctccgaaggagcataatatatactgtggggaaagctgggaatggggctatggaggcagggaagctctgacttgatcctgtaggcagtggagaattgccaaattcagattttgaacaggactatgatacctttggagggggtggcatgagaccgggagatcagggggcctttggagagaggaagactgaactagaaagcgaggttccacataagcacactggaggcttatttaaggaggcagaattcacagagcttggtaatgcctagatgtgggcggtgagggagagggggcagcaggaaaggaatcccccg

SEQ ID NO: 439009 - DNA, 1087 bp, Homo Sapiens
  misc_feature (6)..(6): n is a, c, g, or t
  misc_feature (11)..(12): n is a, c, g, or t
  misc_feature (20)..(22): n is a, c, g, or t
  misc_feature (25)..(25): n is a, c, g, or t
  misc_feature (27)..(27): n is a, c, g, or t
  misc_feature (32)..(32): n is a, c, g, or t
  misc_feature (37)..(37): n is a, c, g, or t
  misc_feature (43)..(43): n is a, c, g, or t
  misc_feature (50)..(51): n is a, c, g, or t
  misc_feature (57)..(57): n is a, c, g, or t
  misc_feature (59)..(59): n is a, c, g, or t
  misc_feature (63)..(66): n is a, c, g, or t
  misc_feature (70)..(70): n is a, c, g, or t
  misc_feature (75)..(75): n is a, c, g, or t
  misc_feature (78)..(78): n is a, c, g, or t
  misc_feature (88)..(88): n is a, c, g, or t
  misc_feature (94)..(94): n is a, c, g, or t
  misc_feature (98)..(98): n is a, c, g, or t
  misc_feature (132)..(132): n is a, c, g, or t
aatctnatttnncccttttnnncangnaaccnccacnaagtcnagaacgnnattttntncccnnnntcgnccccnttnaaaacacganccggcntctncgatggactgagcatagcctggaggtccagacanccactgccaatgtgaaaactcacacccaccacctccacatggtgcttcttcgcattttcaagcaggtgttctgcaggattttcagtggccctccaaactttagggtcagggcagctcagggagtgggagtcatcggtagcaatgcacagaaccatcttgggcactggggtggctctttaccacctttgccagctccatctcattgtcaaagctcagcagctggatcccatgcttggcagcatatttgatctgtgcaatttgcttacaggggttggcgcagatgatcttactggcagggattccaatatgctggaccaactccatctctgccttgttggcacagctaaagcccagccccagctgggccagaaccttcagcacacctgggctgctgttgcacttgacagcataaaagggccggactcgtggcaggcacttcagaaagcaaaagtgcttcctcactatggcacccaggtcagccacgaagaaggcagctacctcgtccgtggtggcctgtgaggcccccagagtgagttccttcagcaggtctcgggtactgaagccctcctccaccatcacaaagtccgattcactcaggtagccagccatgccttgcaggaggagctgacgggctggatggagccgctgctgcagccgccgccttagaaagtatgcaacacacaaactccgtcctccttcgcgggggccagagccaggcgcgctgctagggggggtcgccggtgacctcgaaacttgtgcaacaccccgaggaggagtggcagttgcggagccgaggcctctgcttaaaacgcatttacacggcttcggcccataggtctccccagggagtgaatcggatcctcggcgcctccgctctctcgcttccccgggctcgggtcccgcggcctgcgccccgccagcccagcagccaatcccgggaattccggaccggtcc

SEQ ID NO: 439010 - DNA, 2182 bp, Homo Sapiens
tttcagtttttaaaaacctaaatatttatttatttgcattatatttacaaaggtgggaaggagaccaaaggagaccccaagaacacccccacacctggctgaccaggccccttgcactgcagaggaggcagacacagctggaaggaacaggatttatgttgcatacttgaactacagcgagtgtaagactggtcctatttacagggcagaaacactgcaggtggagcgcgggggtggcagggtgggcaccagagtcctggccaagggtacccttgcctgccatcttccccacctctcccagatgcatctctgaggccccgctgggattctccggggggaacgaggcccactcacatgatgctcgctggggtgaagacagggcccacgcacagggtgtctgtgatctcccagccgcaggacagaggcttgcacacaccctccacgtcatcctcctgttctgcagccatcagctgctttcgcagcgcttcccaggccacccgggacatggcataggtgatgtggcaggcctgggtcccccaaaagggggaacccatgcccacagtgtaggcgcccatgttgtcaaagaccagccagtcccctacgtgtagttgcggcagccacaggccctcagccacgcaatcacagccatcaaccgccgggccccacaggctgctgctgtacaggggctgctccgtggatggtttcttctgcaggatgggggtagggcagatgttgtcaaacaggactgagttgaagatcccatacacgccctcatcaaggtggtacacgatggtcttggaggtggaaccattttcctcctccctgccaggctggtctagcagaacctccttcttggcaatgatgctgactgccacagtgaaggccgaggtcacgtagtagcgccccagctcagcaaagatgtccacgccacagccctctgggaagtacaggtccaaggctgagttgatcacggaagcaatctcttcaaatctcactttggccccttctgtgccagggaagccaccaccaaggtccagaacgtgcatcttgtgacccagctcggtgcccatttcaaacacgagccgggcgtctgcgatggactgagcataggcctgagggtcaggacagccactgccaatgtgaaaactcacacccaccacctccacatggtgcttcttcgcattttcaagcaggtgtctgcaggatttcagtgacactccaaactttaggctcaggcagctcagggagtgggagtcatcggtagcaatgcacagaaccatcttggcactggggtggctctttaccacctttgccagctccatctcattgtcaaagctcagcagctggatccccatgcttggcagcatatttgatctgtgcaatttgcttacaggggttggcgcagatgatcttactggcagggattccaatatgctggaccaactccatctctgccttgttggcacagctaaaagcccagccccagctgggccagaaccttcagcacacctgggctgctgttgcacttgacagcataaaagggccggactcgtggcaggcacttcagaaagcaaaagtgcttcctcactatggcacccaggtcagccacgaagaaggcagctacctcgtcaagtccattcagcagatgttagatggcagtttctacaaggtgcaatgcaggggcatggagaaagaaaatagaaaatctgcctggggcgatcaggaaaggcaaacactgatgagaagcaaggaatgacgtggtggcctgtgaggcccccagagtgagttccttcagcaggtctcgggtactgaagccctcctccaccatcacaaagtccgattcactcaagttagccagccatgccttgcaggaggagctgacgggctggatggagccgctgctgcagccgccgccttagaaagtatgcaacacacaaactccgtcctccttcgcgggggccagagccaggcgcgctgctagggggggtcgccggtgacctcgaaacttgtgcaacaccccgaggaggagtggcagttgcggagccgaggcctcttaaaacgcatttacacggcttcggcccataggtctccccagggagtgaatcggatcctcggcgcctccgctctctcgtttccccgggctcgggtcccgcggcctgcgccccgccagcccagcagccac

SEQ ID NO: 439011 - DNA, 502 bp, Homo Sapiens
actctacaggatctttgcagctctctctgatggggtttttgggtagatacaaatagataatataagtgcctggcatgatgtctggcatgtagtaaatgctcgatacatgtggatttctttcccttgttgaggggtggggaccacacgggagtaggaagcagttggggaggggtcagcagcctgtccctgcccctgccctcagctgagctcggtgctcacgtgagagccctctgcccaatggggctgcgtctccagtgtacagtgtccctgccagtcccatgcttggctacttgcagcacccctctctcacccctagggaagcgctgcgaagggcagctgatggctgcagaacaggaggatgacgtggagggtgtgtgcaagcctctgtcctgcggctgggagatcacagacaccctgtgcgtgtggcctgtcttcaccccagcgagcatcatgtgagtgggcctcgttcaccccggagaatcccagcggggcctcagagatg

SEQ ID NO: 439012 - DNA, 2028 bp, Homo Sapiens
  misc_feature (28)..(28): n is a, c, g, or t
ccatttacaagtggaatggacaggaatnattttaatatttttatattaattaatgatattttgatgcaatatatatggcagcaaacctccatatgtgttacccattagtactgtgtttttttaaatggggatgaagcactaataatcactacctgtaaaataaagaacatttattattttggtgagtctagcaatcttttctgagttgtaagttcttaaaaaataaattctaacaattacagaatactgatttgacttccacctttttcgtacttttattttaccccaaagcaagcattaaacacataatcttgctaggagagaccatcttgttagtattatgaaacactggtgggagtaagaaccagtatcattgatatgcaaaattgtgcagttatctctgcaaatcattaggaaaatgttgaaaggttaaaaatcaaaacaaaatatagtggtgatccccaaaactattttgacattattttgacgatgagtaatttagtctcaaccaaaatctttttttcccattcataataatcctcctcccctcaaatgtctttaaaaaatacatgaaacagttcaataacaaaaaccgaagagcacgaactattttcaaaaacagaaaaatctctagtgcagaaagaaacctcaaagagcagattcctttgcagacattaatcaatgcgcttgcaaagattatgaagatttctctttcctctttggcggacagtctactctatttgaagtttccactcccactccgttttctgttctttttttagaagatctcgaccgtttctttttcatacatgaggcctgaatattagaatcttctacccacctctgaagccagagagtaattaagttccatgttacgtaggcttggatcgtgcaactggacgacagaacagcaattttagctgccaacacatttacatttccagtaagggcatcaggattccgattctgcgatccagccaggtgaaacccaacagtgagtacggaaacaattaaagtcacaagtctacccaagataaacacaatggcccacagagatatgcctttctggtacttttcatcactaaagtaaaacaggccgcacatgtgggaaagtaattcaacaaaataatgcagtaccaaaagaagaagtcccaaatgattcaagtacaagagataagctccagtaatgtggaagaggtgaagaccaatgtagacaagttgacgagggatgtcttgttttttggttttctggaagtagagttcaggaaaagcatgaaacccagtaagccaactgggatatgtagaaaaacttcatttgaaatgtcatcatgctatggggacgagccttccatataagagttgggtctgacaggcagttttcagagattaaaatgaatgtgccccgaatacaagaaaaaaagtagaacacactaaactgaccagactcgttaaacttgttttgtttcgctttggtgaactgcattctcttgttaattttatccaacacatattcctgaattgtggcatgaataatgattgccaccagcatgtagaagaaaaccgtggccaaatctttgacaccataataatagagggactttgagcccgtggcttgttcctctgctgcaggggcagcaacactgtgctgaagagtgagaaacacgatggatgcttctgctgttccctcgaacacaagccccagcaggaagaacatccccacgcaggagacgatgtccgcatgattctgcaggatgaattcctggctgagaacgggggggttcttggtgctcttcttacggagccccatggtggcgcttcccggatactcaccggcgagccgcagctgcctccccctggctgctcctcacagcgccgccgccacggtagcagctccgggggctccacttcccatcccgaagtcagtcccgggtcgcagcggccgcccagaaaaaaaataaatcaaggcgagggccgagctgagctgagcatccgctctcgacgaattcgagctcgccgatttggcctgat

SEQ ID NO: 439013 - DNA, 1152 bp, Homo Sapiens
  misc_feature (20)..(20): n is a, c, g, or t
aaggctgaaaattaatgaancttcccacatccataaaatgccctgagtaacgccaaatggatgccggaacagcgattctaacagcctaacacattgaagtttcccagtactgaaaatcccagcttcctgattttcctgctcttgcaaggcccaaaacccaacagtcaggtactgaaagaatttaaggtcagaagtcttccccaaaccaaaaaagacctgcccacagagaaaaatcctttctgatacttttcattgctaaaataaaacaggcgggaaatgtggaaaagaaattcaacaaaataatgtagcaccagaagaacaagtcctagatgattcaagttcaaaaggtaagctccagcaatgtggaagaggtaaagaccaatgtagacaagctgacgaggaatatcttcttttttggttttctggaagtagagttcaggaaaagcatgaagccagtaagccagctgtgatatgtagaaaaacttcatttgaaatgtcatcaggttatggggataagccctccataagatagttgggtctgagatgtagttttcagagatgagaatgaatgtgccccaaacacaggcaaaaaggtagaacgcactaagctgaccagattcattaaacttgctgtgttttgttttggagaagtgcattcgcctgttaattttatccaacatatactcttgaattacggcatgaataattatcgccactagcatgtagaagaaaacagtagccaaatctttgatgccatagtaataaagggacactgattcagtagcttgttcttctgttgctgggagggtgacattgtactgaagagtaacaaaaatgatagaagcttttgccgttatctcaaacatgagccccagcaggaagaccatcgccacacaggagacgatgtccgcgtgattctgcaggacgaattcgtggctcagcactggggggctcttggtgcttttcttgcgaatcgccatggtggggccgccgcccgcgcctgcaggtgctccgccccggttctgctcttcccagctgctcaccgactcgccgccgcctcccgctggctgctcctcacggccccgctgcagccgctcgctggggcttcacttcccatcccacagccagtacgcagccgccgggccgcccgct

SEQ ID NO: 439014 - DNA, 1960 bp, Homo Sapiens
gaaactagacagacatttattttgtgtttgatttcactggttcaaatgtctacatgctggagtaaatccacttgcctctcttcagggcttttcctctgcagtatattaacctggccgaggatggcatatgccactgttgactcctggtcctccaaggcctaggaggctcaccccaccggcagggcctggagccatagcaaactcagaagaaggccacaggtacagtctcagtgacatcagacattgggctgattcctgaggcatcgctcctgtctcccaggacagcagggtctggctctctgataagtagctaccaggtcacaatcacatgaccactgcaaaagcatcagccccagctggtccaggctccagccagcctctgggcagcatgagaatgggctccctgcctgttttgatcatccaaatctagcttcaaagggctccaaaatgtgctcaccacatccggacccgaaagcaagagctgatttttaagagtgagattctcattgcatttggacaaaatgaataatgtgcctttcatattttctttgtatttctcttcaatagttgcttgaccaacatctttctgtctgctctatacaatgaaaatacaaactaaatgagaatagaaaaaataattaaagcattgaattgtacaaattacaaatctgttccaaaatatacttacattaaataaaatacgcatttcaataagagatctacagtgaatgactctatgcattctgggaggcttcacaacatctaggcagggccaacattcgtgaaagaagctaagagattttgcatccaatcacagtttgtagcgggtatcttattgccaatctgcgagttacactgaacacatcattagcatcgcttgtgcagaaaaccaattttgtttgggaaaagggaaagcaagctctggcctcaattttgagttcattacaacttcttaagaatttcaccaacagcctatacagtacaagttcaaaaaagtaaacatgttaaggtaagcagacaactcttcagaagcccaaacacattttcttgctgtatttatgttgaattctccatctacaatgagcagtcatgaagatggtcttcttcagggcaacatggtcacaggactggggcaatccaggggactgagagggagcatgaggacgggagagggggctacctcttgctgtttcatgttagagacaaactgtaacacagtccatgggcctgcaatcgtccccttttatcatctggcataacgtttgatgtagtcatccactttattccggaagtcctccttgtcccgcaaatgatgttctgcagcttcaatattcagtggatcatcaaaattcaaaagatcagtaaacaaagagtttaatccccaaacgacatcctttaatgttcttgtgggagcccagccagtgccatcaattgaatgttctctcaataaactcagacatatttcccctgtctctgtgatgttggggtgccagatcttggtcaggcatttcactttgggaggcaccatgttgtacgcatcgggaacttcagtttcaaactgaaattttccaccctggtagtaaccctcatctggggttactgttagctgaaaacaatgaagcttgtttggatcaggaaaatgcactttacatgtacaaggtaaattagcttcaagttctgcaacctctttaacaagcaatttgtctctcacagaaaccctccgagtcgagtcggacgctgtggctgccgtccgggaccctttgagaccatcgtcacgcttcagtttacttgctagcgttagcattactgctgcctttaccctgggctccccgagacaggcgaggcgggcccggcgcccaacaccatgcccggtccgggcggctgctgcgagacgcggcccctcacagccgcaccggctcccggcggcgggaccggaagtggcggggcggggactcccgct

SEQ ID NO: 439015 - DNA, 1439 bp, Homo Sapiens
  misc_feature (685)..(687): n is a, c, g, or t
  misc_feature (689)..(689): n is a, c, g, or t
  misc_feature (691)..(696): n is a, c, g, or t
  misc_feature (1094)..(1094): n is a, c, g, or t
  misc_feature (1180)..(1180): n is a, c, g, or t
  misc_feature (1261)..(1310): n is a, c, g, or t
gcctattagggatttattagaggtagaatatcaataatccaggtgaaagtctacaaccatgtcagaacacaatctaactcctttgatatttacaatctcaaaaaattcaggcatgggtactaagcagacagcagaaacccaacattcaaaaccatcacagcaaaaagtcattccatacaaagacaaaagaactctacaccaggaggctcaccatgtctcgccgaaagttatgaagtggaagtttagctaatgcctgaaaggcgtcctttatcttgatgtttttcatttcaacaagaaattctgaaaacgtctcaacatctctgagtaatggaagaaggcatcaccttctctagctaggaaaagggatagagctgcgtctaaatgtttgagtggtgtccgaagcagaaagggagctgttgtctttcaggggccgccatgcctgccgttaggaaatgccatttgactcgcaaactggttatggtagttgctgatgaagaagatgaggagccaggatgtcattccttttttacacagtctgtcttcctgcccataaccacactttaatcaccatgggcaatgaccgtacttaaattttgcattgtaaaacagggacgcagcagtaatggaaaaagtatcatcactcataaaatttggaaaatgcaacatgagtcttctgtgtctgtgnnngngnnnnnnttttaacacacacaaaccaggaaggaaaatgaaacacaagcatctgcttttcatcagcaaacacaggcaaagcaaggggcagcagaggctgtgtcactgaagtatccgaggatttaaacattcctacatccggactccttggtcaaccaaagcaaggctctctgagaagcatttgaaaaatacgcattgaaaagtgtccatggaacccacatcattataagcttctaaatagtttcgggattttggttgtttttaacgacagttccaacatactctaaggaatattcttgtgtaaatcttctacctccagttcccacatactttcatggatgggattatcagaaaggtctgtcatcttcacagcctgcaggcagggctcagggctgcaggcctgaacnactcccatcaccataacatactttcctgggactagacagggccgcccgcgcggcacccgctccaggccgcggaccgagaagtcccngctcgggtccctcagccgagcctcgccgcggtccgccatcactaccctgccctgcatccacacggccgccaggtccagcgnnnnnnnnnnnnnnnnnnnnnnnnnnnnnnnnnnnnnnnnnnnnnnnnnntccgcgtcgcgccgcagctgtccgccagcaccttgagtggcggcgacctcggaagccgcacccccgcggggccgcctgagaacgagtccgcagccgccgccattccgccatcccgggaattccggaccg

SEQ ID NO: 439016 - DNA, 1487 bp, Homo Sapiens
gctggtgccttaactgagtggtctttttttcattccattgatgaaagcaacataagaaagccaagagtgaaaggggtaaaagatcacagtataaaggtcttcggtgtgtccttcaaagatttacacaacattgtcctaaagggaagtcacagcagcttagctgtttctcacagatcagagaggatggtggggcagccaggagtcatcagtaaacccaggtgagcagtgcaggactgaatgtcgctgtccacttgcaggtgggagtccatgtggagggtgctccttcttgtttctcattgggacggtgactgtgtacagtggaaagcacagagccaatgagggacaggatggctgtggtggagggaaaacagtgcagggctgctctgtctctctgtcctgtcccgttaggactggtgggccaccacaggtttcgcgaaggtgtggctggccattcctttcctcgcgttggggtttctctgtgtcagcgagcctcggtacactgatttccgatcaaaagaatcatcatctttaccttgacttttcagggaattactgaactttcttctcagaagatagggcacagccattgccttggcctcacttgaagggtctgcatttgggtcctctggtctcttgccaagtttcccagccactcgagggagaaatatcgggaggtttgacttcctccggggctttcccgagggcttcaccgtgagccctgcggccctcagggctgcaatcctggattcaatgtctgaaacctcgctctctgcctgctggacttctgaggccgtcactgccactctgtcctccagctctgacagctcctcatctgtggtcctgttgtactggacggggtccccagggtcctgggggcttttttcctgtctgttggtttgatgggcagccgtgcccacctccgggtccgcctgggggagaggcccaactgatttgtccctgttgggctctgccttttcgtccttggcctcctcctcctcggacgaggtctcctggtcactgacgttgctggtcagctcctccagcttcctcctcaaggcctcctcctctacatcggcctccgtgcgcactccagcacctagacccttggccaagggaggcacaactgtgttctccaggtaggtcagcaggcattccacagctgaaatatgcttattcagctcaaagatcgagtgcagcagcagtccccagggccatcctgtgggagcctccaggcgggcagagctcagccagggcgccgtgtctggaaggtgagatgctggtcggctgctcttccggatgggagtggcacccagaggccccagtatcagcctcctccaggccctcagccttgtgaggggctgccttctctgagcaggactcatctgtgagggactgtgggctgtccctggcctcagggactgaggacaggtgcagggagtgaccttgaggctgagtggagtcatctgagtctccctcgaagtcgaagt

SEQ ID NO: 439017 - DNA, 1963 bp, Homo Sapiens
  misc_feature (212)..(212): n is a, c, g, or t
  misc_feature (255)..(255): n is a, c, g, or t
  misc_feature (603)..(603): n is a, c, g, or t
  misc_feature (610)..(610): n is a, c, g, or t
  misc_feature (656)..(656): n is a, c, g, or t
  misc_feature (662)..(662): n is a, c, g, or t
atgtggggaaagcccccgagaaccccaaaggaagggaccaagggatgggttggtggtggaaggggaaaacccggggcaaggggctggttcgttctcttctgtcctgttccccgttaggactggtgggccacccacaggttttccgcgagggtgtggctgcccattcctttcctcgcgttggggtttctctgtgtcagcgagcctcggtacantgattcccgatcaaaagaatcatcatctttaccttgactttcnagggaattactgaactttcttctcagaagatagggcacagccattgccttggcctcacttgaagggtctgcatttgggtcctctggtctcttgccaagtttcccagccactcgagggagaaatatcgggaggtttgacttcctccggggctttcccgagggcttcaccgtgagccctgcggccctcagggctgcaatcctggattcaatgtctgaaacctccgggtccgcctgggggagaggcccaactgatttgtccctgttgggctctgccttttcgtccttggcttcctcctcctcggacgaggtctcctggtcactgacgttgctggtcagctcctccaggttncctcctncagggcctcctccttttacatcggcctccgtgcgcactccagcacnctaganccctgactctcagaagacgcccggcctctccgcttggaatggtgggaggccatcacgtgagcccggatgctttcctcatcagaggtgtccacatcggccaagtactgcaggggcagctgctcattcctgatgacattcgacccgagtgcagcagcaatccccagggccatcctgtgggagcctccaggcgggcagagctcagccagggcgccgtgtctggaaggtgagatgctggtcggctgctcttccggatgggagtggcacccagaggccccagtatcagcctcctccaggccctcagccttgtgaggggctgccttctctgagcaggactcatctgtgagggactgtgggctgtccctggcctcagggactgaggacaggtgcagggagtgaccttgaggctgagtggagtcatctgagtctccctcgaagtcgaagtcgtggacggagaggaggcgcttttttttgctgccaaagggctgggcctgggcctgggcctctgagtcaggttctccatcctcatctgtctggtcgctgtctccacttctctcttcagatatcggttcaggcccagctccaccctgcagccgcccgtggagggaccggatgaccttggcacttccgaacctcttgaagcgggctttcacatgctcatagtaccactccagtgagccgatcttcacgactctggccagatggcaggggtcacagatccagccctgctcctccgggtggacgcggccacagcttttgcaggtgaagaggccacattccaggcactgccttttgctattcacaagcagctggtagggctgcaggcagcgggcgcagtgggtctcgttcagatgggcagtgtcggaaagcagctccctcttggagctttccttcttaatcttgcccttcaacgcctctagccgttcctcttctttccttcggaggtcaaaatctcgttgaacaacttccaagacatgctgggcctcttcatcagtgagcttggaaagatccagtttcttccccatttctgcttcttgtcggggtcacaccggaccctctccgggggacgctcagtccctggtccagcacctgggagagaaaggaggcgacgaagcagggcgtcaggccagggcgtcaggtcagggcgccggggcaaggctggataatgggggcaagcagggcgcggggcgcagagcggctggttagcgcctggctctccggggcaggcgggcaactggccacgtcccggcgcctcccgcccgaaccacgtgggctgcgccccgctccgcccagctccgggagcg

SEQ ID NO: 439018 - DNA, 1808 bp, Homo Sapiens
  misc_feature (21)..(21): n is a, c, g, or t
  misc_feature (25)..(25): n is a, c, g, or t
  misc_feature (28)..(28): n is a, c, g, or t
  misc_feature (1705)..(1745): n is a, c, g, or t
atatatgtatgatgtcctttnctanttnttttttggtatttttccttgctatttcttggttccaacttgataatttcttaagattgtaaattatatagtactcagctaaaatatttcttcataaatagttacaaaacctgccaaaacacaaaggggaaagtatttttcattcaaaaaaatgacatttgaatgtcacacaacacaagaaacaatgcttagagacatgttattgtttccagaagaaaatggtcagtaaactacttagctgaagacaaaagactacccttccccaggatcacagtgcacaaaaagcaaaatgtcaaacaacagtacctcaaagcaaaataaaggtctgaggatgaagccagctcacttgtaatcctgttaaagaatgagagtcaccgtttaggtccaatgtactgggaacatttgctagctcagaatgcaatattggtagaatttgctaagaattcaaccaaggatgccgaagattcgccagctgaggctcgtttttctggaaccatttctaacatcgggatcaggaaatctgtaaactgtgcagcatcttcatggggccagccatacttttccacaagtacatcaaagaggctccagggcttcagcttggtgatgtgtcgcagttctcctctgcgattgaagaattcccgagaatattttccagatagagcaaagtgccttggaatactgcctagcagctctatgatgtgggctatgtggtcttcgtctctggaatagtcttccccagaatgtggttcaaacaaataatctcccgttgccagctcaaatgccatacacgccgtgctccagatgtccgcaggggtgctgtaccccgctcctattaaaacctctatggagcggtactgacgcgtctggatgtcttccgtgaagtgtttatgcacccaacaagcatttcccaggtcagcaatttttactctaattttatctgcattccgcggatccaggggattcaccaacaagtcagctgcccgggtttttgcttttggcaaatcccccagtactggaggctgaaaccgttctgcttctgtcatgggatggactgctctcctcttgctcagtaagtggtgatccctcagaaagcacagagccgcaggccacaggttctaaggatccagagaacaacgaggtggaaaactctgggaactgtgactcgggaattttatgtcgtccatttggcaattcaccattgaattgttcataggagctgctatatgtgtaatcactttctgcatttggctcatcaagattatattcctcaggatttgggcagtcttcttcatcatcatcttcatcgtccagttgctgctccagtgagaatgggccattctcaatatggccattggttttaggtgattctatccacgtagggtctatgttcgcaagttcctgatctacatcatcttcatctttttctatgttttctttctcagcatcttctttctcttcctggtcctcagcttcaccattgtcctttgcagtctctgcctcagccgcctcctctaatcctgttgtttttagtttcacctctgggcagtattcgccatcctggtcattggaaggtgcagctgaggtgatgttttcttctattattttcctttcagcttctcgctccaattcttctatctcctgcaggcgcttctccaataactcagcctgcctcttctgnnnnnnnnnnnnnnnnnnnnnnnnnnnnnnnnnnnnnnnnnctataggtttctgctgtggagccgtactcactgcagaccctgaaggaggaggagcacctgctt

SEQ ID NO: 439019 - DNA, 936 bp, Homo Sapiens
  misc_feature (726)..(726): n is a, c, g, or t
  misc_feature (729)..(744): n is a, c, g, or t
  misc_feature (819)..(819): n is a, c, g, or t
  misc_feature (886)..(886): n is a, c, g, or t
ttctttttgtttttagatatttttcctataggtttctgctgtggagccgtactcactgcagaccctgaaggaggaggagcacctgctttctgccactcagtggcctcagctgccattcttctcacatatgcatcatccacacacatcaagatattttccggctttatgtcagtatgaatgatcttgcacttactgtgtaagtaatctaacccttgaaggacctgtcgaatgatactcttcacacaacgtactgggaggccttgatagttggatttgatgatccacttgaggagatggtggccaagtacttcgaagaccatgcagacatgtatcccattcatgcctgaaatcttgaagtcgtcaatgagctggaccaccatgtctttgtttgggtcactgggatcactttctcgaacacatttgagcaattttatttcatccaaggctgtctccgtataatgctgggcactttttacaactttcattgcaacaaatcttttcccctgcatatcccagcacagccagacagtagagaagtgcccccatccaagctttctaataacatgataccggccattgaagaggtctccaattttcactggatgatatccacctttgcagtagtccgcagggtcctctttgctcctcatcatctgattccaggatctcctcctctggctccgggggtgtggggtttggcaaaggtggcgcgtcggtggtggtggnggnnnnnnnnnnnnnnnnactaaaggagctttctgttgaggctccggcctttctgaagaggacgacttctcagagttaactgacatcagcagntcaatcttctgcttgatttctggaaaaatgagaaaatattcacaaccaagattgcctgcccttgctntcaagccttatatcaagagatttttcttctctaatcccttttgttcagaa

SEQ ID NO: 439020 - DNA, 1120 bp, Homo Sapiens
  misc_feature (805)..(833): n is a, c, g, or t
cgaatagtcgaagacgctaaccgcgggtactgcgttatattgaagcgcgtcgtatttctgaatatatttacggtaaattgttaccaaaagagtgtcttgcacagtgaaactccgtgcgtgccgtgctaagccccccaaaggggggaaggagccccttttctttgtagcccacccagggggcctccaggtgcgcattttttctccacaaagggggatcatcccgccacccatcaaagaattttttccgggcttttatgtcaagtaagaaatgattcggccacttaacggtgtaaagtaatctaaccccttgaaaggaccctgttgaaatgatactttttcaccacaaccgtactgggagggcctggatagttggattggatgatccacttgaggagatggtggccaagtatttcgaagaccatgcagacatgtatcccattcatgcctgaaatcttgaagtcgtcaatgagctggaccaccatgtctttgtttgggtcactgggatcactttctcgaacacatttgagcaattttatttcatccaaggctgtctccgtataatgctgggcactttttacaactttcattgcaacaaatcttttcccctgcatatcccagcacagccagacagtagagaagtgcccccatccaagctttctaataacatgataccggccattgaagaggtctccaattttcactggatgatatccacctttgcagtagtccgcagggtcctcttgctcctcatcatctgatcccaggatctcctcctctggctccgggggtgtggggtctggcaaannnnnnnnnnnnnnnnnnnnnnnnnnnnnaggaggaggaactaaaggagctttctgttgaggctccggcctttctgaagaggacgacttctcagagttaactgacatcagcagctcaatcttctgcttgatttctggaaaaatcagaaaatattcacaaccaagattgcctgcccttgctttcaagccttatatcaagagatttttcttctctaatcccttttgttcagaatgaggccacaagattcgcagtacttctgttaggactgggattcaatggtgctataaagggaaaaagctccagaggcatccgaaga

SEQ ID NO: 439021 - DNA, 1675 bp, Homo Sapiens
ggaaaaaaaaaaaccaaaacactttaatttttaagacaactgcaagcacctcaaacaatggattattgttacaacacttgttagcttttcacaatctagttattgcaaaggcatatggataaatgttaatggacaaagtcaaaaacgaggcaccttaatgaatgtaaaatttaaaataaaaagacattcaatccactgacttctaaaagaggctaaatatacctctatatattacattctaaaattgtattgcctactatggtttgtatcctggagtctacaattaattttaaggaaatgcataaacaaaactgtgtgcaacctgcaaagggaaaatcattttctcaacttcgtttcatggaaagacaatgaaaaagctagtaaaatttgttgtagccacacgtaaagctacctatggaatgaatgtgatcactgttatctttgagctgtgagaagtattctgcccactgcactgcaaattgtatataccataccttgtgttctagacaagcatgatcatgcttttccaaaaatatatgtattttttcattccacacaattaacacgtttctccaatttaatctatgtagagcttaacttacagcgcccagaggaggcaacatgacatggtactgagccatcacatttttaaagggaaattgctcttctttaaaagtacttttaaaaatatgcaaaatcacaaatgggactgctaaattataatgcatattttagaatgagaaacatatcttttcttcctttaaagtgccatatagagaatgacatcttataacccagagccactttgtttaaaatccaatgtgaaaagactgttatggaatgaaaagtttgcacaactccttggagcagttaaagtccgctacatgcaacataggctacaaagcactcaagacttggtagcttttctgaaatttgagtccccctcccatatttaatggaaagtaacatttacagggtgcatttacatacactataatacaggaatgatgtccctttgccagaagataaaattgtacatttccttgctatttcttggttccaacttgataatttcttaagattgtaaattatatagtactcagctaaaatatttcttcataaatagttacaaaacctgccaaaacacaaaggggaaagtatttttcattcaaaaaaatgacatttgaatgtcacacaacacaagaaacaatgcttagagacatgttattgtttccagaagaaaatggtcagtaaactacttagctgaagacaaaagactacccttccccaggatcacagtgcacaaaaagcaaaatgtcaaacaacagtacctcaaagcaaaataaaggtctgaggatgaagccagctcacttgtaatcctgttaaagaatgagagtcaccgtttaggtccaatgtactgggaacatttgctagctcagaatgcaatattggtagaatttgctaagaattcaaccaaggatgccgaaggcattcgccagctgaggctcgtttttctggaaccatttctaacatcgggatcaggaaatctgtaaactgtgcagcatcttcatggggccagccatacttttccacaagtacatcaaagaggctccagggcttcagcttggtgatgtgtcgcagttctcctctgcgattgaagaattcccgagaatcc

SEQ ID NO: 439022 - DNA, 1130 bp, Homo Sapiens
  misc_feature (965)..(965): n is a, c, g, or t
atctcattgtgccatcctcttcgtgtgtgttcttgtcccgtttgcttctttgtgtggtatctcactttcttcactgcgttctctggcgtctcgttcctcgtctgcagtctcctcgtcagggcgcgggtcctccaccggctagcttccccacacgctgggccctccttgtccctgttttgttctcctattgtgcagctcttctctcgctctcatgttcacgactgtttcttccgggggcttatatggtcccctttctctgtgattgtgcccctttcctggttacgcttgttatactcccttgtaaggtctctgtccgtgtcggtcttcgttcacacctctgtcctgggagcccttgcatccttgggatttcgaatgcatcccaccgttggacggagattgtgtgccccaggtaccgttcggagtcccatgccagacatggtatccccagtccatgcgcttgtgtgcttgaatttcggtcaatgaggctggaccaccattgtctttgttttggttctctgggatcacttttctcgaacacatttgagcaattttaatttccatccaacggcttgtctccgtataatgctgggtcacttttttatcaactttcatttgcgacatatctttgttcccctgcatatcccagcacagccagacagtagagaagttgcccccatccaagctttctaataacatgataccggccattgaagaggttctccatttttcactggatgatatccacctttgcagtagtccgcagggtcctcttgctcctcatcatctgatcccaggatctcctcctctggctccgggggtgtgggttctggcaaaggtgccgctgtgtttggtgctgtcggtggaggaggaggaactaaaggagctttctgttgaggctccggcctttctgaagaggacgacttctcagagttaactgacatcagcagctcaatcttctgcttganttttttttcggatgtttctctcttttcggcctccgctttcgggcctgaatggccagcactttccgggagctcattccgacgcgggcggaagcggggcggggggcttcgcgacggcgacgcgggcgccgagacgagctgggctgcagcctccactcgcaccccgct

SEQ ID NO: 439023 - DNA, 1207 bp, Homo Sapiens
  misc_feature (720)..(720): n is a, c, g, or t
  misc_feature (764)..(774): n is a, c, g, or t
  misc_feature (874)..(882): n is a, c, g, or t
  misc_feature (901)..(901): n is a, c, g, or t
  misc_feature (906)..(906): n is a, c, g, or t
  misc_feature (928)..(928): n is a, c, g, or t
  misc_feature (971)..(971): n is a, c, g, or t
  misc_feature (982)..(982): n is a, c, g, or t
  misc_feature (1042)..(1042): n is a, c, g, or t
gtttccagtagtaaacgtctttattcttccgtgacgtcgcacacccaagccacctcccgcggactctccgctggcagtcccacccagtgagggtagaggcggtggagggcccacccaaggccggctcttccaagcaccacaaatcctctcctcgcccaggtccctttccccctttctggccttcgtggggacaccttcagagtccccaaggaaggctgtgctgatagcctcactcaacccagcttttcaaagttctgcaggaggcaaagggcaagcccagagattagggttagagaccaaagacaagcggtcgttacccctaatatccaaggggaggggacgggagggggctttttgtaaaaatgcccctgaggtatagaaccggcaggcaggcaggctcggaacaaaacaccctgaaccagccacgaagactgctgctcccagactcctttctgcttcagtggtagatgaggccagggcagagggttttcatcatgtagctatgaaaggaagcccccaacccggtcagtcaggcaatgaggggctgtctgaagcacaattggaaccccctcccaaaggccatgtctgtccgaaacttcatgctggtgggtggctggcggcggagcagtgactccgtctggtcttggggtagaggctcattatagatgggtggagatgagccccaagccatttctacggggcctcttcagttgcccaaanggcggtagcgtcgcgccagggtaccccaagccacgctggcatcnnnnnnnnnnnccatcactagccagggccgcaggcaccccggagcaccggcagcccaggcccgggcccgcagcccagcccggccgcgccatcacctgccgcccaaggcccnnnnnnnnncgctcaaaggtgcccaccnggcgngcgatcacagagccatctgccngtccatcgcggagtcgcggtgccagacgcagggggacagaggngcgggcagccnggtctccaccatcgcgggcataggacacacgcaggtccacagcccagtcagcggcggtcngttcagcaaaagcgccgtcggccgccggccagaacggggcagcagtagaaaacaccaggccagagccacccggcgcccacgggagcgcaatcgccgccgcaaagagcggctcagtgggccgctccggcccggtcacggccgcaggcagcgcggcaggccggccca

SEQ ID NO: 439024 - DNA, 1382 bp, Homo Sapiens
  misc_feature (100)..(112): n is a, c, g, or t
  misc_feature (143)..(143): n is a, c, g, or t
  misc_feature (820)..(902): n is a, c, g, or t
  misc_feature (938)..(998): n is a, c, g, or t
  misc_feature (1279)..(1279): n is a, c, g, or t
ggctgaacaagcacccagcaggggggctagacaagccaattcatttcccatcgctgagtgggtggggggaggcagcgccgaccttaatcacatggtgttnnnnnnnnnnnnntaactaggggcacgtggcagggaggggaggnaaggccaaggcaggggattgccccaccggccgccccccaaacccctacccatggcccccaataaatatttgcaggggatgccagggcttgtggccgtggcgggggtgggtatgcgccaaccctatttcaggcagcgctcaaagtaggtggagccgatgtagccaccccgcatggagcgctgcacgttctgctcaaacagccgccggttgttctgcaggacctctgcggcctccttgttcagtgggtcctcggggttgggctccaagaagagatactgcaggccataaattatggagtttatcgtaaggactggcttccagtcctctctgaggatgttgaggcagacgttgccctcgaggtcaatgttggggtgatagaccattgtctcacacttcaccttggggggatcatgcgggtaaccctggcccaccttaaaactgaacacaaacttcccactcttgtagaagccctcatcaggacagatgaccagcttgaagttgaggaggtcgtctggatctgagaagctgatatcacacgtcttgggcaggttcagctcgtttatgtccttctggatccgcagctgcgccgccgacgccttcttgctgctgcccttggtgccgcccgccgactcctcctccttcttctgctgcttcagcgagaacagcttgatcatcctnnnnnnnnnnnnnnnnnnnnnnnnnnnnnnnnnnnnnnnnnnnnnnnnnnnnnnnnnnnnnnnnnnnnnnnnnnnnnnnnnnntcctcggacccgcagctgcggcctcctccgctgctnnnnnnnnnnnnnnnnnnnnnnnnnnnnnnnnnnnnnnnnnnnnnnnnnnnnnnnnnnnnncgcctcggctcccgtagtccggctccggcctggcccagcgcctcgaactcgctcggcagcgctcggccaaattcggctgttctcgggcccgcccggccccgcccccactgcccggggccgctccttccttgccctcgccaactctggtctcaggccccgctgcagctgcggactcggggctcccccgaccgtgccgtttggccgctcagctgatccctccgcgagggggtgcggctaggggtgggaggaggacacggcagctgcggtgacggcgggcgggnactggaggatcgtcttccgcggcagcagcggctttagcgcggaggtcggcaacggcctcgggcgccccatcccgggaattccggaccggtaccagcctgcttt

SEQ ID NO: 439025 - DNA, 1317 bp, Homo Sapiens
  misc_feature (128)..(154): n is a, c, g, or t
  misc_feature (194)..(202): n is a, c, g, or t
  misc_feature (281)..(295): n is a, c, g, or t
  misc_feature (378)..(387): n is a, c, g, or t
  misc_feature (417)..(458): n is a, c, g, or t
  misc_feature (491)..(590): n is a, c, g, or t
  misc_feature (598)..(805): n is a, c, g, or t
  misc_feature (1017)..(1028): n is a, c, g, or t
  misc_feature (1079)..(1119): n is a, c, g, or t
ctccctcaaaaaaaggggggtttattcttggggggaaaaaaaggtgttcttcgtgggggcgggaagaaccacaaatcacgtgtggggcggggggttgcttcccccccggttttgtgtagtttaagaannnnnnnnnnnnnnnnnnnnnnnnnnnatcttttttgtttctccccgccctctgtttcctccccccnnnnnnnnnaaattattattgttgttggccagggtgggccaaggggtggggcgtggtcgccccacggggggaatttccacggggtctnnnnnnnnnnnnnnnttcgggggggggtttcccactggcggggggggaaagagggcagaaaaagttccaccccctcattctcaaataaagtgccagcnnnnnnnnnncgttattttattttaagaaaccctttgggnnnnnnnnnnnnnnnnnnnnnnnnnnnnnnnnnnnnnnnnnnttggggttttttttaaacgccgcgggtcccccnnnnnnnnnnnnnnnnnnnnnnnnnnnnnnnnnnnnnnnnnnnnnnnnnnnnnnnnnnnnnnnnnnnnnnnnnnnnnnnnnnnnnnnnnnnnnnnnnnnnaaaaaaannnnnnnnnnnnnnnnnnnnnnnnnnnnnnnnnnnnnnnnnnnnnnnnnnnnnnnnnnnnnnnnnnnnnnnnnnnnnnnnnnnnnnnnnnnnnnnnnnnnnnnnnnnnnnnnnnnnnnnnnnnnnnnnnnnnnnnnnnnnnnnnnnnnnnnnnnnnnnnnnnnnnnnnnnnnnnnnnnnnnnnnnnnnnnnnnnnnnnnnnnnnnnnngcagtaacattcccctttaatagcctggtgggacctccagaggtggaggggtgggttgcctgggcccagctacccaggcccgttgcccacccactccacagcccagagtgggggctgaacaagcacccagcaggggggctagacaagccaattcatttcccatcgctgagtgggtcgggggaggcagcgccgaccttaatcacatggtgttnnnnnnnnnnnntaactaggggcacgtgccaggaaggggaggcaaggccaaggcaggggattnnnnnnnnnnnnnnnnnnnnnnnnnnnnnnnnnnnnnnnnnataaatatttgcaggggatgccagggcattgtggccgtggcgggggtgggtatgcgccaaccctatttcaggcagcgctcaaagtaggtggagaccgatgtagccaccaccgcatggagcgctgacacgttctgctcacaacagccgccggttgttctgcaggacctatgcggccatccttgttcagtgggtcctcgg

SEQ ID NO: 439026 - DNA, 1070 bp, Homo Sapiens
  misc_feature (187)..(199): n is a, c, g, or t
  misc_feature (250)..(290): n is a, c, g, or t
  misc_feature (908)..(974): n is a, c, g, or t
gtgggaccctccagagctggaggggttgcttgcctgggcccagctacccaggcccggtggcccacccactccacagcccagagtgggggctgaacaagcacccagcaggggggctagacaagcccattcatttcccatcgctgagtggttcgggggaggcagcgccgaccttaatcacatggtgttnnnnnnnnnnnnntaactaggggcacgtggcaggaaggggaggcaaggccaaggcaggggattnnnnnnnnnnnnnnnnnnnnnnnnnnnnnnnnnnnnnnnnnataaatatttgcaggggatgccagggcttgtggccgtggcgggggtgggtatgcgccaaccctatttcaggcagcgctcaaagtaggtggagccgatgtagccaccccgcatggagcgctgcacgttctgctcaaacagccgccggttgttctgcaggacctctgcggcctccttgttcagtgggtcctcggggttgggctccaagaagagatactgcaggccataaattatggagtttatcgtaaggactggcttccagtcctctctgaggatgttgaggcagacgttgccctcgaggtcaatgttggggtgatagaccattgtctcacacttcaccttggggggatcatgcgggtaaccctgggcccaccttaaaactgaacacaaacttcccactcttgtagaagccctcatcaggacagatgaccagcttgaagttgaggaggtcgtctggatctgagaagctgatatcacccgtcttgggcaggttcagctcgtttatgtccttctggatccgcagctgcgccgccgacgccttcttgctgctgcccttggtgccgcccgccgactcctcctccttcttctgctgcttcagcgagaacagcttgatcatcctnnnnnnnnnnnnnnnnnnnnnnnnnnnnnnnnnnnnnnnnnnnnnnnnnnnnnnnnnnnnnnnnnnncccgcgtcgcctccgctcctcggacccgcagctgcggcctcctccgctgctgccgccacccgcccggcctgccgcgccgctccgctcctctccccc

SEQ ID NO: 439027 - DNA, 1541 bp, Homo Sapiens
agatttgaaacattcgtttccctttattagctcagtgaggctgaaaatttgagttctggtttcaatgttggggaggagatggttatatcatggggatgtccctaaacatagaaaagctgttcatgagatcacaagcagtcacgaacatgacgaatgtctatgacaatacagttacaaaaatgggaatgcatactccataattctccacctacagctacgtactaagtataatttaatgtcattaagtattcttccacagtaccatatttgaggactgcccagtatctcattaattggatgtcctataatcctataatgtgttttagctactccttattggacatgtaggtggtttccaaattatagtagcttaactttgggaaaatccacgatcatttgcttcaggtaaacggggagagattgctaatgtcctccaccactaccctgtcatcccacgctatccagttttaacccttccttagccttcaagtagcaaacctcagaacatgccgccatatttcacagtgccagtgaaatcgcagttctcctttcctccctgctcacataaccagcagtggctccagtgtttgcacagactaccttgacatcttttacactgtgatcttcatcccatcaccatttgaggggtccatctgaatagctatgtattacgttcttgtcatctcctggaaattcttaaactctgcagactatacttctgatactcccttcacgataaaatctgaaggtcttctacttctggtgcagtattggcatatggataaaatcaggagttttaaggtggtgatataaaatcacttaagttagcttctctggtctctacttttcttatttataaaatggaaataacaacactatgtataccataggtaggatcataatactatttaccttgtagattgttataagtattaaatgagatcatttatatgaagtatgatatggtttaaatgttttgtcccctccaaatctcatgttgaaatgtgacctccaatgttggaggggggacctagtgggaggtatttgggtcaaaagtgtggatcactcataaatggcttggtactgtccttgcagtaatgtgtgagttctgattctatgagttaacatgagatctggttgtttaaaagacctggggcctcctccctctctctcttgttcactctctcgccatgtgatataccggctccccctttgtcttccaccatgattgtaagctcctgaggtctcaccagaagccaagcagatgctggcaccatgcttgtacaaccagcagaactgtgacccaattaaacttcttctctttataaattacccagcctctggtattcctttatagcaatgcaaaatggactaatacaaggtactcagcacagtaccaagtaagtgtacgagaaatgttagctattcaaagtaaccagataaaattgtctctttttgtaggtcactggaagcttcacatccaatagtattatttcagtctgatattatcactcctaagtttcaaaaatgaaattttcatc

SEQ ID NO: 439028 - DNA, 2202 bp, Homo Sapiens
  misc_feature (562)..(562): n is a, c, g, or t
  misc_feature (605)..(668): n is a, c, g, or t
  misc_feature (911)..(920): n is a, c, g, or t
  misc_feature (2016)..(2016): n is a, c, g, or t
  misc_feature (2019)..(2019): n is a, c, g, or t
  misc_feature (2021)..(2021): n is a, c, g, or t
  misc_feature (2023)..(2024): n is a, c, g, or t
  misc_feature (2028)..(2028): n is a, c, g, or t
  misc_feature (2035)..(2059): n is a, c, g, or t
cggagagcccaaggtagcccaataatggattttgatgagcgtggtccctgctcctctaacatgtatttgccaagttgtacttactacgtctcgggtccagatttctccagcctcccttcttttctgccccagaccccgtcttcgcgcccaatgacatactcctactcctccaacctgccccaggtccaacccgtgcgcgaagtgaccttcagagagtacgccattgagcccgccactaaatggcacccccgcggcaatctggcccactgctactccgcggaggagctcgtgcacagagactgcctgcaggcgcccagcgcggccggcgtgcctggcgacgtgctggccaagagctcggccaacgtctaccaccaccccacccccgcagtctcgtccaatttctatagcaccgtgggcaggaacggcgtcctgccacaggctttcgaccagtttttcgagacagcctacggcaccccggaaaacctcgcctcctccgactaccccggggacaagagcgccgagaaggggcccccggcggccacggcgacctccgcggcggcgncggcggctgcaacgggcgcgccggcaacttcaagttcggacannnnnnnnnnnnnnnnnnnnnnnnnnnnnnnnnnnnnnnnnnnnnnnnnnnnnnnnnnnnnnnnccccgagagcagcagcagccccgagtcgtcttcgggccacactgaggacaaggccggcggctccagtggccaacgcacccgcaaaaagcgctgcccctataccaagtaccagatccgagagctggaacgggagttcttcttcagcgtctacattaacaaagagaagcgcctgcaactgtcccgcatgctcaacctcactgatcgtcaagtcaaaatctggtttcagaacaggagaatgaaggnnnnnnnnnnttaacagagaccgtttacagtactactcagcaaatccactcctctaagactccagcggctggaattgggtggggggcttcatacacatgagataatatgcagattttgcccttgacaaagtcaagccacatggtgacttttgaaaagaggtgtgcaagagagggatgcatggagatagccccacaggaggtggtctgggactctcttgattaagatctcagtggttaagattcctaataatcattggattctgagagctgtgcatcagctagaatgacaggtttgggacccctggtggttcactcttggagcctgcagagctgcgggctgggtgtggtctccactggggattgggcccctgccagaccccctggagactaaccccaccacaccctccctctactgggagcctacccacccccaggacccctgagtaaaaaagctgtgtgctcttcaagcccagttcagcttggggacaggggcaggaggaaggggtaggaattactaggtgcccagaatgaggttgtttttcaaagccaatgtgaacaggggttggactttgaggtagctttgaggtggaagagggctgcaaatccttgtgggaaaagaaatctatgattccaggtggcatcagtgtctttccactcctcctagccacccaccacactgatccagccctgagttcctagccaccgcctcctacagcccacctggcttttctttctaccaaatgagggtcttggttccagcctgccactcaggcccaaagcctcgacacagagtggactgttccctgaggtgggagatgtggaaaagccaagaggctgcagccaggccactggcccctgagatctctgcaggaaatggctgtggagtgtggcagtttggcaaactctccaccacacgtaatgaaacttggatttgctcagtgtctggctgcagagcagtgggcctggccagcaggtccccagctttggctatgagggccttgagtcccccaaaacaccgggttccagcaccacactcagccctcattggctcttgaactgagcttggaagcttctggtgaccttccaagagcctgagagtgaggtgnaantntnntganagataannnnnnnnnnnnnnnnnnnnnnnnntccctgaaggaaccaaagcgaattttaaaagatgcaatgtagaggggaaaagagatgatgaaaatatttaaaggccctatctgtttacagtgttccgtggttagactcgctcactgctaagaatatttgaatgtatgttcata

SEQ ID NO: 439029 - DNA, 819 bp, Homo Sapiens
  misc_feature (181)..(181): n is a, c, g, or t
ttgaaaacctttaaaataaagctgtataggcagcagcgagttttctgaaaatgctggtattttgggcagcaactcccaagacctgaacaccttatgccatttaggagcactaccatttagaaatcaatctttttttaaagcctactatatgccctcaccaggctccacattttgcaaactntcttttcactttcatcgtcaaaacaatcctgaaagatagataggaatgcacccattttacagacaggaaactcaggaccagaagtcacttgttccagatcgccctgttaaagtggtaggccaggatttgaacccacagctggctgcccactctgctctctccctacctcctgagatcccctttcctcagctggtgcctcctagagctccatgacaccctgcccttccgtcctgttccccctgctgcactaaacatggtaggctggttgtccctttctcttcagttagctggaggggtctcctcggaagttctgctcagtgactattttttcctaataaaaatagtgagcctgaaaaagttacttctaacccagcatgaggaaaagggctatggagtccacagtataagtctgcaccatgaaactttcaggctaaataggacagtataaatttagtgttttaagaacgatacctggaaccagactgccagcttcaaatccttgttctgccacttacaaagttttatgatttagggcaaatttcttcacctttctgtgatgttccctttccgggtcgcatcaggccggagaagggtccctcccgctcgtccgtgcgcgcacctccgccgccgctcggaac

SEQ ID NO: 439030 - DNA, 2187 bp, Homo Sapiens
  misc_feature (3)..(3): n is a, c, g, or t
  misc_feature (70)..(70): n is a, c, g, or t
  misc_feature (236)..(236): n is a, c, g, or t
  misc_feature (315)..(315): n is a, c, g, or t
  misc_feature (324)..(324): n is a, c, g, or t
  misc_feature (329)..(329): n is a, c, g, or t
  misc_feature (346)..(346): n is a, c, g, or t
  misc_feature (402)..(402): n is a, c, g, or t
  misc_feature (407)..(407): n is a, c, g, or t
  misc_feature (2105)..(2141): n is a, c, g, or t
gantatttattgttgacgcttttttccttatatttaacattttgagataaaggctaaatgagtttatttntgtgcgtatacaagtacaatcaatgtgactgtgacaactgcaaatgcaaagctgataaacatgtgttgccttgttgactcaaataccagaagctgcgttgtcattgatgaaggaatatttcgaagcgctgaacaattcttgataaagttccgaaacaaacaaagcncaatcttccctcgatttacatgggagttgcattccattggactggtcttctccatagtttttatgggatggtgcatacnagaacatcngagcnaagacatacagattccncatcccatagatgcctgtgaaaaaggccactgttcaacttggaactgtgacgccgnccccnatttcccaatggccttccgttacctgactaacgatgaagaagatgacagtcatggcagcgcaggccaaggtgataagcatgaggaacttgaacctaaaaattagcccctcatagtgtagccgccggactttgctcatagctggcaggctggactgcttcccactgatgttccgaaacacctgaaataccatgaagcatagaaacaggaagtagaggcagaggcagattccagccacgatgatgaaggccatggccagctctgttccaatgtctgtagtccagatactgtagaagggattcgtgagttgtacccctctctcacacatgtcaaatatgaagaggcagaaggagccaacggcaatgggtccgacttgcttccaataccctgcgatgtggttccgctcgtgctgatccatcatgtgctcgccacagaagatgatccagaaggacagaagcatcgcatagaagatgccctgtcggatgtcaccaaacagcagcatccaggtccagtcaaacccgatggaaaaccattccactgggatattgataaaggtcatggaaatcccaagggcaaagatgactttttccagaagcactggggggtcgggacatcatggtgatcctcctccaataccacaccataatgatgaagatgctgggcgtaaggaaggtcttcatggcaaaccaccaccttggtgaagcctccattttggtggatccccaccaaccggatatctttatctccccaattcccacattgattttcttcttctcattcacaggcagccggatgtttaaaaggtaaaacttatgggccacagacccaatttccatgaaaggaaggacatcacattcatagtaacggccctcatgctctggagtcttgggagatgtgaaggtgcatttgagtttccgtggtactctttcatgggccatttcagtccactcagcaaacgcgtcatcacggtaagccagggaaacgtccatggagacttctgcattttctctgatttggttgtttagcttgaaggcaatgtccagctgcaggataaacagcatgaattggaaccaaggactcatctccatgtgggggaggggaatgtgaacagaaaacacgatgtcattggcttcaatttcccttggaattgcctcttcaatgtctcggatcttgtcacaatgattgggtccccaaggcacgaaccattttgtcttgtgatggttcttacgggcatccacacatttcaccgacatgtaggacactgccgttgtgggccctggagcaatcaagcctcccaccagaaaggcgatgatttggaacacgagcagaatcccaccaacaatgcacagcttcttggtgctcatgttttctataattgccccagccatttttgcgccccccctttttcttttctccttgaaataaatgttttagggtgagctttttgctccctcctctcacacactccctccttcctcgcctcctttctgggcgctgcaaaacttcagaggtgctggagcgcggcgaggatgggaccgggacggaaggcgcccgcacggattcccccggcgcagccggctcgggttcccccaatgcccggagctgtgattgtggccgctccgccgcctgtggacgcttaaaggagcagggaagcggatcccgctctcgacgaattcgagctcggccgatttggcctgatnnnnnnnnnnnnnnnnnnnnnnnnnnnnnnnnnnnnncgccaccaccgcattaacggggggtcccctatagtgatcgtataca

SEQ ID NO: 439031 - DNA, 514 bp, Homo Sapiens
ttttaagacaatactcaaagaatatttattgttgacgcttttttccttatatttaacattttgagataaaggctaaatgagtgtatttgtgtgcgtatacaagtacaatcaatgtgactgtgacaactgcaaatgcaaagctgataaacatgtgttgccttgttgactcaaataccagaagctgcgttgtcattgatgaaggaatatttcgaagcgctgaacaattcttgataaagttccgaaacaaacaaagcacaatcttccctcgatttacatgggagttgcattcctggaaaattcagtatattttaaaaccatgcaaaatatccttttaaaaaaatatggtaacatgggagtttaggaccaaggctcaggtaactataaaaatttttacctacataaatttctagtggagtggtttgaaatttgtttaggactgtgtccctcattggtggggacatttggcagatttccccccttgcccactaaatccccaatagcacctcctcccccc

SEQ ID NO: 439032 - DNA, 912 bp, Homo Sapiens
  misc_feature (761)..(761): n is a, c, g, or t
gcgagggcgagggcgaggacggcggcccgccccggggaggcaggctggcaggtggacaggcgggcaaggacagctccgcgagccccctacaactcgtttccttccgttcaccttcgcagggcggcgactggcggcgcgatggacctgaccgggctcctgctggacgaagaaggcaccttctccctcgccggcttccaggacttcacgttcctcccaggacaccagaagctgagtgcccggatccgaaggaggctctactatggctgggactgggaagccgactgtagcctggaggagctctccagcccggtggcagacattgctgtcgaactgctccagaaggcagcccccagccctattcgccgactccagaagaaatacgtagctcatgtgtcccgggaggcatgcatctccccatgtgctatgatgctggctctggtgtacattgaacggctccggcaccgaaacccagactacttgcagcatgtgtcatcctctgacttgttcctgatctccatgatggtggccagtaagtacctctatgatgacggggaggaggaggaggtcttcaacgacgaatggggagctgctgggggtgtggccgtgcccactctcaatgccttgcgagcaggggcttcctgagtgccatggattggcatctctacactgaccctcgggagatctttgaggtgctgaactggttggaaagctgtgtggctgaccaacagggaacggtggcgaagctggtaccccttacacgnacctgggggggctggctggacaacccgaactggcagtttgggcctggggctcccccttggccaccgggttgggtaaaagctggccttcgcctgtttacaccgtggggaattttggtgaaccccaaggtgtgggccccttgggcccttaggt

SEQ ID NO: 439033 - DNA, 396 bp, Homo Sapiens
tttgatttccctaggatggaagagtataggtgggagataagggaagtggggtgagaggagaaaggaaatgttggcatgggcctgtgtgatgtccctgaggcaaaagagccggggactgaatgggttccaggtgggagctgcctgggtgaggcagggaacccttttcactcccattccttagctttagtctaatggagccaaggactgctgggaccttcaaccctgatcttttgtcttccagtcttctcttagtgtcctgctcctaggtttccctctcttctggttcttctcccaggtattctcttcccaggcctctctggccactgctttgtatcagggtttttcacgcttttgtaggactgaggtttccatcaaacagtttcagttgaaaaaaaa

SEQ ID NO: 439034 - DNA, 2609 bp, Homo Sapiens
  misc_feature (121)..(140): n is a, c, g, or t
  misc_feature (156)..(203): n is a, c, g, or t
  misc_feature (505)..(540): n is a, c, g, or t
  misc_feature (2595)..(2595): n is a, c, g, or t
gacgggcgcggggcaaataacgcgtggggggcgtatcgggtacggggggtatatcgaggcaaggggtggagcgaggtatggaagcgtggtgtgggatatgtatgactgggcgcgaaaatannnnnnnnnnnnnnnnnnnnagatactaatgaggcnnnnnnnnnnnnnnnnnnnnnnnnnnnnnnnnnnnnnnnnnnnnnnnnattgtggtccgacggggcgatactagaatacaattgtccgggttttataagatgtgtcccaaggaagcggggataaggttgtctctaggatgcgggatattgtgcgcggcttggcggatgcgcgctgatgcgtgagacgtaagagtcttacaggcgccgacttttggtgagggcgcccggcgcgttaaaagaaaacgcggcgtgcacggggtcaacgccctgggccccctctagagggggtcttcttggaagcgccgccccccctttgtggcgcatctggtggggggcggtggaatgtggcnnnnnnnnnnnnnnnnnnnnnnnnnnnnnnnnnnnncggattgccaggctgaaactgtttattgaaacctcagttctacaaaagcgtgaaaaaccctgatacaaagcagtggccagagaggcctgggaagagaatacctgggagaagaaccagaagagagggaaacctaggagcaggacactaagagaagactggaagacaaaagatcagggttgaaggtcccagcagtccttggctccattagactaaagctaaggaatgggagtgaaaagggttccctgcctcacccagcagctcccacctgaacccatcagtccccggctcttctgcctcagggacatcacacaggcccatgccaacatttcctttctcctctcaccccacttcccttatctcccacctatactcttccatcctagggaaatcaaaagtaaaagtctaaaaaatcccagggaggcagagaggggcttctatgtccatctgggacatgtccctggtcaccaagcggaagctctccctggcggcatcactgtcctggccaagcagccagccactgcgatctaggagtgaattaccttcagtccttctgccccaccaccccataagctcccacccaggaggacaggggacctgccaaggacccagcgaggcagacaggatctgaatcaagctttgctcctccaggttctcagaaactcccaaaccctcttaatgcattcctcacagccctacctagcctgggaaaacgaaagacttgaggcgagccagctccatgacactgaaaagggaacattgctgaggctgaggaagtgaaaggggcaccgggctccaaggccaggggggagccaggccataggtatggtaccaggggctggacagcgcagtggggactgtacggttggggtggaggcaggcatggcaggttggggagtctctctggagcttctggcaaaggtggcagttatgaagaagagtgggaggggcaggggggtctgggggaggcaatggtggaggagtcagtgaggccagaagactgccccagagtgaccgcagccccatgctgccttccaggcagctggagacattagcgagagacggcaggcattgtggcacagaaggtatgcagggctccaggaggcaacgggaggtcagtccaaggtcaggcggcccaggtgtagggatgcaggacagccccaaagactgatgtattacggccaccgatgccacagccagggccacactgctcacatatgccacagctaacaggcaagacagctttaccagccgctggcagagggagcccagggccaactgccaggtcggctgctccagcagcacacacaggtctgtgtaggtgtaccagcctcgccaccgtccctgctgctcagccacacagctctccaaccagctcagcacctcaaagatctcccgagggtcagtgtagagatgccaatccatggcactcaggaagcccctctccaaggcattgagagtgggcacggccacacccccagcagctccccattcgtcgttgaagacctcctcctcctccccttcatcatagaggtacttactggccaccatcatggagatcaggaacaagtcagaggatgacacatgctgcaagtagtctgggtttcggtgccggagccgttcaatgtacaccagagccagcatcatagcacatggggagatgcatgcctcccgggacacatgagctacgtatttcttctggagtcggcgaatagggctgggggctgccttctggagcagttcgacagcaatgtctgccaccgggctggagagctcctccaggctacagtcggcttcccagtcccagccatagtagagcctccttcggatccgggcactcagcttctggtgtcctgggaggaacgtgaagtcctggaagccggcgagggagaaggtgccttcttcgtccagcaggagcccggtcaggtccatcgcgccgccagtcgccgccctgcgaaggtgaacggaaggaaacgagttgtagggggctcgcggagctgtccttgcccgcctgtccacctgccagcctgcctccccggggcgggatgcctaaatccngggccgtacagcct

SEQ ID NO: 439035 - DNA, 1016 bp, Homo Sapiens
agcggcggttcctgcccgcgggtcggggcgggaggctgggccagatgggcggcaggaagtgccaggcgctgacttgcaggcggcacccccgcggcttgtaaacgccgggcggacgcggcacaggcggagtacgcgcctcgcagccgcatctcctttctgctccgcgagggcggcgactggcggcgcgatggacctgaccgggctcctgctggacgaagaaggcaccttctccctcgccggcttccaggacttcacgttcctcccaggacaccagaagctgagtgcccggatccgaaggaggctctactatggctgggactgggaagccgactgtagcctggaggagctctccagcccggtggcagacattgctgtcgaactgctccagaaggcagcccccagccctattcgccgactccagaagaaatatgtagctcatgtgtcccgggaggcatgcatctccccatgtgctatgatgctggctctggtgtacattgaacggctccggcaccgaaacccagactacttgcagcatgtgtcatcctctgacttgttcctgatctccatgatggtggccagtaagtacctctatgatgaaggggaggaggaggaggtcttcaacgacgaatggggagctgctgggggtgtggccgtgcccactctcaatgccttggagaggggcttcctgagtgccatggattggcatctctacactgaccctcgggagatctttgaggtgctgagctggttggagagctgtgtggctgagcagcagggacggtggcgaggctggtacacctacacagacctgtgtgtgctgctggagcagccgacctggcagttggccctgggctccctctgccagcggctggtaaagctgtcttgcctgttagctgtggcatatgtgagccagtgtgggcctggctgtggcatcgcggggccgtaatacatccagtcttgagggctgtcctgcattcctacaactgggagcgctgaactttggaatgacctcacag

SEQ ID NO: 439036 - DNA, 1715 bp, Homo Sapiens
  misc_feature (188)..(244): n is a, c, g, or t
  misc_feature (267)..(284): n is a, c, g, or t
  misc_feature (1391)..(1391): n is a, c, g, or t
  misc_feature (1622)..(1622): n is a, c, g, or t
aaaaatacctcttcgaaattgagggtgggcgggtctctctgagggtcggggtgtcccaagccaggtttgccccaacgcggtgaaagcccgtgtctctcctgaaaaaccaaaatatacccaggccatggtggcacatgcctgatatcccaacaccttgaaagtttaagccagaagatatcccttgaccnnnnnnnnnnnnnnnnnnnnnnnnnnnnnnnnnnnnnnnnnnnnnnnnnnnnnnnnnaacagaagtaaaactccttctcnnnnnnnnnnnnnnnnnntctaaaaactggagccaatctgaatgtccattaccaggtgagtagataaccatgatggcatattcccacaatgaaatacttttcagaaataaagaggaataacctattgatatgtatagaaatatgatttaggtttaaaatattatgatgagcaaaagaagccaggtaaaaaaagtccaaactgattgagtccatttatgttagtttctagaacaggcaaaatcatgtgtctatgtgtctgtcgtgacagaaatcaaatcagtcattgccttgggggaagggggatggatactcaagagggcgctggtaggtggggagactcggtggtgagtcttggaggtctggtgaagcagggaggagaaggggtaagtctgaggacagaagagaagcgtcttggggaataaaatgtgatttgatccctggcagcatcaaggcccacttggagcccatggtcatgaatttcaagcgagtctggcctgcacggctgagcttcccaaagtttagctgcacaagtccaagtgcgcaggaggcagagaactggatttgccccagggttgtggttttccaaatgaatgggatgaagggagatgggcaagggagttggaagtttctttcaccaaattcattgttaatttcatcagaacaaaacgattcttttgcttgttcccacagagaaagcaacatccccaaatacatatgaaacaccgatcactaaaggcacaaaacaggcaccacatgatcctctattccacttctcttaggcagctctgttcagctacggggactcacctagttcccccggcagtagcccaagtctctttcagcaacagcagccttgggaatcttctgtacataataccttcctgaggttggtttatcagcatattaaaagcacctcctaccagacacacagaatggagccccattagaaaaaaacaactaaactctaatgtcatcctgcagcagactgcaatccacacaccagtgtccagggtgtaatcagattctccagaatatggtatacacagtccattcttgactgctggcagtggcaggcaggagaagggcagaacagaggaggagaaaggtttaaaggagaactcattntcgaaaggtgagcttcttctggagctggtcagcccagacccttcatcctgaccccaatgggagacaagtgggcttctccattcatctccttgatgcactcctcagatgagatcagacacccgcagacctgaacagaactcttctttttaaattctcaacctcgaggcccctcctggaggagtctgagcctggatctcttgctcagccctgccgctgggaccaacctggctntctgccttggacactttccttcttgccgctggtgattggcacctcctttcctccagactcccaacaaacaggcacctccagctcctctgatcc

SEQ ID NO: 439037 - DNA, 1633 bp, Homo Sapiens
tatgaaacaaagttttaatttttattttacatatttatacataaaactttcaaggaaccctctgaatccaacagaatgttaatagcacatctaaaaaggaacttcaggtagtcaacattcacaaaatgttgaaaactgagtaaaatatacatattacggagagctacaacttcactacgaggcaggcatgtattttttgacttgtatagcaccgtcatttacagttcttctttaaaactacagtgaagaatgaaaagtagtcaatgggaaaatactgttccaacttaaaatctctaaacaaataaaaataaagttaaaactactctcttttattaaccatgatttgtggtggtgtcagtactgtacattttttgtaacaatattttattaaaatgcctgatattaagtggcacaagtaaaaaattaaaataaattaagaagcaaaggccaatcactggacattaagcttcagacattatcaatgactaacactgatatttgtttctgcgccacctttagcaacagcatttttacaaccacagaagcaaaataaattctagcttgttctctggttgaatggcttcttttcactttgcaggcattttctctgccatgtgcttctgctgactttcagcatgtctggtcaagtcttcaatgtccaccagcatggcatcctgctctgtgtgcagctcatctcggatgagaagcagctggaccaactcttcattcaagctttctatctgggaatggagatcattgactatcacttgtagctgcccaatagtcatgtctctcaggtcggtgggttttaaacttcttttcatcaagcattcacttatatgaggcatgtgtggcagaagatcagcgacgggagactttttcctgttctgtttctccacttctacttgcattttggccattggtttggccatggcaagggccattttggcttcagcttgcaatttcttttgccttgtaaggaagtccatgtcatccaaggattcagactcctcttcagtagtgtctctatcagaataggaagaactctgtttgctcatgggagacaagggggtgtccaagctggtttcagtcttactgtcatcagcatcactgtccttatcactgccactgtcgttgacaaagcatatctgcaagttcatcccactctgcagtcgggaggaaaggcttggcttcccacttttgctacagctggtataaattcctgggccatcatcaaagaagcttccaagtgccaacttctgtctgatagactctctctcatttttctgtgcctgatacgagcagttatcctgatgtaccatctcagtgcatcctagggcgcagaccccaacgcaggactgctgagcgaggctgcggagggcaggcgcggagcatccaccggcgggcggagagaacgccctggtaaggcaggggctccccgcagattaaaatggatgctgtttcgctgatcaacctgcgcagtggcactgcctgtgccgggaagcgcgcagctagcgagctgagctgctctccagccctccgaaaccagtgaggcaggcttaggaacatggagctgggaccgggctccgacgcgtgggtcgacgatatcccggtacctccggccgtaccagcc

SEQ ID NO: 439038 - DNA, 471 bp, Homo Sapiens
  misc_feature (16)..(16): n is a, c, g, or t
  misc_feature (23)..(23): n is a, c, g, or t
  misc_feature (40)..(40): n is a, c, g, or t
  misc_feature (65)..(65): n is a, c, g, or t
gaaaattttcccgggnccggttnccccaactcccacttgnaatttggcccaatgggttgggccanggcaaagggccaatttgggccttcagcttggaaatttcttttgcctttgtaagggaagtcccatgtccatcccaaggattcagactcctcttcaagtagtgtctctatcaagaataggaagaactctgtttgctcatgggagacaagggggtgtccaagctggtttcagtcttactgtcatcagcatcactgtccttatcactgcccactgtcgttgacaaagcatatctgcaagttcatcccactctgcagtcgggaggaaaggcttggcttcccacttttgctacagctggtataaattcctgggccatcatcaaagaagcttccaagtgccaacttctgtctgatagactctctctcatttttctgtgcggaggtggagttggtcctcgcctggccctggttc

SEQ ID NO: 439039 - DNA, 975 bp, Homo Sapiens
  misc_feature (10)..(10): n is a, c, g, or t
  misc_feature (19)..(19): n is a, c, g, or t
  misc_feature (24)..(24): n is a, c, g, or t
  misc_feature (222)..(230): n is a, c, g, or t
tttttttaantcacataancagantttatttggcaaggcaaactgggatcgctgtccgccaagtaggttagggtgagtgtgatgttgtacaataaatgaaaggttctgtgtgaaggagagtgagcagggtacaacaaccaaaaaggcaaactacatatttgaaaacacagctgtggttcatactcaatcatttcatatctcccaagagaattctttttaccnnnnnnnnnttgcatacaaaggttagtttaattatcatgtgaatgtttgaaactctctgatataggaaatctcccaggattacctgtctactaaacagatttccttctctttccaaatacattattgatcaatttggccattgatttagatccactgggacgtctcttttctttgagtttgaagtttatcaggatgtccttgataattctgataaacatcatttccacctccagagactgctctgctgcagacagttcacagaattggcatcggttttccagtgccagcttttgcccttcttcccagccaacctctcgcacatgacaaagatctcgtttgttgccaaccaaaaacactgctgattccacagctcttttacaatgactagtttgtggctcccggattctgtagatcagcgcttttgcaaaagcaaatgaagacctatcactgatgtcatacacaataacaaacccatctgcccagtgaagctcacttgtgagggagaattttgctttctgtgtttgagaacaagggtcatatatttctagatttagttgtttcctttccaaacacaagtgcttcttatagatagattcaaaattagaagcatattctccaatgaatcgcttagtaagaaacctcactgtaagggcagatttgcctgttccttcaccacccaagacagcaagcttcacatcattcatcttgcttttctgcttcttggtcagtcctattttctggaactacactccc

SEQ ID NO: 439040 - DNA, 1944 bp, Homo Sapiens
  misc_feature (1613)..(1613): n is a, c, g, or t
  misc_feature (1621)..(1621): n is a, c, g, or t
  misc_feature (1627)..(1627): n is a, c, g, or t
  misc_feature (1631)..(1632): n is a, c, g, or t
  misc_feature (1636)..(1636): n is a, c, g, or t
  misc_feature (1639)..(1639): n is a, c, g, or t
  misc_feature (1646)..(1646): n is a, c, g, or t
  misc_feature (1682)..(1682): n is a, c, g, or t
  misc_feature (1716)..(1716): n is a, c, g, or t
  misc_feature (1856)..(1856): n is a, c, g, or t
  misc_feature (1884)..(1884): n is a, c, g, or t
  misc_feature (1899)..(1899): n is a, c, g, or t
  misc_feature (1901)..(1901): n is a, c, g, or t
  misc_feature (1912)..(1912): n is a, c, g, or t
  misc_feature (1922)..(1922): n is a, c, g, or t
gctgggtggcggtcctaccgacgggaagagaaggattgttccacaaagggaaagcgccgccaccaatgtgctgcagaagaagcaagaggcggagtccgctgtccggctgatgcaggaatctgtccgaaggataattgaggcagaagagtccagaatgggcctcatcatcgtcaatgcctggtacgggaagtttgtcaatgacaagagcaggaagagcgagaaggtgaaggtgattgacgtgactgtgcccctgcagtgcctggtgaaggactcgaagctcatcctcacggaggcctccaaggctgggctgcctggcttttatgacccgtgtgtgggggaagagaagaacctgaaagtgctctatcagttccggggcgtcctgcatcaggtgatggtgctggacagtgaggccctccggataccaaagcagtcccacaggatcgatacagatggataaactgccaagaaccagatttttaaaaggccgcaaaaaatcttttcctgggagtctaccaaatttggaaatgaaaaaacccagacatcagatgtttttattttatattattattatagaaggtggtaccattatcaattatgtgaagggacatgcagacaccccagcttttgagggtgctgggggtaggactgaggcagccccactgggaaccagactgcagcctggcccatggctgttttcccaaggatcagttcctggagggaagggctctggccctgactccgctgtgtcccgagcacacgtgctgaccgcagcccgccgccctgtagttcttggctgggtctggaggtgtctgtggagcaccctgccctcaccacaggagcgtgagccacttctgcagtccaagctgaacatgggaaacaacctgaaaagcaggcaggcctcccggtcagggagcctctgctgtgctggcttcccatgaccacctcctcctgctgaaatattactgcttgaatctggagcagattgcgggtttataaaactgctttttatctgagaacaaacgggtttggaaattagtcgtcttttttccccactcccagagctgctcaaatcattccaccggccccctcggcttgggacagggtagtgtaactcccgatcccagggcctagccctgacacaggtggcttcccgtatcccggtgggaaaacgccctgccaccagcgggcttgagctggcctgtgtccctccaccgcctgcaccacccacctccagagtgcagtgctgggcaagggcagctcaagaggacaggaccaggcgcttggcaagacatcagacacacccaacccaaaggcgtggaccccaggcccggcccgtggtacccagcaggtggcactgcagctccccgctcctgcaggtccagcgtcctcacaggaacaccagggcctgtgctccggagccttccttcagacccttcctccacgtgcccacttgggatgcagaatgcagcggagctaggaccccctccacggcctggacctcggctgcagtaaagttacgtgaggccatgtctcatcggggacctggaagtggcaggcatcaggttgctcttgcttgacccctcggagcaagcgccgcacaggtggtggctganacagtggngcgggnggcnnaaantgngccggcntccagcccaacccacagatgttgatgaagtcaggcntcacctcacccagaaatggtatctgagtaacggntaagaacctccttcctctggttttaaaaagacagttcgggttgtccaattctgtaacattcatctccattttttaaaaaggtttctacatagacggcccacaacggccacgagccgcggtgaagcgtcgtgttgcatgancctgggcccacgggcttccacgtgcgcntctgccgcaggtgcntnctgggcacccnatcctctgcntttcatttgcagtcgactgtac

SEQ ID NO: 439041 - DNA, 1359 bp, Homo Sapiens
  misc_feature (1277)..(1313): n is a, c, g, or t
ttttttatatattgacactttattacactgcccactcacaccaggccgggacaggagtcactccttagaaccccgagcggctgtccaggctgatggaggaggggaccactcacccgccacagagccagccccctcacatggcttcctccctgaggagcatctcccacactggggcttccaacgatctttgctctgcgtgtgctgaaaggacagcgtccagaatcagcctcagcctggacttctgttaccatgggaggataagcttgtcatgctcacagatgtgcactcctagtgccacgcctctaaacgtcccccagacggcattggggctctcgccggggagcttggctactgtctcgatccccggccaagcaggcctcatggccaactttctcagtgtccacagcagacaaaaatgtccacagccagagctccaaagctctgccggccctggtgccactgccacctctgcgtccggagcctgtggggctcagctctgctgctctggcccaagtctggcctggagtccctggtgccctttgcaagcacggaggcggctggacatccttcgcatcaccagcctctgggcctgcaagcgcttccggagcttttcattttccttcagagtgaggaagagttttttcttcagggaatctaagtccaaaagggcatagctgtgatcagatggctgcttgttgggggtccttctcaggcctgcagggccagtcggccggccaacagcctctgttgcttgcggcctccgtggcgagacctgttttacgtggccttcggcatttgggggcaactgaagctcttcaagtgcagtgtccatgtttctcccaggactgtcctctccggcccccgcctcagggaggaccttttctttctgagaagagctggcatttcctctctcactggcagggtctgtgttctccctcacctgctgtgtggggtcctgaaaggcgaacaccgtgggcacggcattgtgctttaggttcttgcggtttccaaaggcgctgaagcactctggccggaagtgctcggagcagatgaccgtgtgctgcttgggcttgaagttgccccggccgatgttcagcacccattccttcagcagctccgggcggctgaacggaaaccggtggaaggtgagctgcttcctgcggctgctgtagcggttgcagcactgccgggccgcgcacgacttcggcatctcgagccaggcctggctgcccccaaccgctctcgacgaattcgagctcggccgatttggcctgatnnnnnnnnnnnnnnnnnnnnnnnnnnnnnnnnnnnnncgccgccaccgcgtgacatccagttcgccctatagtgatctataca

SEQ ID NO: 439042 - DNA, 775 bp, Homo Sapiens
  misc_feature (732)..(732): n is a, c, g, or t
  misc_feature (761)..(761): n is a, c, g, or t
gagaggaaataccagctcttgtcagaaagaaaaggtcctccctgaggcgggggccggagaggacagtcctgggagaaacagggacaatgcacatgaagaccatcagtgaccccaaaatagcggtgtccatgtataacaggcaatgttgtttaatgtagaaaatggaaccccagcttcacgtgaagccttgtggttgagtgaggagtgaaggatggggaggaggcctctggggaaggggttccctccctcctgaagatgaacacacaatacacggaagagcgccagcctctgctttcaggaaaggtttattgtggtgagtgccttctgtacagtcgactgcaaatgaaacgcagaggatgggtgcccagaagcacctgcggcagaggcgcacgggaagcccggggcccaggctcatgcaacacgacgctcaccgcggctcgggccgtggggccgtcagagaaacctttttaaaaaatggagatgaatgttacagaattggacaacccgaactgcttttcaaaaccagaggaaggaggttcttagccgttactcagataccagtgctggggagggaggcctgacttcagcaacagctgtgggtgggctggaggccggcgcagtttggggccccccgcgccagttgttctcagccaccacctgtgcggcgcttgcttccgaggggtcagcaagagcaactgattggctgccatttccagggcccgagagacaggnttcacgtaaatttaattgcagccgaggtncagggccttgaagg

SEQ ID NO: 439043 - DNA, 1127 bp, Homo Sapiens
  misc_feature (61)..(61): n is a, c, g, or t
  misc_feature (139)..(147): n is a, c, g, or t
  misc_feature (1043)..(1075): n is a, c, g, or t
attcagaaccaattaactgcttcctctcacacatcctgccataagtttcatttgtatcccnaacttgcacccggctgacctcagcaacactttcccatgaaagtcagatctgatggcttttttgagaaaaaggatatgnnnnnnnnngatgagaaggcaagacactcagaaaccaagcccctttcccaaaatgacaaagaaaagcaaattcccactgggagcaggaataggatctaaggaccccatctggtgagtcacatgtactaactaaagcacaagatctgagagttggaattaaccatgttggggatgtcccctaaagagacaaatcagccccaaagtgttccagagctgtaaatgaaatttggattgattaagaagcagcttggcatctttcctctccaagtacaaaaccctgggttttcaaccctgttccagtgccaggtctgctgctccttgactgagctgcatcattccaggctcagtctgggcacaagccaccacaatcccctccttctttccatttctatagtaggacggtaacggtcatgcacaggttcctcgcttcctgctacagtcttcacatatatgtgggcctcttgtgctcccatcgtattcttctcatgtgtgggtgatctcctaggattctcagatatcttgggattgtcatcaatttctgaaatttcacatggtctgtcactttcctccatggcctcaatgctgcttcttcttcggtgaatcaaagtaaatagtaaagccaccagcagggctgtggccaccagcaatggtatgcccgccgctaatccaagagagggcccacagtccgtttctttcccacctgtgacaggagaggacgttgtgttcgccggcagggtgaagttcagtgaaaaactcatttctgacagtctcccaggaaccttcttcgtacactgcctttggtaagctcctttctcactggctttattggcttgtgtctttcatttgtaggaacagttaaccgacccgctctcgacgaattcgagctcggccgatttggcctgatnnnnnnnnnnnnnnnnnnnnnnnnnnnnnnnnnatgcgccgccccgcgatgagcctccgagttcgccctatagtgattacattcc

SEQ ID NO: 439044 - DNA, 914 bp, Homo Sapiens
  misc_feature (773)..(773): n is a, c, g, or t
cagcttgtaatgttaattaactttattcacatttttccaagtaaatacaatattaactataagctaaaaacaatacatagttcttagaaaatacaaccccgaattattgtgtggcctgggctttgtgattatgtgcccagcctttgttcctccagaattttaaagtgaatgcagtgctcaaaacaaacttacgatagcacagggaaaccttccctaaataaagttttgttattagaagagaaatccaaaaagaggcctctactgccttcattcaagtgtcgagaatttcaaaatggaaataatattaaaagagcaatcgatttttttccatctcacactagtaggcttgaaggaggcaaatttggaccaaaaatctagacatagctccttgcatagggtttgatattaagcacacacttgcactgaataactccatatccaccctatagtacaaaaattcatttcaaatgcaaacgttgtgcaatgaccaggtcatatttttaagatcactctttaaaatatcattttactgatcacaaaattatataataaggatcttatatgggttaggtattaagtttgataccaaagcaactatagcatcaagctacataaatattagcaccattttttatctagtccagtgaaatgtaaaactatccatcaaactgttttttaccaaagcagtcaacaagaaaaattgttttacttctgatatatgctttgctcctcctcctctttgctagtaatacttttgaacactttaaaggaangtacagtcggccctttgtattcgtggagttctgcatccatgggtttcaacccaatccaaattgaaaaatatttgggggcaaaaaggatggtttcacttgtgctgaacatgtacagccttttttttccttgtcattattccc

SEQ ID NO: 439045 - DNA, 1144 bp, Homo Sapiens
ccctcaccctcccctccctgtatagtaggagctgtcggttgtcctggatacagcaggtaatgggaaggatggcagctgaggtcacagcgtgaaccaggatggctgtgggcagggagaaatggcttcccagacatacttgtgccctttcacccaggctggagtgagagaggagggtgcagctggcctggccatgcccatgctagcataggagaccagaggtcccgatgagattcccgggatgggctgagagtagggggaggtgagtcaaccgcccaggcctcccacatctaattgcaaggcagtggaaagggaatgtcatatacccatgtggagtcccatgaggtgaaaacagccacttgagggtccagctgaggccctggcctgattgagtagctacagagtaaggacctaggaacgaggtctccttcccagaggagggacttgaagtgatggggtccctttacctcctccaaaaccacaacataaacaaggaagaggcagctgtggcccaaggcaaagaaaatgtcttaaagccattctgacccagatttgactcccacatcccctccctaccacgctcgacagattcctcaatatctccgagcctcagcttctcatctggcaaatgggggcagtcatcacagatctcgtgggttgttgcgaggcctcatctttcccagggtcttccagctccagccagcccaccagatgcccagctcgacacccacactccaagctgccaacaggcagggcggccagccagactcagtggagacaggccaagcccagaattcagtcccagcctcatcctccaggccagcaggcaagggtagttgagataatgatgaggaactccagccccatttctgagctccagctcaagcctcagcttcctcctctcttcccaggggtgggctttgcaagcctcctccctgcctcccttgggcctgaagatcgtcttggtcttgacctctccctgcaaagctggcaaatgggggcagtcatcaccgatctcataggttgttgcgaggccctttcaactaggactcaggaatcagagcttcaaggtcagggttcaaagtgtgtggatgtgctctgggagcagtagagaggctggggtactacagcggtgtgatccacagct

SEQ ID NO: 439046 - DNA, 2001 bp, Homo Sapiens
  misc_feature (254)..(314): n is a, c, g, or t
tggagagattggagagttggatataaaaagaccggcttggatgaaagggttttttcacacagtatatgcaggagaaagagctatgaaaaaaaatattccacaacaccgtatttgcttaaataaaatgtgccagcgggcgggggggcgcttatattttgattttttggagcgttcgctctggagaagtccgcctttggaagaaaggtccccccgagaaaaaccctttcgtaggaatctccccttggggggaattnnnnnnnnnnnnnnnnnnnnnnnnnnnnnnnnnnnnnnnnnnnnnnnnnnnnnnnnnnnnnagaattcccaaagcccctatttggtttgagcccggggtatttccttaggggaaaccaggtttatggccccagtttcccctttcccttaaaggggccccggggggcccaaaagaaaaggttttataaaaaatttttttaggggcccaaggcggcccccacaagagaaaattctttcgtgtgagggttgctgccggggttcagcattttaagggaggcgtttcttgtggtggggttggtttgtccgttctggttccgttctatttcaggtagaaatcatgtttccttttaattgaatacttaattcacaacgtttcctctcttgctgctactctggtaataattaggtccccacctctcaagaacattgcacctgactagactgagagccagtgtgaacatgggccccaaaccagggctttcggaataacaaggaacagccaagccagcctctcccttcacttagaaagggattatgaatggaagggtccaaatcttcatcatccaaacacagaaaaccaggagctcaacacctacatggaaaccaaaatgtatcaggaataaagtacagtaccccttcacatactcaaggtcaagatgggtttgcagaaatcatatctgaccatctggcctctggtagtagatatggccccatcccagcatttttaagagatgtttttgttgtattatttccccaaggggtataaaatctaccaaaaggaatataatgaatcagaataaatcagctcactcacaagaaacgttcttgggtaatggtttttagttgctgagcttattcagcacattatttaaaagtggcaaaattcagggcaatctgagaattcaaaagtggcggcccacaggtttgggtaggacacacatacatacaacccccatttttttcagtgtatatgtcaagaggtcaagacctcaagacctctgatcatcaaaataagttattttgtatattataatgcacaggacaacagaaggaaactttcttggaaggtgatgacaaggccttttgcaaaaggtccactccaaaaggactggtgcccagtgccttgtggccttcattaacttgatccctcctcttctttggttgcagtggcctcaatgggagctgtttcttctgcttgttctgctggcttcttctctctttcctcttcctcatcctcatcctcttggggatagaggtctgggtatttctgcatgcattcctgcatggcccggaactggtctacacagtctgaccccttgatctcctccgtgctatagtggaagcaggaaaaggctgacttaaactgttctccacagggaccgctggccattcccccaaggcatgggcagttccagttaatgtttccatttggcagtatcaatccatgctcctcgtatggatcgttggggtcatcagccaccaattctgcactgcttggagtttcatgatcttctttggttacaaatatgattcgatccttcccttcctgccggcaataggacatggctgcagcccgtccctgagaccttgcagaagcggcggtggcggcagctgcacctttacgccgtgacctccctctcctctggcagggcgggctcctccgaagcccgcgcggacccgccccctcccaggcctgcccgccgcgcgcctgcctcggcgatcccgggaattccggaccggtaccagcct

SEQ ID NO: 439047 - DNA, 1578 bp, Homo Sapiens
  misc_feature (876)..(876): n is a, c, g, or t
  misc_feature (1086)..(1086): n is a, c, g, or t
  misc_feature (1088)..(1088): n is a, c, g, or t
  misc_feature (1094)..(1094): n is a, c, g, or t
  misc_feature (1096)..(1097): n is a, c, g, or t
  misc_feature (1116)..(1116): n is a, c, g, or t
  misc_feature (1172)..(1172): n is a, c, g, or t
  misc_feature (1175)..(1175): n is a, c, g, or t
  misc_feature (1205)..(1205): n is a, c, g, or t
  misc_feature (1211)..(1212): n is a, c, g, or t
  misc_feature (1215)..(1216): n is a, c, g, or t
  misc_feature (1267)..(1267): n is a, c, g, or t
  misc_feature (1269)..(1269): n is a, c, g, or t
  misc_feature (1272)..(1272): n is a, c, g, or t
  misc_feature (1279)..(1279): n is a, c, g, or t
  misc_feature (1296)..(1296): n is a, c, g, or t
  misc_feature (1303)..(1305): n is a, c, g, or t
  misc_feature (1357)..(1357): n is a, c, g, or t
  misc_feature (1359)..(1359): n is a, c, g, or t
  misc_feature (1364)..(1364): n is a, c, g, or t
  misc_feature (1366)..(1366): n is a, c, g, or t
  misc_feature (1371)..(1371): n is a, c, g, or t
  misc_feature (1373)..(1373): n is a, c, g, or t
  misc_feature (1377)..(1377): n is a, c, g, or t
  misc_feature (1403)..(1403): n is a, c, g, or t
  misc_feature (1431)..(1431): n is a, c, g, or t
  misc_feature (1452)..(1452): n is a, c, g, or t
  misc_feature (1499)..(1499): n is a, c, g, or t
  misc_feature (1501)..(1501): n is a, c, g, or t
aaggggcgggaaagggtgagaaaaacggcaagggggcggatcccatccatatatcaattggctcctctggtctctgccgcgggcatcaggccctttctcaatcttctgtgaggtgctccgtgggcagctccccggcagaacaggagcccctctccccagcaattctgccctcctagtccccccgtggaaattctgaaagtaagacgtgtctctgtggctgtcctcctttctctccctgatgagacggggcaagagggagggcaggtgacctgggtacacagtgaccggggacatgctgacaggctgcgccccaaggaacgggctccaagctgcagggtctccacggagattggcagggcctcttcccgctggggcagatgtgggcacacaggacaaaggccagagcaggaatcaagggacaccagtcactgggctggccctgctcggccccctcaggcctggtgggtgggcccgagctcctctctatgaggagctatctggggttggagggggcttgtttccaggacgcgagtggccgtagggctgatgggcccaaggagctgggccttggtcctggagaaaacctcgagggccatgttcctcagcaggccctgcatccaccacaagtccgccggcacatcgggcagccacaccaccaaccttctgctgcggaagtagatgtactcgaagggcagtgtgcagggtagcagcaggtacgtcagcacctgtccaggccccgagtgccagaagcgggcccaccggctgggatccctcgtacatgctttcttcagtgcagcctccagctctggtgagagctgctcaaagttgggtacatccttgacttgcacatggggcactttccagttgagagacagnccccccttccggcgttggtcacagccagcatcccagtttccatcagccggggctgggggttccttagacaccagcgtccatagcactggttccttggtgagtccacgtctctccaggaacctcagggcatccaggtagccttgtctgcagttgtcggccactacctggatgaactcatcgcaggtggcgaagtcagtgaccaagaatttncntccttnannccagcggttcagcgaaatncccagccgctgggaggccaggacgtgggcgtcggggggcagagcatcctgcagctnttntttgacgtgctcgatgggcgcgtaggccgngtgcannatnnttaggctcagccgctccaactgcccaaccatgcccaggaggtgggagcagnanaantcgaccnacttgccgcagacgatncttactnnnttgagcgccccagacgaggaaccgtagatgcggcgggcgccctggaggaggngnggggntngtggngnaggnattcggtttgcccacgtggtgggcgnccaggtagccggcgccggagaaggacangttccatctgccctcctcctntaagaagcccatggcgggtggaccgggcggggttatcgggacgaggnanatgactccgtgacccgggatagggccgggatgcagccttggacggggctgggcccaaatgtgggctctggagggagc

SEQ ID NO: 439048 - DNA, 1183 bp, Homo Sapiens
  misc_feature (123)..(123): n is a, c, g, or t
  misc_feature (206)..(217): n is a, c, g, or t
  misc_feature (499)..(522): n is a, c, g, or t
  misc_feature (1054)..(1073): n is a, c, g, or t
  misc_feature (1172)..(1172): n is a, c, g, or t
ctaaaatgacctaattgtcttaacagaaacccctgctggttctggtaagcccttccaaagggctggatcttgtacactctgacagcacaaggaacaccgcatctttcgcaaaagatttgacanccgtgcttagtagacatctcttccatcaccgactgtcaggcctctagtttctccaactattggcttgccctcccaccattagnnnnnnnnnnnncgcatcaagctggcctcagccaatgctacaaagcacctaagtgtaccctaattatgccatcttctatcactgctgtacttttcccatagaaaccccagcctagcatctcccacagttctaaacgatgttccatgagaaaaagattctacggccataaaagtcaaggaacacttcatcctatgccctgtccctgagtatttgaaattgccattagcattttaaaggttctgataagtcctgcactacttcagtagtgcagcggaatttgaattagaacctgcnnnnnnnnnnnnnnnnnnnnnnnnaaggagcaatgacatttcctagaagttactctaagaatttccctagagggtcgggtatcatctcagccagatctttctcatccttcaaggccctgtttggtacagcttgctaggaagctgttccagactgcagcagccctctctggggtctctctaccacttcccaggcactcagaacttgtgcctcagtagactgttttgtggcactgtcccattctctgattctccatgtgagctggttttatcccatccagcatggctgtgaaatcctaaaggttcaaaccccagccactcttcacctatatttcccccaaatggctagcacgggaaagggcccaaagtaggtgctcagtgctgatgagagagtagaatttaaataccccaggaagcattgtgagttactacggaggccatgaaatgctgccacctccccaagctgattaaagagtgatactaggaaaataggtagggaagggctaatcagaaatgcctctggttcagaagatgctgagttttaaagtccagagagccnnnnnnnnnnnnnnnnnnnntagataaaccctaagtctatactcccagatggatgggagcatttgctgagcacctactggagtcaggcactggctaggcacacaatctcactaattctncctgcacctga

SEQ ID NO: 439049 - DNA, 1441 bp, Homo Sapiens
  misc_feature (1176)..(1327): n is a, c, g, or t
gcgccaggtgccagtcctggcctctgatgtaacccagcgccccgcagtcccgacacagattcctggatctcagccccatagcagctatgatcccgctgctgctggcagcgctgctgtgcgtccccgccggggccctgacctgctacggggactccgggcagcctgtagactggttcgtggtctacaagctgccagctcttagagggtccggggaggcggcgcagagagggctgcagtacaagtatctggacgagagctccggaggctggcgggacggcagggcactcatcaacagcccggaggggcccgtgggccgaagcctgcagccgctgtaccggagcaacaccagccagctcgccttcctgctctacaatgaccaaccgcctcaacccagcaaggctcaggactcttccatgcgtgggcacacgaagggtgtcctgctccttgaccacgatgggggcttctggctggtccacagtgtacctaacttccctccaccggcctcctctgctgcatacagctggcctcatagcgcctgtacctacgggcagaccctgctctgtgtgtcttttcccttcgctcagttctcgaagatgggcaagcagctgacctacacctacccctgggtctataactaccagctggaagggatctttgcccaggaattccccgacttggagaatgtggtcaagggccaccacgttagccaagaaccctggaacagcagcatcacactcacatcccaggccggggctgttttccagagctttgccaagttcagcaaatttggagatgacctgtactccggctggttggcagcagcccttggtaccaacctgcaggtccagttctggcacaaaactgtaggcatcctgccctctaactgctcggatatctggcaggttctgaatgtgaaccagatagctttccctggaccagccggcccaagcttcaacagcacagaggaccactccaaatggtgcgtgtccccaaaagggccctggacctgcgtgggtgacatgaatcggaaccagggagaggagcaacggggtgggggcacactgtgtgcccagctgccagccctctggaaagccttccagccgctggtgaagaactaccagccctgtaatggcatggccaggaagcccagcagagcttataagatctaacccttannnnnnnnnnnnnnnnnnnnnnnnnnnnnnnnnnnnnnnnnnnnnnnnnnnnnnnnnnnnnnnnnnnnnnnnnnnnnnnnnnnnnnnnnnnnnnnnnnnnnnnnnnnnnnnnnnnnnnnnnnnnnnnnnnnnnnnnnnnnnnnnnnnnnnnnataaatgcctgtagtcccagccactgaagccagaggatcgattgaaccagggagatcatggtcacagtgaactatgattacgccaacctgggtcacatagcaagactctgtttc

SEQ ID NO: 439050 - DNA, 2878 bp, Homo Sapiens
  misc_feature (55)..(55): n is a, c, g, or t
  misc_feature (58)..(58): n is a, c, g, or t
  misc_feature (120)..(120): n is a, c, g, or t
  misc_feature (131)..(131): n is a, c, g, or t
  misc_feature (173)..(173): n is a, c, g, or t
  misc_feature (287)..(287): n is a, c, g, or t
  misc_feature (882)..(977): n is a, c, g, or t
  misc_feature (992)..(1048): n is a, c, g, or t
gtggggcgatgatgtagacgacggcgatcgtggtctatgtgtcgattctcgaganaangtagatgtgttcttgacggcgaagaggagattattatatattgtgttgcgtgtattctcacnacggcgtacgnttcatcgtgtgcgtggtgagtcgctattgctgctgcgcatcnatttgttgtagttatatattatgatggtggtgagccctacaaagtgttgggactacaatgattgtgtattttatttgtgccgggattagtttcgttgtgtgctcttatggtgtnagaaatacttatatttatatatatcgtagaggcctcgtagctatgttagtcgcgtgcgcatagtctctatcttccgtctgctgcgatggtatattaactatgtattcttcgctagcgccgagacagtttgtgtcattgggacgttttccttacgtgtccttggtcgagtatattgtgtgtgtttttgatatatgttatcctcccgacttatgtctgtcttcatggtttctgttctgctggccgggcgtgtggtcaatttatctttatgaattatgatgactaccatattgtgttgtttgctgcttgtgtggtgatgttctccgtatatacagcccctcgacagacttcgtttatgatgtatattttacgtaacaccgactttggtttttcaccccgcgaggtgcttttatttttatttgtgtggaggatatcacaacaccctctgtttggtgcccactgtgctctctttttgtttgaagaattgaagaccccgtttgctacttttttctcttattggccctctcgcgccccacaaaaaaatgttttttataagaattttgttgtgggggtaggggcccttccacccacagtcaannnnnnnnnnnnnnnnnnnnnnnnnnnnnnnnnnnnnnnnnnnnnnnnnnnnnnnnnnnnnnnnnnnnnnnnnnnnnnnnnnnnnnnnnnnnnnnngtgtctgttctatannnnnnnnnnnnnnnnnnnnnnnnnnnnnnnnnnnnnnnnnnnnnnnnnnnnnnnnnttgtgagcaacagagatagtctttattcaaacgcagagagatccataacatggaaacactgacgcttccgaaaccgccccatttattcacttctcaagtggcccccgcttggatgcgccctcgggagagtgggctcagcacagcctagagcaccaggtctgaggtatctgcaaccacgtgggagccaggcccctggacgatgaaggacaatctcctggagcagcaataacttataaggagacataatttagagtagctggagccttggggatgactttatcctgcaggaggaggaggctgagagcagacgggacacgggggcccctaagaagcaaggttgggaaaggaggaggctgtttcccaatgcccgtgccggccaccagagggcccttcagtgcagagatggtcggcgcggcctcaccgcggtcaggagcagcgcgaaaccccctgtgccctcggccgcctgcagcatgagcctgcacaggagcccccgacaccccatggctccggggggccccaggggctgcggggctctggtcttagacgcagttatcagggacgcactcagcctcttcttcgagctcggggcaggggctcccgttgttggcgggctggacccggacgtagcgagtcctgctcttggtcccgagcctcccacagtggcctccgcacagtccccaggacgaccacagggagacctcgcagtccagcggcgtttctggaactgaggcgctgtctacaatctcattgtccctgctgggcaggactggggcgggagggatgaaggccctggggctctgtcgcagccgcagcagtgtcaccctggcgatgggaggcagggccttcagccgcgggtagtagaaggagttggccgggtggctgggagaggaggacgttatctcggtcaccgtgtcctgcgggatggtggcgaagttgggggaggagaaggtgaagccgctgtccgtcccggcgtcgtaggggtacaggtccagcgccgcctgttcccgccaacggtccccgtcgcacaggtccaggctgtccacgcccacgaaccagtcggggctgggcacgatgcgcaccacaaacgagaccagcgagtgcctgcgctgcacctccagctccgccgacgtctgcccggtgccgctggggacggcgggcgccgaaaacacctcgtgcacgctctgcagcgcctcccccgccgcctcgatctccttcatcagcgcccaggcctcgccgcgctccgcaaagtcgcgcagcccgttactgacgtactggttcttcctccacatgctgtagtcggagctatgcgcggcccccagcagcgaagaccactgcgcaggggggcggaacagggggtactgcttggggaaggccgtctggctccacttgcccgtgaaggtgatgctgtatttggccggggctctggcggaacagatggactctcccccaagaggctggccggcggcgccgagagtggccaggaggagagcgcagagggccttgcccagggcggcggccgggctggggttttccatcacccggcaggagcagcgggagcgcggccggcagcggtcgggtcccagccagagcccggagctcctatttaagcccgaggccggcgccccgggccggccaatgaggctccagttcctcctgtcttcgatgctgcacggcctggcctccagcgagaggcagataggacgtgggagaaaggaggagaaggggctgcgggggcggcgggggctgccgctttcccaactcgccctgcccagcgaccttccccgggtcggatcaccctcttcccctggcagtgctgccgcacccctttct

SEQ ID NO: 439051 - DNA, 1067 bp, Homo Sapiens
  misc_feature (1008)..(1008): n is a, c, g, or t
  misc_feature (1036)..(1036): n is a, c, g, or t
  misc_feature (1038)..(1038): n is a, c, g, or t
  misc_feature (1043)..(1043): n is a, c, g, or t
  misc_feature (1056)..(1056): n is a, c, g, or t
ttttttttcggttggttacgacaaggcaaaacctttaataacatgagtgcttattacattagctgcttcggggctctgacatctttgatttctggtcatgtttttctaacacataaaggtgaatgcctccctcagggccacctgggcggtggttggtttcctgaggatttgtgtgggtagacaatggggacaactatgagcgcgcctgatggagattcggaaatcccccctggccaccacctgtgacttttagtaaagtcctcttccaaggagggaagaatgtggaggtccttccagtaaagaaggaagaaaggaaaacatctggcacagatacacagagagaggaatgacattaagggattggcttgaaaagttagagaggatggaggggttaggacttggagggtgaggggaaaatgtgggagagggctgagtccatttggtttcattctttgtaaaaagtaataccatcacaaggaccatgccatgcaacctcagagacatctctgttcacttcccccaaggctgtgctgggcgtggggcagaggtcagaggtcagttcagacgggcgtggtgcgcctgttggccggattattatgcagtgactctttgaactctttgggtgtggaattgtggaactgtagaaaagcgtggtcccggtcggagttgaggagggtccccatggtgatctttgaggggtcccgggagagggtgaacatcgagatgtcagtggaagggatggtgtggaagcctttgctgatgggggacaggtctcgggatctgggctcggtggagcgagaacttgaccgcctccggaatcgatacctgtagggtgggaggcgggcaaaagtagatttcttcaggaactccgagtgggatttggctcgtaactgctgatgtttttcaatatagatgtgcacggcaaccactcctacaatttctgcgatgatgagagagaaggctccgaaataaaaggaccaaccataggagttactttttttggagtgngctgcccggggtctccgcggtggctgananataantatgatgcaatangttgcttaacc

SEQ ID NO: 439052 - DNA, 865 bp, Homo Sapiens
  misc_feature (210)..(229): n is a, c, g, or t
gggaattataatttcctgggaaagtgtctggttctcggagaatccttggggcggggtaaaggggcgcgcctggcgcaaaatggttaatacaaagtctgcgcgcgccgcggggccccttgtatgaaaagtgtgcgcgctggtggctgggcacccctttgctaatttgagggattaccgagaggatgggatggctctaggcagtgacgccgnnnnnnnnnnnnnnnnnnnncgcgccagttcacagtccaactccaccaaagtgaccccttgctccgagtgcaaatcttcatcgtcgccggggggcagcctggacttggtgtctgccctggaggactatgaggagcccttcccggtctaccagaagaaggtgattgatgagtgggcgccggagggggacggggaggagggggaagaggaggacgagcgcgaccagcgagggtaccgggatgaccgctctccggcccgggaaccggggacgtaagcgccaggacccgcagcggcggcggcgggggcaggagcgccaccaccgccatgccgcccccggtgcccaacggcaacctccaccagcacgacccccaggacctcaggcacaatggcaacgtggtggtggctggccggccgagctgttcccggggccccgccgggcgatccaaaaaccccagccggctgggggccggcgcagtggccgcggcccggcggctggggggctctgccttcagcccccagacggcgggacgtgcgtccccgaagagcccccggtgccacctatggattgggaggcgctggagaagcatctggccgggctgcagttccgggagcaggaggtacggaaccagggccaggcgaggaccaactccaccttccg

SEQ ID NO: 439053 - DNA, 1401 bp, Homo Sapiens
  misc_feature (991)..(991): n is a, c, g, or t
tttttaaagttaaagaggaatttattataaggatgcaaggatgtctcagaaaccagagatagagacgctgctcatgaactgtaccagactctagtgcactatacataacccagagagttttctgtatttctcttctattttcagaatacaagggaaaaaaatagcaaaggttataatgctgctgttggagagcagtcggtacgttaaaaacctcctaaccttgattttaaactcccagggaaaggggattagttcagcatgagtcagtttccaaaataggagccaataaactgtagccatagttaaagttatgctgttacaaagcctcactgttaaccaggcggactgtggagtaaaaaaagaagagttaccgaaaaggtggaaatgttatgaactgagtcgacaataattagctgtgaattttatgtgacattaatgtaaagattccagaggccactgcaattcacagaagtgtattgaatctagaccttccagagtcacacactgactttaattataggtgtttgagattggagttcaatatggagatgaatgtgaaagggaattaaaaacttctcggagtgtatcgtttacttcaaagttttatacatgatgttcctgctatccagaatgctctcctccttctctttatgtggctgattcctgtttgaccttcaaggttcggcatagatgtcatctctttcagaagcctctcttggttctcccaagactagattagctggccttcatatgtagtgtataagtacactgtactatgttggaaaaggctctctgccatggcccttgaacttctctgatcatttttgctgttctgccactccaatgtccagctctttatcagtccatttctctgggcggtgtttgtagcaagcaacgtttgagggatgagataacatctccccaccttcaaagagcaggcttaattctgtgtagcctaaaagaggcaaattcctttagctcagtgctcctntcttgtaatgcaacccacttcaggcatccatcatagtctgtgtgcactgtccccacagggcttgggaggcttgacaatctcttcctggatccagcgttcatcttctgaggagtggtggaggtggctgagaccaaccacgcaccaccaccccttctcccacttcgattacagaggctttgaggtaaagctcgcacaagggctcaaggcaaggcctggtcttctgccaccccagtgcccagctcctcactctgggcttggcccaaactccgtggatgttctgtataacacctgcaggcggtcaactcggagggccagaaccttactcgctctcccgcaggtagtgtccagccgccggcctccctcgtcccgcggccgggtccccgcgcgtccccgccgcccgggagtccgcc

SEQ ID NO: 439054 - DNA, 1424 bp, Homo Sapiens
  misc_feature (558)..(567): n is a, c, g, or t
  misc_feature (832)..(936): n is a, c, g, or t
  misc_feature (1134)..(1146): n is a, c, g, or t
tttcagtatttcacatggttttattacaaaacaagccacaaaacagttttagaaaatttttgctacataccaattaggagatcacataaaatgagaagcgtaacagtttccatgcactcagcctagagcttacagcgagtgcatttcacagctgaaacatcactgctttaaaacacagaatcatgctaccccttcataagcagagggggaggaggtcaaacagtatgtttttgccaaacgtttgctttatctgaactctatctagtatgaaggactggctgccgcaggcaataacacagagaggaaaaggaacaaaggaagaaaagggtgctggcagacaagatttaacaaacctgtccacttccgacatttcgaaagtttataaacaaagctcacttggggacactcaatttccaaaatgctgtgacctccacatgttatctaatttatactgaaaacaaacctactaaactccactcctcaactactgaacctgctatttattcatggggtctttttagcccatataagagtatatttatattcagaaatataacnnnnnnnnnntttgcttcaagtagactaagaagctggaccttaaaactactttctttctcgtgggagctgagtattcaactcagaaatagatgtataactccaatattctgacctgacatcaatctccataatgtatacctcaatacccttatgatgtctcacttaacactaaaggccaaattatttttaccaaccatcagctgacattgagtaagcaagtcttttgaagatttcaaaagtaatagatggtggccaggcgtgggtggctcacacnnnnnnnnnnnnnnnnnnnnnnnnnnnnnnnnnnnnnnnnnnnnnnnnnnnnnnnnnnnnnnnnnnnnnnnnnnnnnnnnnnnnnnnnnnnnnnnnnnnnnnnnntgacagagtgaaacactgtttcctaaaaataaaaattaaagaataatggatggcattattcagcccatggggaggaccacctgaaatactgttacacacagtgggtcaagaccacttcaaaagccttatgaaaatagcacaactcaggcaaggcttttattccacaaagaaaatgcagtacattttttagttcctttnnnnnnnnnnnnnctcagatttactccagagcctatgcacttagtcactaatctatactgcatccccaacctattttttccatttggttcaattttatacatttaaaactaactgctttggtcaaatacgtaccatctttggttcacattaaaagattatggtccaaaactggccagaagttaagaaatatcaacaaaataggaagtttgaaatacaatttaggaatggaatgcttttagagcttgtttcattgaagataataatttatctcatattgaactacattaacg

SEQ ID NO: 439055 - DNA, 2439 bp, Homo Sapiens
  misc_feature (2211)..(2288): n is a, c, g, or t
caatgacatttcaaacttacaatctggaattgcacttggtacattggcattgcttgttccactgggatggggaccagtgtgaagatgcctgttagatagactgcccacccctactttctctttttctttatagcacttaacaataacaaagtcttgatgatgtacagtattcaaactttaggttgaaatacgttactctttgattcctagccagtagatcttatctacactttaatgggagagaatggtggtgtgtgggtaggcacaaatttatgtaaatagtgctccttctctttagtatgtttgctttgggggtagaaaaatggttttaacaaacactggtttccatcaaatgaatgatgtcttctccatcctgtggagacaagaatctgctagaaggatatgtgctaagttccttataagagataatggtgctctgcctatgccagcttggcacccgaagatgtgtgagtggacgtgaggctgagtattaccttagtatttttctctgggtctttggaaaaccatagtcaatttttagaacatattgctttcattccccataaactcttcacacatgataactgtttaagctttgaaaacacatactgaagtattgtgagcttaaaaaaactttttaaatatttgcatagttttgaggtgaatttgtttccttacagatctctcctaatcattgagatgtatatttcaaaagaggaaattttacatgttgtccaaaacagccttgctagtaactggtgaattttggtattaactattattaaagtctttaaacgacacaggtacctaaagatcaccttaatgtggcaatttgtgatggtgtagctagctgattgtgaaaactgttcctttaaagtcgcttcttgcatgttcggtgttagtcatccagctcaggcttgtgttgcagctgacaatctaggaaagacggccttagagagtggtgcaggccccacactgacggactgccttagaaacccgacttcctctagactttgaaccgccagacttttctcttgtttagaaaacaaacttatatttaatgtacttactacttaaaactccagacagagatataatgtagaaggcaaatattggccaattttttcctctttttaagtggaagacaaatgaacgggatttttaaagtgcttttaaagtgcatgaatggttaataaatcagtatgaattgtaagccttcatcttacatccaagtccttagttggttagggtttcttttctttcttttttaaagagtgtcaattaccttttgaacctgtgaaaatttgatagttgttaacagtctgatggtcctaattctttcttttcattctagaaatgaatgtggttgtaatcatgttcctaattcttgggacaacctgcaagacagtgagacagtttaaaaattacctttcatgttgaaaaagtctgaaacagagaacccaatgatatttaaaataaatgctacataaaactctttttaaaattttgattttaacttaattaaaacaatgtcataaatatgctttttgattttgttactgcttttaatattaaagtaatagaatattgaagcaatattgtctagcactctgctggacattaagtccgcgggaggagaagtgaacaggaatcgattctttgtcttttaactgcccttagttaggagatgttaaaatacttggcacctctggttatatgtatgttatgtgtgttctcccccctaaaatttctaagcacatttattcacttttaaaatgaatctttaaaagattatagttagtagttatagttaatattctatttacttggaaaaatgtgaataaatggatcttcaaaagattcattttaaaaatgaataaatgtataataggctataggtgatcttacttgcgtattaggtaggaggcacatatttataccatttcatatgtaatatctttgtcattgtgtttcatcgaagatcaattgctagcaacttgaagggtatttatacttgggtcacttgaactcagctgactaaattgtaagaacgagagcaagcaagatggctgttattggaagccataacttccagaagataattctgcacaattcgtaagttaaaaaaaatctgtagggtcttccactatcctttttcaggttgataatgctgttctgggcacacactttgtaaatggaatgttatggtannnnnnnnnnnnnnnnnnnnnnnnnnnnnnnnnnnnnnnnnnnnnnnnnnnnnnnnnnnnnnnnnnnnnnnnnnnnnnttctataaaatggtgtagtatttgcatatatcctagacacatcctcctgtatgctttaaatcatctctagattacttaaaatacctaatacaatgtaaatgctctgtaaatagttgttatactatattgtttaggggaataatgacaaggg

SEQ ID NO: 439056 - DNA, 1040 bp, Homo Sapiens
aaaaactattaacaaatatatttattgtggtggctttctcccctactagatataccttgttagaaaatagtatcccttttagttccaggtggaccattaagcaggtaataaaattgtttttccctcattgagaaagaaaacacatgactttgcaaacatgttatattctccttgctctattttttttctataaaatcagaattttcttctaataagtatgattttgtttttggaagtaagttacaggcacatgtttacaggttgatatataatccaaggggtaacagaggctgagccacatagtgctaacatagattggagacctgttccaggtgaccacaatccttcacagttttgtaaagcacaaaagtagtctccagctctatgatttcttccacatttgtctttctccaatcccatatggtatattcaattctggtatgcactcttgtgtttcttataaaaatacaggatgagagtgatggaactaatcttaaaacagttgtttctgtgatgataaatcctgtgattccaaatgccaggccctaattctgagcactctctagatctcccggtcaaaacaacactgtcctttgaaggatgtttctcttccctgaactcctatttgttttgaagggatactgtatctttgaatttgcagaactatcttttgcttcttaaaacaacagcttgaaaacacatttttataaggaaaagatgtttcttctccagatgtcatcatttcgttgttacatcttatagcctattgataatatgtacaagaatgtcttgtcttttaaaaatgcagagaagcacacaagacaaccatctgaaagtatcccttctttgatcttttggctctttgttgttaactatgcttgtatgaagaatatagcaactactgggaatgttgtttagacagagcaataactgacatgtccatttgtggtcctaatggctagagcacctgtcctgggcatctggttgagatagcagcatcatgagtttacaataatctcatggaaccctctagtgtacag

SEQ ID NO: 439057 - DNA, 1799 bp, Homo Sapiens
  misc_feature (533)..(533): n is a, c, g, or t
  misc_feature (1688)..(1688): n is a, c, g, or t
  misc_feature (1690)..(1690): n is a, c, g, or t
  misc_feature (1693)..(1693): n is a, c, g, or t
  misc_feature (1712)..(1712): n is a, c, g, or t
  misc_feature (1726)..(1726): n is a, c, g, or t
  misc_feature (1728)..(1728): n is a, c, g, or t
  misc_feature (1741)..(1741): n is a, c, g, or t
  misc_feature (1745)..(1746): n is a, c, g, or t
cctttttgacctcccaaagtgctgtgattataggcatgagccaccgtgcctggcctagaatagttttcttactcccccaaaactgctttatgctgcctttttgtagtcaaactatctgcctgcccttaaccccagctcccccgcattagaaaccactgaacctctgatctgttcttcaccttaaagctttcccttttccagggtgtagcgtatgtggaattatagagtatgtcacctttcaagtctggcttctttcatctagtgtaatgcatttgagatttatctatgttgtcggatgtatcagtaagtttgtgtcttagcagtgctgagaagtattcctttgcatggatgtacccagatctgtttatccattcatcagttagaggacaactgggttgtttccagtttggggtgattacaaataaagccacgatgtacaagcacctctaggttttgggtgaacataagttttcatttctcttaagtttcaatacctaggagaatgattgctaggtcaatggtaagagcgtgtntaatgctacaagaaagtgctaaactgttttccaaagtgagtgtagcattttgtatccccgctagcaatgaaatgagagctccgcttgctctgtaagaggcattagtgaatatgaaagtgctttgtaaagactaagggtgtctcacagtgtgcccaggcgggaggattcagagggggcatttctaaactctaaactcctgtgggctcctagccatccttctgaatggggacagaatacttccatttccaggttacttgcttctccaaaagggagacagggaagtatccttctctttttgcaaatgagggcacagcactgcctctcgtggttgagccagtcattattcagtaggaacagcagtgagattctccagccttctattttattcctggggtcacagagtaaaatgcagcgtgatcatttggagcattcttatgctttgtgacaagaacaaagccagtggaaacagccatgtgtccaatcagaatgtcagagctggcagggaccttagcaattgtcactttacagatgataacctattacatccccaggtccccagaatcccagcccaggactcactccctcagccttcctggattgtcctgggtggaacaagatcagctcatttagcacatagtcttccagaacacaaggcagtgtcccaccaaggttggatgggaccagcttctctatccacagtagctgtgcacacagagacagaaatgaagccgtactgccgggtgcaccgtggccagagatcctccttcctggtatatactcccggagccattgcttctttcatttcagtgcccatttctgaggcaccttcacatttcaaacgtcctgagaatatgtttaattagaacttggccatacagccttttaaaacaaaacagaagggaccagctaattatatcactcagcattctgtggcaaacatatattttttaataaaacactttcctaaccagagtaatccctggagatgcaaatcctcatttataagaagtttcccaaagggagttaaagagaagatgccttataaagaaaagagacaaagagagtggggaagtgttttcaaagagcttttaaaagatacactcattctgaggttgaattacagatattttaagggtaccaaattttattacagangnaancctatcctgtgttttagancatgtattcccgtncnctccctttttgancacnnccacaaatgcccatatttctctttctgggtctttcataaggcaatatttaaat

SEQ ID NO: 439058 - DNA, 2968 bp, Homo Sapiens
  misc_feature (28)..(28): n is a, c, g, or t
  misc_feature (145)..(145): n is a, c, g, or t
  misc_feature (189)..(189): n is a, c, g, or t
  misc_feature (240)..(240): n is a, c, g, or t
  misc_feature (247)..(248): n is a, c, g, or t
  misc_feature (275)..(275): n is a, c, g, or t
  misc_feature (296)..(296): n is a, c, g, or t
  misc_feature (311)..(311): n is a, c, g, or t
  misc_feature (339)..(339): n is a, c, g, or t
  misc_feature (399)..(400): n is a, c, g, or t
  misc_feature (488)..(488): n is a, c, g, or t
  misc_feature (538)..(538): n is a, c, g, or t
  misc_feature (547)..(547): n is a, c, g, or t
  misc_feature (555)..(555): n is a, c, g, or t
  misc_feature (562)..(562): n is a, c, g, or t
  misc_feature (581)..(581): n is a, c, g, or t
  misc_feature (625)..(625): n is a, c, g, or t
  misc_feature (672)..(672): n is a, c, g, or t
  misc_feature (688)..(689): n is a, c, g, or t
  misc_feature (767)..(767): n is a, c, g, or t
  misc_feature (855)..(855): n is a, c, g, or t
  misc_feature (921)..(921): n is a, c, g, or t
caacaattgttcacacagcctctgatgnatcatacccgacgcacgcacccacacccgctacaaccacgtcggtaatatgaaccggggtgggacggggggcgcatccgtccgagtacgacggacgcgcgtcttggcgggttgcgtngtttacgcagcgcgctcaccctcgggggctgtcatctcggatanaccaaattgaaagcgatgtggtaacagatgaaacggtgctccgtcatgcancgaatanntatgtattgaggagcgcggccctcttnaattatgtccctatatacacngattttcacgtcgcnacccctttgcaaatgggggccgttgtancggggggggtggtgctcgttttgatgacagtcaccttaccgggcaaaagcgaacattgannttgagaacgatcaaggtgcgctcaaattgggatggtcgaatccgccaacaaaaattaccatgcgggcgtaacacccgccccataaccnccccgcgggacgtggttacccttatacctacccgacaatttccgccgaanatggctgantagtgatnaattacntccccccattgttccgacngtggaatgatttgttggaatgcgaccagggagggggtcgccatngggaaggagtttcggcgcttacctacgacgatgccggttttttggtncgtgcttgtacccaannaagattctatcaggcgcggatacggcctcttttttcgcccctccacgccaacatatatacacaaggagtgtcgcgagntcgggcgtgcctcacccgggcgcgggtgtttgggggtggtatcgtctggatgcaaaggtatcgggctcccatgtggtagttccggcgnagggggcgaaattcgtgggctaatggtggaattagttcgtagatacctgcgggatactcatcgcangcctccctctgcgcacctggattctgttacattgaccgtgttcgagtgaccgcttcgtagcgatacgttagagattgaggaaggcgtggcgggcggggcatacacgggagctgatctggcggtcgcgacgttcggcgcgaggggtgggatgggcgacttcctacccggcgacggttgcatggggggcagcgcaaggggcggaccatctcgttaggagtgtccacaggcgtagggcgggggctcaggaggcgaagtgggtgtggtggcggtgtgtgtggcgggagagcccgttcggggtctctaagccatggtacagccccacctctcaggaggtcgggggggttccgccattaagtggggccttcggcctcccaggcgcatggaggagggcagccccagtgtgcttgagtctccccaacatgggcctgcccgggcagcacccgggcatggttcccctggggctggggctccgggtcaggcctgggtcccacggtacttgaggaaggtgctctccaggaaggcggccagcttcatccggtcgtcctcgtggaggaagccatagtgcacgagctccgaggcgaggtcctgggcgctgtccgttgggagcagttcgtaggtcagctgccggtgcagccggtcttccagcaccagaagcagagtgagatgccagcgcgccttgtcctcgcttctctccaggttgcactgcatctggatgacctttctggtctcagagtcaaagggctctggcgtcggggtcttggccttttggacctcctccgggggtggggccagcacacggggcagccccaggggtcgagtggctgcaaagttcatcagtgggtagattccattcctgacatcctccaggaatttgtccagctccatgaaggagacttccgagtaccgccactgcagcgggggcctgcggggccggggaagctccgccaagaccgcgtgcaggtccatggccttggtcttctcctccaccacattctcaggcatgaggtactggtgctggatgaagcagtgggctgccaggagcttcagcgagtgcacctcgaagagcacgcggtggaagaggaggctgtgggcagagggccggcgggcagggtcccgggccaggcagcaaaggatgaactcccgcatgttggggtcactcagcgaagtgcctggcgcgagcaatggcctcctctgtgacccgggtgtccccattggtctggatttccagtacagccatctccagcgcacacatcccaaaggagaagatgtccacagcggtcccatcggccacctctccatactctggggggaagaagtgcaggttccgaagttcctctcgctcagcgcggatggggcttcggagatcatctggaagtgcattggagaagattcggtgccacacggagccgatcttgatgaggccgttgtgctgaatgaagattggtgtcgctggtcaggttcccgtggatgattggggggctgcaggcgtgcaggaagctgagcgcagacaggatctgcgtgcaccagcgcttccaggcctggcggcggacgcacgactccgtcggtcgggtgggcgcaggagaggcggctgggcctgcggagcccgccccgcatcctcgcccagcccctgtccgaggccgccgggcaccccctcaccatcccagtccccgaggctgccccaaccccgtcctgtccccgtggctgccccagcccgctccccatacccgggcgttcatggccttgtggttcttcttggtctttttgaggaattgcttgaggctgcctgatgacacgtactctgtgatgaagatgacctgcacggtgcgagctcaggatttccaccagctgcgggttcgtccccatgcccgccccacctagctgtggtctctgcctgcccggggccttgcccgtgctcaccctcgcgcaggcctcagaggtatccagccagtacttgtgcaacttcacgatgttcgggtggtccaccagcaccagctgctcgaacacggtctggatcttctatccctacgactccgggccagtaccagcg

SEQ ID NO: 439059 - DNA, 1260 bp, Homo Sapiens
  misc_feature (101)..(121): n is a, c, g, or t
  misc_feature (496)..(543): n is a, c, g, or t
gtactgttttgtttcctgtcttgaagattttgagttatggttattggtttcagattgattaattcacatatgctgtgttttgaaatgagatcccattagcnnnnnnnnnnnnnnnnnnnnnccaatataaagtgttttctttaaaagtcatattggttcgtggcctagtgccttggattttacatatttttctttttaaatgcaaaaccttttcaacaaaatagtgtttgtcatcaggttggtactaaacatttataattactgtgtaattataaacaaaaatacataaagctttgaatataattatgtagcataaaagttaaggttgttcactatgatggcatcttagaattaaacaaaacttttactagggctgaaaagagaagactgatttaatgtggtgtgattattctgaagataaatgtctggctacagggaatattttgtcctaaaaaatgattacacatatggctgtgtgtgtttgagtctgtgtctnnnnnnnnnnnnnnnnnnnnnnnnnnnnnnnnnnnnnnnnnnnnnnnncacacacacgccccttgaattgctttaactcctaagtgtttcagtcctcattccggtaaactccccatgctgattctttgttttaaactgaaccataggtacagtttcctttttgccaaatgtcaaaacaggcccaaattttaaaatgtaatgctttttaaatagaaaaatgtataaaattagaagtgcccacatataaaaaatacttgagatgaagattatctttagtgaatatcatctgcatatctctgtaagttccattgtgtttcttacagtccctgtcatattaccaacagaggcaataaaagctgcagtgaaattgccatgactaaatcttttccatatttcagtgtattttttttatagatttaaaatataccctgaaaacttttctaggaaagaataattattcatggcaaagagcattggaaatggcatgttttgggggaggaaaagaatggccaggccttggtttactaccctttaagatgtttacccacttatactggggctgcctttattaaccaaactgggacctgccaaaatatggcaataataagaacatggtcccttccttagaacttttaaaaaagtttttaatggggaagaaggtaaattttactctcaccaaaataccatggagaaaatcctttttccggaaaaatcctttaactgggggaatttcttttttaagcaaggggcccctaatttttttcc

SEQ ID NO: 439060 - DNA, 1871 bp, Homo Sapiens
aaatcccaagccattttgtgcaaggcccagggaatttccttaggaaaacaaggctaagggccctggttcagttaccctaaagggggcccgcgcgcccaaaaagaatgggtctagaaaagtttcttcgagggccggaagcggccaaacaagttttttgttggtatgaggattctggtgtttggcaaaggaagtggggtgtttaatagaaaaaagaaactggaagagcatccactatggcaagatgtggcacttggcaccgccctctgcccccagctccccagtctgccaggctggggggtcatagaatggccacgccgtgctggctgtctcccctgcaacccacagctgtgccctcactgctgcgggccacaggaggctcagtaccccctttaggcggggggacagtgagggcagcaccaggagaagccaggagctgtgtccccatccaccttcaggtccccaggtcccctccgctccaggtgaggccatgacagctatggaaggcaggaagctgagccctgctgtggcacagaatccccctcaaaggaaaaacacccttcccaggggtcctctcccaaggggggctcccaccaccaccccttgaagtctcagacccagttgaactcctgtgggagctggtctggctgcccctatccgcagtcaccatccagggtgctcagggcaagaggccctcgccctgtgccctgaccggcctcaccgagcccgtggagtgaggcggggagctgggggaccacgggggcggagggtacagctgggtggccgcatactgcaatgagggctctgggctgcaagactgaggacttggcacctcacagtcctgccagtttaggacggagctttgtttacagcaggagcagtacagcagctccatgacccggaagcagttgtccagcagggctttgggccgcaccagcttcaggtttggccctggggcattcaagagggacaacacggattccaccttggggctgacctccacatccgtgaggccctgctggacattcagcagcagcgtctgcacctcctgcaggtacttccaggatgggtggccctcgagcagcacgtcctgcaccgactcagtggcactgaggctcaccaagacccacagataccgcagctcccgctcgctcacctgggccctctgcagcctggtgacgttggcgattctgaacaccccctcgtaaggcacactgatcttgtagttgatggggaagtagtgtttcatgtactgaagtcggctcctgtactgcagcttgtcccgcagaaaacccgtgacagtgcactcctcattctgcgtcaagggccacatctccaaaggctcattccccaaggccacgccaaggaagatcccaagatagcgcagccaggtgaagccccggggcatggtggtgttcctcgtccccctgagagctcaggcgccgtccccagcagtgtgtccacagaggcctaagcacggcctacatggcctcggggcagcagaggtggtcactgagtcagggaagggctggccctggaggagtggctgggctgcgggagtgagcaggtgccccaagggcagcagctgcccttatctgcccggcagcgtggaggacagccggggggcggtggccgcaagtcccatggcagcccagaagcaggtctgagccggtggcttgggggtctttcggggtcttcctttccaaggagcaggaggagagagtccctggcaggcccctcggaatctggggctgggtgacgctttctctgatttctccgactgcagctgctcagtgtgaaatctggctctgcctccgctaatggggagctccccaatccacaaagcagcctctgttcctcatgcagacatctct

SEQ ID NO: 439061 - DNA, 862 bp, Homo Sapiens
ggctcacccaagaccccacagataccgcagctcccgctcgctcacctgggccctcagcctggtgacgttggcgattctgaacaccccctcgtaaggcacactgatcttgtagttgatggggaagtagtgtttcatgtactgaagtcggctcctgttacttgcagcttgtccccgcagaaaccccgtggacagtgcactcctcattgctgcgtcaagggccacatcgtccaaaggctcattccccaaggccacgccaaggaagatcccacagatagcgcagccaggtgaagccccggggcatggtggtgttcctcgtccccctgagagctcaggcgccgtccccagcagtgtgtccaacagaggcctaagcacggcctacatggcctcggggcagcagaggtggtcactgagtcagggaagggctggccctggaggagtggctgggctgcgggagtgagcaggtgccccaagggcagcagctgcccttatctgcccggcagcgtggaggacagccggggggcggtggccgcaagtcccatggcagcccagaagcaggtctgagccggtggcttgggggtctttcggggtcttcctttccaaggagcaggaggagagagtccctggcaggcccctcggaatctggggctgggtgacgctttctctgatttctccgactgcagctgctcagtgtgaaatctggctctgttcacgtgccaagactcggtctcctaggatttgctggtggccttaaggggctccaggaccccaagcaggtgcctaagggccacgggcagtgggtgccaggttggagaggctgaggctgcccccaacccacagatcccgggaatccggaccggtccag

SEQ ID NO: 439062 - DNA, 1113 bp, Homo Sapiens
  misc_feature (1005)..(1005): n is a, c, g, or t
  misc_feature (1059)..(1059): n is a, c, g, or t
  misc_feature (1068)..(1068): n is a, c, g, or t
  misc_feature (1075)..(1075): n is a, c, g, or t
  misc_feature (1080)..(1080): n is a, c, g, or t
  misc_feature (1085)..(1085): n is a, c, g, or t
  misc_feature (1097)..(1097): n is a, c, g, or t
  misc_feature (1103)..(1103): n is a, c, g, or t
  misc_feature (1106)..(1106): n is a, c, g, or t
  misc_feature (1109)..(1109): n is a, c, g, or t
gggctgtaccgcccggagtaacgggatgtcacacttttcagaaaaagaatctgcatcctggaaaccagaagaaaaatatgagacggggaatcatcgtgtgatgtgtgtgctgcctttggctgagtgtgtggagtcctgctcaggtgttaggtacagtgtgtttgatcgtggtggcttgaggggaacccgctgttcagagctgtgactgcggctgcactcagagaagctgcccttggctgctcgtagcgccgggccttctctcctcgtcatcatccagagcagccagtgtccgggaggcagaagatgccccactccagcctgcatccatccatcccgtgtcccaggggtcacggggcccagaaggcagccttggttctgctgagtgcctgcctggtgaccctttgggggctaggagagccaccagagcacactctccggtacctggtgctccacctagcctccctgcagctgggactgctgttaaacggggtctgcagcctggctgaggagctgcgccacatccactccaggtgactcactgcagtacccagggacggggtatccaacgtgtgtcactcccttgatgcctagccctgcccctccttgaacctctctggctgagctgggctgcggggctggggtctggggtctggctgtcactcacaggtaccggggcagctacttgaggactcgtgcgggcctgcctgggctgccccctccgccgttggcggcccctgtctgctcgctgtccatctatcttctactactccctcccacatgcgcgtcggcccgcccttcacttggatgcttgccctcctggggcctctcgcaggcactgaacatcctcctgggcctcaagggctggccccagctgagatctctgcagtgtgtgaaaaagggaatttcaacgtggcccatgggctggcatggtcatattacatcggatatctgcggctgatcctgccagagctccaggcccggattcgaacttacaatcagcattanaacaacctgctacggggtgcagtgagcagcgctgtatatctcctcccatttgantgtggggtnctgaaanctgantttgntgacccaaattncttctnganaantgcc

SEQ ID NO: 439063 - DNA, 2150 bp, Homo Sapiens
ctaggtcacacttttcagaaaaagaatctgcatcctggaaaccagaagaaaaatatgagacggggaatcatcgtgtgatgtgtgtgctgcctttggctgagtgtgtggagtcctgctcaggtgttaggtacagtgtgtttgatcgtggtggcttgaggggaacccgctgttcagagctgtgactgcggctgcactcagagaagctgcccttggctgctcgtagcgccgggccttctctcctcgtcatcatccagagcagccagtgtccgggaggcagaagatgccccactccagcctgcatccatccatcccgtgtcccaggggtcacggggcccagaaggcagccttggttctgctgagtgcctgcctggtgaccctttgggggctaggagagccaccagagcacactctccggtacctggtcctccacctagcctccctgcagctgggactgctgttaaacggggtctgcagcctggctgaggagctgcgccacatccactccaggtaccggggcagctactggaggactgtgcgggcctgcctgggctgccccctccgccgtggggccctgttgctgctgtccatctatttctactactccctcccaaatgcggtcggcccgcccttcacttggatgcttgccctcctgggcctctcgcaggcactgaacatcctcctgggcctcaagggcctggccccagctgagatctctgcagtgtgtgaaaaagggaatttcaacgtggcccatgggctggcatggtcatattacatcggatatctgcggctgatcctgccagagctccaggcccggattcgaacttacaatcagcattacaacaacctgctacggggtgcagtgagccagcggctgtatattctcctcccattggactgtggggtgcctgataacctgagtatggctgaccccaacattcgcttcctggataaactgccccagcagaccggtgaccgtgctggcatcaaggatcgggtttacagcaacagcatctatgagcttctggagaacgggcagcgggcgggcacctgtgtcctggagtacgccacccccttgcagactttgtttgccatgtcacaatacagtcaagctggctttagccgggaggataggcttgagcaggccaaactcttctgccggacacttgaggacatcctggcagatgcccctgagtctcagaacaactgccgcctcattgcctaccaggaacctgcagatgacagcagcttctcgctgtcccaggaggttctccggcacctgcggcaggaggaaaaggaagaggttactgtgggcagcttgaagacctcagcggtgcccagtacctccacgatgtcccaagagcctgagctcctcatcagtggaatggaaaagcccctccctctccgcacggatttctcttgagacccagggtcaccaggccagagcctccagtggtctccaagcctctggactgggggctctcttcagtggctgaatgtccagcagagctatttccttccacagggggccttgcagggaagggtccaggacttgacatcttaagatgcgtcttgtccccttgggccagtcatttcccctctctgagcctcggtgtcttcaacctgtgaaatgggatcataatcactgccttacctccctcacggttgttgtgaggactgagtgtgtggaagtttttcataaactttggatgctagtgtacttagggggtgtgccaggtgtctttcatggggccttccaagacccactcccccacccttctccccttcctttgcccggggacgccgaactctctcaatggtatcaacaggctccttcgccctctggctcctggtcatgttccattattggggagccccagcagaagaatggagaggaggaggaggctgagtttggggtattgaatcccccggctcccaccctgcagcatcaaggttgctatggactctcctgccgggcaactcttgcgtaatcatgactatctctaggattctggcaccacttccttccctggccccttaagcctagctgtgtatcggcacccccaccccactagagtactccctctcacttgcggtttccttatactccacccctttctcaacggtccttttttaaagcacatctcagatta

SEQ ID NO: 439064 - DNA, 1442 bp, Homo Sapiens
  misc_feature (515)..(515): n is a, c, g, or t
  misc_feature (613)..(613): n is a, c, g, or t
  misc_feature (709)..(709): n is a, c, g, or t
  misc_feature (731)..(731): n is a, c, g, or t
  misc_feature (828)..(828): n is a, c, g, or t
caagttttatagtcagaatatatttcactgaaaatatgtgtatgtgtgtgccttcaagagtgagtgctcctcaagggagactcacacagttccttacaacataaattagatatagaggttatggctttactcagtagaaaactagcagcatcattttgggccatggggcattccccaggggtcaccatccagcagcctctccctgggggcagaggacgcctggtcagaacagctataactcatccatcatggcgagcaaatggtcccctttgctggtgctcagccttggctgctccgtgatctcaaactcccccatgattcgagccagctcctcgctccgttgctggtcctgggtggcttgtatgttgataacttcataggataactcttctggcctggttagcgctgcttgttcctcttcttcatcggtggtaaagagattcaaccggaatctgggctcagggccactgggtttcttaatctccatccctcccatcagcctggccaagaaattnagctcttctttagcaagagggtttggagcgatgctttgctgggtcatgaggctaagttctttgatgatccagagacatgagtttccacaggctgattnacgctgtacatgtgagttcccagtttcaggacttggtctccataaagttcaaaagaaccttctttgggtgcagggacatagtttccaccatgcttnaattctatcctcttcacttctncacctttgttgttgaacattctgatgagttctggaacttcagttccccaaggaacaggcccggacaccggcaacacaaagcgaccgttattattctnaactttgttctttagaaacatggatactcggatgttcaggtcttggaagaagatgaggagtgttttccggatcagctggaactcccctgcagagagaccaccatatatctgcttctgttagctgccgcaaagtctcgtccacttgctgcaggatggctggggagtctcggatgaatcccttgatggtatccaagtgattgaaagtgaccagcagcacatccttgggtcggggacacagcaatacttgatatttgaaagccatggtcatcaggtcatagagcttatccatgctggcctggttcagtttcataatggaggcatgagccaggcgctcatagacagtcctcagggccttcttggagtagagctcttgaggcttgaataattcctccataaactttctattgaacatggtggagatgatgtcattcagaactcgttttctgtccacctctgtccattcatctttgcgggccttgtctcccgggatgttctgggcccgcagccgttggtcgaggatgtaaagcatctccccgcccaagttcaagaagagcagcggtagcgtccgcaccgacatggtgctggaaacgagctggactggtgaagagccccgg

SEQ ID NO: 439065 - DNA, 1198 bp, Homo Sapiens
  misc_feature (944)..(944): n is a, c, g, or t
  misc_feature (1126)..(1126): n is a, c, g, or t
attgggacgctgcggcctggccttcaggccactggctaccgaaccccggggctcttcaccagtccagctcgtttccagcaccatgtcggtgcggacgctaccgctgctcttcttgaacttgggcggggagatgctttacatcctcgaccaacggctgcgggcccagaacatcccgggagacaaggcccgcaaagttctgaatgacatcatctccaccatgttcaatagaaagtttatggaggaattattcaagcctcaagagctctactccaagaaggccctgaggactgtctatgagcgcctggctcatgcctccattatgaaactgaaccaggccagcatggataagctctatgacctgatgaccatggctttcaaatatcaagtattgctgtgtccccgacccaaggatgtgctgctggtcactttcaatcacttggataccatcaagggattcatccgagactccccagccatcctgcagcaagtggacgagactttgcggcagctgacagaaatatatggtggtctctctgcaggggagttccagctgatccggcagacactcctcatcttcttccaagacctgcacatccgagtatccatgtttctaaaggacaaagttcagaataataacggtcgctttgtgttgccggtgtccgggcctgttccttggggaactgaagttccaggactcatcagaatgttcaacaacaaaggtgaagaagtgaagaggatagaattcaagcatggtggaaactatgtccctgcacccaaagaaggttcttttgaactttatggagaccgagtcctgaaactgggaactaacatgtacagcgtgaatcagcctgtggaaactcatgtgtttggatcatcaaagaacttagcctcatggacccagacaagcagcgctaaccaggccagaagagttatccctatgaagntatcaacatacaagccacccaggaacagcaacggagcgaggagctggctcgaatcatgggggagtttgagatcacggagcagcccaggctgagcacccagcaaagggggaacgatttgctcgccatgtatggatggagttatagcctggttctgacccaggcgtccctctggccccccaggnaaaagagctggctgggatggtgcaccccctggggggattgccccccatgggccccagaaattggatgcctgt

SEQ ID NO: 439066 - DNA, 770 bp, Homo Sapiens
  misc_feature (177)..(187): n is a, c, g, or t
  misc_feature (189)..(199): n is a, c, g, or t
  misc_feature (614)..(625): n is a, c, g, or t
atttggtggaggaattccaaagccacctagtccatgggcccagggatctttcctatggaaaaacagcctatgggcccatgtttccctttaccctaactggggcccggcgcgcgcaaaacgagatggtcctagaaagctttcttcgaggggccgagggcggccgaccatgtttttttnnnnnnnnnnntnnnnnnnnnnngatagtttgtagcttttattctgagacattaaatagcatccagaaaggtgctgtgggtacagaatgcaactgagtgtgtgttaaccattcacatttcacttcttcctaaagaaaaacacctggggaggctgggtggcaatgcctcctcttgtgaagagtaacacgcatcactgaaaatatatgcagctttacagaacggataagtctttctggatttccactgcagcacatattttggctagttctcttgcatggctattgaacatcatgtatcttttcattctgttgagttgccttatgtttggcgttcctgggtgccctttgaaatgtcaggcctctgtatgcagtgtacctaaggggaaattactcctattgtcggcagggattttcatagcagaagtctggctgtttctcnnnnnnnnnnnnaaatgaagtgacctcccttggacttgaattcactcagagaagaatttgcttacatgttagttcccagtttcaggactcggtctccataaagttcaaaagaaccttctttgggtgcagggacatagtttccaccatgcttgaatcc

SEQ ID NO: 439067 - DNA, 648 bp, Homo Sapiens
ttattgctctcagcacctctgcaacattgggaaattagagagtatttttttacagatgagaaaactcaggcccaaagaggttaagaaacttggccaaggttatacaataagttaggaggaaaggagtacttaaatttgcattttctttctccagatccagtgctcactttgggactccgctgctgccaatattatttcagacgtttcccattaacaatacacatcaggtgaccagaaatcctggtttgcccaggaatgtgctggcttactcctgttttcctggcttaattattaaaagcacccgccttgactctcagaagtgtcttggtttgggtgataagtgatatggtcccccgagctgtatggcaagcccagagttggttttcagtaaatgcttgactgaatcactgtttggagattctcacacctgattttgatatggtcccatttcttttgcttgtgtgtgggttggcagctctatgacctgatgaccatggctttcaaatatcaagtattgctgtgtccccgacccaaggatgtgctgctggtcactttcaatcacttggataccatcaagggattcatccgagactacccaaccatcctgcagcaagtggacgagactttgcggcagctgacagaagtaag

SEQ ID NO: 439068 - DNA, 1029 bp, Homo Sapiens
  misc_feature (780)..(780): n is a, c, g, or t
  misc_feature (793)..(794): n is a, c, g, or t
  misc_feature (796)..(796): n is a, c, g, or t
  misc_feature (801)..(801): n is a, c, g, or t
  misc_feature (818)..(920): n is a, c, g, or t
  misc_feature (922)..(922): n is a, c, g, or t
  misc_feature (927)..(927): n is a, c, g, or t
  misc_feature (935)..(935): n is a, c, g, or t
  misc_feature (944)..(944): n is a, c, g, or t
  misc_feature (951)..(952): n is a, c, g, or t
  misc_feature (954)..(954): n is a, c, g, or t
  misc_feature (961)..(961): n is a, c, g, or t
  misc_feature (970)..(970): n is a, c, g, or t
  misc_feature (982)..(983): n is a, c, g, or t
  misc_feature (990)..(990): n is a, c, g, or t
  misc_feature (994)..(994): n is a, c, g, or t
  misc_feature (997)..(997): n is a, c, g, or t
  misc_feature (1001)..(1001): n is a, c, g, or t
  misc_feature (1008)..(1008): n is a, c, g, or t
  misc_feature (1012)..(1012): n is a, c, g, or t
  misc_feature (1020)..(1020): n is a, c, g, or t
gacggcttcaacagcaacacctttattgccagcaaaaccctgcggaggaggaaaccagcttagtgccagcaccaactgcctctcacaggctggggtaatcatgggactgggagggaggggtctgggtggtagagcttgctgcccggcaggatatggcaaggatgttcctgcagtcaggctgttgggcctttgcccgggagggtgcgataaggatgtttctacagtcaggtgatcaggaaggatgcttctcacggcccgagttcccaaggaatgtttcattctgaccagggtgtgcaaaatggctgcaggtttacaaaatggtacaggttagactaacagcaacatctcccaggtagacagttctataaagtaaacttcccttgagcacctacactgtaccagacatggtgctaggacccaggccacaggaggaacaggacagatgaggcccctgccatcctggtgctcatgcctgatgaaggaagctaacaggtcgtaagaccaggtcacgtggtggtggtaatgaaagacattaccagcctcttcgaggtccctgccagaacctgactgccacattccccaaagggaccagactcctcggcacactagctgaggtttctataggcgcagagaaaacactgtcccaactgttgcaatggagctgggaaaaataatgttttttctcaatgcttagacttaccaattgcttcattttatcacatgaaggctgtgtggcactttgaagtagaattagtaatttacataattacaaatcatgtnttttttctttttnntntaganggagtcttgctctctcnnnnnnnnnnnnnnnnnnnnnnnnnnnnnnnnnnnnnnnnnnnnnnnnnnnnnnnnnnnnnnnnnnnnnnnnnnnnnnnnnnnnnnnnnnnnnnnnnnnnnnngngcaanccatcatncccagctanttttttnngnttttatngagcggggnttcacaagatanncaggatnggcnggncccngaccagngatntgccgctnggcctccca

SEQ ID NO: 439069 - DNA, 2012 bp, Homo Sapiens
  misc_feature (54)..(54): n is a, c, g, or t
gttcgccccgcgaagtgatgaaaaggcccccacgccgcgggaggtgggggccanacgaaagaggtgcgccattaacccgtgtgcgttccgttacaagggttaccttccgcccaagtgggagcccccaaaacaggaaacacagggggggcagttgccaaggccaaggttccccttgaaaggaacgcaggaaagcaggccgccaaggaaggagccccccggggggggatgaaattttggccccaacaggtgaaggtagaaagccaggtggtgctttgcccactcaccaaagacgcaagttcagggaggcttacccggcccccggaaggccacgtccagggccagaccagctgggttgggctgccagcatccttgctcggcacaagtgcatcaatgaagtccaaggtctggaatgtggccttggccttgaggacgtcaccaccctggctagtgagggtgcagtgccgctccaggatgatggtgtctaaagttgagcgccaggtcgcaggcccgcagaagcatctcccctcaggagtgaggtagtacaggaagtctgtgcacaggcagatctgctggtgccattacactatgagggcatggagctccaagatggtggcaacatagtcactagaattcctacagggtaaggctggggagaggaagtagctgcataacacatatgataccctggaagcacttcccagccagagtctcaggaccacattacatccagatacaggtgccctctgagcacacttctctctctgcctcccactctgagctgcctcctggccccacatgggcagcctggcccaagggttggagcccagcaagtgttcagtccatggtgttgactgctccctgggccaggagagcccttggtgactctctgactcctcctgtggaacctctgactctgccttgggacctcccaattcccatgggaagcccccatggctctggattgccccaccttgcctgggatcctccagccccacaggccttacttgatgccttagccctcccagaacatgacatgttcctcagaatgtggctgatgtccagggccatctgtggatgtttgctgggggcttcttgctgttttcctttatggtctgtagggcagggcaaggccaagaggagaaaccagtctaatctcagaatggacaaaatgctcactgccactaacggcaaccaccttacagtcagcagtgcttctggatggaacagaggtttcattctgcagaacgctccttgtttggcttctttctgaagccagggaagggtaccaagcccagcttacctgcagtgcctgcattagcatctgtgcctaggatgtgtgatgggcccctgctcccactgcagggttgacgttccctccagctggagacctgggctcctgacaccaccgggcctgtttgtcctgctctggatgagggtggaaaggctgtatctggcattttcctaggtccttagtttccaccttctagacatccagcaggagtgaccatgcccagccccacacctgaaatgggactcccttgtagagcagctgagacatctacagacagaagagtgctctggtgagacaggccacaggggtccccagggagggttgggggccagaagattctgaaggcttccagtcttgggctctgtggttcctcaaagaggttaggtttaactaaagccaggcctcccctcccacgattcaaaagagtgggtgagtgctctgcgtcaggaactctgatctggacctattttttcatttaggtcaccaagagacaacccctaaccccccagctagggatggtgcaagctctggcatgagattttcttctagcaatgtgatgcttgcagggacaggtagaaaagctggtgatcaggcctgctgtcctccgggtaaggacagtgtgctacccacgctctgagaggccggtggtgccaggtcactgcactgggtgcctgtacccctggctctgcagacaccagtcatggaggtcctcccctctcca

SEQ ID NO: 439070 - DNA, 638 bp, Homo Sapiens
  misc_feature (158)..(159): n is a, c, g, or t
  misc_feature (178)..(179): n is a, c, g, or t
aggaaggatgtttctcatggcccaagttcccgtggaacgtttcactgtgatcaaagtctgcaaaatggcactgaccacaatgcaggtcatgaagcataaccagaccctgaaggcacgtccagggccagaccagctggccgggctgccaacatcttagnngagatcccaggagatcagnngagcaattgtttcattttatcacatgaaggctgtgtggcattttgaagtagaattaagaatctacataattacaaattatattcttaaaagaaggtgctcagtgccatgcctgacacatggtggaactccacgatgagatgtgtgagaagccagggtgccatggttacagacaaggactgcaggtacagattgcttgcttcaaacctgggaccaggggtgtgaattttgggaactctctgtattgctctttgccactgttttttaatctaacaacagtcactcctcagggatccttcgcaagggcatgattcctccagaatgtcctgcctgatctgcaagtgtcagacccggtgttgaggacagggcacctgacagtgccatccagcaatgagcaggaacacagccattcaatgtcttcaggattgcggtccctcagaactcttgaagccgtagctggc

SEQ ID NO: 439071 - DNA, 1143 bp, Homo Sapiens
  misc_feature (517)..(560): n is a, c, g, or t
  misc_feature (821)..(832): n is a, c, g, or t
  misc_feature (1092)..(1102): n is a, c, g, or t
tttagacaccatcatcctggagcggcactgcaccctcactagccagggtgttgacgtcctccaaaggccaaggccacattcaagactttggacttcattgatgcacttgtgccgagcaagcttatctgatcttctgggatctctactaggatgctggcagcccagccagctggtctggccctggacgtgccttcaggggctgggtatgcttcatgacctgtgttttggtgagtgatcctggttggagtaaaacattccatgggaactcgggctgtgagaaatgtcctaaccacctgactgcagaaacatccttatcacatcctgctgggcaaaggcccaacagcctgacttcaggaacatccttatcatcttctactgagcagcaagctatactgtccagagccctccctcccagcgctatgattaccccagcctgtgagcggcagtgggcactgacactaagctggtttccccctccgcagggttttgctagtaataaacctgtgttgcctgtttnnnnnnnnnnnnnnnnnnnnnnnnnnnnnnnnnnnnnnnnnnnngagagagggcggcgcgcgcgcctccaaaaaatttttccccgcggggggcgcccaattttcacgctcgtcccccagttttttttgttcacaaagggggccccctattgaggggagccggcttttataaagacaccagaggagcagcgggggcccgcccgttttaaacaacaccgttggaggagacgcggggaaaacaactcggttctgacctggaggagacatctctgtggggggaaggagagacacctcttaatcttcgcnnnnnnnnnnnnagaaccacatattgtggcggccacacaatcctcatcctctaaagcggagaagattttttgagagagctctcttcgaggggggataatatgatagagacactgtttttcagagacgtgtttgatcaggtgcgtggttgaaacaacactgaggacgcgaggcgatatatattggccgtggagacgtggttgttgagaaaaaatttttgtgcgctctataccagagggggattattagtggaatcattgttggcagacagaannnnnnnnnnnccgccgacggggggatccctttggttgtatatataaatgat

SEQ ID NO: 439072 - DNA, 1492 bp, Homo Sapiens
tgtgacgtggtaagtgtatgcgatggtggtttattgcacctatcaacccatcagctaggtattaagctcagcatagcattagcagcactcttaacacacaataaaactcacatgtaatgagattacttctcattactccacaccatagtagtctattttacagatgaggatactgaggctcagggaggctgagagatttacctggagtcaatcaattgttgatctggaagcatccgatcaccaggtcttctgaaataatgacagcagcaacaattaacattatgcttactatgccaaatgctatgcttagcattttacctgcatcacaatcgcgattcctttgggcagttaggtaggttccattttaaccgaatttaaagaggaggaagctgaggttcagagaggtaacttgccctaggtaacccagggtagtcagttaaaaagtcaagactcagacctcgatctgactaactccaaagaaacccgtgccactctgcctctcggaaaacactgcttccagctgcacagttcaaaaccccacccaaggcggccctgaatcgcggtcagtcggcttcagccgaatcgcactttgttttgaacaaggatacagagggcgctgcctgatgttagtctgggggcttgggggagaagatgggggtccagggtggaaatgtaggtgctggggctgtgccagagggagagtgtccgggaccagcgggcgagtcacgtgcgcgtgaaactcgacctaaggggaggggaaaagaagggagcccccgcccccacctcggggcgcagctccggacgcgtgtaaatacaactatcaactccgcagatccacttcatccaagccccagttcgcagacctctggcgcccggcgggttcccagttcccccgcttcttccgaggagacagcggaggcgaggccaccgggctgtcaggctgaagctccgtggcggccgggtcctgcacgcagagaagaccccagcgccggcgcggctcagggctgggcccacgggactccggacgcgccgcgaaagcgttgcgctcccggaggcgtcccgcagctgctggctgctcatttgccggtgaccggaggtgagcagcgtgggcggggagggggcgcgcgtagggtctccggctatgcgtcggctgagagacaccgaggccgctcccgccgacactgccaggcttcccaaggaaagaccgttacttgcgcccgcggtcccgcggcacagtgtcccatctcgccaagcgcgtccttcccttttcttttctctgacccctccgactcttctcttcctcccgggtccccgcttcgctgcacttcctctgcttagagtgcgcgtttgccagagttccagcggacctcctggagcgcttgaacccaaagccccgtttcacagatgagaataccgagtccccctggaagaagtgactggtacttcctcccctctctctgggtctttcttgcccttctcctctccgctttcc

SEQ ID NO: 439073 - DNA, 2187 bp, Homo Sapiens
  misc_feature (1610)..(1610): n is a, c, g, or t
  misc_feature (1647)..(1648): n is a, c, g, or t
  misc_feature (1661)..(1662): n is a, c, g, or t
  misc_feature (1667)..(1667): n is a, c, g, or t
  misc_feature (1670)..(1670): n is a, c, g, or t
  misc_feature (1681)..(1681): n is a, c, g, or t
  misc_feature (1685)..(1685): n is a, c, g, or t
  misc_feature (1688)..(1688): n is a, c, g, or t
  misc_feature (1694)..(1694): n is a, c, g, or t
  misc_feature (1697)..(1697): n is a, c, g, or t
  misc_feature (1714)..(1714): n is a, c, g, or t
  misc_feature (1717)..(1772): n is a, c, g, or t
  misc_feature (1817)..(1817): n is a, c, g, or t
  misc_feature (1832)..(1832): n is a, c, g, or t
  misc_feature (1968)..(1968): n is a, c, g, or t
  misc_feature (1991)..(1991): n is a, c, g, or t
  misc_feature (1998)..(1998): n is a, c, g, or t
  misc_feature (2045)..(2045): n is a, c, g, or t
tttttttaaccttgaaggagtttttattgaaacacagtacagaaaacaccaaacgtcactgacagcagtgagctcatagctgtaatggagttggccccagatgccaaaccacctcgctgaggtgtgacttcctctggagggtgacatggcaaggaaagggaaggtgttctctgtcaaattcagagaccatgtgcacctccaacaaaatcacactccctacaagttcagtgtgcccccagtggcacccgtggcacatcttgacaatgggaagggttaacggaagtagtggggacatccaacccaatggcacataccaggaatgggaatgtaggctgctgagtcttcttggagaagaagagagagctatgccacagttcagcttgtgggccctgagacaagggccacagtgtgcggagaggattccaaaggaggaggaggatggtgacatggacagtgactctggggctgcgggccacgatgtggcaaaaatggagcagctgggtggaggcaagatgaggggctgaggagtggaaagacaccagaatggggcagggagagcaattccactcagagtggagcagggaacagccagcatattagggccaagacccggtcagccagcttcaaccccttcacacgcaggatgagctcatggaggttgatctgccataagttgaaggcctcgctgaaagagatctgggtccttctgaagaatgaacaggtattcttcttcttgtgctcagctagcgctctgatgcagcaacgtgacatgttgagaaaggagctggcgctggcgcgggtgcccagggcggcctcaatgccacgcagcaggtcgttggtcttcaagatgagcagcatctggcgcggcacgtggttgaggagatggctgatctgggggaggtagttggccgcgttgttgcgaatctctaagtcctcagtggcagtgacgggagcttggctgatgcctctgttgaccgagtcccacgatcgcgccgtcagcatgcaggcaaacaaggggtagagatccccggctcccagtcgctggctgtactccttcactctcttcatgtcagtccagatcagagactgccagaggtggcagtaattcaggcggaattcttccgtgagcatctggtaaagcccatggtccaacaggacaatctccgcctttcccgtgccggggtgcttccgcaccagtacattgccggggtggggatcgcagtgcacgaagccattgacgaagatcatctcactatacatcttgcccaggtggcgtgagatctcattgacgtcgatcttgttccttctccatgtagtttctttcattgacctgcccgccatccacaaactctatcaggaggacccgctccgtggacaggtccccagtggattcgggggaccttcaagaagtcaaaatgcctgagcatctgggacaccttctcagcattcctcccttcattgaggaaatccagctccaaaggcaggttcttcttggcttcatccacaagccacataaactcaaactctgggaacagctgcttcacagccagaacgagcacctccatcaggagaatgtccttcgagctctgagcccgcacctttgggtgctngatttttatggctaccgttttttattatgcagtattnncttgtggatttgnntcagngangttgtttctanaggngtnttattnaanttttggaataaattatngannnnnnnnnnnnnnnnnnnnnnnnnnnnnnnnnnnnnnnnnnnnnnnnnnnnnnnntggagcttggttgtgtagtacctttagcgtgttggtgtactcctntggcaacaggtagtncagagcccccaggtgttggcccaccttgatgaaggtgccccggttggtacagcagagcttacagagacgcctggcagagcgaaggtgcaccttagatttcagctgcaagtactcctttgagccataagggacactnttcagggaagtgaggtagtcgtnactgatnacagccgtcgtagcaactgctctgcccaccctgacagcgccaaagtnattagggtccaagtacttgttactgtagaagtagatgccagaggcagcaagagccatgctggtccacgaagcaagcttgagagcctttctggccatgtcgccagatccccgagggaagcagagccgcggcgcccggcttccg

SEQ ID NO: 439074 - DNA, 810 bp, Homo Sapiens
ctgagcatctgggacaccttttcagcattcgtgcccttcattgaggaaatccagctccaaaggcaggttcttctttggcttcatccacaagccacataaactcaaactctgggaacagctgcttcacagccagaacgagcacctccatcaggagaatgtccttcgagctctgagcccgcacctttgggtgctggaccttcacggccaccgtccgcccatcatgcagcactgccttgtggacctgggccagggaggccgtccccagaggggtgtcatcgaagctctggaacaaatcatggatctccttgcccagatcttctcggatgacctggcggatctcttgcatgctgctctgtggagcctggctgtgcagtaccttcagcgtgctggtgtactcctctggcaacaggtagtccagagcccccaggtgctggcccaccttgatgaaggtgccccggttggcacagcagagctcacagagacgcctggcagagcgaaggtgcaccttagatctcagctgcaagtactcctctgagccataagggacactcttcagggaagtgaggtagtcgtaactgatgacagccgtcgtagcaactgctctgcccaccctgacagcgccaaagtcattagggtccaagtacttgttactgtagaagtagatgccagaggcagcaagagccatgctggtccacgaagcaagcttgagagcctttctggccatgtcgccagatccccgagggaagcagagccgcggcgcccggcttccggccgcaacccggtagcggggaattagctgggaaccgtgcg

SEQ ID NO: 439075 - DNA, 1075 bp, Homo Sapiens
  misc_feature (477)..(477): n is a, c, g, or t
  misc_feature (698)..(698): n is a, c, g, or t
aaaagctagctgtattgaaacaaaatgccttacagagtgggagcaggcccaagcaaggctcaaaagcactggtcgcagaattttctggggtttaaataccctctagatgtttcccattggtcacttggtttacaccctatgaaatagtggcccatgaccagtctgattggttgtggaaggtgaccaagcagaggctgaagtgaagttacaaagttacgctctatgcagatgtctgactggttgcaggaggggaccaatccgaggcactttccatttttcatctgcaacacagaaagttggggggagttgcaaagggagtagcctctgatccttttgttacgtgggcatggaaatttagggttttgcttttgattgcgttcatgaagtcagcatgaatcagccttaggctccctgcccccagaccctattctcctgcctcactggcaaccactgatctttatcctgtctccatagttntgcctttttcagaatgtcatagttggggtcattcactacgtagccttttccgactggctgctttcactaagcaacatgcatcgtgtgtatcttcataccaccctctcacgtttcccccaggctggagatgttgagtttatctgaatttttctcggggcttcctgcgtcttctttcttggaactctctcgcctgcagcctttggtaattctttctctgaaangcaccccagcttacttatctacccttcttcctgggccatgccctgacaccataccttaggcatgtgatcctgggatctggttactggcaactttctggtgggataggcatccctcttgctggcctgtgagacagccccttcctcatttatgccccaaagagaaaccacgcaagaatttaagggcctacccgattttcatggcccgcaaaactggaacaactagcccccctgacttttttccgggtttaaactaaaaacccttattgggttgggttcttttgaaacctcctcctgggggttcccagggattccccagggacccaagattgggatgagcacgtccagtgttaaagtctggtttgaggcactggtgtgag

SEQ ID NO: 439076 - DNA, 1144 bp, Homo Sapiens
gcacttttaaaaccatatttattatgcagctttgcaaagcagtcttttcttccacagcccccagtcccagaacaaaaaaagtatgggggaaagtacctcagaaaacccagtcacaatatgctatatttgaaaatagccattttgtggagaccttagcagaaatttggccttgaagtcatctgggggcattttaaaattcttacctgtgttagattcactagtttagatgttgataccatactaccatagccatgcatgtaatggtggtaagctttaaggttgaatatagtatatttaccagaatttacctagatttggctgatctttgaggaaatgtttagatgacgccagttatgatttcaccctgtgctaaagaacatgtatatgtttttgccataggtgtgttttctttacattatttatacaaataattttctataatatctgggagccaactggggaatttggcagtccaattggcaggtcccctcagatacccacgggctgacggcattggtaccaagtgaccaggttcacagtgcagcttgtggctccagtccaactggcaggtggctcttcctccacgtcccagctgccattttcataaaacaatccgtggtgtcccgctcggagactgggttcctggctctcccactcgcattgctgtaggcataggtaagtgctgaggtgaaagtgccaaccaaagccgttagattgaacatttatgcctggagggaatcagtagaggaactggctgtggaccttcacctctgcatcccctttgctttctgctgtagcaccttgaagaagttcttcggctttgggagccgcaggggccggcggtccggggctccctaggccacgtctacaggggttcggggtaccgaatcggaagatccacagggcgctgtcaagggcgaagccgcggaagtggagcgctgcctggagcgcaggagcagagacctggaagccggggacaggcagcacaggcagtggggtgggggctcagcccagggtgggagggggtccccaggcccggcttccccgcagcccctgggatggggcctcggagggcaccctcagaggggtggtccaaacggagcctcagctgctctgcatcccccatcccgggaattccggaccg

SEQ ID NO: 439077 - DNA, 1652 bp, Homo Sapiens
  misc_feature (11)..(11): n is a, c, g, or t
  misc_feature (35)..(35): n is a, c, g, or t
  misc_feature (43)..(43): n is a, c, g, or t
  misc_feature (55)..(55): n is a, c, g, or t
  misc_feature (57)..(57): n is a, c, g, or t
  misc_feature (63)..(63): n is a, c, g, or t
  misc_feature (65)..(65): n is a, c, g, or t
  misc_feature (70)..(70): n is a, c, g, or t
  misc_feature (78)..(78): n is a, c, g, or t
  misc_feature (212)..(212): n is a, c, g, or t
  misc_feature (218)..(218): n is a, c, g, or t
  misc_feature (258)..(258): n is a, c, g, or t
  misc_feature (266)..(266): n is a, c, g, or t
  misc_feature (271)..(271): n is a, c, g, or t
  misc_feature (275)..(275): n is a, c, g, or t
  misc_feature (280)..(280): n is a, c, g, or t
  misc_feature (282)..(282): n is a, c, g, or t
  misc_feature (289)..(289): n is a, c, g, or t
  misc_feature (293)..(293): n is a, c, g, or t
  misc_feature (301)..(301): n is a, c, g, or t
  misc_feature (310)..(310): n is a, c, g, or t
  misc_feature (338)..(338): n is a, c, g, or t
  misc_feature (347)..(347): n is a, c, g, or t
  misc_feature (355)..(355): n is a, c, g, or t
  misc_feature (365)..(366): n is a, c, g, or t
  misc_feature (369)..(369): n is a, c, g, or t
  misc_feature (375)..(375): n is a, c, g, or t
  misc_feature (382)..(383): n is a, c, g, or t
  misc_feature (394)..(394): n is a, c, g, or t
  misc_feature (399)..(399): n is a, c, g, or t
  misc_feature (403)..(403): n is a, c, g, or t
  misc_feature (443)..(443): n is a, c, g, or t
  misc_feature (449)..(449): n is a, c, g, or t
  misc_feature (457)..(457): n is a, c, g, or t
ctttattgtgnataagatatatattaattaaaganaaactctncaactttatggngnagaagnanatatnttaatganctcattagacaactatctataaaatatattgagtatttacatacatgtattatgtagacggaagtgttaaataataggagacaccacactctatccacagtgctatcgctagtatagcttatagttagaaatcntcctcngactagcttgacaacatttcaattactttcaataacagcnggcatgtnatganttcngccanangtccggngatntgcacacnccctttctnatgctcagacaatgcggtggaggaggcnttgggcgtncgctgcantttatagacnnggnggcggngggccgnngaggaggtggnggacngggnggggccaccatcccactggcggtggcaggcaatctaatcngcctcngccggacngaaagcagtgtgctcttctgctcttctccaaaccacacagccctcattgttggcatgcttttaactctgtatctgggatgcatttatttaaatctctgcggccactggtattgtgacacaaggtgatggccaatatcaacaaggatccttctgaatcacatgctttggagctgtaggtgtggagttattggtggtggcttctgtcttatccctgtacttcctaatttatttttttcctgaaaatgaccttttggtcttcactcccccagtccatccaatagcggtgtcagccttctgattccctgccttatcatcctttcaggtatcatctgaaatacccgggagggacttctcttgtggatgagaggggtacaaaacgctttgcttgtggcatcagcacaatctccatggcagagacatctcactgggcaccttccgtgcaagtcacccctccctgcttccttgtccttttgatatcacctgttggaatgtgactcttggaatccataggccaaaaggcttgctgctctctcttcaagattcaaaacaaatcttcaaaatctgaggaacacagaggaaaggccaggtgagcacacagtgagaaggcagctgtctgccacctacgaggagagccctcaccagacaccagctctgctataccttggtcttgaacttccagtctctggaacaatctaggttagggccaacatctcatgccttcctcctttcctccacttctcctcgttccctcttccctggatataacctctacccaacgataagcaagttgtaatgggtctcttggctggtggaagaatagaaagaatctggttcttcttaatttcccattcaggttctcagtgttccaggaagcagtttgctcaagtttcttttctccatttagctctcctgaatgcccgacttcagtgcctgggcattgctgccaaggatcccgctggtgcattcagctgccattcaaggcaacagccctccacactgcctcgcacttggaagtttgtcttacagcataaaacaggtggaaggacattctgcctttagagttctgctggcatgtcttatcacttctgttgtccagtgccaagaatgacaaaaatcttttgtgtatgtttgggggtgggaaagaccagatataactgggaacagcagttaacttgttgttcagacaagattccca

SEQ ID NO: 439078 - DNA, 2040 bp, Homo Sapiens
  misc_feature (90)..(90): n is a, c, g, or t
ggaggattgggcgtgcaaggaggcaatgagtggtggggggacggtgggggggaaagcgtgttaggagagtttcggcgccgggtgagggtnttttcggaataggacttagtgttgccatggaaaatgggtcttgaaggccaaggggcccttttgttgggggaggattgaacggattggtacagggggggagatggtatgtggccgtggggataggtaggcgggggtatcgggaaaaataaggaggggatggttggggggttatggggaagaaagggtcgtggtttttactggtggtccagaaaaggtagggaattgggggggccccggccaaaagttttcttggagaacggaaagcagggacttgattttcaaatttggggtctttgacacaacaaatggggtgggccggcggaggagcattcgcgcaaaggtttgcgaagacgctggcgtgacggggcaggttttacagtgacagaaaaggtagaggaacacaagatgattattggggggaaggctaaaattaagatgtagaactgtctaggatatgttattccagaaaacacagatttaagatttttcaagtgattcttgccttccccctccccttttcttccccaatgagataaccatttctttcacaatgatgagccatccctttttatggaaaaatggctttctttctccattggatcaggacaaagacatcacttcttggccacactggccacagccttcttggctgcatcctccaggtcaatggctgaagtaatggggagtccgctgttgttgagtatcttctgggcctcttggacgttggttcgttcaagccggaccaccaggggcaccttgagttctagctcccggcaggctttggtgatcccattggcaatgatggcacagttgacgataccaccaaatatattggacaaggatggcttcaaccttaggatccagctgtgagcaatttgaatgcttgatatacttgagcttcctttacaccacctccaagatccaagaagttggctggcttcccaccattaaggaaaatgatatcacaagtagccatggcgagcccagcaccattcacaaagcaggcaatgttcccatctagtcctatgtattttagatcatatttggcagcttcattttcaatgggctcattctctgatttgtcgtccatagcaaatatgtctttttgtcggaattctgcgttgtcatcaaagtttatcttggcatcaaaacagacaacttgtccttctggagtttcaccaaagggattcacttccacctgagtagcatcaattttcaggaagagattatacagcttcgtaatttgatctgcagcctggcttttcaaaggcccaacgaagcctagattttcggccatccgctgagcttggctgtcctttattccttcaaaaatgtcaatttgctccttaaaaatgagctccgggtttgaagcagccacctcttcaatgtcgacgcccccctgggggctgcccaccagcacggggccattgcaggaccggtccatcagaattgccaggtaggtttctctggaaatatccaaggcttcagcaaccatcaccttgttaactttcacaccttcttttggagtttgttttgtcgctagattgtacccaatcatctgtttagccagctgtcccacaacattagggtcttttgttaaatgaacacctcctttcaaaccactattgaagacaccttttcctcttcctccagctaagatctgggcttttaaaacaatttcttttgcatttagtctcttagcagcctcgagagcttcatttgcagtgtctgctacaaagaatctttgaactctcactccgttgtcagacatcagtttcttgctctggtattcctgcaggttcagccatcttctggaggttaattgaactgcctgggacccggccgccaggaagcggggccgcagcgctagggctcgcagaagcttcccggcctgcgctgctacgggggacgccatcttaaacaggaaactcggcacggggcacgcccgct

SEQ ID NO: 439079 - DNA, 1875 bp, Homo Sapiens
  misc_feature (41)..(41): n is a, c, g, or t
  misc_feature (84)..(97): n is a, c, g, or t
  misc_feature (390)..(406): n is a, c, g, or t
  misc_feature (682)..(682): n is a, c, g, or t
  misc_feature (1722)..(1779): n is a, c, g, or t
  misc_feature (1798)..(1798): n is a, c, g, or t
  misc_feature (1847)..(1847): n is a, c, g, or t
  misc_feature (1870)..(1870): n is a, c, g, or t
cctattctcgttccaaatatagagtggattaaaatatgcanaacaggggggctccttggcccccatcgagaatcccaatgtctnnnnnnnnnnnnnngagtcaccaaggcgggtcctgacctcgcatgctggactaggttccccctctgggagaatggccaccaggagctgcgaaggaggtggtcacgctagggcaccccacccccggcacctcccgccccagcctccctggtccacgcccttcctgactgtgcgctgggtgggctgggcggccggtgagggcactaagcaatgtacagggcgagtctccgagcaacagcaaacaggacgattcatgcaacattcctggcccgggcgccgtcgtaaggggcaggccgagcccgcggcccnnnnnnnnnnnnnnnnnccctgccggcagggcacggccggggcgggagtgggggtggggcgtcagctgccgtccagctgcctgagcgcgcgctcgatgttcatgcggtggcccacgcgcgtgacgcccagctccacgaagtcgtccttggtaagcgcgggtaggtgcgcgccttctatctcatggtcctcgaagcggtcgcggtgctcgcctaggtggatgctctccagccagtcgcccacgtcgaacttgctccagagctgcagcggcttctgctggaagggtcggcgtggngccgggggcgccggggccggggccggacgcgtgcgagggcagctgcgactgcgagggggtagcgactgcgcgcgctcacgctgcgcaccacgaagcgcacctccttgggctcgtgcgggatggagaggctggacgacttgaggatggtggggggcgtgaggccgaagggccgcctcgtgccccccgcgcccgcccccagcccctccacccgctccagcgacgcgggcttcaccgggctcggggcgcgtctcgccacggggtagcggccactgggcctcaccgagtacgaggccccgccgcccgggcccccggggctgcgctgcgctgaaatggagctcagctcaccgaggctgctgaagagcctgcgtagggagaggggtcagcgccaggtgaggggcgcacagccaaggggggacgggcggaggggagcgggcagggtccaggaggaaacgggctggggctgcggctggcgggagtagcccggccagaggaagaaataaagggtgggatcctacggttaccctggcccttttctttggcccctgggaccagagccagcgactggctggaatatgaggaatgactggtggccccctccactccatccaggctccaagtgcagcccaaccaaagaaaagacagcctctcatggcaaagggcgggcttctccctcctgccagcctccgacaccggctctgggcatggcgggatccacagatacccgggacgctgagacttgggcagtacccttcaccgcccaccccccacacagctctgctctcatgagaagacccaggggatcctgggcaggttccagggacagctgagtcgcgataaaggctggcagcagcacgaggttgaacaggtccgtgacacaggagacagacactaggcagggctcgtacccgtatggagcagcagcacatgcagggcaggtgtgaggccgtgcacaccctcaacacaaaggcagcctcctgcacagacggcacacaacagcagcaacggtgcccacacgcgttacagacatgctagcgagtgannnnnnnnnnnnnnnnnnnnnnnnnnnnnnnnnnnnnnnnnnnnnnnnnnnnnnnnnnagaaccgatggcagctcanttcccagcctcacctgacaggaccctagagctctagcccctccattggntctgccgtggtgggaggcctacntgggg

SEQ ID NO: 439080 - DNA, 926 bp, Homo Sapiens
  misc_feature (296)..(312): n is a, c, g, or t
  misc_feature (426)..(443): n is a, c, g, or t
  misc_feature (449)..(622): n is a, c, g, or t
tctaaagataacaaatctaacttttattacattgctacttcaacttcagtccttacattgatttgttttttaaaaaataccagtttgaaacacattactgaaagtgagtgtacacaataaatagaaaatagggatgcatagtgctggagacattcaaccaacttatcttcatctgttgcctactgttgtagacaaaatttgacacacaattagcattactgaaagagcagccaaactacctcggagaaagtggcaaactactggaaaagtagcttaaagctctggaccactcaccnnnnnnnnnnnnnnnnngaagaaaatacactgtttatctgggagctagcctcattatggcaatgaatttatctactagtcataagaacaatttttaaaatatcaaaagtcccagggaaccttcactaacannnnnnnnnnnnnnnnnnggagannnnnnnnnnnnnnnnnnnnnnnnnnnnnnnnnnnnnnnnnnnnnnnnnnnnnnnnnnnnnnnnnnnnnnnnnnnnnnnnnnnnnnnnnnnnnnnnnnnnnnnnnnnnnnnnnnnnnnnnnnnnnnnnnnnnnnnnnnnnnnnnnnnnnnnnnnnnnnnnnnnnnnnnnnnnnngcctttttgaccagtctggtctataactcctgacctcaatttatttgcccacctcagtttccccattgatggcattacacgtgggagccattgtgcccacccccaaacttttattttaaatatatgtttcttcaattttcctaaatcattcggtgggtccttataccacttaattctcaaatagcgtctgcttttcactaccttaagtggtggatttggcaaaatcaacaaacataatttggggggtattttttatacttacctctcttcaacgctaagccgctttttctaaaagggttaaatt

SEQ ID NO: 439081 - DNA, 1392 bp, Homo Sapiens
  misc_feature (26)..(26): n is a, c, g, or t
  misc_feature (50)..(50): n is a, c, g, or t
  misc_feature (61)..(61): n is a, c, g, or t
  misc_feature (82)..(82): n is a, c, g, or t
  misc_feature (87)..(87): n is a, c, g, or t
  misc_feature (89)..(89): n is a, c, g, or t
  misc_feature (93)..(93): n is a, c, g, or t
  misc_feature (104)..(104): n is a, c, g, or t
  misc_feature (130)..(130): n is a, c, g, or t
  misc_feature (134)..(134): n is a, c, g, or t
  misc_feature (136)..(136): n is a, c, g, or t
  misc_feature (141)..(141): n is a, c, g, or t
  misc_feature (144)..(144): n is a, c, g, or t
  misc_feature (149)..(149): n is a, c, g, or t
  misc_feature (165)..(165): n is a, c, g, or t
  misc_feature (172)..(172): n is a, c, g, or t
  misc_feature (178)..(178): n is a, c, g, or t
  misc_feature (181)..(181): n is a, c, g, or t
  misc_feature (183)..(184): n is a, c, g, or t
  misc_feature (187)..(187): n is a, c, g, or t
  misc_feature (189)..(190): n is a, c, g, or t
  misc_feature (193)..(193): n is a, c, g, or t
  misc_feature (198)..(198): n is a, c, g, or t
  misc_feature (212)..(212): n is a, c, g, or t
  misc_feature (219)..(219): n is a, c, g, or t
  misc_feature (230)..(230): n is a, c, g, or t
  misc_feature (258)..(258): n is a, c, g, or t
  misc_feature (262)..(262): n is a, c, g, or t
  misc_feature (271)..(271): n is a, c, g, or t
  misc_feature (276)..(276): n is a, c, g, or t
  misc_feature (282)..(282): n is a, c, g, or t
  misc_feature (290)..(290): n is a, c, g, or t
  misc_feature (315)..(315): n is a, c, g, or t
  misc_feature (318)..(318): n is a, c, g, or t
  misc_feature (321)..(321): n is a, c, g, or t
  misc_feature (324)..(324): n is a, c, g, or t
  misc_feature (326)..(326): n is a, c, g, or t
  misc_feature (329)..(329): n is a, c, g, or t
  misc_feature (357)..(357): n is a, c, g, or t
  misc_feature (362)..(362): n is a, c, g, or t
  misc_feature (366)..(366): n is a, c, g, or t
  misc_feature (368)..(368): n is a, c, g, or t
  misc_feature (392)..(392): n is a, c, g, or t
  misc_feature (421)..(421): n is a, c, g, or t
  misc_feature (425)..(425): n is a, c, g, or t
  misc_feature (427)..(437): n is a, c, g, or t
ccccgtgcttccctggcccgccgacngccggccctccagccacggatccntggtgacctcnttgcctccctggctccccccntgccngncgcncccctttctgncatttcccgctccccgcccccctccntccncnttctngtnttccncgatttgcgccccgcnttccgtntctccnccncnnccncnnccnccccnctttctccgccgcngaccgcnctgctcttgtngggatgcggctcgtgtccggcgacggcntccnttgcccgcntttcntcgtcnggttgccnccctcccgcccctcggcctggctcngtnccntcncnccnccgccccgcctccctgccgcccctcccncggcncccncngtctttctttttcgccttcgcccnttccgcgccgccccgttttgtcttccgtntccncnnnnnnnnnnnggcatggcctgcgccgacgccagccccctccgcgacgtccttaccgcctgccttgcgtttgatatttagacaccttggtcacaacatcttgcattctctcgggatgctgatttctaactgctctttggcctttcctgcattggtcctcctcaggcaggggatccctgctcttctatattagtgagtattgctgttgtaacaaacagacccaaacataatgcaagtttatgtcatgcctcatttaacactgcagggctgttctagtttggggtcagacatggtgagcgtgagggcatccttctccatgcagtggttcagagattttggctgatggcaggcatgccaacttttaaattgggcctccaaagtcatgctggagagcaccgttaaccagaaggagttaaccagaaggagaaggagtgtggaagggttttatccatcaggcctgagaagagcacacgtctatcacttttcattgatcagaattaggttgcttggccacactcagctgcaagaatgcagtctagccgtgtgctcaggatgaactggaaatgggttgggtggacagctggccagtgtctgccctgccccactttagcccactggcatctctggcagcctgggctgatggcccacccgggctcagatgctggacccacccaagtgttcctgaaagtcctccgactggatgggagtggtttgagagtttgagaagtgttatttctatctcagatggattaagtagaaggatgtggagcagtgaaccaggcacggggcggcacaactgtcatcaaccattgtcacccgtcactaagcacatgccctccaggcctagaaagtctaccttgccactgctaggggacgaaatgagtgaggacgagatgctagggagctcaccagaatctcaagagatgtttctcagtcccatggctctgacatttctcaggaaatctta

SEQ ID NO: 439082 - DNA, 1740 bp, Homo Sapiens
  misc_feature (41)..(78): n is a, c, g, or t
  misc_feature (954)..(954): n is a, c, g, or t
  misc_feature (1637)..(1637): n is a, c, g, or t
  misc_feature (1681)..(1681): n is a, c, g, or t
  misc_feature (1736)..(1736): n is a, c, g, or t
cgagatgatatatggggcctggagttcacgcggggcggcgnnnnnnnnnnnnnnnnnnnnnnnnnnnnnnnnnnnnnnatcaggccaaatcggccgagctcgaattcgtcgagagcggagtgccattttgtggcagcgagacccacaaataaaggggagcgcaggggttgcggcgggactaggagcgcggcggggccggcggcagagctgtccggctgcgcggtggcccggggggcccgggcggcagggcaagcagcgcggcctcggcctatgcgaccggtggcgccggcgcggcttctgcctggagaggattcaagatgaccaacgaagaacctcttcccaagaaggttcgattgagtgaaacagacttcaaagttatggcaagagatgagttaattctaagatggaaacaatatgaagcatatgtacaagctttggagggcaagtacacagatcttaactctaatgatgtaactggcctaagagagtctgaagaaaaactaaagcaacaacagcaggagtctgcacgcagggaaaacatccttgtaatgcgactagcaaccaaggaacaagagatgcaagagtgtactactcaaatccagtacctcaagcaagtccagcagccgagcgttgcccaactgagatcaacaatggtagacccagcgatcaacttgtttttcctaaaaatgaaaggtgaactggaacagactaaagacaaactggaacaagcccaaaatgaactgagtgcctggaagtttacgcctgataggtaaacaaatcatactccccagtcaagacttccctgacagtcccactacgagaaagctgtggtgggacagccaagtactcgtttccacaccaagactcagactttttgagccaaaaaaaagccacattcttacactgtccagcttgtaatggttaatgtaaaacttaccagatgaaccttgtgtntcagcttttttcttttccccttcccctggcttcagaggcctgatggcgtcggactattccgaagaagtggccacctccgaaaaattccccttctagaacatgtagacacttgagaaatgtttctgtttgaagaaaatagagggagaaacagaactcttaagtctctggcacactgtgtcttcagacagtttgaaggaatgaaaacctagagattttaaatcatgaattgaacatgtaaaattccagtaaaatgtaaaaacggaatatgcatcgctcttaaccttgagcatagtcacttagagacactgtgtatcagttttgccaataaaactgtggacttcatgattgttgttgaactttttgcctttaaagggtttatttgctgagaaccaactttcaatagtcataagagaatcaaataatagatgtccgtacaagtagcgcatatatttaaccatttagtttggggctctatataacttgcttgagccttaatcaatgtggttttattcaatggtttgttctttgaatggttgcaaaaactgtagataatcttactgagaactgtacaaacatgaaggtgtggtatcaaacttcaggttgaaactgtttgaagcattataaacattcatttcacaactagattgtataaggatattagctgtgatgaaactcactgcatnattttttttagtgaattttatgaaatccccgtcccattcaacangcacatgctttaaaagagctttgtcgttggtgttaatgggggaatgtgttcctanattg

SEQ ID NO: 439083 - DNA, 1469 bp, Homo Sapiens
  misc_feature (388)..(428): n is a, c, g, or t
ttttttttatttcctgaatctttttaatggttgcattgtgttctactgtatggatgcaccattcccaatcagttccctattaacggatatttgggttatccctaacttttgctatgacaaatagcactgcaataaccttgtatacctattgtttccatgtgtggagctgcaccttcagaataaggttagggttagaagtataactgcaaggtataagaataaacacaagtaattttgtactccgtggaacttgaaccatttttccactcccaccaggaaaggtaatttcaacgtgtatttccattgtaagtgaggtggagcgactttctatgtttaaagaccattacggtattttttctgagaatcatctgttcatgtccttccccannnnnnnnnnnnnnnnnnnnnnnnnnnnnnnnnnnnnnnnnagagctcttgtgatacgagttgcaaagattttctccagaccgatctgattcactggaaatatactacgaccatctggaatgtactttaatcttatcctaataaatcaccttactacaagacactcctttggggatgaacaggtttgataaagccggctaaggacagaccaatcaaaagaattacgtgctcttctagtaagtgtttagagactgtttcacgttctccaggtaacaccgccattactcggcggtccagatggcagtcttgcttcagggagtctactccacttgcaggacctctttgattgagttcactaaacctcacagggccgccttcccccgtgttccagttagcaaggggccctcaacgccgcggacacagcgcaacctccgacgccagagaacaatagctcctcgatgcgtctccagagatgtcaaggaggaacgaacccagcggccaggagactgcgcctcacgactgatgagagggaaggcatcggtttctaagttctcaaaacttacaggtgagcttctgctaagagtaaacgcccgcggctcgccgcccacggcctctctcttgaggtggcacctggtcctccgacacgcggaagcatcacggatgagcgtcacgaacacagagcggccaatcacgcgccgccttcgcccagatccctccgcacgaggcagccccgcagccgcaggtggccccggcgagtacttccacctgtcccttcccgtgatgccctggggctgacctccgacctcgctggcccgcccctcccctcggccgcttcccttactgagcttgctgagctccggggcccgcggagctcgcgccaggctcctgggaaaggacggggagtgttaccggggagcagctgctccattgtgcctcgaggccccgatcgggctaggccgacggcctccctcccttcacctttcctctcctggcggggttcggcggcgggcgagtgactgcggccacgcctgaaaggcgactctcctgtgagtgggccagaaggcgaacatggcggagcgggg

SEQ ID NO: 439084 - DNA, 1848 bp, Homo Sapiens
ttttttatttcaaggcacatttaatttaatatcaagagtgcaatacaaaaggcccaaatacaatgaaggaacacattcccccattaacaccaacgacaaagctcttttaaacatgtgcctgttgaatggaacggggatttcataaaattcactaaaaaaaataatgcagtgagtctcatcacagctaatatccttatacaatctagttgtgaaatgaatgtttataatgcttcaaacagtttcaacctgaagtttgataccacaccttcatgtttgtacagtcctcagtaagattatctacagtttttgcaaccattcaaagaacaaaccattgaataaaaccacattgattaaggctcaagcaagtaatatagagccccaaactaaatggttaaatatatgcgctacttgtacggacatctattatttgattctctcatgactattgaaagttggttctcagcaaataaaccctttaaaggcaaaattcacctcatttgagttttgacccagaagttcaacaacaatcatgaagtccacagtcttattggcaaaactgatacacagtgtctctaagtcactatgctcaaggttaagagcgatgcatattccgtttttacattttactggaattttacatgttcaattcatgatttaaaatctctaggttttcattccttcaaactgtctgaagacacagtgtgccacagacttaagacttctgtttctccctctattttcttcaaacagaaacatttctcaagtgtctacatgttctagaaggggaatttttcggaggtggccacttcttcggaatagtccgacgccatcaggcctctgaagcaaggggaaggggaaaagaaaaaagctgaaacacaaggttcatctggtaagttttacattaaccattacaagctggacagtgtaagaatgtggcttttttttggctcaaaaagtctgagtcttggtgtggaaacgagtacttggctgtcccaccacagctttctcgtagtgggactgtcagggaagtcttgactggggagtatgatttgtttacctatcaggcgtaaacttccaggcactcagttcattttgggcttgttccagtttgtctttagtctgttccagttcacctttcatttttaggaaaaacaagttgatcgctgggtctaccattgttgatctcagttgggcaacgctcggctgctggacttgcttgaggtactggatttgagtagtacactcttgcatctcttgttccttggttgctagtcgcattacaaggatgttttccctgcgtgcagactcctgctgttgttgctttagtttttcttcagactctcttaggccagttacatcattagagttaagatctgtgtacttgccctccaaagcttgtacatatgcttcatattgtttccatcttagaattaactcatctcttgccataactttgaagtctgtttcactcaatcgaaccttcttgggaagaggttcttcgttggtcatcttgaatcaggagagtcgcctttcaggcgtggccgcagtcactcgcccgccgccgaaccccgccaggagaggaaaggtgaagggagggaggccgtcggcctagcccgatcggggcctcgaggcacaatggagcagctgctccccggtaacactccccgtcctttcccaggagcctggcgcgagctccgcgggccccggagctcagcaagctcagtaagggaagcggccgaggggaggggcgggccagcgaggtcggaggtcagccccagggcatcacgggaagggaaggtggaagtactcgccggggccacctgcggctgcggggctgcctcgtgcccc

SEQ ID NO: 439085 - DNA, 519 bp, Homo Sapiens
  misc_feature (25)..(25): n is a, c, g, or t
ccagttcgacggagactctccttgnccccaaaggactctcccccatatcatccttcatttcatttgtaaaactctggaaattttgctctactcccctttttgctaggtatacatttacaatgcctttcacactaggctataaacattacaaactaccagtaggtgccactgtccaacaaataatgctactgcatctcctggagagttagacgtttccagtttggaggacagacatgtgatcccccaaaaacaaccaagtaagctagatatggaacagataaaggctaacatcttgatctcagttgggcaacgctaggctgctggacttgcttgaggtactggatttgagtagtacactcttgcatctcttgttccttggttgctagtcgcattacaaggatgttttccctgcgtgcagactcctgctgttgttgctttagtttttcttcagactctcttaggccagttacatcattagagttaagatctgtgtactgcttagagagtctccgtcgaact

SEQ ID NO: 439086 - DNA, 586 bp, Homo Sapiens
ttcagctgctgctgcagaactagaatggtactctgcataccctctacttcttcatcaagctggatgatgaagtcattcagttcatcctgactgcttttaagctcctcactgtatttcttctgtaaagccaactctgcttcaagttgtgccatacgtccctgggacagctgccttccaagctcttgattctcctggataagcattcgacacttcgccattaactttttccctgtttggctatcaggcgtaaacttccaggcactcagttcattttgggcttgttccagtttgtctttagtctgttccagttcacctttcatttttaggaaaaacaagttgatcgctgggtctaccattgttgatctcagttgggccacgctaggctgctggacttgcttgaggtactggatttgagtagtacactcttgcatctcttgttccttggttgctagtcgcattacaaggatgttttccctgcgtgcagactcctgctgttgttgctttagtttttcttcagactctcttaggccagttacatcattagagttaagatctgtgtactgcctaagagagtctccgtcgaact

SEQ ID NO: 439087 - DNA, 536 bp, Homo Sapiens
  misc_feature (28)..(28): n is a, c, g, or t
  misc_feature (35)..(35): n is a, c, g, or t
gcgccactgtagggacaccaatatgganccccccnggaacaatgaaaggtgggtcccccgaccaaaaaaaaccccttaaagggcaaaaattcaccctcatttgagttttggaccccagaagttccaacaacaatccatgaaagtcccacagtccttattggcaaaactggatacacagtgtctcctaagtcactatgcctcaaggttaagagcgatgcatattccgtttttacattttactggaattttacatgttcaattcatgatttaaaatctctaggttttcattccttcaaactgtctgaagacacagtgtgccacagacttaagacttctgtttctccctctattttcttcaaacagaaacatttctcaagtgtctacatgttctagaaggggaatttttcggaggtggccacttcttcggaatagtccgacgccatcaggcctctgaagcaaggggaaggggaaaagaaaaaagctgaaacacaaggttcatctggtaagttttacattaaccattacaagtctgcgag

SEQ ID NO: 439088 - DNA, 1580 bp, Homo Sapiens
  misc_feature (529)..(529): n is a, c, g, or t
ccgccccgggcacaagaggaacaaacccgggaagaatataactcccttaaacacaccgaaaccgggcccaaaaagggtttctcaagaaagtgaggcttttttacccttaaaatgttcccaaatgggcaccaggcccctcgggaaaactccccaaaatggacccctttggtccccaaactaagggcagaaccctccctgcctttaagggtaacaaaatgccggttgtagatttcccccaaaaaccttgggtggatgtttcaagggtaggccacttttcaaacaccaaaaaaaatttccttttaaaattcgcaaccagcatgtgttttcttaagaaaaggagctctaacctcaagtgtgcggaccaccttgaaggcataggatctggtcgcctattctacaattctaagcctcaaaccccatatccaccatcggatcagcttcattctaccaccaagtatttgcaaaagtctaatccaatctttcttctttccatcatatccactagacgtcctggagtggctactaacanaatggcatccacgttccaagtctcgaatctgctgaccaatatcggcaccaccataaaccacgcaaggacgaactctagatcggtatgaaaattttctggcttcctcgtagatctgtactgccaactctctcgttggtgctaataccaaggagattgggtattgtttgcggcgcccataccttccattttccttcatggccctcaaagcctcgcctggaccatctgaataaatctgactcaagatgggcaacagaaatgctgcagtttttccagaccctgtttgggcacaagccatcaagtctcttttctctttgataataggaatagcatgcttttgcactggagttgggcgagtataacgagtaagctcaatgtttcccatgataatttctcccatctcaacatcactgaaactttcaatatgtggaggacagttgttgcctgttgcctcaactggaatgtcatcgtatttctcaaaattaatcccagtgttgcctccagaaaagagttcctgttccaagcgttcacttggtgggagtggttttgaccaatcatcttcatctgatttgtcacaccagcgactgtttccaccacgttcaaatttgccaaagccacttctgtcaccacggctgccaatgccatcgtaatcactccgtccacgatcatcaaaccttccccttgatccacttccacgatcactgaagaagctagacttccctcttgaatcactacgagatccaaaactgctatacgcatccttatctttgctagaactccaccctgaactgtctttatcgtagaaacctttagtagcttctcggttccttaaatgaggaggaatatagcgccctttgctggctgtacttcctccactctgattatctgaagagttcaggtctaggccagcaaactgctggtccagcccgagcgcattttccactgccacatgactcatccctgaagagtaccgagaactcggagtcttccgctgctaagcgagtgtttgttccaccgcgaaggccctctcacgggagaactgcggccctccgct

SEQ ID NO: 439089 - DNA, 2840 bp, Homo Sapiens
  misc_feature (401)..(401): n is a, c, g, or t
  misc_feature (416)..(416): n is a, c, g, or t
  misc_feature (2407)..(2438): n is a, c, g, or t
gcgctgagctgcttatttattgaaaataaacgacggaaaagtctggccttgcctctgtgcaagcttggaggcctgggtcgccgctgtggacaagcgtcttagtgtcatgcagaccagaaggcagctgcctgtcccagggccggggcccacctcactgcctctgatggggactcccagcccccatggctccgctgtgccctgggcaggggacgggctgggggcaggggagggctggagcccaggaggcagcacagcagccagaaagccgcaggcctgagcctgcacctttggttccgggaggggcttgggcccctcacccaggtgtgatccctgagaacaggaggcccagccaccctgggaggaggcgctggagggcggggcggtggtggcccccgtcagtnccctcaaccccagtntcagggacggtggaaaagccatccaagaccccagagcgaggcctcatggttcaggagtggggaaaggggtctttcccagggtgggggtggggatatcctgacccctcaggtgtccttgatgtccctgacgtccgtgagtggcgcctcatccatgatgctgcgcacttgctccagggtctcagcctggcggattcgctctaggcgcacctgcagggcctgggacaagtcgcacgaaatccctctgcacctgctcactgggtctccagctctgcctgcagccgcagcaccttggccctctgttctgagaggaggtctgggagctgggccttgctctgttcctgctgcacccgctccatctctgtcctcaggctgcacagggaggcctccagcacctctgtctcctcccgctgcaccctcagctgcccctccaggctggccctggccactgtctcctcctccagagccttcccgcagcgtcacgatctcgatccgcaggcgctcggccccgtgctcctgggcctgcagccgggccctcgcctcttgccgcgtgcagcacagcagctgctgcagctctggcacagagctgggcagtgattcctcctcgccctgctcctgctgcgagccctggggggctgaggatggcagctgctcggcccggagcccttggttttcctcattcaaccgctttacctcatggtgcaggcacttgtgggtggtgaccagctccgccatctgcagctgcacccgctcctgggcctggctcacggtcccttgcagggtccgcagcagctgctctgagttctggacctgggccaggagcacctgcatctgcttggcacagtcctcattgctccgtctcaggccctcttggagctcgtcccgctcgcgactgacgctctccaggtccttctgcagctgtcggccctctgtctgcagctgctcccactgagtgtctgggacgagctggtagccaggagggggcaggtagatgccctcgggaaccagggtgcccgtagacaccagcgaggccgtctcttcctgttcagggctcaggccctggcggctttggggcagggaggagctgctgccgaccccaccgccaagggagaaggaggagatggaggcgctgtcatcgcagttgtgagcgaaggcctcagcggctggacccccatctccgctcagctcctccagaggctccagcgggggcgatggatcccgggacaggggcagcaactccgtggagccgtgcagggaaggggcatgccggggacgtctctggatctcctgaatcagctcctcggccctcagcagcttcgccttcagctcctcgatctccttttccatgggcagtacgatctcccgcagcttctccgagtcctcgtgggccttttccatctgcttctccagggagtccagggggtaggcccgggacagcagctgcttcaggcggcccagctcccgctccttctcctcacagtcctgctgctgctgctgtcgctcctgcttcagggcggtgatctgggcttcatagctgctgatggagtctttcaggatggcctgcagcgaggccacctcctcttggcactgccgctgcaccgcagccacagcctcggccttcgtgctctcgctcacctctgccacagccttcatggtttccatttctgccagggcgcctgccagctcagcccgaagccggctgagctcacctgactcggcctcaccatttgccccttcctgggaccgggagtcctccagtgcagcccccggccgccgccgccgctcatcgtcgtccgcggccaccggcgcagctgccgccattgcctcagcgcaaacggcggattcccgcactccctggtgacggagcgcaccggttccgggtcctctcggctgtttccggatccgctcggctgtttccggatcggccccgggctggaggccccggacggaggatggggggattgccgagcctcggccgaagattcccgagtcgnnnnnnnnnnnnnnnnnnnnnnnnnnnnnnnntcttcttggctgggtcgcgcggttcgggaggacgcctgcctttcaagcccggaagaggatccttaagaggtcttgcccggcgtctctccgtgaccttggaagccctgctccaattatgcctcctccgggacaccggcctgcggagagctccccctcgctccctcgctgcccctgcccggagccagcctttgatcggctccggccgcccttccgcccgagcctggcttgcgttaccgcgaattgtggcggggccctccctgcacctccgccctcttggagcgtccctcggggcagggccgggtcggcttcatttttctgagcgcctcggagtccccgcgtagttagtcggagtctgaaacttgcacgtccccacccccatttgatcccgggaattccggacgc

SEQ ID NO: 439090 - DNA, 1834 bp, Homo Sapiens
  misc_feature (1644)..(1644): n is a, c, g, or t
  misc_feature (1669)..(1669): n is a, c, g, or t
  misc_feature (1799)..(1799): n is a, c, g, or t
  misc_feature (1808)..(1808): n is a, c, g, or t
aattcaagaggcaatctttgcaccaatgttaggcttgtttatacagtccctgtctctaaagcaaatagcaaactgtgcatcctctcctactgactttggccagcagggaaacaagcttggtctcttctctgccagggtaccacagggacacacgccaaggtaacctgcgtgtgatgccagtacttctgaaactaagaaaagaagaatactttgggttggagaatttaaaggaatggtggacaaaggttcagggctgaagtttcaagcagcagaatttcccgacttaaatttgaggtgaccaagagtattcccgccagcagagtgcttctttcttctcttttctgtttcctacaggtacagtccctggaacccaccttgccagccttttccttctccatcaaggcagaggcatttggtgggtggggagggtcctgaggtgctctggccacaggtgccatctgtgtctcctacttgtgaccaaagtgaaccacggaggtgtggtccaggggaatctctatcttctgcccatgggcctcctcacttcagcagggagatgtcatcagcaaagtcatcatgctgctggcgcaggcagcggaggcagcgccactgacacaccatgaggcagagtggcagcatgaagagggcgcagatggcagccatgacataggctatggtcatgagggttgactcatctgtctgtggaatgttgtagccacagtcttccatgtccaaggtgacaaaagggccttccaccgctgccgtcctgaactcatcgtgcacatggcaagcgctgacagcaaagccaattcgttttcgggcccgatcaaagacaacgtagaagccctccatgataacagctcccataacagtgcccgtggatgactgtgagatggcaaacttgtaacagtcgtcttgggacgtggccacatcttccactggccgcaggtattgctgcggaaggatggtgatgcggaaggactggttggtaacctcacccattaggtagagtgagatgactgggaaaatgttccaaggggtggtgcctgcttgccagcacaccagctgctctcctagccagaaaccatcagggaacttctccgtggaggaggctgccttgatggatttgactgcagcttcaaacactttcttgggcaaacgaaggttggtggtgccactgtccacaatgctcttgtcatagttgtactccttgcagtccattttcagatcctgtccattgatctccacccgcacaatgatcacctcataataccactcccgccggatgggtgtataccagagactgcctgtgtacagcgagtggtcgatacctccaatgatcatgctccctccgacagaggccagcacttcagactggttgagggggaagccagcaccacaaagctgcagggagaagaggttgggaacgtgggtctgctttaccagagagtcaaagaaaggctccagggagtcgtcaggcctggcaatctcagcataggccagccccaggatgccttcccagttggagccgttgatgaagaacttgtctgattcagtgatggcagcaatgttggcacgcacagtgacgttggggccatgggggatgcttaccaggtcggtgcccagctccccttccacttgccctgngtgtagggcacatacacacccttcncgagggtcccggtatgtgctggaccacccagacagagtgtaaaagtgggcttgcagatagatgaagggacccattggtgaggcttgctctcctatctattgctcatattcctaggatcttgatcccgggnaatttcggnaccgtaccagcctgcttttttgtaca

SEQ ID NO: 439091 - DNA, 1661 bp, Homo Sapiens
  misc_feature (1254)..(1255): n is a, c, g, or t
  misc_feature (1577)..(1577): n is a, c, g, or t
  misc_feature (1631)..(1631): n is a, c, g, or t
agaatgatttaacttccttaaactttctgcttaaacaagttttcagtagtactctacataaatgagcacgcgtaatttctaattccatcattgttaaattttttgctgcagttaatgacttctacaggaagttatgcttatacaatagccaaaacatatgcctacgaggtagaagcaccaacacagaaatcaacaatatcctgggctaattaagtgtatttcacattattatactgaacccactcttcagttccaccttagccagattatctgttcctataattacccatcatggaaaggaccccctgtaggtaggaatttcaggcacatctggcagccaactgcacaggacccttccatctgcacatttgctctcatgaaagccctgtgcctgcacttaattgggggtataaccaggtatctcagagacaatttggttggtgaaaaccatattatttttatccaaattgatgtgatggtctgatgactgcaaccactgagaacaccgtattgaaaaaattaatttatctctttgtacctgaaaacatggactgactaacctttccatttttcaaccaattattttgacatcttttaaatgcagtcagaagataaatgctgctccacttccttgtttttcatttttcttggcctcggtccagatgtgggtataaatgttactttgtataaaatggagctggttgctagtgcttaattttcatgagggtaaggacacaaatgtcttgcattagttctgtgagttatggtaaaacccttttcagtcttttttaggagttagtgatgtgtttgatgctgtgaaggttaaggtaacagcaacttctgttacaggttacctctcaaatctcagtagcttcttccagtggaagctcatctctcattcacataaagtcagtcaccagtggggaccctgtaaaattttggagtaactgatcacaatgaccagtcctggcaccaagaagttcaaagtaacaaaagagacatcccacgagatctctccaggaatggtgggccaaatcagtgtgcaaatcgaaatttcctgttcggcgccggggagccgttgcgggacgactcggaagaagacgcagagaggcagagcggcgaccgccgaatagccccagatgagcgccagcagcactgcccgcgcccgccgcccaggaccccgcacgccgcgctgcaggtgcacgatgcacaccatgcgctccaggctgaccgcggccagcgtgaggatggtgnngctgccgctcagggtcatcacgtagaagagcaggtggcaggcaacggggcccagcagccaggcctcagtccagcgcacggccagcaccagagggatagcgctgatgaagagcaggtccgcgcagaagaggttgagtaccaggcaggcagtcgcgccgcggcgtcgtcggcacgccaccagcaccagggcgcacacgttgcccagcagcgacactgcaaagatgagcaccagcacggttgtctccaccgcggccagcaccagccggtggtcgcccttgacgtcggagaagaagggaaagcgggtgcggttggcttgctccagntgcgcaagggcgcgtcgcccgctgcccgcgcgcattcaggggacattcccggcnctggcggcccgcagcggtctgagagagtgc

SEQ ID NO: 439092 - DNA, 1692 bp, Homo Sapiens
  misc_feature (59)..(59): n is a, c, g, or t
  misc_feature (96)..(96): n is a, c, g, or t
  misc_feature (1439)..(1439): n is a, c, g, or t
  misc_feature (1453)..(1453): n is a, c, g, or t
acacaaagaagcaaattatgctgtgcatggcgtaaataattgactgcattgagttttgnagtttaagggcactgttgacttaagcaaaataagctngcagtccagctgcagcttgagttttcttgctttaccctatccaatactgtctgtcttgcctaacagtggcccttttcagatctctccaggtacaaaaccttgactaaatcttcaagctctgttctgcatacacgacttgaacacatctggctgatctgagcttctccttcggtgaagatcttccactggctcagggttgttctggtcaccagcttgaagtgaggaagctcctcaaacatcctcttggagatcttctcaatatggaagtgctggagaatgccctttcgaatagtccaaacgtggacctctacctgaggtggtctctcagtctccagtgctatttttctggttgtctccccatcctccatgaatacagactcatacacaggcatcgtttcttccccgcagaagtagcctttattgtcaaagctttggcctggaagttcttcttttgcttttttacctggacacaccttgcagcattttccgtctattttttgaggatacttgcaggggtatcgattggggcagtggattttcttacactcttgcttggtgacattacaagtacatagcacacactccacaatgccaaatgcccggaggtttgggtgccaggactcgccatgagaataggtctttccattggaaacacacacttgtccatgcttgtgtttgttattgatgacaatttgcacaatggttcctgatgcttgctgggaatccataagagctccccggtgacttctggccccaggaaagcgggacagacctcccgcctgtcggcttggtggaggatcatagtgagagcggtggtaagaatgtcttgcttctctgttggcaggttgccggaagatatcaccatcagaatgttcccatgacagttctccatctcctctgcatacccggcagcaggaatctggaacagagactgggaaggcacaggttaatttggggcaagtcttgagaccacaatacacgtttccctccgaacagctgcactgggtgcattgattgggttgccgattctgaaagagcccttcagctacgaacagctctccatgttggtaagttgtcccattgtactcgcaagacttgctggtcaccttattgttcactgggggtaaggagtcttctgggcagcgagggcagcacagatgaggaatatgcacaggagaaaggcaatgaacatttggacatctgactcggctgcaaagcacattcccattctctgagcagatgcagttcacgcagtaaaccaacccataaggttccaggtaaggatgccatctctcacccactctgtacttcttgtcttgaaacatgcaatatgtctctgaatnttttacttgctctnttttgcctccttctagcaaaagaaagaacaacaacgaaaagatgtatttcatgcctcccattttccacttttttctcatttggaccactgcaaaaggtgacagaaccttcaagctgtgcaaaggctggaaaaggaggtgagggaagcgggcgccgggcactgctcactaacctgggcactggccttctccgtctgccacgcgtgcacgcgctccgagctccccggggcgctctcgatcc

SEQ ID NO: 439093 - DNA, 701 bp, Homo Sapiens
  misc_feature (539)..(539): n is a, c, g, or t
  misc_feature (544)..(544): n is a, c, g, or t
  misc_feature (556)..(557): n is a, c, g, or t
  misc_feature (569)..(569): n is a, c, g, or t
  misc_feature (580)..(580): n is a, c, g, or t
  misc_feature (651)..(652): n is a, c, g, or t
  misc_feature (657)..(658): n is a, c, g, or t
  misc_feature (686)..(686): n is a, c, g, or t
  misc_feature (691)..(691): n is a, c, g, or t
ggaattctccggatgtgctcgaggggtgccggccattgcctgagcgagcgagctagccagcaggcatcgagggggcgcggctgccgtccggacgagacaggcgaacccgacgcagaagagtccaccaccggacagccagcacatccacgatggagcgtcttgtcgcccgtgggaccttcccagtactagtgcgcaccagcgcctgccgcagcctcttcgggccggtggaccacgaggagctgagccgcgagctgcaggcccgcctggccgagctgaacgccgaggaccagaaccgctgggattacgacttccagcaggacatgccgctgcggggccctggacgcctgcagtggaccgaagtggacagcgactcggtgcccgcgttctaccgcgagacggtgcaggtggggcgctgccgcctgctgctggcgccgcggcccgtcgcggtcgcggtggctgtcagcccgcccctcgagccggccgctgagtccctcgacggcctcgaggaggcgccggagcagctgcctagtgtcccggtnccggncccggcgtccannccgcccccagtnccggtcctggntccagccccggccccggctccggctccggtcgcggctccggtcgcggctccggtcgcggtcgcggtcctgnncccgnncccggccccggctccggctccggctccngcccngctccagtcg

SEQ ID NO: 439094 - DNA, 1292 bp, Homo Sapiens
  misc_feature (581)..(618): n is a, c, g, or t
  misc_feature (669)..(670): n is a, c, g, or t
  misc_feature (708)..(708): n is a, c, g, or t
  misc_feature (728)..(728): n is a, c, g, or t
  misc_feature (1229)..(1229): n is a, c, g, or t
ttttttaaaacttcacagttactttaatctgcacgggttccggggaactcctctgcccctccccgctccccttcaccagcctcccaccgacctggcgtccccaactcagcccaaggagctgtcagggattggaggcggctgggtcctccggcagaacactaagacgggcccccggggcggcccggctctgcccggggccgaggcagcgacagcagatgcccgaccccgaggagcccactcccagtgcgggctgagggtcagcagccccgggaggtggccccgagccccggcggtcgcagggcggggcctccgccagtcccgggagtcctctgcggcgcagggctgggctccagggcagcgggaagaggcaggccggagaggcgggcctgggcaggcagcagctcccgccgcggcgcggggagcaaggtccggaggggccggcgacgctgccaagcgcccgcggaggcactacgggcggtacatggcaaaggccaggagactgaggagcagggtgaagccggccaggcccagagtggcggtcaggggaaagaagggccggtactggatctggcagtaccagnnnnnnnnnnnnnnnnnnnnnnnnnnnnnnnnnnnnnngctgccgatttccagcccggaggggccgggctcggcaccccggcgggcagnngggggatttgggggaccgactctcgtgggacacgtggncagtggagaacgcagttggngagggaggtgaaggctgcccagggtctgggtgtcgtcgcctagcagctgcccttggtagatgagtcgcacctgctgttcccggccgggaaactgggtccttttcaaggagccaatggtgtcgtggggccaggccctggccacctgctctgaatcattgaggaatttcagccgtagcacgaggggctcctgcgggggagtccggggctggcggtgttgctgtgaacccggtgctgggctctggctgtgcagcttgacctctgtgtctcaggctgggggtctctgcccctggggccttccctctcatgctgtcggtagctgccatggtgcgctgggctgggatggcgttggggtcctgacggctggggcagtgggtccccgccctcagcggtgtgcgttgagacccaggcaagggccagcaccagaaggcaggcaagcaccgagaaaaggacggtcacctcatcacccaccccttcaatcagggtcatggcgcctgccttgcnccgccgcgctaccgagcgcccggctcccccagctccatcgcgatcccgggaattccggaccgg

SEQ ID NO: 439095 - DNA, 811 bp, Homo Sapiens
  misc_feature (37)..(37): n is a, c, g, or t
  misc_feature (238)..(238): n is a, c, g, or t
  misc_feature (243)..(243): n is a, c, g, or t
  misc_feature (283)..(283): n is a, c, g, or t
ccgatttccagcccggagggccgggttcggacccggnggggccagggattttggggaccgatcttcgtgacacgtggcagtgagaacgcagttggagggaggtgaaggctgcccagggtctgggtgtcgtcgcctagcagctgcccttggtagatgagtcgcacctgctgttcccggccgggaaactgggtccttttcaaggagccaatggtgtcgtggggccaggcccctggccacntgctntgaatcattgaggaatttcagccgtagcacgaggggctcntgcggggagtccggggctggcggtgttgctgtgaacccccgtgctgggctctggctgtgcagcttaacctctgtgtctcaggctgggggtctcttcccctggggcctcccctctcatgctgtcggtagctgccatgctgcgctgggctgggatggcgttggggtccctgacggctggggcagtgggtccccgccctcagcggtgtgcgttgagacccaggcaagggccagcaccagaaggcaggcaagcaccgagaaaaggacggtcacctcatcacccaccccttcaatcagggtcatggcgcctgccttgcccgccgcgctaccgagctggagaggcacaaagagcccgtgaggcccgggccccctggccaggagccctggaacctccacagggtcctgccctcacccacaccgcgacgctcccaccgtcctcagcctccgtcccctcacccaccccagggtaccggcttctctgcagacgcgtgggtcgactgatatcccaaaaattccgggccagtacagcctg

SEQ ID NO: 439096 - DNA, 1105 bp, Homo Sapiens
  misc_feature (45)..(54): n is a, c, g, or t
  misc_feature (238)..(238): n is a, c, g, or t
  misc_feature (341)..(381): n is a, c, g, or t
gcctggcctggggagggggccgccggagaccgggtacgttgaacnnnnnnnnnntcttccgccagttccgcgaggatgccttttcggcccaaggggctgggctccaggccaaccggaaagagccaggcccggaaaggcgggcctgggccaggcagcagcttcccggccgcggcgcggggagccaaggtccgggaggggccggggaacgcttcccaagcgcccgcggaggcactacggncggtacatggcaaaggccaggagactgaggagcagggtgaagccggccaggcccagagtggcggtcaggggaaagaagggccggtactggatctggcagtacnnnnnnnnnnnnnnnnnnnnnnnnnnnnnnnnnnnnnnnnngctgccgatttccagcccggaggggccgggctcggaccccggcgggcaggggggatttgggggaccgactctcgtggacacgtggcagtggagaacgcagttgggagggaggtgaaggctgcccagggtctgggtgtcgtcgcctagcagctgcccttggtagatgagtcgcacctgctgttcccggccgggaaactgggtccttttcaaggagccaatggtgtcgtggggccaggccctggccacctgctctgaatcattgaggaatttcagccgtagcacgaggggctcctgcggggagtccggggctggcggtgttgctgtgaaccccgtgctgggctctggctgtgcagcttgacctctgtgtctcaggctgggggtctctgcccctggggcctcccctctcatgctgtcggtagctgccatggctgcgctgggctgggatggcgttggggtccctgacggctggggcagtgggtccccgccctcagcggtgtgcgttgagacccaggcaagggccagcaccagaaggcaggcaagcaccgagaaaaggacggtcacctcatcacccaccccttcaatcagggtcatggcgcctgccttgcccgccgcgctaccgagcgcccggctcccccagctccatcgcggcccctcgggcacttccgggcgggaggcgcggaggtcgcaggcacctgaagcaccccatcccgggaattccggaccg

SEQ ID NO: 439097 - DNA, 956 bp, Homo Sapiens
  misc_feature (4)..(4): n is a, c, g, or t
  misc_feature (28)..(28): n is a, c, g, or t
  misc_feature (78)..(78): n is a, c, g, or t
  misc_feature (91)..(91): n is a, c, g, or t
cctnataattcatactttctcccaagantgattaaatggttgccgtcctctcccactggaagccacagccgaaacagnaaagcagccacanatgcatcctctccagggctggggctggcaggagccctgtggatgaggtacacgtgctccatgtactccgtgatccgctgcaagaagctcagaggctcgttgaaggcgattggcatcgtgatcttggacagctccaggccaacacacttcttcaggatggtccacacgctgaagtcgcttctgctgaacatgggagccggcagcgatgtcctgtgtttctgaattccgttctcttgagagggcctctccccagttttcccaatcctattatttttgctggtgtctaagtcaatcattcccgtgactttctgatttgcctctgaaaattccccagaagagttatcagaatcaaagcctgtgacggcatcaaagaattcttcctctccgttcatccttcagcagccagcctccactgcccctgacatgtgctcttctactgaatcatcgtatctgatccacatctacagtgtaaggaattttacaaactttctcttggaaaaatccaatagacactgaagatcttacacccaggagagaggcctgatgaccgccacaagccctgagggtgcgggaacctcttcaggccccaaactatggagccagccactagctcaacaggactgatcccagagtttgtttctcaaaatacatcaagcgagtgttccactgaaaacagaaggcaagcaaagagaaacagccacaaacatcaggcacgagtctcagatccagtcccttataaaagctcacttccaccactcagctcaactcagaggtcacaggatttgcatcagcagaagctccagcggaaagaatgtggatgctgtgacattctgctgaatgatcccaagttcttttctgaatctgga

SEQ ID NO: 439098 - DNA, 807 bp, Homo Sapiens
ggggtagaatggaggccatggaaacagggaagtccatggttgaagccttcccgaattggaacgcactgattggggggttgttgactgacctgttccgatatagatctgaatcctaaatcttccctgattaattcatacgtttctcccaagagtggattaaatggtttcccggtcctctcccactgggaagccacagccgaaacagcaaaagcagccacagactgcatcctctccaggggctggggctggcaggaggccctgtggatgaggtacacgtgctccatgtactccgtgatccgctgcaagaagctcagaggctcgttgaaggcgattggcatcgtgatcttggacagctccaggccaacacacttcttcaggatggtccacacgctgaagtcgcttctgctgaacatgggagccggcagcgatgtcctgtgtttctgaattccgttctcttgagagggcctctccccagttttcccaatcctattatttttgctggtgtctaagtcaatcattcccgtgactttctgatttgcctctgaaaattccccagaagagttatcagaatcaaagcctgtgacggcatcaaagaattcttcctctccgttcatccttcagcagccagcctccactgcccctgacatgtgctcttctactgaatcatcgtatctgatccacatctacagtgtaaggaattttacaaactttctcttggaaaaatccaatagacactgaagatctggacgcgggtccctcggttgccggccgagctcactgccgccccgcccccgccccgtaggcccg

SEQ ID NO: 439099 - DNA, 1044 bp, Homo Sapiens
  misc_feature (6)..(6): n is a, c, g, or t
  misc_feature (10)..(11): n is a, c, g, or t
  misc_feature (13)..(13): n is a, c, g, or t
  misc_feature (17)..(17): n is a, c, g, or t
  misc_feature (23)..(23): n is a, c, g, or t
  misc_feature (25)..(26): n is a, c, g, or t
  misc_feature (28)..(28): n is a, c, g, or t
  misc_feature (32)..(33): n is a, c, g, or t
  misc_feature (39)..(39): n is a, c, g, or t
  misc_feature (47)..(48): n is a, c, g, or t
  misc_feature (56)..(56): n is a, c, g, or t
  misc_feature (69)..(69): n is a, c, g, or t
  misc_feature (76)..(76): n is a, c, g, or t
  misc_feature (79)..(79): n is a, c, g, or t
  misc_feature (93)..(94): n is a, c, g, or t
  misc_feature (261)..(261): n is a, c, g, or t
  misc_feature (530)..(530): n is a, c, g, or t
  misc_feature (778)..(778): n is a, c, g, or t
cattcntttnncncaanacaacntnntnaacnntgattntcaacacnncatgcacntaagaaataatcnataaatnttntcttttcctagganntggatcggggcagaaaaggtgagtccggtttttttggcagggcagagcaagctaaaagttttgtacttgtgctttaaaaatatagggtgtatggtgggaaagttccttccctcttcgtttcaggcaagtttctgtctccctttccagaactcatacagcaaagtatnttggcgcttacagcatgccttgtatcgtcagccacattttcatactgtaagagcttgtatttgaaaatcagatttaacattcctctaagagtccttatattcattgacgactctagggccctactcgtttgccagcacagtaaacagttcactaataaaaaatacagcacggagtgtgggtcagctgcattcagagcgctcgcgtgtgccagtggctttaaaagtggaggcctcttcccgacaaaccgatataaccctgggaggtagcncttccaaagccacacattcccttcttgtcttctcatgcaccgctccgatttctctttccaatccgggggacggatctgtcatatttaccggcatggaaggaacgctcgtaaaaaattagtttgtagtattactaaggcctcagtggtggtgtcgtcggcgcagcagccacacctcctcatctgccgcggcgccgggagtccgaaaaaggcgggtcagaggggccccggggtttccgggtgcctccccnttttagactctttcggggaagtgttccctgccctggacccggtgtcagggccagggcgtcctcgggtggaggggggcaggacagtgccagcttgtcgctcccgcccaagcacgtgggaggcctgcgaagaccagcgcccagcccaagccgggagagagaccaggccagtcaggagccgcggcttggggatacgcggacggtagtattccggcgcacttgaagccgcaggtccgtcacgcgatacgctcctcatcgcgatcccggga

SEQ ID NO: 439100 - DNA, 1776 bp, Homo Sapiens
  misc_feature (91)..(91): n is a, c, g, or t
  misc_feature (147)..(147): n is a, c, g, or t
  misc_feature (547)..(547): n is a, c, g, or t
  misc_feature (732)..(742): n is a, c, g, or t
  misc_feature (1413)..(1413): n is a, c, g, or t
  misc_feature (1430)..(1430): n is a, c, g, or t
tcgggacctcccagggctaggagctgcgcgccccacccggcccgcgagggatggcaactacccggggtccggaggcggggctgcgagtgtnggggcggggggcgcgggccgggtcgagcaccgccccgacgagggcccaggccagtncggcccgccccgggttccctccgtgcctcaggtcccctccgtgccccgcgtcctcccgcgcattccggtcatgcctcagccgcgccaaggcctgggacacggccggacagaccgcggggcagccctcggagaagtgggaagaggggagaaaacagtggcgaaaagaaggtctcctgggaaggagcgccctgggaagctggacgcggtgggtgctcttgaggggcctcaggagtggacttggggaaaccgcccgccctgaaaactgactcagcggcgcgttactgaggccgttcctagttggaagagaattaatagcacttgtttgagaattacaagttagttccagaaatgaatcgagtgacctcacagcccgtagcaggggtgggagagccagggtganctcctcacctcaccccgcccccgccccggcagcgctctggaaagcctcaaagcccagcgctgcgcggaaatgttagaggcccaaggcaggtggcctgtctggactcagacccgacccagatgtccccccaggtccctaccactcagtcccacctgcctcgactcagtcccgacccagatgaccannnnnnnnnnnggccccaccacgaccaacttttattccgactgcgccagtgacttgcagatagcatagcttcaaatttcctcacctggtctggggcggtgaacaggtcaagatggagagtgtcaagagagacttttgctttgtctatgatgtttttatatacacttgctaattaaatgaacgcatatgtttcctgtgtaattttgtataggggaataggggccgtgggaactggaagtaaacagccagtgtgccagcagctcttgactctaggtggtgggaataagtgccgttgtaaccacagtaccagcccaaacggggcttactctgtttgtaacaatgttgagttaccttgcaggtataacagagccaaaaactcttaagtcacaaagcccaggcatgcaccatagaaaaagatttgatctctaacaaacatccagaaccaactattcgtctccttggaacgaagaagactgggacatgactggaacccggacattcgaactctcagaagggaagggtctcttggcccagaagataggggcttaaatccacctcaacataccgtaccataaatggccaaatttgaaggccttcaaccagatcctgcccagccaacatttttaggtcctttcctttgccctctgcttccttagaaacttggcccagaccccaaatcaggnaggaagatttgaacctncctcctgtctccttgctggctggtcttgcaataaagtctttcttttctcaaaggcagtaccatggtattgcttccgtgtacattgagcagtgagcctgaggcaggaaaatagggtcaggaggcagggaacataaggccaattcacacttcggctgtaacaggaaatatccactccatagggcgtatgctgtaagtgactttgtaactttacttcatcctctgcatttacgtagagggtaagtgaagtaaacaatggaatcatctaggggatatttaaacttccaaaaattctgtaacggggcctttgagcccctatgttcgggccgctcccacactgtggaatgta

SEQ ID NO: 439101 - DNA, 1257 bp, Homo Sapiens
cccaactgtagatgtcaaatatttaatgaggtctaaacttcagagtgacaaaaacacccacccaactctacatctctatcaaaacaaatatattatgtaagaaagaattccctttaaatatatatgtttttttagtcatgttatactgttaattaaacccataattctatttatttaaataagaattaaataaactgcccaaatgcttattttcatttcacaaaacataaagtattttaaatcacaacttcagggtggtatactgaatacattggttccttagacagcatcaacaagcatatttttaagaatatattttcatctataggccaggtaaagttttattaaatgatgaacattttttaacagtgcagaaatacaagttttaaaaacaaatacattcagaagatttgctgttcaaataatattttttcaaaaccaggtggaggcgtatgataaaactcactgaactggcaatccaaaattgcactgtcatcaacataaacaactggatacactgtccctcgtatacctgatgctggacaatgcatgttttttccattcaagtatacatttaattcgacatggtcataagtaatacccaccacatctccttcctgcggaagactgtttgctggcagcctatttttctcttcattgttgtggtaaagggctccatcatttctcatcaccagactgtgcatatctcggccaagaggaatctgattcaagttaaccttctgagttgcaacaccaataccccagattcctgtggactggattttgaattcaaaatagcttttgttttgatgtaaaggtgcgctggctaaacaacctcctgttccacatattcttcttccattctttacaataacaacatctgttcccatgtgctgcgtgtccagctgcacggccggcatctccttcagagggatgtggccagtccccccgtctctgcagcaccgcaggcagcacaacaccgaggtggccatcgcgcagggaccaccgactccgccgccgtccctagaccgaggcgacactgccccccgccgctcagctccgtctcctgcccccgcccgaggtccggacttgtctatgtggagctcggaggccggtacagcgacaccctaggccgggagggcgcaatgcaggctgagcttaggctggcctgcgaggaagacgcggagaatcaaggggccggggagagaccggacagggcgagcggccgggctgggccggggagatcccgggaattcc

SEQ ID NO: 439102 - DNA, 1064 bp, Homo Sapiens
  misc_feature (832)..(832): n is a, c, g, or t
  misc_feature (854)..(854): n is a, c, g, or t
  misc_feature (856)..(856): n is a, c, g, or t
  misc_feature (861)..(861): n is a, c, g, or t
  misc_feature (882)..(882): n is a, c, g, or t
  misc_feature (889)..(889): n is a, c, g, or t
  misc_feature (893)..(893): n is a, c, g, or t
  misc_feature (895)..(895): n is a, c, g, or t
  misc_feature (907)..(907): n is a, c, g, or t
  misc_feature (919)..(919): n is a, c, g, or t
  misc_feature (929)..(929): n is a, c, g, or t
  misc_feature (941)..(941): n is a, c, g, or t
  misc_feature (947)..(947): n is a, c, g, or t
  misc_feature (954)..(954): n is a, c, g, or t
  misc_feature (964)..(964): n is a, c, g, or t
  misc_feature (999)..(999): n is a, c, g, or t
  misc_feature (1009)..(1009): n is a, c, g, or t
  misc_feature (1018)..(1018): n is a, c, g, or t
  misc_feature (1032)..(1032): n is a, c, g, or t
  misc_feature (1036)..(1037): n is a, c, g, or t
  misc_feature (1039)..(1039): n is a, c, g, or t
  misc_feature (1044)..(1044): n is a, c, g, or t
  misc_feature (1048)..(1048): n is a, c, g, or t
  misc_feature (1057)..(1057): n is a, c, g, or t
taaataatgatcaaggaatttttttattcattaagtttcagtatcattacagaaaatgttatggtacagaattgtttaacattattttgtctttgctcttgatttccacatgaatgctggtaacactaatatctgtacaagatcagtctttgattttatttttttgttctgtacaattttaaatgtattggttaaaaaggctgtcagcacttaaggaagcattttttcttcagtttgtttcttcaaataaaaggtgtccagttactgcccaagagtactgtgccgtgaggattttggggcgagaaacctccctggatgctctgcaggggatggttcttgaggcaaggcagagcctccacccagtcagtcttcttttggcactgtgcacataaacacgagatacatgagaaagaacaagcaaaagctctctgtaaagcagttatgaagcatactaagaagggaaatccaagtgttgcctacgctagtataaataagcagacagccttgatttaagagcataagtagttgtattttaaagatgagaaaaacacaagttctgcaggcacctaccgctgtctactaaaagctatcgctatcagacctagcattgaacacacaaagcattttgcaagagaggaaaaatttgccttgatataatcagaacagaattttctgttaagatttatttttaggtgtttttttctttaaaagatatttaaattcattttatatatagttcaagatggttgcctatacagatcaacttttatccaaatcgggaaaattatctgtgccgttgcatattacaggatacagtcaatgatatgtgganatgcatcaaagctttctcctgntngtgancatcatagccgtccaatgaanatgaaanaaananctcgcctttgtngggctccacgtnctgttctgtntttgggggtgcntcaacnatccttnggcctgcgcntctcatcggcggctgccatttgattccttactctnttcccagggngtggttctngtgatgccagttantttnncngatgngttntggaggggntcagttt

SEQ ID NO: 439103 - DNA, 853 bp, Homo Sapiens
  misc_feature (38)..(38): n is a, c, g, or t
  misc_feature (50)..(50): n is a, c, g, or t
  misc_feature (53)..(54): n is a, c, g, or t
  misc_feature (56)..(56): n is a, c, g, or t
  misc_feature (59)..(59): n is a, c, g, or t
  misc_feature (61)..(61): n is a, c, g, or t
  misc_feature (64)..(64): n is a, c, g, or t
  misc_feature (69)..(69): n is a, c, g, or t
  misc_feature (78)..(78): n is a, c, g, or t
  misc_feature (127)..(130): n is a, c, g, or t
  misc_feature (133)..(133): n is a, c, g, or t
  misc_feature (137)..(137): n is a, c, g, or t
  misc_feature (139)..(140): n is a, c, g, or t
  misc_feature (149)..(150): n is a, c, g, or t
  misc_feature (163)..(163): n is a, c, g, or t
  misc_feature (169)..(169): n is a, c, g, or t
  misc_feature (180)..(180): n is a, c, g, or t
  misc_feature (299)..(299): n is a, c, g, or t
  misc_feature (301)..(301): n is a, c, g, or t
  misc_feature (324)..(324): n is a, c, g, or t
  misc_feature (706)..(757): n is a, c, g, or t
gtgctaataacccacagtacaatgttgtagggaattanaacacaaagcgncannanatngngtnttgtncttaaagtnaacggctaggacgttgaatttattttataaagtacaattttgctgaccnnnnacnctantnntggcacctnnactgaatatttgnaaatgncttggtaggcntaggacttatttttaatgtaaggatagcagcgtgccttagttttgagtagggattcattaccccccctaaaatagtggattttacttttcagtttcttgagttgtgtcttgaaattatngntttgtaaaactgtttcttttgantttggagggaaaaaaaatcaaaaagtttctagtgcttctgtctacttgtagatataacacacgctggaaaagaaaaggaggcccatccttgaagaagaagatgacctctgggttagaattcgacatcgacatattgcggttgtgttagagtatgtgaactcattttaatttttgttccataatttttaagacactatgtgatagtacattttgtaaccttaaaatagttctgtaaagatttacatcttagaaatttaaagaattctctcacaatttgacagggaaattcccaagcttatgaaagaaatttcatcaacaaagaaagcaacagaaggaaaggtaagagtcttacttaactttcaaagtaatagtgaaggtgaannnnnnnnnnnnnnnnnnnnnnnnnnnnnnnnnnnnnnnnnnnnnnnnnnnngaaagttctaacatggaggtagagaatgaactcctacgtacccattgcctagtttcaatagttaacaacatttttgtctgtcctgcttcattaaaa

SEQ ID NO: 439104 - DNA, 2595 bp, Homo Sapiens
  misc_feature (18)..(18): n is a, c, g, or t
  misc_feature (456)..(456): n is a, c, g, or t
  misc_feature (468)..(468): n is a, c, g, or t
  misc_feature (2508)..(2544): n is a, c, g, or t
aaattctatatttatttnctcttagaatgttcatgatttttggttttctaatttaaacatacatgatttcaaaattatataaaattgtgttctttagaagtatgtggcaaaacagtacacactgtgaaatcactccatttctattaatgactgaattattttacacataaactgaattttagttgaaagaaaaactacacttagaggaaacaattctatcatacatatacatttaccagttttttacttttacaatctctttatttaaaatcattctttcccaaaaactatacttcagcatgagacttttagatataagtttccaatgggtaatttgtatgttcattggtggctgtgttgattttcccacaactcttatatattctcctccaaaggtgaaagaatttccttttagagagcactttaacatttcttctcatcatctacaaagcagcngcgatatttaanttatcgggggtggcaaatccagtgataatcataaacagttccttaagagatgtatttgagaagccattattccataaaatatttacattgtttaaattacatgacagcgacattttctttctattttagttcaacatattagttagagtctctaaaccctccaaaaagagatgctattcatctttaattaaggagactttatccttgggtttattcagcatctttatatcatccaacagctttttgggtgttaaaacatgtgtagaaccaataataacttcacaggatttatgtgcctgagaaacttcataagcacaacgcacttcagagtatgtgatccctccaattacaaaaacaatcagctttgacccattttttcggtcttctaaataattagctctgggtttctggcgagcacttacagctcctgaaccattccatactgctggacactgggaacaatatggccattcttttgaatctaatctattatcaatagcatcctccataatatctttgataaaaggtgtccaccgagagagctgaaaagtttcttctgcagaccgatcctttcttaacggtttgccttgttgagattggggaacaatgggaacaccaaggtaactccagttacgaatcatgtcactctcattttctatctttacattctggatcaacctgtccaaattttcttccgtagttccattaatactgaagatataaagtagaattgctcttattttatcacaattatcatgatttttgttgagtagaactggaaggagtactcgcatggaatctttcaccttctgtccttctgcatcagttccaagtgcgaggtcctgttcagttttgcagagcttttctatattaagcttgaacttattcatgcaatcttctgctaagttaagatggacaacttgcttagtaatctgttttcggaaatggggcatctttttcatcagctgggtaagagcactaagtgatgtctttccttctgttgctttctttgttgatgaaatttctttcataagcttgggaatttcctctaacacaaccgcaatatgtcgatgtcgaattctaacccagaggtcatcttcttcttcaaggatggcctccttttcttttccatctgttttatatttgtatgtatcattctcaattggtagtagatcatatgccattgcctgaaaggtcagttcatgcaggacagtggacacaggatcaaagccacgatcaattattaagagctgtgaatgagttttaccctttattaggctcttttcatcaatcttgtagtagtcttcaagctttttttcaacaagctgtgcaagcttactggcattatctagaggtttacttttatatcttactccgggattttcatccaaggtggcacacactgtaactatctggtcagccattgtttccataatggcatcttttccctttgcattaccagggtctggactataacagtaatagaatgcatctggtacatcaagagtatacacctgagattcatgtggaatgaaggaaatatttatttctttacatcttcttattgacttggagcaagaagccttaattttgttaaagagattatcagggcaaaagtcagtgaagtaaatatatgctgctttatacttgttctccgatttacttgcaaaatcatgtaagaaacaatctacagactttgatgtcggagtgatgaaataaagagctttcatttgtctgacaggttcacggttcttataaatattctctacaacagtaataccttcttctagaagatctgtcattttgcaacacgatgccaaaagcttagtggtaaattcatctaaaagcattatcttccattcgccttctttcttgcagtcatcaaacactgttgcttttatcttctgccacacgacgctctttagccccctctctgccaccggcggcgccatcttcccgacactgcggagcagcagccaccaccttccactcccaacctccgctctcgacgaattcgagctcggccgatttggcctgatnnnnnnnnnnnnnnnnnnnnnnnnnnnnnnnnnnnnncgccgccaccgcggtagaagctccaattcgccctatagtgatgtatcagtc

SEQ ID NO: 439105 - DNA, 909 bp, Homo Sapiens
  misc_feature (346)..(346): n is a, c, g, or t
  misc_feature (605)..(648): n is a, c, g, or t
cattttgttacccacttgcattttgttttcactcagcagaaattctccttctctgttttccttttatcccatccccaagaatgtggaaggaaggtgagaaacatggcaggatgggaaataggagagtatgactctctatagctcatccaggagtaatcaattaagaagataaattggatgactgtggagaagctctgtgataggaacacttcagtgtggttgctgagaggagacagtcattgaaggtaagaaggtttgccaaaagatccagaagctcagagctccctttgtgctctttgggaattaccttgcattcagtttagaaacatggatctaaaagttactngggaaataagcagatggagacacactctgttgtttacgtattggaagaagggaaccaagccagttttgttagaggtaactcattttccatgaccaaacagactcaacagattcaagtactctgcttactctaattgactagactctaggttttatttgacatcatagcattacataaatcactctgataacataagtgcacagtaatatgcctgatctcttcctttttaaaagccaacttgagttcagtaccatctgannnnnnnnnnnnnnnnnnnnnnnnnnnnnnnnnnnnnnnnnnnntcctgtggcaaacataataatgtatttatttagaattataatatgaccatcatgttaattattttttacctaatcagagttgttattgacaaatgtcataagtggaaagtattaattcttattgtcatcagtatttagccattatttagtagctgcaagaatatctttatgtgaatgtctctgtaacttggaattgcaatttcactgtgttaagtaatcagaactctgcttataagatttatctgtatcttgtttcataat

SEQ ID NO: 439106 - DNA, 930 bp, Homo Sapiens
  misc_feature (14)..(14): n is a, c, g, or t
ccaggttgagcagngcaagtgtgtcgtctgtttcccaacaacttggaacaaccttgtgtgtgctgcccaggccactgtcacgatgagaaaggtcatcaggtagacggcaatccgtgttgccagaagcctctgtacacttctgtcgaactgctccaggcctgcaggagcagccggggtgggagtgtccccgctgagacggggcgctggccgcgtttactcagagcagctacgtaaggggcctgcctgctggggcagctgccctcccgcagaggaaacttctgtccttggggcaggcccggaaccttcctcttccaacctgtcctctggctcacttccagggtgctgcctttgtccactgaactcggaaacagagccctaggagcccagtctcccaccctcccaggaggccaggacctccgccggggtgagcacaggctgagcaggacttgttggctccctccctttccaaggaggcccccgcctcccgcctctgcctcctaagcctcagaagcttcgaggcgtgcagggtcagcaccctgtgccaggtcgagcctcggggaccctatatcttcgcagggccacaccacgcagagcacagcctgccccgttacctgttctggggagatctccgtgtgggtcacaggcaggatcatgacggtggcgatgatggacagcagggcagtcactgaagctgagcatgcgttgggagcactggatcccctccccagcgtcctcgtctctcctgcctggggggcagtcccccaggtgtatccagtgcctgctctggggtccggggctgggacatggcggggccactgcctggcggttacaggagcctgggcgggaatcgcctcggcgactgttccgcgcgcctccgcttgagtcagcccggccgggagcttgacagccggaagatcccgggaattccgg

SEQ ID NO: 439107 - DNA, 3301 bp, Homo Sapiens
ctggtactggcccggaatttcgggatatcgtcgacccacgcgtcggggctctggatggtgagccctctgccctgtggtggcctggtcctctcctcaggggtgggcacccatccctctccccactgagccccttgagctggacagtgctggatgcaggccgtccaggtgggtctgatctcactttgtgcccctcgggccgtccccctggccagtccttcagagcagcaggctccctggtgtgtccctgccccagcagacacaggctgccagtccctccagcctcacctccccgccctgggcagcatgtgtgggcagcgtgtgaggctgccgggtggtggtgactggtgacttccttgtgttcagggaagggagaaggtgccttcccttgttttctggccttgttatatacagatggcagcttggatctcaggtacagctccaggggcaggcagtgcccagctggacctggtggccctttcctagtgcctctgctgggggaggagaacctctgtccacgtggaggctaggaggtctcacgtgctgccctggcagcaccagagtgtgggccgggcccgagtgtctgcccctcggccctcagggtggggcacttagcacccagaagggaccaaaagcagggcatggcggtgcagaggagtttgggaggtgtaaacagccccatgcacgtggaggaggagctggctttcagccccagaccccacgctagcactttccacgctgcttgcccgctgttgatgtgcagttcccagtgcctgtgtgagccgacatctgctcagtcctatccctcgtcagcgtgtggagacccagctcctgcagccctcctgctcccacgcccccagacagcttggtggagggtcctgcatctgggccaggctggggtgcacccagccaaagacaaagctgcctccacgtgcccaaggattcagatggtgcactggccccgggaggagtctgaccaaaaatggagcccgctctgtgggaagccccgactcccccacgagaaacggtcccacggtgcggatcttcccctttccttgtggggcacagctggcctgggccttccaattctgcggagctttcctgggtgatggctttgacctcagaagtggctctggtttggcctcaggagtgtggcctggcccagcctgctgcagcctcctggggggcccttgatgccactaatcccccgaccccccgcatctgccaaactgcacagacacacgcattgtaaggccgcttgtggcctccagcgtgcactcttgtttacgtcattgtcatcttcaagaccagtcctttgtgattagtttttcttcgcgagccctggtgtggactgtggtctgtatgaatcgtgtgtaactgtggtgaggggcttgtcctgtatgtgagtctgtacccaggtggggtctgtgccctgcacaccgggcccctctgtatttatcgctgcctgaatgcaacagtaatttatatccaggacaaatacagtctgggcgtcactatcctagcatctcttcctcatctttagtgtcaacaaacttaggggaggggagggcctggcttggcacccccgaccccaccagctctgtataggcctcaaaggggctgggagtgggctgcccctcgggtaggtgagcttggcaacgtgtcttcaggttggagagagtggataggcaaatgccataaagcacatttccagttcctgtgaaactcctctctccgcaaaaagtggagaacatttgaggactgaaataagagcatgatatttcacaatgaaaataaaaccaggccacgcaagaaccactgcggcctgcccgtgacttggcttcccctgcccagcatcctgtcctccctggtccatctctggtgaggacggctgggagtgggctctgtggctgctagcagggggcagggaggagctgggactgtgggtcgtcctggcccgtgggggctggcggggggtgttcgggccgggcgaggccccgcaggacccgcagggtggccagggccaggcccacgagcaggcgcagcaacaggaaggcgcagggcacggcgatctgcatgaggtggaagatgcccacactgaacctgctcagcaggcaggtggaggcgaaggccagcaggctggcacaggggtacagcgccagcttggcgaacatgagcacatgctcccggccgccaaaccacaccgagggctgcagcgtctccgcctggtgcagcagcgccgtggtccacgtggccagctggaagatgctggccaggaagatgatggtgcagctgacacgcacgcgctccagctcatcgcggggctgccgggcgaaggccgaggtctgctggtaggctagtgggaggccacccacgaaggccagcgagagcgtgttcagcagccccatggcccgcgtggccttgcgcacatgcaggaagagtgagtggtgggcgaaccacagcagtcccacctgtggcgaaggagccgaagtacgccaggaagcgcggcccggtcgcactcagggcggccacgaggctgccgctgaacctctccttcacatccttggggtccgggacgttgtcttcgcagatgtccaggatgagaagcgtggccacgatggcgtagactccgtcgctgaaggcttccacgcgctccttgctgagtggctcgtggaggtcaaacgagaagacttccactgggtgagccgagggctccctgtggcccaggagcctgtctctgcaccagccggtgaccttgctgacataggggaggaggatgacagtcaccatcagcaggtaagacaaggggacaaagaagagagagaagatggccgctgcaaagcacagggccgggccttggaggacgatgcccaggacgtgtcgtcggtacagagccctgtgggcagagcgctggatctgcgggctcagcaggtgcgggaagtggaatgcgtaccccacaatcagtgcctgcacgaccccgatggcgatcacacacacacagaacaagaagatgcccagaggcacatcagggaaggtcaccattaacgaaaacgtgtaaggcaggaaggtgatggtcatcatgcaggccaggttgagcagggcaagtgtgtcgtctgttttcccaacaacttggaacaaccttgtgtgtgctgcccaggccactgtcacgatgagaaaggtcatcaggtagacggcaatccgtgttgccagaagcctctgtacacttctgtcgaactgctgggcgggaatcgcctcggcgactgttccgcgcgcctccgcttgagtcagcccggccgggagcttg

SEQ ID NO: 439108 - DNA, 912 bp, Homo Sapiens
ttaagctatgggagccaccccacgaaggccacgcgaaggagcgtgttcaccagcccccatgcccgcgttgcctgcgcacatgcaaggaagagtgattgtgggccgaaccacagcagtcccactggtgcgaaggacccgaagtacgcccaggaagcgcggcccggtcgcactcagggcggccacgaggctgccgctgaaccgtctccttcacatccttggggtccgggacgttgtctttcgcagatgtccaggatgagaagcgtggccacgatggcgtagactccgtcgctgaaggcttccacgcgctccttgctgagtggctcgtggaggtcaaaacgagaagacttccactgggtgagccgagggctccctgtggcccaggagcctgtctctgcaccagccggtgaccttgctgacataggggaggaggatgacagtcaccatcagcaggtaagacaaggggacaaagaagagagagaagatggccgctgcaaagcacagggccgggccttggaggacgatgcccaggacgtgtcgtcggtacagagccctgtgggcagagcgctggatctgcgggctcagcaggtgcgggaagtggaatgcgtaccccacaatcagtgcctgcacgaccccgatggcgatcacacacacacagaacaagaagatgcccagaggcacatcagggaaggtcaccattaacgaaaacgtgtaaggcaggaaggtgatggtcatcatgcaggccaggttgagcagggcaagtgtgtcgtctgttttcccaacatcttggaacaaccttgtgtgtgctgcccaggccactgtcccgatgagaaaggtcatcacggtagacggcaatccgtgttgcccggacgcgtgggtcgacgatatcccgtaattccggccgtaccagcgctt

SEQ ID NO: 439109 - DNA, 1205 bp, Homo Sapiens
cgatgaacttccggctgtcaagctcccggccgggctgactcaagcggaggcgcgcggaacagtcgccgaggcgattcccgcccaggctcctgtaaccgccaggcagcggccccgccatgtccagccccggaccccagagcaggcactggatacaccgggggactgccccccaggcaggagagacgaggacgctggggaggggatccagtgctcccaacgcatgctcagcttcagtgacgccctgctgtccatcatcgccaccgtcatgatcctgcctgtgacccacacggagatctccccagaacagcagttcgacagaagtgtacagaggcttctggcaacacggattgccgtctacctgatgacctttctcatcgtgacagtggcctgggcagcacacacaaggttgttccaagttgttgggaaaacagacgacacacttgccctgctcaacctggcctgcatgatgaccatcaccttcctgccttacacgttttcgttaatggtgaccttccctgatgtgcctctgggcatcttcttgttctgtgtgtgtgtgatcgccatcggggtcgtgcaggcactgattgtggggtacgcattccacttcccgcacctgctgagcccgcagatccagcgctctgcccacagggctctgtaccgacgacacgtcctgggcatcgtcctccaaggcccggccctgtgctttgcagcggccatcttctctctcttctttgtccccttgtcttacctgctgatggtgactgtcatcctcctcccctatgtcagcaaggtcaccggctggtgcagagacaggctcctgggccacagggagccctcggctcacccagtggaagtcttctcgtttgacctccacgagccactcagcaaggagcgcgttggaagccttcagcgacggagtctacgccatcgtggccacgcttctcatcctggacatctgcgaagaccacgtccccggaccccaggatgtgaccgggcgcacgttcagggggagcctcgttgcgccctgagtgcgaccggccggcttcctggcgtacttcggctccttcgccaccagtgagacttctgtgggtcgccaccaatcagtcttcctgcatgttcccaggcacgcgggccttggggttgtgaaaccgcgctcggtggcttcgtgggtggcccccatagctaccaggaactcggctttgccg

SEQ ID NO: 439110 - DNA, 880 bp, Homo Sapiens
  misc_feature (224)..(224): n is a, c, g, or t
  misc_feature (231)..(231): n is a, c, g, or t
cccttgggggaagtgcgggggacccttgctattttaaaaccctttcttttgggcccccttccgggggtgcctgcctttttccattgaacttcggaaaacagagcccttaggagcccaatttccccccctcccaggaggccaggacctccgccgggggtgagcacaggctgagcaggacttgttggctccctccctttccaaaggaggccccggcttcccgcttntgcctcntaagcctcagaagcttcgaggcgtgcagggtcagcaccctgtgccaggttgagcctcggggggccctatatcttcgcagggccacaccacgcagagcacagcctgccccgttacctgttctggggagatctccgtgtgggtcacaggcaggatctgagggggcaaagagacagaaggaagcaggagagcaagagacgcttgttggattgggtgtggcagtactggggactcgagggcagtgctgggcccccctaagctgcctgaggagctgggggacccaaggatgctggcaagacctagacaggtctgaggtgggctgggcagtgcctcgagaggctcggggtggggcaggcctaagcaggggccccgtacagaccatgacggtggcgatgatggacagcagggcgtcactgaagctgagcatgcgttgggagcactggatcccctccccagcgtcctcgtctctcctgcctggggggcagtcccccggtgtatccagtgcctgctctggggtccggggctgggacatggcggggccgctgcctggcggttacaggagcctgggcgggaatcgcctcggcgactgttccgcgcgcgtcagcttgagtcagccaggccgggtgatgcaaggaattccggaccggtccag

SEQ ID NO: 439111 - DNA, 827 bp, Homo Sapiens
tggtcgatcgacacgcacccagtacaagaggatgcccagaggcacatcaagggaaggtcaccagttagcgtacaacgtgtaaggcaggaaggtgatggtcatcatgcaggccaggttgagcagggcaagtgtgtcgtctgtttttcccaacaacttggaacaaccttgtgtgtgctgcccaggccactgtcacgatgagaaaggtcatcaggtagacggcaatccgtgttgctagaagcctctgtacacttctgtcgaactgctccaggcctgcaggagcagccggggtgggagtgtccccgctgagacggggcgctggccgcgtttactcagagcagctacgtaaggggcctgcctgctggggcagctgccctcccgcagaggaaacttctgtccttggggcaggcccggaaccttcctcttccaacctgtcctctggctcacttccagggtgctgcctttgtccactgttctggggagatctccgtgtgggtcacaggcaggatcatgacggtggcgatgatggacagcagggcgtcactgaagctgagcatgcgttgggagcactggatcccctccccagcgtcctcgtctctcctgcctggggggcagtcccccggtgtatccagtgcctgctctggggtccggggctgggacatggcggggccgctgcctggcggttacaggagcctgggcgggaatcgcctcggcgactgttccgcgcgcctccgcttgagtcagcccggccgggagcttgacagccggaagttcatcgcaagcccggcgacgccgcgcacgcgctgtctccgtcagacctccgcgcctgc

SEQ ID NO: 439112 - DNA, 936 bp, Homo Sapiens
tggcgtcgccgggcttgcgatgaacttccggctgtcaagctcccggccgggctgactcaagcggaggcgcgcggaacagtcgccgaggcgattcccgcccagcagttcgacagaagtgtacagaggcttctggcaacacggattgccgtctacctgatgacctttctcatcgtgacagtggcctgggcagcacacacaaggttgttccaagttgttgggaaaacagacgacacacttgccctgctcaacctggcctgcatgatgaccatcaccttcctgccttacacgttttcgttaatggtgaccttccctgatgtgcctctgggcatcttcttgttctgtgtgtgtgtgatcgccatcggggtcgtgcaggcactgattgtggggtacgcattccacttcccgcacctgctgagcccgcagatccagcgctctgcccacagggctctgtaccgacgacacgtcctgggcatcgtcctccaaggcccggccctgtgctttgcagcggccatcttctctctcttctttgtccccttgtcttacctgctgatggtgactgtcatcctcctcccctatgtcagcaaggtcaccggctggtgcagagacaggctcctgggccacagggagccctcggctcacccagtggaagtcttctcgtttgacctccacgagccactcagcaaggagcgcgtggaagccttcagcgacggagtctacgccatcgtggccacgcttctcatcctggacatctgcgaagacaacgtcccggaccccaaggatgtgaaggagaggttcagcggcagcctcgtggcccgccctgagtgcgaccgggccgcgctttcctggcgtacttcggctccttcgcaacagttgggactgctgtggttcggcccacatcactcttccttcattgtccgcaaggcacgcgggccatgg

SEQ ID NO: 439113 - DNA, 917 bp, Homo Sapiens
gtgggcgaaaccaccaggcagtccccaactgtgggggaaggaggccgaaagtaacgccaggaaggcgcggcccggtcgcactcaggggcgcccacgaggctgccgctgaactttcctttcacatccttggggtccgggacgttgtcttcgcagatgtccaggatgagaagcgtggccacgatggcgtagactccgtcgctgaaggcttccacgcgctccttgctgagtggctcgtggaggtcaaacgagaagacttccactgggtgagccgagggctccctgtggcccaggagcctgtctctgcaccagccggtgaccttgctgacataggggaggaggatgacagtcaccatcagcaggtaagacaaggggacaaagaagagagagaagatggccgctgcaaagcacagggccgggccttggaggacgatgcccaggacgtgtcgtcggtacagagccctgtgggcagagcgctggatctgcgggctcagcaggtgcgggaagtggaatgcgtaccccacaatcagtgcctgcacgaccccgatggcgatcacacacacacagaacaagaagatgcccagaggcacatcagggaaggtcaccattaacgaaaacgtgtaaggcaggaaggtgatggtcatcatgcaggcctggagggagggagggcatcacagccatgatgcggccaggttgagcagggcaagtgtgtcgtctgttttcccaacaacttggaacaaccttgtgtgtgctgcccaggccactgtcacgatgagaaaggtcatcaggtagacggcaatccgtgttgccagaagcctctgtacacttctgtcgaactgctgggcgggaatcgcctcggcgactgttccgcgcgcctccgcttgagtcagcccggccgggagcttgatcccgggaattcc

SEQ ID NO: 439114 - DNA, 1027 bp, Homo Sapiens
  misc_feature (651)..(663): n is a, c, g, or t
  misc_feature (667)..(667): n is a, c, g, or t
  misc_feature (670)..(670): n is a, c, g, or t
  misc_feature (676)..(677): n is a, c, g, or t
  misc_feature (690)..(690): n is a, c, g, or t
  misc_feature (692)..(692): n is a, c, g, or t
  misc_feature (697)..(697): n is a, c, g, or t
  misc_feature (711)..(711): n is a, c, g, or t
  misc_feature (720)..(720): n is a, c, g, or t
  misc_feature (725)..(725): n is a, c, g, or t
  misc_feature (729)..(730): n is a, c, g, or t
  misc_feature (733)..(733): n is a, c, g, or t
  misc_feature (749)..(749): n is a, c, g, or t
  misc_feature (752)..(753): n is a, c, g, or t
  misc_feature (755)..(755): n is a, c, g, or t
  misc_feature (757)..(758): n is a, c, g, or t
  misc_feature (764)..(764): n is a, c, g, or t
  misc_feature (781)..(781): n is a, c, g, or t
  misc_feature (796)..(796): n is a, c, g, or t
  misc_feature (826)..(826): n is a, c, g, or t
  misc_feature (839)..(839): n is a, c, g, or t
  misc_feature (843)..(843): n is a, c, g, or t
  misc_feature (852)..(852): n is a, c, g, or t
  misc_feature (878)..(878): n is a, c, g, or t
  misc_feature (882)..(884): n is a, c, g, or t
  misc_feature (889)..(889): n is a, c, g, or t
  misc_feature (892)..(892): n is a, c, g, or t
  misc_feature (896)..(898): n is a, c, g, or t
  misc_feature (901)..(901): n is a, c, g, or t
  misc_feature (903)..(903): n is a, c, g, or t
  misc_feature (905)..(905): n is a, c, g, or t
  misc_feature (907)..(917): n is a, c, g, or t
  misc_feature (920)..(920): n is a, c, g, or t
  misc_feature (926)..(926): n is a, c, g, or t
  misc_feature (932)..(932): n is a, c, g, or t
  misc_feature (942)..(942): n is a, c, g, or t
  misc_feature (947)..(947): n is a, c, g, or t
  misc_feature (951)..(951): n is a, c, g, or t
  misc_feature (956)..(956): n is a, c, g, or t
  misc_feature (971)..(971): n is a, c, g, or t
  misc_feature (978)..(978): n is a, c, g, or t
  misc_feature (982)..(982): n is a, c, g, or t
  misc_feature (989)..(990): n is a, c, g, or t
  misc_feature (1009)..(1009): n is a, c, g, or t
  misc_feature (1014)..(1014): n is a, c, g, or t
  misc_feature (1022)..(1022): n is a, c, g, or t
cagtacagatgccatattttaggtaaaggtcaaagtaattgggcagaatttgttctcgttttgaaaaataatcggagatatttaatggaccagggcaaacccataatttcatctgaatataaatgtatgcacgtttccaatgagttatctttcagttatcacaaacagcaacaaggaccttatagctatgttagaaaactgtatagttggaacttaattctaacaatctcacttgctctcaagagaacaccatccatttcaaatcaatgtcacaaactccagaagaccaggggagcaagggggtgaggagtgggccagagtggtaaacacagggccaatacacaggtgatggacagaaacacagctctggaggaaatcaaaatcagatgcattattacagctaagggcaaggaaaagcctatggcttttgaaaaatgacttttctgccagtaccgtacaagtacacaaagagatgtgcggcaagtcaactgacttacaaggacagaggctacatttcaggtcatttcaactgcaaccagtcgaccctttccattgaggattcagcagtggagtcagcgtagtccagaagctcaatgttggatttgcaaatacagtttattttacagaaattcaacattataaacagcaggnnnnnnnnnnnnngggnggncccctnnccccgcccatctncnaagtncagaccattctatncaaaaaatnaacancaanncgnccctacttcttttganttnnantnnaaaacnatagaacctgcctgcancacatcctgtctgcnccacacacgcacacgcctgctcgctgcgcnggccaccacagtntgtntgggcccanccagcgctgggaccccattaaatggntccnnncccgngcncccnnnccntnangnnnnnnnnnnnggntctttnttcttngagggttttnatggnaggntatanagggaaatttggtanagggatntttnggtacannatttccagcaaatcttgtntaatngctctgtntagtt

SEQ ID NO: 439115 - DNA, 1644 bp, Homo Sapiens
  misc_feature (605)..(606): n is a, c, g, or t
  misc_feature (611)..(611): n is a, c, g, or t
  misc_feature (615)..(615): n is a, c, g, or t
ttttttttatgaaaattaatcgagatatttaatagacagtgcaaaccataatttcatctgaatataaatgtatgcacgtttccaatgagttatctatcagttatcacaaacagcaacaaggaccttatagctatgttagaaaactgtatagttggaacttaattctaacaatctcacttgctctcaagagaacaccatccatttcaaatcaatgtcacaaactccagaagaccaggggagcaagggggtgaggagtgggccagagtggtaaacacagggccaatacacaggtgatggacagaaacacagctctggaggaaatcaaaatcagatgcattattacagctaagggcaaggaaaagcctatggcttttgaaaaatgacttttctgccagtaccgtacaagtacacaaagagatgtgcggcaagtcaactgacttacaaggacagaggctacatttcaggtcatttcaactgcaaccagtcgaccctttccattgaggattcagcagtggagtcagcgtagtccagaagctcaatgttggatttgcaaatacagtttattttacagaaattcaacattataaacagcaggcacttcccannccgcncgcncccctccccccgcccatctcccaggtgcagaccatgctatgcagagagtgagcagcaacgcggccctactgctttggagtgagagtcgaaagcgatggaacctgcctgcaccacatcctgcctgccccacacacgcacacgcctgctcgctgcgcaggccaccacagtctgtctgggcccagccagcgctggaccccattacatggatccagcccagttctccaattccttcatgtcgtcgtcctcctcttctttcttcttggcgggttttgatggtagggctatagagggaacatttggtagagggactgtttcgggtccactgatttccagcaaattcttgtctagttcctcctgttctagttcttctaattccgccatgagctcatcctcgtcaaactcttctccaaaccctacaggtttcgaaattgctgttgaaatctcctctgcaagttcttgctggtcagcaatgtcctgcattaactcatcaactttatcgatgtccatgttgtcatgggccgccttcatggccttggcggcatagcccatgttcttgagcacctcggtgttggtgttggcattctccagggcctcccgctggaactcgatggttgataatgtgccgtcgatctgcgccagctgcttctcatacctcttcttacgcttcagtgcctggagggccgcgcgcttgtttttggtgccgtgcttcttggcggccgtcagctcctgctcgattttcttctccaggaactcctgtttcttgcttaacatctcttccgtgtcccgcagccgctggatggcctcctggggggtcgggccgcccttgccggccttaccccctccagccccgaacagcttcccgaacaccgacatggttgctgctcgccgcgccggccttcgccgcccgctccggctcggctcggctcggctcggctcgggtcggctcccgcgcccgctcccagtcccgccgctccctgccgccgcaggcctctcctccgcctccgcctccgccccgcagctgggcccggc

SEQ ID NO: 439116 - DNA, 1081 bp, Homo Sapiens
  misc_feature (427)..(509): n is a, c, g, or t
ttctgaggctgtacgcaaaatgacattggcatttgcttgacttctggggaggccacaggaggcttacaatcatggcaaaaggtgaaaggggagccgcacatcacatggcaaaaacacatgagctagacagaaggggcgaaatgtgccacacatttttaaaggacctaatctcacaaaaactcactcattatcgagaagacagccccgtgccatgagggacctgccccatgatccaaacacctcccaccaggccccatctccagcactggggattacaatctaacatgagattttgggcagggacaaatatccaaactatttcaaggggtggagccagtgcctaggctgaacctataccgcatcctcaggaccaacagcccagggtaagagtccagctggtacttacctgtccccactctcaacatgnnnnnnnnnnnnnnnnnnnnnnnnnnnnnnnnnnnnnnnnnnnnnnnnnnnnnnnnnnnnnnnnnnnnnnnnnnnnnnnnnnnggaagtctgagataattggcaacgttttctgcctttagctatttataaaatattcaacacttgtgttgtttcatcttgaatcttgttcttaaagctcccgttcttcttgttcaacttactgatgtggcattttcaggatatctgggcacaggcctctgttcatccctccttttatcacccaagggtctttctcttgctccagtaaggagatcacatctggtttagaaatgcaaagacccactgaaactaggttcctgtagttttctaacatcaccttcttgtacaaacttctctgagcaagattcagccactcccattcatcttgggaaaagtctatggccacatctgtgaaagtcactgaacccagggacatggctttacaaagtttaattcctgccacctctacctcttcctggctcttcatttggagaagagctttactctgggattgtagagctgaggcagtagttgaggaaactacatgacagccagtgactctggagtcagcctgttctggatctgaatcccggttcttccacttgctagtgattactttcctctctatgcttctg

SEQ ID NO: 439117 - DNA, 1860 bp, Homo Sapiens
  misc_feature (22)..(22): n is a, c, g, or t
  misc_feature (343)..(343): n is a, c, g, or t
  misc_feature (752)..(752): n is a, c, g, or t
  misc_feature (1811)..(1811): n is a, c, g, or t
  misc_feature (1814)..(1814): n is a, c, g, or t
aagaatggcccaaacagcaganttctgaataactgaaagtcgaaaggctgaaatgggattgagacttggatccaccattccttctgcaacaccattctcaaattttcctattctgaaatagccatcttctaatcgtttgtctttggtttctttgcttatttccaaaccttcactcttaaaaggcaaaacttccacagttgtgtttagcagaatatctccaggatgttctttgttgccgctatggaacaaatacctttctacattgactggtttatcaattttaaacaagatgtagtctccagctatcggtgtgatagcccagaagaaatcctctcccatgtangttttttccagcgtatgcccttggtagaccttcaaggaagtagatacctccgcaggtgggtttacatggattttaagaagtaatggtttcatataatctttatccgtgagtttttggctttttcctgatagtgatgagtgcagaccaacatgttggaaaagggaaggtctgaagcgaattcgcagatttgctttctgtctatcacaatgttttgcatctttttcagggttgcagactttcacccagagaatatggtccaggggccaatcaatgggtttctccttgtaaaacatgaatatgaattctacaatcagagtaagatccggcgcttgaaacattttaccaatgaagcccagctgggaaaactctagaatcatccattcctcagaagaaagttgaagtgcaaaanttttttatggtattaacataattttgtttgacaataatatcatcttcaagctgaatgtaatatatgcccttttcttgagcatacatcattagaaaacagtaatctaggttttgctttgttctccatcttactctttctttggagtctccaaatgtctcctttaggtttgtcaagtcaggataatagctttcagggggtgatatgacttccaccaagccagaactgatttctttagaaaattctttctccaggttggctacaacaccatgtacataatcaatatctgtctctcctatgaagactactataacacagtccaacttctcttcaggatacaggttatcaataagggaatgaagagtttctatgaggtaagatttaacttctctcttcactgtgggaatgcccatgactattgaaactcctgttcttccgttgccaatctgtacagcaggttgaagacttccttcatttttcaataaatgaggcaaatgataataaatacttggcacttgaagagattttttgcttgttaactcctttaacagctttagggtattatctgagaacttattcaacgcatccttacttccatttgtttctgctcctacacgcttgaactgttgcacaatcgtatttaattcagaagagcgctgtgagattctgtgttcagctattcgaagacgttctttcaaagcaaggaattctcgttgataagcaatcagtttttctttcccattttgccatgtagtataccaagacaaagtaaggaaggaagtgataaatgctaaagcagtggctacagttccattgcggagcctcatctcatttcaccatcacactggtccatatgtttatgatgacaacaaccaggactgttttctttttaccctgaaagtcaactgaatgcagtactcctggctctaggccaataaaaatcaataagagaggttcatttcagatgatctgcaggaggagcctagcagcaatgctgttcacaactgtactcgggatcgtctttgcggtcttcacacgctgatgcctcggccttttcccttnccnccgctggcgtcgccgtgctcccgcggctgccggcggagctgctgta

SEQ ID NO: 439118 - DNA, 1205 bp, Homo Sapiens
  misc_feature (23)..(23): n is a, c, g, or t
  misc_feature (51)..(51): n is a, c, g, or t
  misc_feature (175)..(175): n is a, c, g, or t
  misc_feature (1006)..(1006): n is a, c, g, or t
cgggcgcgggaggaggtggcggnggagggggaggagcgagccgggcaccgnccccggccccaccccggccttccccgcgcagagctccgaccgcgggcggcccaggggcgggcgcgccgctgcatccccatcctcgtcgtcgcccggcacagcgcgagcgagcgagcggcgcggngcggccggagcgccgaggcccggccatggccaccaccagcaccacgggctccaccctgctgcagcccctcagcaacgccgtgcagctgcccatcgaccaggtcaactttgtagtgtgccaactctttgccttgctagcagccatttggtttcgaacttatctacattcaagcaaaactaggctcttttataagacatgtagttgctacccttttgggcctttatcttgcacttttttgctttggatggtatgccttacactttcttgtacaaagtggaatttcctactgtatcatgatcatcataggagtggagaacatgcacaattactgctttgtgtttgctctgggatacctcacagtgtgccaagttactcgagtctatatctttgactatggacaatattctgctgatttttcaggcccaatgatgatcattactcagaagatcactagtttggcttgcgaaattcatgatgggatgtttcggaaggatgaagaactgacttcctcacagagggatttagctgtaaggcgcatgccaagcttactggagtatttgagttacaactgtaacttcatggggatcctggcaggcccactttgctcttacaaagactacattactttcattgaaggcagatcataccatatcacacaatctggtgaaaatggaaaagaagagacacagtatgaaagaacagagccatctccaaatactgcggttgttcagaagctcttagtttgtgggctgtccttgttatttcacttgaccatctgtacaacattacctgtggagtacaacatttgtgagcattttcaagctacagctntcgtggccaacaaagaatatctatctggatatctctctttttggctgccaggccccactcctatttttgcatggacgctagctgatgccattaatattgctgcagccttggtttcaagaggttgacaaaatggagcaactcctggggcttaattctcatttggggattaacaaaaagggatgtcaccaggttcaaggag

SEQ ID NO: 439119 - DNA, 1181 bp, Homo Sapiens
  misc_feature (343)..(343): n is a, c, g, or t
  misc_feature (402)..(606): n is a, c, g, or t
  misc_feature (627)..(627): n is a, c, g, or t
  misc_feature (1019)..(1019): n is a, c, g, or t
  misc_feature (1108)..(1108): n is a, c, g, or t
  misc_feature (1128)..(1128): n is a, c, g, or t
  misc_feature (1130)..(1130): n is a, c, g, or t
  misc_feature (1144)..(1147): n is a, c, g, or t
  misc_feature (1159)..(1159): n is a, c, g, or t
  misc_feature (1170)..(1170): n is a, c, g, or t
agtatggaaatgtctttatttcactcttcattttatcgtacaatttttcaaaccacacagactttaaaataattgtagaatataatttcacaacattttgttctatttgttattgtcttctatcttgtccatctatccatcctgtcttcttctagtgtctttttttatgcttttcaaagtaagttgcagttgttagtataccacacccttaacttgagcatgtatgttaactaaaacttagtagtttagtatttttaactagaatttactatgctgttccagttatttattgctgtgtaatacattgccccaaacttagtgccttaaatatcagcaactattntattttggctcatgaatctctcatttggtcagggattggcaaggagagcttgtctttgnnnnnnnnnnnnnnnnnnnnnnnnnnnnnnnnnnnnnnnnnnnnnnnnnnnnnnnnnnnnnnnnnnnnnnnnnnnnnnnnnnnnnnnnnnnnnnnnnnnnnnnnnnnnnnnnnnnnnnnnnnnnnnnnnnnnnnnnnnnnnnnnnnnnnnnnnnnnnnnnnnnnnnnnnnnnnnnnnnnnnnnnnnnnnnnnnnnnnnnnnnnnngtagtctttggattgaaagantcactaatttcactcagattcaaggagaagggccatagactccaccacctgatgaaaaaatgacagtgttacattgttaagagcatgtggaatggcttctattgtgaccatctttggaaaatacagttgaccacatataccatttcatgagctgtgacaaatgtatacacctttgccagaaagttctatcagggtatagaacctacacctcttcctagttattccttccccccacaccacccctagaacctaacattgttcagattgttttcatcttagtttagcttgcgcagaactttatgtaagtagagtcatacaatacttatatgttgtaaaaagtttctttttgctcaacataatgtttttgagattcatccatattgttgaatgtntctgtggtttgtgacttcatctgttaagggacactggggctgttttcagttccaggctgttttcagttccagctattataaaaaggtanatgaacattgtgtgaaaaanangttctgtgtggacnnnntgttcttttctnttggttgttgngtgttttcttt

SEQ ID NO: 439120 - DNA, 607 bp, Homo Sapiens
  misc_feature (190)..(298): n is a, c, g, or t
  misc_feature (442)..(533): n is a, c, g, or t
gaccaagtgtaagctttattacctttccctcctcaaagtcctatcatccgtatcaattgagactaccttatcaagtcaatcagaacctttgctaattctgggaaaagcagaggactatccttccttgtcctggaaggacagtactcccaaatggtagtggtgaagagagtgggcactggtgtcaaacctnnnnnnnnnnnnnnnnnnnnnnnnnnnnnnnnnnnnnnnnnnnnnnnnnnnnnnnnnnnnnnnnnnnnnnnnnnnnnnnnnnnnnnnnnnnnnnnnnnnnnnnnnnnnnagtgcacatagtaagacctcaaattttggcacttgttgctgttaagctgtattaggtcaaaactattaattgattaagatccttcatatctgttaattatctgtgcatcaaaaagactttatgggccgggcacagtggctcatnnnnnnnnnnnnnnnnnnnnnnnnnnnnnnnnnnnnnnnnnnnnnnnnnnnnnnnnnnnnnnnnnnnnnnnnnnnnnnnnnnnnnnnnnnnntagccaggcatggtggtgcacgtctgtagtcccagctattcagcaggctaaggtgggaggattgcttgagccca

SEQ ID NO: 439121 - DNA, 1722 bp, Homo Sapiens
  misc_feature (1679)..(1679): n is a, c, g, or t
  misc_feature (1690)..(1690): n is a, c, g, or t
accaatttaagtgatcaatatattaatggtttttagagtagtacccgatatttgatgttcaaggttcatgcatgtgtatttttaattccttaaactagacagcaaggtataagtcaccattctcctctaatttttgaaataatcttaaactgcgcaatccagattctcgctctccatttttccacaaaataatgagatgatcagcggagcacgtcactagtccatgatcttcaaagtatagaaacatctccacagatgatgagtgtccaatcaaatctccaataagctccagtgaacatgaagtagcattttcttgctgctttttaacaggttggctggcttgtttgctgactcttccaaatccccacatgttaaaaaaacctgttggtacaggctcagctgcaagctgctgtttttctcttaactcccaaatgcgtacactgccatcttctgagcatgagattaactgcctgtttggaagtctggcaatgtgcaggacattggagtcatgtgcagttttctggcaggcaatcacacgcttcatttgaaggctatacacgtataaaccccttccaactgcagcaaatacattctcttcatcacatgtgaaatgatgaatagaaatgtcatttgatttttgacagagttttatttcttgttgggtgtccagttgtggagatgggtcccagaagttgcgttcataggcctgcatggtccagtccagggcatcccagatgatcagctctccgacgtgggagccggtgacaaaactcaaatcattgacattaatcaatgagagaatattatcctggtgatcaaggaggcgcttaacttcaagaatatcccattctagtgatccttctgtgggtgctaccaacctgaaaattatcagttctttgccaactgctgccacaacacagttcttaggtatttcaaccaaagcactaatacctgtatcagaaaggtggctagtcttacacaggagatctaattttcggttccacacacacaggtcattcccaccagaaagccaaacatctagtctctgaagaacagttaaacactttacagtagactggaagcatgatattctctgaacttgtctggtagtatcaccatcccacacaataactgttctatcagcagaggctgtcaagatgagttgatttttctcttcacaagattccaaggaaggaaatgtaataatagctgttatcttttgagtgtgtccattcagttctaaaagtttttcccctgtctgggcattccacacaactacaattccatcatcaccagcagatgcaaatctgtagtcatctaactgtaccagaaatcgtacaatatcatgatgagccttcagtactagcagttcagtgtagggattctgggtttgttcttcacctattgtctgtaaaggagatttctcggccagtccctgcggttctcggcctcccccgatcagccatcgcaacatccgggcagcggcggcgtcttgcccggtccagccccagtcagcccaaactccgccccaggctcggcctcctccttcctccccaggctgcagcgcaactgagacgctaatacttcccgccccagatcagcccacgggccgaaggaatgcagaccacagttgagggagaatttttgtccccaaagcgctcccgtacccagccacggangcttagtttgngcagtcgcttggggtgcggcggccgacggcgg

SEQ ID NO: 439122 - DNA, 1815 bp, Homo Sapiens
  misc_feature (18)..(18): n is a, c, g, or t
  misc_feature (41)..(41): n is a, c, g, or t
  misc_feature (43)..(43): n is a, c, g, or t
  misc_feature (45)..(45): n is a, c, g, or t
  misc_feature (47)..(49): n is a, c, g, or t
  misc_feature (82)..(82): n is a, c, g, or t
  misc_feature (127)..(136): n is a, c, g, or t
  misc_feature (348)..(479): n is a, c, g, or t
  misc_feature (636)..(636): n is a, c, g, or t
  misc_feature (825)..(825): n is a, c, g, or t
tggtaaagtatcaactangaaatttcatttacctgtcccancngngnnnttctgtcacaaagacatatactaagactttggnaaaattccaaaggggattacacttgaaatgtgctgtgttttcacnnnnnnnnnngtacttgtcttattcacagtgaatcaaataaaacagctttacagcttactaaaactcaaacttgttctcaaaggaagcagtttaaacattttcaactgaaaaatcagcaacacaatgattctacatcaggaaatcgaaccagggagacaaaaagcagctctaatagaaagcgtgtcttgtcaaaaggttaaaaataaaaataaaggcccggnnnnnnnnnnnnnnnnnnnnnnnnnnnnnnnnnnnnnnnnnnnnnnnnnnnnnnnnnnnnnnnnnnnnnnnnnnnnnnnnnnnnnnnnnnnnnnnnnnnnnnnnnnnnnnnnnnnnnnnnnnnnnnnnnnnntgacagagcggagccctgccccctcctcccccaccaaaaaaacccacacatattatgaggaaaatccaacttatttacaaagaatgggtcatcttcaggcctgagatcccaatatgttatggtaaaattgtgggtgcaccgtcctctttggaaaaanggggtaaggaacagatctggctcaatccatgctaagaatctggttttaaaagatcaaagaagtttcagagaaaaacctaacatcactgtatgccccaggggtgtcatttaccatgaatgaagggcctgggaacgcactctccctgaggtgccccccaggcctgccaacatctcatgaaatctggtagtnaaactggcaagagttccctctgcaccagcaggctacaggcagtttgtggggctgggggctggtcttctctggtcttcccctgggaagtgcctcccgctttccccaaactgccaagctaccaagccctctagtgaacaaatgagccatagtctggggggctggcatggtaatcagaatgggtggatgctgccaggagaggccagggccccggagtattcgggggtcggcactctggcagcaccatctcacttcttagccattgcaaatgagtaggccctttctcctcaaacccagagcagtagctggctagaagaaacggcaccaggaaggtggcaataaactctgactgagctcatgtcagttttctcctaacccacctgtagatttgagagcaaaagtcctgactcatccagccccagtgtaactgtgaagtgcggctgtcatgtttacagtcccagttactcaggagggtcatcaaatggatcatctaaaatcaccgtatgatttatcctgatatcctgatatggtacaaagtccttgtcaacaaaggtctcattaattttcttaattatgtccatgccttctgtcacctcaccaaacaccgtatggacaccatcaagataatctagattttctcctgtggtgataagaaactgagatccatgttgatcactgccattattcaccatggacactgtgcctttcttcttgtgcttaattcttgggactttttctgcctcaaaaaagcttgcttgatcaccatacagttggccaaagatagactctcctccacggccagtccctgtaggatcgccagtttgtatgataaaatccctctgtacattgtgaataaggcaataattgtaatattttattttgcacagtttcaagaaattcaagcaggcacgcggccgttcttcggtgtacaagtcgatgacgacgtcgcctaaagtggtctccagtagaaccgccatggcgcccgctccatcc

SEQ ID NO: 439123 - DNA, 626 bp, Homo Sapiens
gttatttcaatgatatcttcttataggattcttatgggaattttagtagtttcattgcagatcaataatgggaccacgttttgggggagtgaagggtggggagctgggaataagactatacataatcagaatttttgattttgcatattgctctagagacatgttctgatttcagttgagctatttcagttccatatttttgaagctgatccttcgtttcagccaaaatagtagatacaaatcaatgacgttgttaaacctttttctgaattattttattgctttgtaatttacaagattcttgacattagtggtagtgttcacatttaagctgttataacagccttctaatggtagacttttctaagttttattaattgaaaatgcccacaaaatgattattttactgattcacttgtaattcccccttcctttgacaggatatctatagagaaatggggtttggtcactatgaagaagaagaaagctgttgggagaaacaaaagagtgaaaagagagaccgaactcagaaccgaagtcgtagccgatctcgagagagggatggccattatagtaatagtcataaatcaaaataccaaacagatctttatgaaagagaaaggagt

SEQ ID NO: 439124 - DNA, 1759 bp, Homo Sapiens
  misc_feature (1647)..(1678): n is a, c, g, or t
gctttccctggcactcttaagttagacaagagtaaatatgttagcctctcaattctgcctcttcatctttcatctatacttagatttttctttatctttggacttctttggacttctgcttcggtctctctttttactcctttctctttcataaagatctgtttggtattttgatttatgactattactataatggccatccctctctcgagatcggctacgacttcggttctgagttcggtctctcttttcactcttttgtttctcccaacagctttcttcttcttcatagtgaccaaaccccatttctctatagatatcctgattagtatttttgattggcatgtagtcctcattcttcttttttcttcagaaacagtgatgggttttcttccttgtgttttttacttgtgtgtgagtgacttgattttgagtctttcggcctgctcatctaaatataagatcgtattttgtatcctgtttgggctttactttatctttcagaaccaaattagggtggtttatcctgttctttttcatactccttgaaatcactcttggtgtatttcccaccttttcctttccatttaacctttgcaaccgactggctaaaatccacatgtattcttctgtcatctataagcacattgtccattttgaagaatgctttctcacaatcttcttccttttcaaattcaataaaagcgtaacagagggactctcctgtcttccagtctcggataacttcacaacttcttattggcccaaatctagagaatattatttccagatcctcatctgtggtcactgggttcaatttacacacaaacagtacattttctggaggtttaatatctgcatcaggtaggtctcccaccatctccaaaagtatagcctgagttttagcctctttttctgcctttatttcttctacttcctcagctgatcttcctttgaaatcatcaatttcttcatctgctcctattcgaccactatctaattgttcccttgtaggttctggtgatcgatcagggattaataaatcaggagggtcatcaaatggatcatctaaaatcaccgtatgatttatcctgatatcctgatatggtacaaagtccttgtcaacaaaggtctcattaattttcttaattatgtccatgccttctgtcacctcaccaaacaccgtatggacaccatcaagataatctagattttctcctgtggtgataagaaactgagatccatgttgatcactgccattattcaccatggacactgtgcctttcttcttgtgcttaattcttgggactttttctgcctcaaaaaagcttgcttgatcaccatacagttggccaaagatagactctcctccacggccagtccctgtaggatcgccagtttgtatgataaaatccctctgtacattgtgaataaggcaataattgtaatattttattttgcacagtttcaagaaattcaagcaggcacgcggccgttcttcggtgtacaagtcgatgacgacgtcgcctaaagtggtctccagtagaaccgccatggcgcccgctcctcctccgctacaaaccccgggaggaccccggccgtaatggcccgaattcccgggcatatgtccgtacacgtcgactgatnnnnnnnnnnnnnnnnnnnnnnnnnnnnnnnncgccgcttcctcgctcactgaatcactgcgctcgatcgttcgattcaacagtagcgcccatatgatgataaacgtcctgcg

SEQ ID NO: 439125 - DNA, 2322 bp, Homo Sapiens
  misc_feature (221)..(221): n is a, c, g, or t
  misc_feature (225)..(225): n is a, c, g, or t
  misc_feature (277)..(277): n is a, c, g, or t
ctcaagtggtgctgcctgcagctttaaaaggctgagcacaaacccatcagagagccacagtcctaagtagactcctcggtgcgctctgcccacctgtccatgtgcattcagatttctcattaaattttccacagcatgaccagtggggatgacctgggtggcctttgtgtccatggccacagcctaggtacccacctggcatggtgcctccacaggcgcangagncggttttctggcccccgctggagcagaaggtgcagcagtgaaacacgcctgngtgtgggcggtgctttctcctcaccatcacagtgaatggcgagccctgcacatgctgttctttgatgcagacccacacagtatagacgccagtttccttgggggtgtaggaaatgtagtatgtcccatccttgttatcctggaccattgttctgactgggctgtctttcttatctttagggacaacggcaacttgaacgttgtctcctcccctgcccatgatttctcctgcggcatccttacaaagcaggggtgaaagaggccgtctgtttctcccgggctctgtggaggtcttctctcttgtaggacacatttggctggatcaacctctttggtattaatcgtaccataaatttcatagccacggcactggcctgctttctcctgaggacagaagcgtatcttatcatttactccaggacgggtgctatattgaactttgttcagcttcctgagccgttctaccaccaccctcttggtgatgaggatctccaagtctgagccgctggtcagcaagtgctcggtgaactccactccagtccgcatgtctgccagtaactgttccagctgggccttctgcagctgcagggaattttccttctgggcccgtatgtcttccagctgcttcagcagcttgtcccgatgctcctcaatggccttaatgtagccctccgagaatgtccggacatcagctgccactgcctccactcgcttctggagggcactgtttattatgtggatctgagccagggcttcctccagggcctccacgtggggctgagtacctttgaggagctcccacacagagtccccatgcttgtggatgacattgctggtgaagtcacaggggtgttcccgatgctcccccaccacacaatcctggcacacgggccggtcacagaactcacagaacagcctcagttcctctgcagggtgaacaggacacaggatgggcttcccaatccggctgtagcctttcaagtcttttaggtccaccatggtgtggtaagtcgttttcttctgccgcctatgagcctggcagcagaagtggcagaggttggctttgcaggtctgacacctcttctctacttccctgtcgttgcacaggtcacacaccaggccctggccttccccacgtaggctctccagcatcacatcattcacggccaggtggtctatggttaaagccttcactccacccatgggcaggtccacctgagcatcacatacaggacaaaggatgccgatctgcgactgcagacttcgtggcttgagttcctggaatattgacccctcagagcttgtgtcagagtctccccctcggatgtccactactgagaagggctccagctgctccagacacgtggtgcaaactgtatgcaaacaaggcaagagcctgggggctttgaaaagccccaagcacagggggcagtgagtcttgcctgagttcccaagtgcagtcccactagtgagtttgcttacaaagcccagcagcggttttctgttttctgacatactcctcacgtttgtgaccaatattagaaagggccctgggcagttctacgatttagtagcaggtgattaagcccacccaaagagaaagtttccagaacttgaacagagaccatggggactccctcgctgacaaataaaagggcagacgggaagacgaggcgtcctcgaaggaatcacccacagatctactcaggagggccccctcctttccactgcatcccataccagacacgcccacgccctcctctgccccgcaagtcctccccggatgcgcttccaggtctagctctccagctagtcctgctgccaacaaagtcacccctgcacctctcgctccctccactgccacccccctcccgccgcccgccccactgcgcgccacacgcgacaagcgccgaccccacccgcgcacgatgaggtaggggccctcttgctccttccctctgcgaaaggcgcgcgccgggtgagggaattgcaagccgccggcgggcttctcggtgtccaccgcatcccggaattccggaccggtac

SEQ ID NO: 439126 - DNA, 2092 bp, Homo Sapiens
  misc_feature (55)..(69): n is a, c, g, or t
  misc_feature (75)..(75): n is a, c, g, or t
  misc_feature (78)..(111): n is a, c, g, or t
  misc_feature (113)..(233): n is a, c, g, or t
ctttcttggggtgggcccccgcccccaccaagagggggggtgaaaaaattttttnnnnnnnnnnnnnnncgggcnaannnnnnnnnnnnnnnnnnnnnnnnnnnnnnnnnncnnnnnnnnnnnnnnnnnnnnnnnnnnnnnnnnnnnnnnnnnnnnnnnnnnnnnnnnnnnnnnnnnnnnnnnnnnnnnnnnnnnnnnnnnnnnnnnnnnnnnnnnnnnnnnnnnnnnnnnnntttcaatcaataaaaatattttattcaaaaaacagtctaatatcttattttacatgatttcaaaataaagttgattgtagtacagattgctgtggcctttttcccctccattttttacatgttctcatggttacaatatccagcataaagaggttgtgcagctattccacgttcgaccatcctgcagcggtgccttgtcagtctgtcataggcgtcatccatatctctgacatctttggaactccagagtctctcaccaacagcacttgcccgaggccataatcttggagtgaggttagttgcatccacatattctccccatagacaagcttctccaccaatgaaaagttgtttctgtttctgagtaccgccaaaatcaagaggttccactttatagtatttcctccaatcttgtccatagctaatcaaatctaagtaccaaggagcagaaaggattacagggaagccagatgctgtgactctactgagttcctcaggatatgcgctgtctttccatacttcaactattgtgcccggcgcaagctttgctttatcatcaaaaacctcctgccagacaatggatcccttgtttatggttgcaataatatccaaaaccttttgaatgtagaaagattctagtttcttaaaatctgtgccaaagcctttttgcctcatgaaatcttgaatttttggatttgattcccaacatttaaattccacttcatctcctcccaaatgaatgaattgatctggaaacacctcactaatttctttgaaaaatgtagtaaggaagctgtatgttgtattcagagtagggtttataggtccaaaagagtccaacttgttttgtctactgtaacatggagtcaggaggtctttctgaccttttccccaagatagtgtatgcccaggggtatcaaattctggcaggactcgaattcctcgtaatctggcatattcaatcaccatacggacatcatttggtgtataaacatgagacaaagaatagcttcctttattgcttaactcaggaaaagtgatgctctgatatgggaaagactggtcatcaactatgtgccagtgaagaacattaaacttattaaaagccatggcatccagagttttaagaataatcttaactggcagataatgtctggatgtatcaaccaaaattcctctgtgagaaaaccttggagaatcaataatggtggattcattgatggtgaaagttccataagaatcttgataaactaactggctaaaggtctctaaacctcgtaatgctccccaaactctgttggccttaaggacagccactggttctttcacaagtaaagtataagactcatctgaagatatgttggggaaagcatcacactctgactgaagggtgattgagacaagaagttgctgaacctgggttttagcctggaattcagcaggttcatgatgccacttgtagaaaccaaaaatatagccatgatatcgtcgaaacgcttcctccagcagggtgcaggaggggcccgccgtggaattggggctgtggctgatgtagaagttctccggggcgagatgcagcaggttcggggtcatcttcaccgagagcggcaggggccacagcgccggccccggcttggccgagacgctcggggcccgagccgcctccgccacctgcaccaccagcgccacctgagtcagcagcgccaacatcgccgccagcagtgtcgccaacagcagcgccagcagcatgggcggccggggcagccccagcccgcacagctccatggccgctcggctgctttccgcccggtctgccgagccggagcctcgggacccgacttcccgcccggcccggatcc

SEQ ID NO: 439127 - DNA, 1055 bp, Homo Sapiens
  misc_feature (907)..(907): n is a, c, g, or t
  misc_feature (918)..(918): n is a, c, g, or t
  misc_feature (929)..(929): n is a, c, g, or t
  misc_feature (931)..(931): n is a, c, g, or t
  misc_feature (933)..(933): n is a, c, g, or t
  misc_feature (939)..(939): n is a, c, g, or t
  misc_feature (947)..(947): n is a, c, g, or t
  misc_feature (949)..(949): n is a, c, g, or t
  misc_feature (953)..(953): n is a, c, g, or t
  misc_feature (962)..(962): n is a, c, g, or t
  misc_feature (968)..(968): n is a, c, g, or t
  misc_feature (978)..(978): n is a, c, g, or t
  misc_feature (983)..(983): n is a, c, g, or t
  misc_feature (997)..(997): n is a, c, g, or t
  misc_feature (1005)..(1005): n is a, c, g, or t
  misc_feature (1012)..(1012): n is a, c, g, or t
  misc_feature (1020)..(1020): n is a, c, g, or t
  misc_feature (1043)..(1043): n is a, c, g, or t
ctcggttcaaacgacccggtgggtctacagcggaagggagggagcgaaggtaggaggcagggcttgcctcactggccaccctcccaaccccaagagcccagccccatggtccccgccgccggcgcgctgctgtgggtcctgctgctgaatctgggtccccgggcggcgggggcccaaggcctgacccagactccgaccgaaatgcagcgggtcagtttacgctttgggggccccatgacccgcagctaccggagcaccgcccggactggtcttccccggaagacaaggataatcctagaggacgagaatgatgccatggccgacgccgaccgcctggctggaccagcggctgccgagctcttggccgccacggtgtccaccggctttagccggtcgtccgccattaacgaggaggatgggtcttcagaagagggggttgtgattaatgccggaaaggatagcaccagcagagagcttcccagtgcgactcccaatacagcggggagttccagcacgaggtttatagccaatagtcaggagcctgaaatcaggctgacttcaagcctgccgcgctcccccgggaggtctactgaggacctgccaggctcgcaggccacctgagccagtggtccacacctgggtctaccccgagccggtggccgtcaccctcacccacagccatgccatctcctgaggatctgcggctggtgctgatgccctggggcccgtggcactgccactgcaagtcggggcaccatgagccggagccggtctgggaagctgcacggcctttccgggcgccttcgagttggggcgctgagccagctccgcacggagcacaagccttgcacctatcaacaatgtccctgcaaccgacttcggggaagagtgcccctggacacaagtntctgttctganacaactgtgcntntnagagcncaccagtncnaggnccacactancgcctncccaccatcnacgtnagaagcagtccagnctgcaacngcaagcnctgccaanctggctttttggaaagggtaagnttcgctggagga

SEQ ID NO: 439128 - DNA, 2105 bp, Homo Sapiens
  misc_feature (2)..(2): n is a, c, g, or t
  misc_feature (1507)..(1507): n is a, c, g, or t
  misc_feature (1683)..(1683): n is a, c, g, or t
gnttacttccatgggtaaaaacccatttctctatgagaatgaattattacttgctaacaggcaatatgcatattctgccttacaaaatatttaaacaccattttaggagagtggttgaatttttagaaaaatatttgccagacataattaatgagtaccaatcctattctgtttagctttaggaaaacaataaggttattttcttccaaggaagttttatatacacaacaaaaggttacaatttaggctaaatatcatggaccatttttgtccatcttgtggaacttatttttttgtaaatataaagattaaatattcaggtgaagacacatattctggatacacaactattacatattttccaagagtgaatacaccatacaataaacagaacacagaaactataggaaagtggcataatttctcttaattcatcaattttatatatcttcacaatcttacaatgcatgtggatcttcatatgaaaaagaaatcaatgatattgacactggatgggcacagaatagtagaaactggttgctaacgtgacaaagaaggtgacttttagtatttttgaatttattaattttcatttaagcaaaacctaacactaatatcccatcaatttttgatacactctttacatgctcattaaaattacaataacatttttggtatattttttgtatgcacattaaaattagagcaggagcaaatgatcatgtgtgacaccattgggcataaatgtctagaagaggtaaactctttcagctagaaatagacacttgttttatatatatataacttcaaagtgtaagatatctccagcctgccagtggactgtttcataggaaatatctcacacctgagaggaatgttcacctgccattattagcagtgccaaatgaagtcacttgcctgtgtaaatcttgagtaatgtggcatgttagggctcaagatcataaccacagctaatcattaaactatagaaagtttagctggcctgccactgaaagattgaacctaatcattctttgaacttcagtctggaaaaggtacatacattatgcctgatatcttaagaattctctctttacaggacaggaaaaaatgaaaattcgagtatagttttaaaaatatccaaactcttcatgatctttctagataaggctttggccttatagaataagtataagtgtgataacttcttggtgacaagaaacaaaagggaaaaaagaaggctcttaagaaaaataggtattactaatgttaatgaatacaaataaattctcatgaagtagataatgaatttgagagtttcgttagaaaacatgtccttttttattccttccaataacctctggagactccaacaataaggaaaatatattcttacaaacaagagtatagtaatactgactactcattgacacttccattcctgagagatatttaccagacttaaagttaggagaaaactttagctattgatttatcacttaaagtngctgacatgttttaatacaacctagctattcttaaagctagagtggctggatcactataaaaacatcaataatgaacatattaagcaataatatcttgaaaaactgttttaaaaacaggaaaaataaatgtccactttttgtgcaaaaatctgtaaaagttttaagatgccacttnacagaggtcaagctgatgatccattaattaggttatgactgcattattttaaatacatgtattgttttaagacactccttcacatgtctgcgcgaacaaaagaagcaaatactccattttcctgagccaagaggctttctggagtgtcatattctaaaatatttcctcgcttcatcacaataaccaggtctgccgtcagaatagtgtgtactcgatgagctattgtcaccacggtccggtctgcaaaggctgtcattactactttttgcaaaatattctctgtggccatgtcaatggaagctgttgcctcatccataataagaatgctgcttttgcggacaagggccctggcaaggcaaaatagctgtctctgtccaacgctaaaattctccccaccttcagtgacaaccgcatctagaatc

SEQ ID NO: 439129 - DNA, 2370 bp, Homo Sapiens
  misc_feature (39)..(39): n is a, c, g, or t
  misc_feature (61)..(61): n is a, c, g, or t
  misc_feature (65)..(66): n is a, c, g, or t
  misc_feature (68)..(69): n is a, c, g, or t
  misc_feature (86)..(86): n is a, c, g, or t
  misc_feature (357)..(357): n is a, c, g, or t
  misc_feature (381)..(381): n is a, c, g, or t
  misc_feature (2074)..(2074): n is a, c, g, or t
aaacaaaaatatccactcaaaatacaattcaacaatgcnacagtcatcttacagcagaganatgnngnnttatatgcaaaactgcnagtgactgtgaattaagggtgaatgtagtctcaaatcctcaaagagttgtgtttatttcatcgacaaatagattattcgtattcaattctgatgtgttttaaagactaagatgctcattttacgattagcgcacatgtgtttattgtcacctgttctccttagaaaaatgctcttcctcatggttaatgtttccctttggtaccaattttgcctgtttgcataaagtatttcatttttaaaactcagcataaaatatagactgcatctganaagatattgaatataacatataangcagaacacacaagttccacatttcaaaagcctcgataacaaaaaaaagaaagatcaaatcccttattagtctctgttaagtcatttataaagctcctgctgatcctgttaagcatggatataattgatctttcttttaaattaaaatgttagcttttccccaagacatgtcaaagtgctaagaatgaataggaattgtccatgtttttcgcttttgaccacgggcaccatcggaactgaactcacaaatataagaaaaatttcccttcacttttaaaatcctaagacccagaaatcagaatccatgggatttgtttagtaaagaagggaatctgtggctctaggtgtccactaaaggagagccaaaaatgtcccaaataatctcagaaccacagcatcattttgtaaataacagagccaagtcctcagattgtacagcagattggttcttattgctggaacagggcctaaaccatgcctggaaccccagctgttacagaggaggtggacgggagggactcctgacctgttcacattgcgaaggtgtgtggaaaccaaggtgagcagagaacatgaatgctcacaccctttggcccaggtgcctgtgatttagccttctcattaacaggattcccagatgttcatcctccatgcaatcttcagaatgaatggtcagctaggagcttagtcccttgaccagatttgatgaacacatttctgtacaactttctcaaatccttggtcggcacatcccacattcttgatggagctgtcatgagaatcaggttgggggcttctcttgtctctctttagcctaatgggtcagagaccacagggaacacaagaaaaaaacccaggaagggctgtgcacctgacagcttctttgttaaactggctacatattatgtgttcccagaaacttcaacagcattacaaatcctaactcatccaacattatataaaaatactctggatagattgaggtctttatacagtattacaacagcgcggcatgatgtagctgaaatgcacacgtgcatctctgcaagacacagctttgcaaggaggatcagctcctggatagctccttctttctgtctttgtcggggccctcaaaggtgagagcgggaaactggggttttcttattcctgccacatttacaggaatgtggactgccaagtttttctacatcatccactgtctctggcaaggcaatacccttggtttcaggcaaaagcatcacaaggccaccacagatggatgccaggataccaaagatgatcagaggtagttctagccacacgctgctagccgaaagagcagaaatggggctatgattcccccaaaatcacacagacctgaacagagcgaaactccgaaatttcgtaatgttgttgggtacaattctgaatttaccaaataaacaatttcaaaggccatggttatccctagtcttcccaatgtagccactgtggtcctcaaccatgctattccttctggtaagaacgcagtgacaaggcatgccacccctgccactatattgcttgctgcaaaggggaggcgtcgtccaaggcgctcaatggttagtaagatcaagagagctcctggcagttccaccacgcccgagatgaaaaagtctatatagaggttgccccctataattcccaggcgcatgacaagtccttgatacanccactgcgcttgtgaaccaagcaaacataagaataagtgtgcatttcctcatttggggagttctcaccagatctaaaaaggatggataactaacttcctcatctgtaacagtgatctctgagtaatttgatgagaggtatttcccattgcacttagcaatgcgtctcaggatctgtaatgctttatctcctttcttccgagtaatcagccaacggggagactcagggaccacccagtaataaaggaggaagagaaagctgggcagcgtgatggctaactggattccttgccagttg

SEQ ID NO: 439130 - DNA, 347 bp, Homo Sapiens
gcagcttgagtaatgccgactttatatcagcacacccagtgcccccacgttcccgctggcccaggtcccggagaccatgatggcacccacagtgccttcgcaaaggagcgtggggaccccgaaggccaggccacccctcagatgggggtcccatgctaaagcagacggtgccggtgccgcagggcgtctgagacccacggtggagcccgggcctggcgtgcgggagcggccacgccgccgcctttctcccaggactccgggaggaccccagcgacgcgtgggtcgacgatatcccggaagttccggaccgacacctgctttataaccactggtcatatccaaatgtt

SEQ ID NO: 439131 - DNA, 2461 bp, Homo Sapiens
  misc_feature (563)..(625): n is a, c, g, or t
tctctttcccatttgtttttttcttgtttattttcgtccctcggtttttattaaatgattgttctatttgtagattgttagtttagtcgctattgttttggggcccaggtttttggttcgtcttatatccttgcgtgctcgcaatttttctgcgcgcttcgtgtgttctttggcctctcacgtgtaattctcctaggctctgttaaattttgttttttggctttcctatgtctccgtgcgtggcccttattattgcctttttccggttctttgggcagtgttgttgtgctgtcacatattttggtgctttccccagctcatttttatgtcgtgttttgttgttaacacatgagcgttcctctatgtcacggttgtgtgcttccatctgattgcttatgccttgttaatgtcttattcggctctctcgtgttatcttttgttttatatcattactgccacttctaattggtgtgctgcccttgctgttcagatcttctggggtgtctccttgttggtgggcttcgtggggtggtcttcttttgttgcgcgcccctcctctttgnnnnnnnnnnnnnnnnnnnnnnnnnnnnnnnnnnnnnnnnnnnnnnnnnnnnnnnnnnnnnnngcagcttgagtaatgccgactttatatcagcacacccagtgcccccacgttcccgctggcccaggtcccggagaccatgatggcacccacagtggacttcgcaaaggagcgtggggaccccgaaggccaggccacccctcagatgggggtcccatgctaaagcagacggtgccggtgccgcagggcgtctgagacccacggtggagcccgggcctggcgtgcgggaggcggccacgacggcgcctttctcccaggaactccgggagggaccccaggactcagcgccagggcagccttggcaggtgcagtgaggcagtgacttgtgggggttagatgtgggcctgccccacgtgggcagggatcagccaggcatgggggtccagcggatccgagcggggccacagagctctggaggacttttctgcacaatgaatttctgcttaaaaacagagatcaagaggaagctctatcctgcagctccggaaatgggtggctgcgtgcttggggtctccgccacgcgggaggacagcccagaggcaccctggtctcaggcagctggttcctaggctgtgtcctccccactggccgggcaccggctggaacggcacgaggaccagcctcactgttctcagaggggtctcgggccactgggtgtggtggtgctggaggagtcctgcccgctgtgggctctggagggcacggcagcagagcccctggcttttctaggcagagcggcacctgccccatagatcgtgccagctttggctgcaggcgctggggcctcaccgtgtttcctgggggggcccggaccccccaaggcctcgatctgaagctctgaggtctcatggatgcctgctcctggtccgataaacgagatggctgtggtggggaggagcctcaggcggcccgggaccctttggcgtccgtcgctgggaggcggagggacccagagccgaggctgtgcccaggactgtcccgggcgccgggcgatgccaacactttgtgctggttcccgccaaggggtcggcctccgggtccctgccgccaagtgcgtggcgtggtctcggcctccaggtcagacattgctgatacgggcctcccccgggaaggcagcgggatccgtggccctgtccaggggccgctcccgcctgacgtagcgcggcttccgtactgaggactgtggcggggggatcattgcagcggcttcgccaggctgcagggccggagctttgtttcttctgtagcaggccctggggagtttactggagcgcttgaggtagaagaacccagctacggagaggatgaggccggagctaatgaagaacgtgcccaggaagagggaggcggccacgcgcggagccccaggatgtggccgcccgggggtccctgagcttctgttcatggggaatggcgcacccgggccagcaaagcttctacactcggagccgttgtaggctgggagggttccgttcccacagcggacgcagctggcgctcccgtccgcgttccagcgcctgtaacagcctggaccacacagacttgcgcctgggcagctggcgttgacgcccaccacatccacacagcactcgggcagctgggccgtgttctccatggacttgctggcgactcccacgagaaggccagccaggagggcgaggtgccgcagcgccatgccaggagcagatgcgcagagcctgcccctccaggatggggactaccgacatcagccctttgcccgcctgggtgttcaggggttagctctgggagctcatgggctcagctgagccctgcagaccccggcccagtccccggcgccctccggtttctctttcgtac

SEQ ID NO: 439132 - DNA, 1598 bp, Homo Sapiens
  misc_feature (354)..(354): n is a, c, g, or t
  misc_feature (980)..(980): n is a, c, g, or t
ccattggttcctcttcaaaacaaggagtccccggcgagaacaaaaaaatccaaggggaggaacccagggggttccagttccagggtggggtccccaaggagaagaaatgttcaaggaactggtggtgttccagcaacattggggacacagcctcaaggccagctccctccaggggcctggatggcccacagttagaggggaaggtcctaactgaccgttcccacaacaagctgctcgtacagggagggccccgtaggcttgacgggatgagtaagcccaggcttctgacgagaaaagctttgaagcagaccggcgccacggaggcagggggcgagcactggccttcttgtcccncctcccactgactggagcaggtgaacatcctggagctgcagacacactccaggtcgcatcacccgcctaaggccacggaactgctggtaggcaaggcagagccccagctgcccatccagctcatagaggccagcgggctcattcaacacgccagtgactgctcccgaataggataggagtctagaataccggacaagactttctggatccttcttgtcctccgagttgctgggcatggggagtggcttggggtcagcctctaagaggggtccttccagctccagttccagctcctgcacacattctggtttcagcagcaacagacgggaggactgactggtcatccaaacatgctggcgctgaccacggatcttggacactcgcagttctgtcagcacataggctgtaccaggccgaagggctctgtgccacaccagctgggcagggacctgcacgatgatggacacgtgggtgacagctgggtgtgatctaccaagagacaggatgaagtaagctttctgtttacttttcaccagagcactcaatcgaactagactcccagccaggtttcgctgcacacctctgagcttgtttctgagcctgagcaggcaggaagcactctctgngtagaggacagggataggcgtgacggggccaggactgatggtcaaaggaaacactggcacaggggcatcccacagctccaagtgcccttcccctgaggaattccacctggcaggagggaggtaactccaacgggggaacagaaaaagatggcccgaccaagtaaggtccaggtctatgagctgcacagctcaggacgccagtgttatctctcacatagaggcttccgttcctgcactcttgttccaagtctgccgataggtctgttagtgtccctaaaagtaacagctgctctcggggcagggggttcccatttggtccagcctcttgggcccaggcctggtatgcactactgctccacgacaggtggctgcagcatgggagacgctggtgagtcttgaggtcctgtactgagacgaagctatagctgaggggcagtgtagaaccttggttccttccctgggacaaccagacagtcttcacactatcgagttaccaatggagtcaactgtacattaggctccttgacagctgtacacagggtctatttggatgaagacctgagcatcctcaagccaggcttgttcggaggaagggacctgggcccggccagccgccat

SEQ ID NO: 439133 - DNA, 1458 bp, Homo Sapiens
  misc_feature (47)..(47): n is a, c, g, or t
  misc_feature (50)..(50): n is a, c, g, or t
  misc_feature (55)..(71): n is a, c, g, or t
  misc_feature (178)..(178): n is a, c, g, or t
  misc_feature (208)..(460): n is a, c, g, or t
ttcctgaggattttgtttctccatatcaaaccctttcaccatggccngcntgttnnnnnnnnnnnnnnnnnagggcagttctcttctctgcgaggcattaaactttaaaacatttgaatcattggaccataatgcttcaccctaacgatatttatataaaaggaagagaaagacattntcttttttttgagacggagtttcactcgtnnnnnnnnnnnnnnnnnnnnnnnnnnnnnnnnnnnnnnnnnnnnnnnnnnnnnnnnnnnnnnnnnnnnnnnnnnnnnnnnnnnnnnnnnnnnnnnnnnnnnnnnnnnnnnnnnnnnnnnnnnnnnnnnnnnnnnnnnnnnnnnnnnnnnnnnnnnnnnnnnnnnnnnnnnnnnnnnnnnnnnnnnnnnnnnnnnnnnnnnnnnnnnnnnnnnnnnnnnnnnnnnnnnnnnnnnnnnnnnnnnnnnnnnnnnnngaccacgcctggctgagaaagccattttcaatacagagtgtaaaattagatagcctctattaattaattagattttggaaagaaatgcagctttttagttagcattgaggcaaaacagggaacctgcttctttccaattgcacttgggtctttgcaaaagtccactcggcgctgagaaactttcctgttcaccagtgtgaggagttctgtgaactctaaggaggagccatattttcccaacatctcacacaaatcttgaatgtaccatgagccgttcacagtttcccggtgagaataatatccttctgcaacagagtaacacatgaggaagtcagctccagcaggcagcgtgtaaacggaggctgcatccacctcagttatgttggtgtccaacttctctgtctgattatctactacatccaaaggaatgactggcacatcgtgctggtttccccgacatgcctgaatgataaatatcttgggttttccaaccaggctgtgacacttgtctcctttgaacaagccagttaatgtctgaatttcgattttagcatcatatgcataaatgtgattgccttcgccatggctcaggaagacacacacaaagcaatcggcatctgcgtggctaacagttgacacctcatgaattttgagcagtagttcttctgctttaagatcattaaagcatttcacttcaaatcctagatctgaaaacctgcgggtaagattgtctctatctgcgcaggtgccccgcctttctggcagtgttaagtgccaaaagaacctctcatgattgaagattaaagcaattcctctcctcctgtggtccattttgtacttttctgccggatcaaacatttctcttttatagaaggcatctgtttctgtcatgttttcttccccacctgccgggtgccccctgcggagccccgaggccgagctcattgcagccaaacgcgcagccagacaccttgccctcctcttcctgaagccacccc

SEQ ID NO: 439134 - DNA, 1533 bp, Homo Sapiens
  misc_feature (236)..(266): n is a, c, g, or t
tgtctgaggcagccgccctcgctgcatgtgcaagttacttggtcttatcgtatgcttctggtccaggctaataatagttatcaccttaatgcgtttaattttggttcttctagttttaacgggagaaattaactccccggggccgccgggttgactgcgctgcctgggccggaggtcttctccggccagggagcgctgtgggaaggggctcgagcggccagggccaggcgaggccnnnnnnnnnnnnnnnnnnnnnnnnnnnnnnnctactcttgggagcgcccctgtccggctggctgcgcgccggttttcaatagcatctttcggacttgtcttcgcggccaccagtccccgagctcggacgctgacctgggctcctgcaagcctctccctaagtcttctccaaacgaccacctcacggattccttatggatcgcagctccaaagaggaggcaggtgaagctttaggaccagcttctctgctggaagctcttgattatgatagttcagatgacagtgatttctacagttggagatgcctcaggactcgctgattcttgagaagagtcaaaactggagctctcaaaaactggcccatattctgatttgctgtgtttgtctgggagatactagtgagtgacgctgactgaaataaattcagatggtgacaattgtggcattacaggtccatgaaggttgttatggagttgatggagagagtgactctattatgagttcagcttctgaaaactccactgaaccttggttttgtgatgcctgtaaatgtggtgtttctcctagctgtgaactgtgtcctaatcaggatggaattttcaaggagacagatgctggaagatgggttcatattgtttgtgccctgtatgttcctggagtagcctttggagatattgacaaattacgaccagtaacactaacggaaatgaactattccaaatatggtgccaaggagtgtagcttttgtgaagaccctcgctttgctagaactggggtttgcattagctgtgatgcagggatgtgcagagcctatttccatgtgacctgtgctcaaaaggaaggtctgctttcagaggcagcggcggaagaggatatagcagatccattctttgcttattgtaagcaacatgcagataggttagacagaaagtggaagagaaaaaactacttggctctacagtcctattgttaaatgtctttgcaagagagagagaagcaactatcaccagaagcacaggcaaggatcaatgcccggcttcagcagtatcgtgccaaagcagaactagctcgatctaccagaccccagcccctggttccaagggaaaaattgcccagaccactcaccagcagtgcttcagcttttcgtaaactatgccggaagcagaacttatgggggatcagtacaggatttctttccaggggacaaattccggatactagttcctagtgggggctgggaaggaggaaaacattagccaacccagctcttcactgggaaatttttgggaaatttatttt

SEQ ID NO: 439135 - DNA, 667 bp, Homo Sapiens
  misc_feature (51)..(84): n is a, c, g, or t
  misc_feature (203)..(216): n is a, c, g, or t
  misc_feature (220)..(220): n is a, c, g, or t
  misc_feature (229)..(229): n is a, c, g, or t
  misc_feature (482)..(482): n is a, c, g, or t
gcgctgtgcaatttctggtctttcgttgcttctggtccaggctaataaagnnnnnnnnnnnnnnnnnnnnnnnnnnnnnnnnnnaacgggagaaattaactccccggggccgccgggttgactgcgctgcctgggccggaggtcttctccggccagggagcgctgtgggaaggggctcgagcggccagggccaggcgaggccnnnnnnnnnnnnnnttangggaccgcngggctactcttgggagcgcccctgtccggctggctgcgcgccggttttaaatagcatctttcggacttgtcttcgcggccccagtccccgacctcggcgctgcctgggctcctgcagcctctccctaagtcttctccaaacgaccacctcacggattccttatggatcgcagctccaagaggaggcaggtgaagcctttggccgcttctctgctggaagctcttgattatgatagttcagatgacagtgattnttaaagttggagatgcctcagattcttgaagggagtggtaatggaagtgaagatgcttcaagggacagtggagaaggttcctgtagtgattctgaagaaaatattttagaagaagaactgaatgaagatattaaagtaaaagaagaacaacttaaaaattctgcagaggaagaagtactatcatc

SEQ ID NO: 439136 - DNA, 1335 bp, Homo Sapiens
  misc_feature (941)..(941): n is a, c, g, or t
  misc_feature (955)..(955): n is a, c, g, or t
  misc_feature (985)..(985): n is a, c, g, or t
gaagaacgacgaccaaaaggacacagaccaggacggccggggcgatgcgtgcgacgacgacatctgacggcgaccggatccgcaaccaggccgactatctgccctagggtacccaactcagaccagaaggacagtgatggcgatggtataggggatgccttttacaactgtccccagaagagcaacccggatcaggcggatttggaccacgactttgtgggagatgcttgtgacagcgatcaagaccaggatggagacggacatcaggactctcgggacaactgtcccacggtgcctaacagtgcccaggaggactcagaccacgttggccagggtgatgcctgcgacgacgacgacgacaattacggagtccctgacagtcgggacaactgccgcctggtgcctaaccccggccaggaggacgcggacagggacggcgtgggcgacgtgtgccaggacgactttgatgcagacaaggtggtagacaagatcgacgtgtgtccggagaacgctgaagtcacgctcaccgacttcagggccttccagacagtcgtgctggacccggagggtgacgcgcagattgaccccaactgggtggtgctcaaccagggaagggagatcgtgcagacaatgaacagcgacccaggcctggctgtgggttacactgccttaaatggcgtggacttcgagggcacgttccatgtgaacacggtcacggatgacgactatgcgggcttcatctttggctaccaggacagctccagcttctacgtggtcatgtggaagcagatggagcaaacgtattggcaggcgaaaccccttccgtgctgtggccgaagcctggcatccaactccagggctgtgaagtcttccacaggcccccggggaacagctgccggaacgctctgtgggcatacaggagacacagagtcccaggtgcngctgctgtggaagnacccgcgaaacgtgggttggaaggacaagnagtcctatcgttggttcctgcagcaccggccccaagtgggctacatcagggtgcgattctatgagggccctgagctggtggccgacagcaacgtggtcttggacacaaccatgcggggtggccgcctgggggtcttctgcttctcccaggagaacatcatctgggccaacctgcgttaccgctgcaatgacaccatcccagaggactatgagacccatcagctgcggcaagcctagggaccagggtgaggacccgccggatgacagccaccctcaccgcggctggatgggggctctgcacccagccccaaggggtggccgtcctgagggggaagtgagaagggctcagag

SEQ ID NO: 439137 - DNA, 1922 bp, Homo Sapiens
  misc_feature (1612)..(1636): n is a, c, g, or t
ctatgtacaaaaacattttaattgaaatacctgtataaaaaaatatgatctccagacatctcacttttgaactgaaagaacccccatctgcgatgcctgcacacaccgcattcacacaaacacaggtactgaataaattaaacgctcaggctctggccccaccccagctttcagagcccacaagcagactgtacaaagtcaataatttaaaacccaaaccctgggcacagtgcctggaagtgtcagggtcacccactccccttaagttagccactatacatgttcatcttctgacaggcggggccaggacagacgccaggcacaggaatcagggcctggggtccctggaccacagccaccccctcccctgcctccccactgtcccctggggcttgggagaggcagactgctcagaggaaataacctcaacaaataaattaaacaataaatagccccggtgggccgagggcacctccagggggtcacaccataaataacagagttggcggcgggtacggctcgcgtgggcgggcgggcgcggaggccaggacttgcattgtgtgtgcaggacgtgcccagacgcacaccgcaggactgagggcgggaggtgggcttgggaccctgcgccggcggaaagagctccgggtgggcaggcagatgggaaggccgcctccggacacagcagcacagaggggcgtctggggttcaagtatccacccagggcaggcgggacctcgaccggagcgtctttggacagacagagcttgagaaaaccaagtcccgcgggaccagcgttcaaaaggcactcaaagcgaaggtcaccaggggtcagaggtcactgcttccgcaggaggagacggcccacgcaggaaaaagtcagggtctgggggcgtcccaggtctggccaaggcaggtggtcccctagctcccagtcaggtgcagctcctcacaagctctcgctgctggacgtggtgctggccacgtcatcagggtcgagggtgcacagccgcaggtcacagctctccggggcgcccccgtcagcccccagcatccagggatgggccgcaatctgatccagcgacggccgctctgagggccgcagggacaggcaccaccggatcagctgctggcactctggagagaccctcctccggaagagcaggcggcctcggaggatctcctcgtcctgctcgaaggggatgtccccacacaccatatcgtagagaagcacgcccagcgaccacacggtggccgagcgcccgtggtagcggtggtagcggatccactccggggggctgtacactcgggtgccgtcgaagtcggtgtagaccgtgtccttgagcagcgcacccgaaccgaagtcgatgagcttgagctctccggagcgcaggtccacaagcagattttcgtccttaatgtcgcggtgcacgaccccgcagctgtggcagtggcgcacggcggccagcacctgcgcgaagaagcggcgcgccagcggctcgtccagggcgccgcgctccgtgataaagtcgaagaggtcctgcgccggctcgggccgctccagcaccagcaggaagccgtcgggccgctcgaaccagtccagcaggcggatgannnnnnnnnnnnnnnnnnnnnnnnncaccttgcgcagcagcaccacctccaggggcacggtcgcgccgcccaggctgccccactcggtcacccgctccttcaccacgtgcttcacagccaccgggagcccgtcggcgatgcggctacccgcgtagaccgtgccgaagccgccgctacccagcacggcgcccacctggtacgccttctcgaagctctccttgtccgccttggctgcagggaggcgcgggcggggttggtgcggcccggggcgcccccctcgtgccgaattcgccacccaggcctcgctcctt

SEQ ID NO: 439138 - DNA, 1549 bp, Homo Sapiens
ggaggttaacgaccccgggcccccgggacggctcaacccgcggaccctccctttccaatagacatatcaaagtgcgacggtttggcgcaatcgagtgattaacccctactttccgttaaggtgttaatcattaaaaagaacagtcttgggaaaggggttagggtcggcttaacagttgaggggctatcctagcaaacgggatctcatagaggggttagagtaggtgccctgcttcactgtgagggagtcgcggtccggggcgcatacgggtgccgggactgcgcgccaggtgttcctctctaaactactttcacctagcataacgtctttcatggaggacgcggttttacacttggtctggtcagtgagatcatggcacctgcatttctcggtgttgattacgccttctcacttcgttacatatactggatactttttcacagctcttaccctctgtcccacaggtcgtttcctcactccttccgcgtataggttctcctagcccactccgtcccctccacatgctagaatatgagtgttctgtgacgaagtgcgctcatcgtacgatttatgaaactgtccgatacgctcgcgtgagagaatagcaggtgcggggtggctgcccgggctccagccgccgccgcggcagccacgtagacgaataatctctgagtgaagtcgcttaccggatacggccgcaccggcctggattgagacatcaccgccgcgcgaggatcaggtccccacccgccggcgggcgtgttaaaatcggtggcgcgtcgcagcgaataccaacacggcgaaggtttgttcttgattcccaacctcgcacatttcgcgcaacctctccttgggcccaagcgttccgtcacaacggggacagagggcgccagacctagggggggtgcagcggggggctcagaccgcggactcagcgtcgcgccccaccgccccaccggctcttccccgagtttcagcggcctggtttcgtctgcgcggggggggagtgtgcatctgtgcccgccccgcgccggcaacggaggcgagcgcgcccaccgcggcagacgggcaggcctgcggggccgtcatagaacgacgtcgtaggcttcgcgtgccgagacgcccgggctgggctctcccgacggcgatgggtggccgccaacaaaaaccatgaatccgtcgggccggtggtgccagtccagcaggcggatgacgccgcgcgcgccgcccgccgcgcccaccttgcgcagcagcaccacctccaggggcacggtcgcgccgcccaggctgccccactcggtcacccgctccttcaccacgtgcttcacagccaccgggagcccgtcggcgatgcggctacccgcgtagaccgtgccgaagccgccgctacccagcacggcgcccaccgtggtacgccttctcgaagctctccttgtccgccttggctgcagggaggcgcgggcggggttggtgcggcccggggcgcccccctcgtgcggaattcgccacccaggcctcgctgctttgggagtgaaggaatatttgtcga

SEQ ID NO: 439139 - DNA, 1370 bp, Homo Sapiens
  misc_feature (836)..(848): n is a, c, g, or t
tgtttttgcacatatactttaatacttaggcttgggtaaaatcattttaaataacatattaaaatatgtttggggggacaacccagcaattgcacagcccactagaaaattttaacatctaagtaatataactgttttagggtctgaaagttctccttcagttgttccacagcctctttatcaactaggcaaatatatttaagcttttaaatttcataatgttggtattttttaaaaggcacgggaggttcacttaatattaaatatataacattcactttcataaccaaaacctttttggcaagtgactttcacatagattatgagattctctacatgccttaaaataaatctggcagctcttaactcatatctaaattctctggacaactgtcttgctctctgttttggggccaggggcgtagcagtgaaggccctaacaggcttgctgacctaattggacagtttgttaaatagcaggaaatgtaacaaggcttctctctctcttgcatgttaatgtagtgaacagtgctaatagccagagattgtgcaatttagtcacaatatttcaagccaaaattcagtgttcttatattaaaagataccgaagaaagctatccttgttctttgaattataaaagcacagaggttgcaatgatcagaaccaaactggttaaaagccgaaatgcatcctttcagtattgatttgacagatgccaacaagcattcaaaaatttagagttaatttcttggtgacaggtagcataaaattgatcagactggtttcagctgtatcataagcttcacaaattggagatcttgtccttcctggctgnnnnnnnnnnnnncccacaccttaattctagcacctgttgtcagaccactgttcagcaccaaaagaactcctcagcctggagttctttggagttttaagtgattgcctaactcagcaggggacagtggtcttgacttcttggttgacggtttaaaaacataaaagaattttatattttaaaactgacaaactagaaaatgttagaaactctatctgaaggcagaaagtataaagttggtgggtacctgataaaacatgatgtatgtaaatacagttcaaaacaattgaaaagtgtaaatatttgtgaatgattgttcctgcagagctctggctattggtgaaaacaccttttaatggcaccttggaactggactgccaaaagatgaatgctgacgtgttctggtgcttaacaggaaatgagaatgtgtgccttaatgatgaataaggttattgttttaggacactgttgtctgaaatcgtttgattgcctgaaaactgatttagctgtggtatttatttgttatttgctttgttt

SEQ ID NO: 439140 - DNA, 1380 bp, Homo Sapiens
  misc_feature (44)..(45): n is a, c, g, or t
  misc_feature (159)..(159): n is a, c, g, or t
  misc_feature (221)..(221): n is a, c, g, or t
  misc_feature (227)..(227): n is a, c, g, or t
  misc_feature (305)..(305): n is a, c, g, or t
  misc_feature (316)..(316): n is a, c, g, or t
  misc_feature (321)..(321): n is a, c, g, or t
  misc_feature (325)..(325): n is a, c, g, or t
  misc_feature (351)..(352): n is a, c, g, or t
  misc_feature (401)..(401): n is a, c, g, or t
  misc_feature (665)..(725): n is a, c, g, or t
  misc_feature (1125)..(1232): n is a, c, g, or t
  misc_feature (1258)..(1274): n is a, c, g, or t
  misc_feature (1276)..(1309): n is a, c, g, or t
  misc_feature (1311)..(1321): n is a, c, g, or t
  misc_feature (1353)..(1353): n is a, c, g, or t
agataatcaaccatctgagccaaaaacatttccccacacgctgnnttggcaaaggagggtgatggagagggaggtgggaggggccaactatctttccccggtctaagtcacaaagcaaagcaatggggataaagcacaggtcaaagcccctgctatgtnaagaactgacgagggaggggtgattaaaggaggctgagtgcctgtgggcatggaggcctgtntccgtnacaagggacaaaggacagggagccaggaatgttcctaaaggcctcttaatccttcacctggtgacccaggtggccagntctcccctctnctctngggnaggaaatcccaaacccagctgctgtnngtggggtcagtgcatagagcattccagctctgcagacagtgttgtgggngccgccgcggaccacctggctccagtgggacagccttttcctgctgcagggacagcgtccgtacctgcccccacccaggagatggccagaggggcagagtcctgctagacccagggggtcctggagggaaggggacagcctcctgcatgctcactgtctgccccttcctcctccttttccaatcccactgcagcactgggccctcctttcctctgcttgctcccttttctcacatttgctccccaaaaccaaactcctcgccannnnnnnnnnnnnnnnnnnnnnnnnnnnnnnnnnnnnnnnnnnnnnnnnnnnnnnnnnnnnactgccggcccttccctccttcagtctcaccccagggcctttgcacctgcaattgccttcacctgcaaaacccagcctctcatcctcagtctcagctcagttgtcacctcaggaaggccttcctgggccacccgggccaatgttgctctcacccccaccctgcctcactctcacacgatcttgttttcttcacggccccaccactcctggaaaaatctcatatttacattttcccgtttgttgttcagcatctgctcccgcacgcccaccagaatgtaaggtttcttcaaggcagtgtctccagggcctataactcactaagcataagctgataaatgaatgaaagaatgaatgagtggcttattgtctctttatttatttagagacaggggctcacttnnnnnnnnnnnnnnnnnnnnnnnnnnnnnnnnnnnnnnnnnnnnnnnnnnnnnnnnnnnnnnnnnnnnnnnnnnnnnnnnnnnnnnnnnnnnnnnnnnnnnnnnnnnngcatgcaccaacatgcccagctaagnnnnnnnnnnnnnnnnnannnnnnnnnnnnnnnnnnnnnnnnnnnnnnnnnnannnnnnnnnnnagttcccacgtgcattcctttgctttccgttnttactcacgcctccatctctctaacct

SEQ ID NO: 439141 - DNA, 1656 bp, Homo Sapiens
  misc_feature (1208)..(1208): n is a, c, g, or t
  misc_feature (1213)..(1213): n is a, c, g, or t
  misc_feature (1360)..(1362): n is a, c, g, or t
  misc_feature (1389)..(1389): n is a, c, g, or t
  misc_feature (1525)..(1525): n is a, c, g, or t
  misc_feature (1624)..(1624): n is a, c, g, or t
  misc_feature (1651)..(1651): n is a, c, g, or t
tttgttggctgcagtaagagctcagtctcttcaccaggggctcccagtccttccatctgggaggccaaggcggcttcgcgttctgagaatagacagaacctctgttactctgtgaccggcaggcaccgggagatccgtagctcagacgccaggacatcccggaagctgggaaatgatatcttttctcatgatactcaaggcctcttaagaaagaagcttatagaagcatcattccaaaaagtgatattggatggatatgggagctgtggccctcagaatttaaacttaaggaaagagtgggaaagtgagggtctcctttacagaaaggggcttggataaggaggaaagaccatcagaagaaaagataagacactctcttctcattccagtaagagccacatgcaaggcaagaatcagagtccagctcagatgggggaactctaggaagagagaaatccattccatggacagctgccaagatagagcaggacagcatcaaggacatgagccaaaagtgcaaaaggactgcttgactttggaaaagaaaccaaaggcctctgacactgtacacatcagtgaaatgaggagacccatgatgcctgctgtgggggacccccagaggcccacaccgggcacagcgagcggcccagatctcagtctctaggagaccacccactaccacttcagaaaagcctggtgacctctctgcacactccatctgaagccatttatcacaacacagcccaggtgtgggaacagtaggcctattctctgctgacctgggagcagctgtctgagctcacctggctccaggggcctctgtgctgtggtacaaacctgtgccatggccacccaggtggcctatgtctttcgcactgagggctggctcatcccagccatactccctggtccctagggtggagaagctcagaactcctcctaggaagaaaatggatccaccctttccctggagaggagataaaggagcctgttggtggatcaaatgaggctttagctggggtcgcccaggccctattcaacagaggacacagctgtgtgagtgagaacaaagacctgctacttctcaggcaattttagacacactgtgttaatacatgacacaactgggggcactcttgggaaaggagtttgaacaatatcctcaaagtggaaactgtgtttcgtttaggtctaaaaccactcacaanttttntatttcatgttagacatttgatgtttttggatgttttatgacagtcacgcatttctttgtaatcagaaaatattagggtataatcattcatatgtgtttgtgtattgaaaagtacagcaaaatgaagatatatgtagatcctccccnnntaagtcaaaaagactgtagctcttttntctcccaccctgagtcaataaaggactgatatctactaacctttaatagcattctctatggagaaatgttggtattttttcaatttgaggaaatgataaaatcaccatgctatcgtttcattttctttgttctaanactttcagaatgtattaagtgcttgttgatcatatttttatttattcttcaacctggattatattttttgcctaattttaatcttccattttacagatntcaattgagcttattttttaaaacagnttgat

SEQ ID NO: 439142 - DNA, 883 bp, Homo Sapiens
  misc_feature (103)..(300): n is a, c, g, or t
gaaaaggaagtcttcccttctaatggccacaggctggaaggagcaattgggcacgtatcttgacctcacctgcaaggtccggtcttcccagggacaaacccgnnnnnnnnnnnnnnnnnnnnnnnnnnnnnnnnnnnnnnnnnnnnnnnnnnnnnnnnnnnnnnnnnnnnnnnnnnnnnnnnnnnnnnnnnnnnnnnnnnnnnnnnnnnnnnnnnnnnnnnnnnnnnnnnnnnnnnnnnnnnnnnnnnnnnnnnnnnnnnnnnnnnnnnnnnnnnnnnnnnnnnnnnnnnnnnnnnnnnnctctccttgccccactttaggatccctcccccctggacaactgtatacccaagacagtccccagggcctcgcctgtctcccccagcccccgctaagcagtccagactccaaccccaactgctggggtccatcatcccctataccaggggctatcccctcaacttggagggctggccaaagcctgtgcagcctcaggctggactcagagaagcctccccagctcccgcagctatgctgtggcctgaggctgtgctggacctggcttcatttctgctccaggatggcaggctgtgtcttcttcatggctgcatgaccagcctggggtgggtgtgcccggggaaagtaggtgtacactgggagccgtgccatgtttcaggccctgtcctggctctgcctcgggtgcgggaccttggtcctccacactggctgggtggggctggatgggttgagattcacatgtgctccttacgaccacgggtccctgggtgcccgcagcagggcctccacccttcgctgtgtgcatattcgtgtgcttatgagtttggctttgttttattaaaggtttttgctgctagaaaaaaaa

SEQ ID NO: 439143 - DNA, 1383 bp, Homo Sapiens
  misc_feature (404)..(415): n is a, c, g, or t
aactattaacctgtttttaatagatggacttcttgcacatccattatttgttacgtttctgtggttgtgttttttctattatttgcaaaagaaaaaataaagcgtgtgtgtcatctttttataacagtctactacagaataaggtacaaaagaacacttctggaaacagcagaagccaggtctgcaccactgaatttctcatccagtggtaaccattatatcaacagctggaaattaagaacaataatatacagtttggaggacatagtacagaactatagtttttttctgtatttggtaccaatatactaaatatataacaaaggtgcacttgttctaaaaataaaacaaacgttctagttggttagatactgcactttcagtactgcacatcacctaatacnnnnnnnnnnnnacaaaaaaggtaacttatgcaatgtttaataataagaaaaccaatagtacacgctaactcgattgtagaaaaagaagaaagaacccaaccaaaagccagaatagtcactttccaaaacagcccctcctctgccttcacaactagaggaagtaatcagaacggtgaggcgacttcagcaccagacctggctggacagctcccagatcctttgtaaatcctgaaaatgtcacaagtcaaaggtgtacgggtgggggcggggcagggaatgaaagcgttagctttttaaaaaaaactcatttaaagattttaacgtacttatgctcggccagcgagggtcattttaaaaagtaaattaaatgctctgtcctggaaaatgtaatggttaaccaaagggtgagaaatgggcggactggcgaggggtacctgtcataaacactttccggggactattctctatggcctcttgcagtcctggtgcttaatgtagacattttctttataatatactattgcctgagcccggctgagggtgggaatggggaggaaagggaagctaaaggaaaagtgaaagcttaggggtcagaggggaaggaaggaaactaaaccttaacttgacagctatgtacattaccgggccccctcccctccctttgctccgggaatcaatgccttttatatatttggtagcttgtgcggtttctcctcctaattgaggggagcgcggggtggaatgggaagatgcatcctccattgacagttagaaattatgtgatttgtcatgcgcttggattgtgttattagtattataataattactataaatattaataaagtattattatcagcgttatttcttcttccgagactttcctcgcccaatatttacaaataccgcacagtgcctcggcggaggagaaacaagagtaaggggagggcaggtaaggaaaccaggaagaggaaagagggcc

SEQ ID NO: 439144 - DNA, 478 bp, Homo Sapiens
  misc_feature (407)..(407): n is a, c, g, or t
  misc_feature (418)..(430): n is a, c, g, or t
  misc_feature (446)..(446): n is a, c, g, or t
  misc_feature (456)..(456): n is a, c, g, or t
  misc_feature (464)..(464): n is a, c, g, or t
ttttttaaatattaaccatgtttttaatagatggcattcttgcacatccattatttgtttgtttctgtggttgtgttttttctattatttgcaaaagaaaaaataaagcgtgtgtgtcatctttttataacagtctactacagaataaggtacaaaagaacacttctggaaacagcagaagccaggtctgcaccactgaatttctcatccagtggtaaccattatatcaacagctggaaattaagaacaataatatacagtttggaggacatagtacagaactatagtttttttctgtatttgggtaccaatatactaaatatataacaaagggtgcacttgttctaaaaataaaacaaacgttctagttggggttaggtactggcactttccggtactggcacatncacctaatacnnnnnnnnnnnnnacaaaaagggggaacntttggccatngtttaatnattaggggaaaccc

SEQ ID NO: 439145 - DNA, 1606 bp, Homo Sapiens
  misc_feature (230)..(265): n is a, c, g, or t
  misc_feature (272)..(272): n is a, c, g, or t
  misc_feature (631)..(631): n is a, c, g, or t
accttaatatgctccccagatggtcagttccactttggcttatgacatcgcaacccgatgggatccggggacacggggaagaaccacgaactggggacctccaggacggcctgcgcgaccggctccttcgcggctggggcctcctcgacagccgctgggctgacaggacggccctcctcgaactgcccctccgctatgggctgcagtccaggtcggttcttcttccttcnnnnnnnnnnnnnnnnnnnnnnnnnnnnnnnnnnnnccaaagncccagccaactggggggtctcgaggcgggactggcggggctggggcccggcttcgggaccggagttccttgaaggtggtgacttcccgaggaggtgccgaggagccgcccggcgaccccgagggggggagctcggtgtcgggcgagaagactatgagccagtcactgcgatctttcttcgcctgcgggacaaggggcagccctgggccccgcttgcgcttctgggccagctcgtggaaggacgtgattgtccggtggggcaccggctcctcgctgacgtcacttctccatcctccatcaattttccctgcatctgttttcgagccagaatcagttattcttgtgttggttttccaaccnagagtcgaatttttcaggttcacttttccagctagagttaacattcccgttgtttttccaaccagtgttattgttttcagtggttttccattcagctttagttttctctgtgtcaattttccaaattgggttaatcttccaactgggctccgttttcccagcgtcgattttcccatcatccgcctctaagagctcagaggtagggagatccttctccgccctctcgtcctcttcctccaagcctggggaagggacgtcctggcaggtggtcagggcgttgcagttcgagtccaggccaggatcgggtgaagaagaagctccggagcaggaatcaggagagcagcagaagctgtccggtgagcaggtgccagggcctgctgaagccagtggggagccctgctccagggggatgatactgggctgagggtgggcatcctcatcaccagggaggtcccgcaagtagactgagacaggggactcatcggggctaagatctgagcaggagctgagtgaggaggagcagcctgggtctgagggagaggcagccccctcttcctcctgtgacgggtcctgccggttttctaggcccggaccgtgctcctggcagcaccggcagggcacagctgggctgttggaattggcgtccaccagggtgccactgcaggggcccctgctctccttgcccccagtgtctcctggaggagggggtgtgctcaaaggcccctcctgtagctcaggacggcgggacaagtgcaggcccagggagacgtgctggaggtggatgtggttgaggttgcagagtaaagctctctgaggggacagcatgatgctagcggcgatgggatggcttctagagaaccagaagggtagggtctctcacatccacctacctggcaaccacaggtgcagaccagggtcctcctggaaccgctccggccttgggcttgtccgcggatcccgggaattccggaccgg

SEQ ID NO: 439146 - DNA, 1147 bp, Homo Sapiens
  misc_feature (1)..(1): n is a, c, g, or t
  misc_feature (5)..(5): n is a, c, g, or t
  misc_feature (11)..(12): n is a, c, g, or t
  misc_feature (16)..(16): n is a, c, g, or t
  misc_feature (28)..(28): n is a, c, g, or t
  misc_feature (49)..(49): n is a, c, g, or t
  misc_feature (57)..(57): n is a, c, g, or t
  misc_feature (61)..(62): n is a, c, g, or t
  misc_feature (74)..(74): n is a, c, g, or t
  misc_feature (76)..(77): n is a, c, g, or t
  misc_feature (94)..(94): n is a, c, g, or t
  misc_feature (108)..(108): n is a, c, g, or t
  misc_feature (114)..(114): n is a, c, g, or t
  misc_feature (121)..(121): n is a, c, g, or t
  misc_feature (124)..(124): n is a, c, g, or t
  misc_feature (127)..(127): n is a, c, g, or t
  misc_feature (129)..(129): n is a, c, g, or t
  misc_feature (137)..(137): n is a, c, g, or t
ncatngtttcnntcantttatttttttnttcaatttcaaaattggttantttccaantggnnccttttccagcntnnttttccatcatcccctntaagagctcagagntagganatccttnccnccntntcgtcctnttcctccaagcctgggaagggacgtcttggcaggtgttcagggcgttgcagttcgagtccaggccaggatcgggtgaagaagaagctccggagcaggaatcaggagagcagcagaagctgtccggtgagcaggtgccagggcctgctgaagccagtggggagccctgctccagggggatgatactgggctgagggtgggcatcctcatcaccagggaggtcccgcaagtagactgagacaggggactcatcggggctaagatctgagcaggagctgagtgaggaggagcagcctgggtctgagggagaggcagccccctcttcctcctgtgacgggtcctgccggttttctaggcccggaccgtgctcctggcagcaccggcagggcacagctgggctgttggaattggcgtccaccagggtgccactgcaggggcccctgctctccttgcccccagtgtctcctggaggagggggtgtgctcaaaggcccctcctgtagctcaggacggcgggacaagtgcaggcccagggagacgtgctggaggtggatgtggttgaggttgcagagtaaagctctctgaggggacagcatgatgctagcggcgatgggatggcttctagagaaccagaagggtagggtctctcacatccacctacctggcaaccacaggtgcagacctagaagacagaggtggtgaagcccggccagtgaggacaagagctgcggggaaggacaccgaggtgacttgacggcagcagcaggcctgaaggctctggctgctttggaagatatttcaatgagatgcaaatcgcaatcgactgaccattagtttccactgcagtgtttgcagatggagtcgaatgtaaccccccgggaatggagccgggagggtcagagaacgcggtgcgctctggatctccgaaggggggcgggggcctggaagaggtccgggcccagaatggacctccaggtccctgcatcccgggaattccggaccggtaccagcct

SEQ ID NO: 439147 - DNA, 1798 bp, Homo Sapiens
  misc_feature (1777)..(1777): n is a, c, g, or t
aaaagcaggctggtaccggtccggaattcccgggatcctctccaggaacagatgtcctgcgttctaaatgaagagtgcagagcccacagcaaacaactgtccccagcagcccggatccctctgacatcagcccccaggaatgtgctgcagaccctctagcacgttcaggcctcccaggggataccctcccctcccctcctccatcccagtgtttcactggggacaggcctctgagctgcagacggaggcccacggagggtggaagacagcccaccccgctccagacctggagactggaggagtgactggagtgagtgaggcagccttgagtggagtggagcgggaagcctgcctgtgaaagaggcagctaggccaatagctggactgtaggaagaacacggagctggactgattcaaccaagagtcctaccgaccggtgctccccttgccaagagtgaaggcagatgccgtgggattctgccagctgctgagtacatctatttccatgatgctttccggaagtggggaaatagcacagaatgggtttcagatggacgtaagctaaaaacccataagcccccactttgatgttctgggtctcctagaattactgtcagctcagaaccagtggccagtagtccaaaagatctgattatttccttttctccaatgcacgctcatcctggtgaaaggtgtctttggagaactgggagaaagaatacagtatagatttctggcaggctacgagggtgcttccttgagggtaccagcctttccctcattcaagagcttccagtctgataaaactggctcaagtacgggaatggattgaggggtcatgactctactctgcttttatgatttgggatagacttttgtttgcttgacctagaagttttctgcttatacagattaagtacgaacttagtaggcttcctgtctatttcacttcgaggaacatcatgatcaaccagccaacaccacaggtctgcagcagtcagactgatttctgctttgactccactgtccaatagggtcagcacgtccaccttgcctttggtagtactacagccacggggcccccgccaccctggagccaattactccggtcgcattcaggttactggttcagtggctgctgttcctgctgtgaggtctggccttcagagaagagtgatcacagctcctcaaggaggctggagctcctttcatatatttacttctcaccatcaaggtgaaaggcgtgtcttcaggagcttcccagcgtgggtgaggaggtcttaaagggaagccaaacatgccgcagaccacgcgggaattcttggccgtccagtgcttgtcacagatctgcttccaggtcttgccctccttcaccttcacgtagccctccatcactggggtgcgcttgcggtaggttgagaggatggctcgaatccgaatgtcctccacctggatattcaggttctgggaagaaagaggcgtggaaggagagggttaccctactggcctggctgcagagacaccaggccacccagaacttctttagcgactatgggccaggcctgccgcgggcctgcctgtgccctcaggccctgcagtgagctctgggcaaccccgaggggcacacggcccaagctgcagttagaaagcgctatgcatgggagatagtgaggctgaaaggaccctacagggagtggggtgacctgggacagtcagaaaagactcagagaccccatgggcttctcctacatccgaacctaagatcttggagagcaanaggcagcagcctcctcctgca

SEQ ID NO: 439148 - DNA, 1344 bp, Homo Sapiens
acaccaagttcccactttgttcgtcgcagacggtcccccaactcttccattttttgagcaaccttccacggcggccccttcccccgatgtaagcaccgcctcttcagtcgcaccaaggggttgctcttggctttgtacgctttccggaatcttcgagggtccgtcagggctgaagacctgccccagggcacacaactcaccacgggcgggtagcccattctcggcaggtgacattcttcatggggtccagtgacacctgggggccccagcttgcagctggagatgtgggcctctgtgccggtgcagtccatggagaatggccagtagcgctgcttcctccgtgaggcaaacattttgtacactttggtattgtatgtcctctccccagggaagccaaacatgccgcagaccacgcgggaattcttggccgtccagtgcttgtcacagatctgcttccaggtcttgccctccttcacctccacgtagccctccatcactggggtgcgcttgcggtaggttgagaggatggctcgaatccgaatgtcctccacctggatattcaggttctctatctggttgatcaacgaattgtcaaatttgaacccaggaatccttttgtcgctgcacaccacaccggacatcctccgtgtgcttgcagtcagtgacgccccagccattggaggtgcatgctgcaagggtcgcctcgttgccagtacagtggagattgtctaaccagatgggcccttctcccttgccgtaggaggagctggcagtccaggacttggcctccacgtagcccagctcccggcagacgacgtgggcagcgtggatggagaagtcgtcatcgcacacggtgccccactggccatcatagtacacctccacccggccctcgctgtgcttcctcttctgcccagccaggcgcagctgaatcttggccacgttggcgggggcctggggctggtgatactcaggagccggttgctggaagtactcggggtaatggggccagctgtcatactgtgccaggctcaggggggacaggagggccagcatagccaggcagctgcagaggtgggagcacagaggcctctccatccctgtcttcgggctgatgatcccacgaaggggccctgcgcagctgggagggacaggcggggtacagaagcagcaggagctttttggtttcagggatccgcagtggccgggctgggaccgcgctctccacggtggtccccctccgcttccgccgccgctgagcccctttctcgagcagagggggcggctctggtctccgatggctggagaaagcaagcaccaagcgtaggtagccgcgcgcgggag

SEQ ID NO: 439149 - DNA, 2133 bp, Homo Sapiens
  misc_feature (221)..(263): n is a, c, g, or t
  misc_feature (1523)..(1590): n is a, c, g, or t
  misc_feature (1781)..(1781): n is a, c, g, or t
  misc_feature (1856)..(1856): n is a, c, g, or t
tctaagggagatagagattaactgatcataagaataaatgtaaaattatatggccagatggttttcttttttgaaatattaatctttcttctttctctggcatttcctctttctttatagggcagttgggctcaggaaattcactgctgcagggtagggatgactcagtggaagtcagtagtcagttcttgtcttttgagtgtcaaaactgaagctcaaannnnnnnnnnnnnnnnnnnnnnnnnnnnnnnnnnnnnnnnnnnaggatagaaagaaccaggtgaaaacccaaagatttggaaggcgcagggttatttcctgggctgggggaagacagggtgatggtgaggggttgggctgttgctgggtgggctttgcagatgggccatgtacctgcccggatccttctctgctcctcatccaaggaggtctggagggcctgggaacagagaagacttgtatcaccatccccagggtaaagctcagggaggtggaagggccccagcattccctgagccagtggagcacagactccatggtgttttggagcagagtcttaaggcagccttgagtcttctggggccagggcagctctgcaacccaccagctgaggctcacccagagtcaccagggagggcaggtcctccacttgcctctgttgctgggtccatgcctggacctacctaccaggtgggctgcacaccttttcttctggggaggaaaatgttcctctgagtttcactttttaaaaaattttgacaaaagcctattggccactctggctcttccagctcagcagcacctggcattgttttctgaccatctgatgtgccatgtgctgccacccactcctcttagctgcccatgcttgccctgtgaaaaaggcgcctcagtgcggaggctgaaggtcaagtatggggagggggaatgaaagaacccaggctcgaccctcagccacaaggtctcccacggtccctggaaccactgcggggctgggccactgttgggggtctgcattccagatgcagacagcactggagtgggagtcagagcatggataagcctggctatgcccctgaactggccatgtgacctgagacaagtctcactatctccaagcctgttacttcattgataaaacagggacaacatcagtgtggtcaatgagataaaggatttgaaagatcaagtcttgttgtcataataaaagtagatttactgagcaccatgtcctgagccaggcactgtgtcaagaggtggctcaggtgaatctcgttgattcttccccacacgcctgtgatgtgggatgcggacattattgttaccccattacatagaaggggaaactgaggcacagagagctcaaggaagctgctgaagatcatatagttagtatttcgcaagctggtattcaaagccaggctggcagatcccacaccgagaccccttctatatcatgcagcacttctggagattccctggtaggatggggcagaaagggactctgaggccatctcatccannnnnnnnnnnnnnnnnnnnnnnnnnnnnnnnnnnnnnnnnnnnnnnnnnnnnnnnnnnnnnnnnnnnctagacaccacattgatatatgcatgaataaaatgtgaaacactacatgttccttttggacaaacgcatgtgaatccacaaaaaggactttctgaggatgtccaaacttgcccacatgggatgctctacttttgaaaagtgcaggtcttgggcaaggctgtgatgaggagaggggaatgtgcgggggaccnttgaggaccactaagcactgctcagagcagaaggaacaaaacaggaccgctgcctccttcaccagcctggatttnactcccagctttgtccagagagggaattggtcctgaagaaacagtcagaggtgagcactgagatgtatgatgcagggtgctcactgtaacactgtttccaagaatgaaacatccgaaggaacctaaatgtccaacaacaggggactggttaaaaatgccattgtagttttgtcgggttctagaatataagacaaccgttaagaatagtgttatagaataagtgtctaaaggcatatggaatgtgttcccggtgtattgccttttcacactctaataa

SEQ ID NO: 439150 - DNA, 1526 bp, Homo Sapiens
  misc_feature (191)..(192): n is a, c, g, or t
  misc_feature (866)..(866): n is a, c, g, or t
  misc_feature (948)..(948): n is a, c, g, or t
  misc_feature (1066)..(1066): n is a, c, g, or t
  misc_feature (1324)..(1324): n is a, c, g, or t
  misc_feature (1456)..(1456): n is a, c, g, or t
  misc_feature (1466)..(1466): n is a, c, g, or t
agtgttcttttttctttatttaagtttacgaaatacatgcttatagaaaattaaaacattatagaaatatgtaaagccacccatgaaagttcttccataattctgcttcctaacaaagccactgttagtaatgtggtgttacttatattttagagcatcaagttgtccacaaaaatgcttgcacaactttnntttttacccaagtttagaaatcttgccctaataatccagacattcctcactctcttaacgaatacttagaaacaaattgcataaaggtaccatctattaaaccagtcccttactgacagggcatttgggctagttttaagtattaaagaacaaaggtgcaatgactttgcttgtgtacacttgtcagatcattcccattaggcagtttcctaggaatgaacttagtaggccaaaaggttcaaagtttcaataaatcccagaaaactacattcctaaaggctgtgacaattatactcccacctatggcatacaagatgggtaatgtaattggaagtgcttgttcaaaatcatggtgcaattttttaatttggaaaatttaaaaaattgactgttcttataactgtgttttctaattatagaaggtgaagtctgacaaatcttgattaatggggaatcaggatcccagggcaggatttttaaaacttgtatttaccaaaaagaggcatcagtattagaaactttaagacttctctttaaaatctccgcaagattgcagcccttgctacagctttaaatagctgcactggtatctccagttattttccccaaagtttcaataccagtattgggtatccctactagttgaggaataaattccatacttatatgagctnttccccagaacaagccagctatagtccccattattcgacagtagcagtacattctttgtcccagaacacaccgtacactttnttatgcatggtttcatacacttaatgcctcatctcttttacttatttgtcttccttcacttcaaggtaatctcccatgccacttactctatgaagtcttccacaatccttcctgaganaaaataaatggtcttatcccttctgttcccccagcatttcacctgcacctctgttacagaatttctatactaagctaccaaactggaagtcttagaggatagacacatcttacttgtctatttcctgaacagtatctagtgcagaactttgtagaacatacactcaaaaactgtttttggaataaacatacataaattaagacttcaaatcttttaatctcaaattattagtcacagatgttattttttaaaggactnaaaaaaaactactgctccttcaaatgtcctaattatcggtttcatacattttttttaaaaaagggggttttctaataagactgtcaaaatattacatctagaatagttatagttcaataaacctgcatttanttgatatctncatcttcctagtatcacaaattgttttagaaataaaaacacaggggtagggatcccggga

SEQ ID NO: 439151 - DNA, 1616 bp, Homo Sapiens
  misc_feature (375)..(375): n is a, c, g, or t
atggctctctcaatgggggtgctttaggttctccggaaaaagctgaaagaggccaagggctggccctgagaagcaggaatttctttgtccggggatggggccaaagaacataaaccatccacggggccacaggcagcagtgctgagtagagctccccgggggcctggacctgctggccttcaggaagtcacgcaccaccttggtcatcctccgaccgccagacagaggaaagctgctcccgatgaggatgcggccaagcgggtatgtcttgccgttcacggtcactgggggactgacctccaggtttccaaatgagtcaaggctggtgacagactcaaagaggggctcccgggtcacgtagccaaaatctgggcncaggagctccttcacagggaagtcctttaggtttccatctcggggagagtccagcaccacggggaagcctttatggggggcctcgatgtagccaaactcaatttcatcctggatccagcgatcgcctcggtttaggtactggaagcagaccttcagctcacagttggttttctccacaaggttcttcacctctttcaggaacaggtaattatccttcatgcagcacacaaacaccgacacgggaggcaggatgttgggggtcatgatccacggagcaatccggaatatcacggtgtccgtgaagatgggagtcaggggaatgtcttgggccatgtactccagcaggctgacatggatggagaccaggcctgagaagccctcttcggggaaacagaggccttccacgaagaacaggcagctccgcggagccccccgtgtacttgaccacatggtagagcttccgccggcccaggatgtggatatagcgttggccgaagaacgggttctccacgtagaacacgcccactttgtctgagtctgacatggaaatgtacagaactatctcgtatccggcggggaggcggtcggggcctttggtccgcaggatcatctgggacatgtccttaagatcttccttgctgtagaccttctcatcacggcagtcctccttgggcaaccagggtgtctctcggtcacagttcaccagcaggatggccccctggccctcggggccccaggtccaggatgccttctttgggttgttcttctccaccacaccatcccggtctgcgtccacatccagggagatctcaatggctgtgaggaagagccccgcctggtcgatgggaatgctcccttcctcgtcatagtagttgacggtgaccttgtcactgctggcctcggtgctcgcctggctcatggtgacccgcagggtggtgctgggcgagagaagccagcgctgcttgccattggtggccacctcctcagcctccccatcacgcaccacctccacccacacgtgttccgagtgcttcaggctgaaggtttgggccccggctggggccgcgctgtagacatcggtccagaggtaggtgcccagcacgtacaccgcctccacgcggctcccgtactgcagccgcacggtccgctcgcgcagcatcctccccgccgcagtgcccgcgctcgctggtccggggcggccgggagcacctgcagcaggtgcgatccgaagaattcggacc

SEQ ID NO: 439152 - DNA, 843 bp, Homo Sapiens
gctggtacggtccggacgttttggatatcgtcgaccacgcgtcgggccgtggcagtgccctgaggagcccgagcccactcctgggctggtgctgagcaagccggccctggaggaggaggaggcaccccgagccctgtcactgctgagcctgccgcccaagaagcgctcgatcctggggctgtggacagtgcccggcccctcgagttcctgaggactgtgctacgtggggcagcttcctggtacacgagtcgttcctctacaagcgggagaaggctgtcggggacaaggtgtattggacctgccgggaccacgcgctgcacggctgccggagccgggccatcacccagggacagcgggtgactgtgatgcgtgggcactggcaccagaccgatatggagggcctggaagcccggcggcagcaggagaaggccgtggagacgctgcaggctgggcaggacggccctgggagccaagtggacacgctgctccgaggcgtggatagtttgctctaccgcaggggtccgggtcccctgactctcaccaggcctcgggccaagaaagcgagcaaagggtcgaagaccaggagctgcaaaccatagccgaggccccagacgagcaccaggacattggacgcagacccgggaggcctgagttcctgaagacgcccctggggggcagcttcctggtgtacgaagtccttcctcataaccgggggcgacagaagcgggctggggagacaggggtaattggacccatgccgggaacgagggccagaatgggctgcctgcagccgtcgcagtcacccagggaccgagggtgaatgacatgcgtggacctgcagcc

SEQ ID NO: 439153 - DNA, 1480 bp, Homo Sapiens
  misc_feature (42)..(78): n is a, c, g, or t
tatgcctacttgggcgaatggagctcaccgcgggggcggcgnnnnnnnnnnnnnnnnnnnnnnnnnnnnnnnnnnnnnatcaggccaaatcggccgaagctcgaattcgtcgagagcggcggcttccggcgagagggccagagtgagtgtttacaccggcggcagtgcggccgggttccttccgcgggacggggagaaagagagagcgcgaaagagagaggatgtctctctcagactggcacctggcggtgaagctggctgaccagccacttactccaaagtctattcttcggttgccagagacagaactgggagaatactcgctagggggctatagtatttcatttctgaagcagcttattgctggcaaactccaggagtctgttccagaccctgagctgattgatctgatctactgtggtcggaagctaaaagatgaccagacacttgacttctatggcattcaacctgggtccactgtccatgttctgcgaaagtcctggcctgaacctgatcagaaaccggaacctgtggacaaagtggctgccatgagagagttccgggtgttgcacactgccctgcacagcagctcctcttacagggaggcggtctttaagatgctcagcaataaggagtctctggatcagatcattgtggccaccccaggcctcagcagtgaccctattgctcttggggttctccaggacaaggacctcttctctgtcttcgctgatcccaatatgcttgatacgttggtgcctgctcacccagccctcgtcaatgccattgtcctggttctgcactccgtagcaggcagtgccccaatgcctgggactgactcctcttcccggagcatgccctccagctcataccgggatatgccaggtggcttcctgtttgaagggctctcagatgatgaggatgactttcacccaaacaccaggtccacaccctctagcagtactcccagctcccgcccagcctccctggggtacagtggagctgctgggccccggcccatcacccagagtgagctggccaccgccttggccctggccagcactccggagagcagctctcacacaccgactcctggcacccagggtcattcctcagggacctcaccaatgtcctctggtgtccagtcagggacgcccatcaccaatgatctcttcagccaagccctacagcatgcccttcaggcctctgggcagcccagccttcagagccagtggcagccccagctgcagcagctacgtgacatgggcatccaggacgatgagctgagcctgcgggccctgcaggccaccggtggggacatccaagcagccctggagctcatctttgctggaggagccccatgaactccctgcttcccctgaacccccagcaagttgcagaggctactgcccttgggaggcactcatgaaggtgcctccatctctcccttccccaatatacctgatggtcaactctcaaa

SEQ ID NO: 439154 - DNA, 947 bp, Homo Sapiens
cggggccacaagctccactgtacccagggagctgggcggagcctgggagtactgctagaggtgtggacctgtgtttggtgaaagtcatcctcatcatctgagagcccttcagacaggaagccacctggcatatcccggtatgagctggaggccatgctccgggaagaggagtcagtcccaggcattggggcactgcctgctacggagtgcagaaccaggacaatggcattgacgagggctgggtgagcaggcaccaacgtatcaagcatattgggatcagcgaagacagagaagaggtccttgtcctggagaaccccaagagcaatagggtcactgctgaggcctggggtggccacaatgatctgatccagagactccttattgctgagcatcttaaagaccgcctccctgtaagaggagctgctgtgcagggcagtgtgcaacacccggaactctctcatggcagccactttgtccacaggttccggtttctgatcaggttcaggccaggactttcgcagaacatggacagtggacccaggttgaatgccatagaagtcaagtgtctggtcatcttttagcttccgaccacagtagatcagatcaatcagctcagggtctggaacagactcctggagtttgccagcaataagctgcttcagaaatgaaatactatagccccctagcgagtattctcccagttctgtctctggcaaccgaagaatagactttggagtaagtggctggtcagccagcttcaccgccaggtgccagtctgagagagacatcctctctctttcgcgctctctctttctcccgctccagtgggaccagctacttggctgacacacatcgagcccgcgctgcccagggccccagcgccctcacccgtcccgcggaaggaacccggccgatcccaaacactccgggccgtaccagccgctgta

SEQ ID NO: 439155 - DNA, 1067 bp, Homo Sapiens
  misc_feature (97)..(168): n is a, c, g, or t
  misc_feature (1050)..(1050): n is a, c, g, or t
ccccaagagggccctttgtgggaaggtcccccggcaggggaaagggcccctgggggcccacgggaatcccggtggggaagagaaatatgtttctccnnnnnnnnnnnnnnnnnnnnnnnnnnnnnnnnnnnnnnnnnnnnnnnnnnnnnnnnnnnnnnnnnnnnnnnncaaccaagttcccccggtaccccccaggaaggctgggccgggaacttgggaattcctgctagagggggtgggggcccttggtgtttggggtgaaagttcatccttcttcctttggggagccccttcaaccagggaaggccccctggcatatcccgggtatgagctggggggcatgcttcggggaggaggagtcagtccccaggcattgggggcactgcctgttacgggagtgcagaaccaggacaatggcattgacgagggctgggtgagcaggcaccagcgtatcaagcatattgggatcagcgaagacagagaagaggtccttgtcctggagagccccaagagcaatagggtcactgctgaggcctggggtggccacaatgatctgatccagagactccttattgctgagcatcttaaagaccgcctccctgtaagaggagctgctgtgcagggcagtgtgcaacacccggaactctctcatggcagccactttgtccacaggttccggtttctgatcaggttcaggccaggactttcgcagaacatggacagtggacccaggttgaatgccatagaagtcaagtgtctggtcatcttttagcttccgaccacagtagatcagatcaatcagctcagggtctggaacagactcctggagtttgccagcaataagctgcttcagaaatgaaatactatagccccctagcgagtattctcccagttctgtctctggcaaccgaagaatagactttggagtaagtggctggtcagccagcttcaccgccaggtgccagtctgagagagacatcatctctctttcgcgctctctctttctccccgtcccgcggaaggaacccggcgggaatccgccggttaacncgcttattgaaaaattc

SEQ ID NO: 439156 - DNA, 456 bp, Homo Sapiens
  misc_feature (374)..(374): n is a, c, g, or t
cggaacctgtggacaaagtggctgccatgagagagttccgggtgttgcacactgccctgcacagcagctcctcttacagggaggcggtctttaagatgctcagcaataaggagtctctggatcagatcattgtggccaccccaggcctcagcagtgaccctattgctcttgggtttctccaggacaaggacctcttctctgtcttcgctgatcccaatatgcttgatacgttggtgcctgctcacccagccctcgtcaatgccattgtcctgtttctgcactccgtagcagccagtgccccaatgcctgggactgactcctcttcccggagcatgcctccagctcataccggatatgccaggtgcttcctgttnaaaggctctcagatgatgagatgacttcacccatacaccagtcacaccctctacagtctctctcctgcagagatcctgtaga

SEQ ID NO: 439157 - DNA, 482 bp, Homo Sapiens
  misc_feature (20)..(20): n is a, c, g, or t
  misc_feature (468)..(468): n is a, c, g, or t
aactcccttaattgcctganccatccttaaaaagaccgccctcccctgtaaagaggaagctgctgtgccagggcaatgtgcaaacacccggaaactctcctcaatggcaagcccactttgtcccacaggttccggtttctgatcaggttcaggcccaggactttcgcagaacatggacagtggaccccaggttgaatgccatagaagtcaagtgtctggtcatcttttagcttccgaccacagtagatcagatcaatcagctcagggtctggaacagactcctggagtttgccagcaataagctgcttcagaaatgaaatactatagccccctagcgagtattctcccagttctgtctctggcaaccgaagaatagactttggagtaagtgctggtcagccagcttcaccgccaggtgccagtctgagagagacatcctctcatctttcgcgctctctctttctcccntcccgcggaaggaa

SEQ ID NO: 439158 - DNA, 458 bp, Homo Sapiens
  misc_feature (266)..(266): n is a, c, g, or t
  misc_feature (292)..(292): n is a, c, g, or t
  misc_feature (321)..(321): n is a, c, g, or t
  misc_feature (375)..(375): n is a, c, g, or t
  misc_feature (384)..(384): n is a, c, g, or t
  misc_feature (391)..(391): n is a, c, g, or t
  misc_feature (399)..(399): n is a, c, g, or t
  misc_feature (417)..(417): n is a, c, g, or t
  misc_feature (442)..(442): n is a, c, g, or t
gagagttgaccatcaggtatattggggaggggagagatggaggcaccttcatgagtgcctcccaagggcagtagcctctgcaacttgctgggggttcaggggaagcagggagttcatggggctcctccagcaaagatgagctccagggctgcttggatgtccccaccggtggcctgcagggccgacaggcttcagctcatcgtcctgggatgcccatgtcacgtaggctgctgcagctggggctccactggctctgaaggctgggntgcccagaggcctgaagggcatgctntagggtttggctgaagagatcattgggtnatggggcgtccctgactgggacaccagaggacatttgggtgaggtccctgaggnaattgaccntggggtnccaggaantcggttttttgagagttntttttccggaatttttggccaaggncaaaggcggttggcca

SEQ ID NO: 439159 - DNA, 2032 bp, Homo Sapiens
  misc_feature (4)..(4): n is a, c, g, or t
  misc_feature (6)..(6): n is a, c, g, or t
  misc_feature (10)..(10): n is a, c, g, or t
  misc_feature (13)..(13): n is a, c, g, or t
  misc_feature (130)..(227): n is a, c, g, or t
  misc_feature (239)..(522): n is a, c, g, or t
  misc_feature (525)..(540): n is a, c, g, or t
  misc_feature (585)..(586): n is a, c, g, or t
  misc_feature (1051)..(1051): n is a, c, g, or t
atantntatnttnaaaaaatgtcaatgaacaagagggacagaaaacaccagtggttgctagggggcaggagaagagaggaacagaggaacagaggggaatgtcctgggtggcagaactgtcctatcgatnnnnnnnnnnnnnnnnnnnnnnnnnnnnnnnnnnnnnnnnnnnnnnnnnnnnnnnnnnnnnnnnnnnnnnnnnnnnnnnnnnnnnnnnnnnnnnnnnngagataatgaannnnnnnnnnnnnnnnnnnnnnnnnnnnnnnnnnnnnnnnnnnnnnnnnnnnnnnnnnnnnnnnnnnnnnnnnnnnnnnnnnnnnnnnnnnnnnnnnnnnnnnnnnnnnnnnnnnnnnnnnnnnnnnnnnnnnnnnnnnnnnnnnnnnnnnnnnnnnnnnnnnnnnnnnnnnnnnnnnnnnnnnnnnnnnnnnnnnnnnnnnnnnnnnnnnnnnnnnnnnnnnnnnnnnnnnnnnnnnnnnnnnnnnnnnnnnnnnnnnnnnnnnnnnnnnnnnnnnnnnnnnnttnnnnnnnnnnnnnnnngataatgaaatgagaggagccaaacatttaccctaagtggaaaannaaaattgggcttatgataggttttctcttatagacagtaaaaagaagtgccaggaatttaaagcaaagaacagtaagatgagagagatctccaatatacaaaatgtttcaaaatgtttttctagtacaacatgcttatacaagaggtaagacttatttttgtatttgatttgataatttgacttggaatttttctgtgggaataaaagtgttagaatgcttatttttaaatttctcaaaatttgcaggcagtaagcaaggccttaaagccatagagggctctaaaactagttccataaagcattttactgtaaaaatatgtacagatctttaatagaaaagtatatttctttacagtagaaaaatatctgaacagtcaacttttcttaagacacaaattcaaatgtaacatactacctaaactataaatttagctaacactgaatcgagctgtttataagaactngattccacaatatacatatatgaatttacataaccgatatgtagaagttcttcaaaatcgactgtaaattgaaaagttaaaattggccttgcctctgcagtttggagctgcaatggctgccagtatcggctgttttcttggtgcctgagctgcagggtgggcctgtcgaggaggggctgctgtctggtcgctttccctctggctgtctgtggcgtaggtacatgaggtgctcaatctcggcctggaaagaatacctcgaaagaataccacgcactggaactctgtgaagaagtgaagacgctaaaagcgggcagtgctgtgtttacttagagacagtggagtgggtccagggctgtcctcgccaggctggtttttaaagcacttttggtttaggagtcagcttcatcatggtcactttcattatcattgtcattctcctcatcttcttccctcttttcctctttaagcattttcaggtatttactagctaaaatcttctttggtaatatatctgcaagaaactgaaaagtttctgattgctgtgcagtgtttgctaaatcactgtaagtcagtactttcttttcctttccactgccgtgtctgtaggaataggtggctaggcattgaacaaagagctccgtggccttggccgtgagcaccaacgcctcctggttgatgctggacacctcgggggagctcttcatgatgacccggatgcgggatagaggcagcgagatgagccgctgctccccgcccttgtctttacccacgaccacgtccgccatcttcccgcccgtcgcgcgggtgcccgcagccggcgggcccgaccgcgaagtggctgccctgcccggccagctggtgggtacggggagccgcgcccgctgccccgtgggagttgtagtgtgggtaggcgaggccgcgaggccgggagcggcccgtccgggaaactacgagctccgtgaggcctcgcgcccccccgct

SEQ ID NO: 439160 - DNA, 224 bp, Homo Sapiens
acaaggtttttttccatgttgtgtttcagttaggcggattttaaaatattttattttaaaataaatgtcaatgaacaagagggacagaaaacaccagtggttgctagggggcaggagaagagaggaacagaggaacagaggggaatgtcctgggtggcagaactgtcctatcgattggttacaaaaccatgcatttgtcaaaattcacagattagacactaacc

SEQ ID NO: 439161 - DNA, 926 bp, Homo Sapiens
  misc_feature (841)..(877): n is a, c, g, or t
catatagggatctacataaccgatatgtagaagctcttcaaaatcgactgtaaattggaaaagttcaaattggctttgcctctgcagtttggagctgcaatggctgccagtatcgcctgttttcttggtgcctgagctgccgggtgggcctgtcgagggggggctgcttttctggtcgctttccctctggctgtctgtggcgtaggtacatgaggtgctcaatctcggcctggaaagaatacctcgaaagaataccacgcactggaactctgtgaagaagtgaagacgctaaaagcgggcagtgctgtgtttacttagagacagtggagtgggtccagggctgtcctcgccaggctggtttttaaagcacttttggtttaggagtcagcttcatcatggtcactttcattatcattgtcattctcctcatcttcttccctcttttcctctttaagcattttcaggtatttactagctaaaatcttctttggtaatatatctgcaagaaacgtgaaaacgtttctgattgctgtgcagtgtttgctaaatcactgtaagtcagtactttcggttttcctttccactgccgtgtctgtaggaataggtggactaggcattgaacaaagagctaccgtggccttggccgtgagcaccaacgcctcctggttgatgctggacacctcgggggagctcttcatgatgaccctgatgcgggatagaggcagcgagatgagccgctgctccccgcccttgtctttacccacgaccacgtccgccatcttcccgcccgtcgcgccgctccgctctcgacgaattcgagctcggccgatttggcctgatnnnnnnnnnnnnnnnnnnnnnnnnnnnnnnnnnnnnncgccgccaccgcgatgaacgccgggtcccgtatagtgattctatcatca

SEQ ID NO: 439162 - DNA, 1920 bp, Homo Sapiens
  misc_feature (1673)..(1728): n is a, c, g, or t
  misc_feature (1745)..(1824): n is a, c, g, or t
gtcaccagacgcgcatgcaacacctttcttacctccacatagtattgccgggatagatcaatacagcacggatctcccaggtgcccttctggaatgctatcctttgggggcttgtatattgaaattctgcttgcaaaaattctggaccccttacacagagttcgatgagcatgccgattggaatacctggttctagcagagtcaaggcgagcttcaaaagtaatcctcttacttgtcctcattctgctacttctggaaaggtgtctctaaatggttctccagcaagtcgtacacaagcacattgttagactgcttcgcaaagtgcagggcactattctggtgctttgacaaaatattgcagtcagctccacattcaattacgagtcgtacgatgtctgaatttcctcttttacaggccttcatcagtgcagtctcaccattgctttgctggacatttacaaaagctcctgcttccaaaagaatagccactgttgttaaaaagttcttctctgcagcatgaatgagggcggtggtcccgttcttctgccgaccgttcactttcgcgccttttgtgatgaggagtcgcaggaggtcgtcctgccctccggcggcggcaagcatcaccagtgtcattccactggaatcctcttggtccaggttatattcttcatttgaattaagtgcaacttttacagtaatataatccccatttttcacagcatcccttaacacattacttggaattgcatctgttgcagcaaaattctcatctttcccatcaaggtgcttttggaaatcttccaacttcatccattccaactgcaggtccatgcccaaactcagaatctgctgcctgccatctgaattctcatctgcttggcacacgctgtctaaaacctcctgatcaccttctgcagcaatgtatgcccaagtatccgtttcgtctctggtgtttctcctttctttaagtgactgtttgttttcctttggttttggtgatcgtctatggttttaaaatcccagtggtatttcttcccttttccgattattctcagaaaacatcatttttttcttctggagttaatttaaataaatcaaatgcatttctgatttccttaagtgtctttaatccttttggctcttttctgcctttttcttccttgtcagaatcatgccttttctgatatttttctttggattcatttcttttggtttctttgtcctcctcggctgagtccgtggaccagaggcctctctcttccccgctcaacctccggccctttggcgtttgggcagatacaggcatcagcttctctaactctgcagcacttttgcttctgtcttgattcctctgctttttaggcacagttttcttctctaagaaagcgttcttgttctctagcttcctgttctctctagtgtcctcagcctttctcggggtcttctttttcctcctgcctctgacatcggtatcctcctcagcactcatggcactgtctaggggcttctcaaagccatgctccagccccatgtcctgccctgctctctctcttgcacttttagtgttttgtttctcttctctgctgtcggaatgtagcccttcactgtcatcctctggaaagggagaatcattaagtacacttgattcagattccacctgggattcgacaaannnnnnnnnnnnnnnnnnnnnnnnnnnnnnnnnnnnnnnnnnnnnnnnnnnnnnnnaatctcttatttcaccnnnnnnnnnnnnnnnnnnnnnnnnnnnnnnnnnnnnnnnnnnnnnnnnnnnnnnnnnnnnnnnnnnnnnnnnnnnnnnnncttcagaaattcgtttctttgtccttaaatcaaaaactaaactttccaaggagctctccaggtctggtttgacttgtctttagcttcccggccttt

SEQ ID NO: 439163 - DNA, 955 bp, Homo Sapiens
  misc_feature (305)..(330): n is a, c, g, or t
agcacgctttcatttatagggaacagaacgcaggcctccgagtgtccacggagcaatgtgcaaatcgcagtgatgagtagagtaaaacctctacttcgagcacagtatctctggcaaacacaggggactgcagtcgacaatgctgcggagtaccacccgagtacacagtcagacatttgttcggtaaacagtaaatgcgtaagatcaatgaccttgagaggcctgtctgtgctccagacgtgtggttcacgtggagagaatggctgccactcaaagtatcttcacaggaaaacagggcttgaggnnnnnnnnnnnnnnnnnnnnnnnnnnggttcacccaaaaagtcactgtgtacggacttaactttgttcaacatggattttggttttgtggaatctaaatgcatacactcgtttacctcacaacccttggatttgtctgtttttggacatatatatatattttttgtttgtttctttctttcttccataacatcaatgcttggtctgaatattatcatcgttcaagagttgggggaagaacgactttatatgcacagggccgggtggggaatgtttgttttggctgttttgtttcctccattcagatatttcctatcgcagtttcaactgggtgaccttgaaggcgaagcaaaaaggcacaaggggtccccaagggcccttccggaaagagccgctttttacctccttgtcctgggccaaccgagatctctacccagaaataaatgatttttcccgcactccaaagtgggggggtggtcgtaagtcatgtaccatgggcttagaaatctcccatgtttaccctgggtggtttgttccacagggggtaatttttaaataaaacaccattcggccgcctaaagaaaaaatacaataacccctcaaatataactttgtatttcagcatttataagttataatatactgcgggtga

SEQ ID NO: 439164 - DNA, 2099 bp, Homo Sapiens
  misc_feature (601)..(614): n is a, c, g, or t
  misc_feature (1265)..(1265): n is a, c, g, or t
  misc_feature (1288)..(1288): n is a, c, g, or t
  misc_feature (1378)..(1391): n is a, c, g, or t
  misc_feature (1769)..(1781): n is a, c, g, or t
gggagcatttttgggatcaatttttatttgggcttctcacagtggttagagccactctgtcttcagaacaatcacagcacaggaaatgcgtcactgagactgcccagaaaagtctgaccagctgaatcttattgcttaaaatacacatattcacaataactgacaaagggtaacgtgcctcacacaggaatgtgttcgcatttgcaaatcttctgactggctgtagcaccaaaccctccaccgaccccgtctcattcacgtggaaagccagcctcagtcacatctccctggccccctaacgattccttcagctccctattaaatctctctctgagcagggcagcatcctgtagcgggggccaaactgtgacctgggaaccaagcccagctccgcaggttgcatttccgtcttctcgtgcctttaggataggacgctgcagtgagtcccacagttaacacttgcccagttccccactctaactggggaaaggaacttgagaggctcagaactcatccatttgatctgttaactgaaaaaggattcattttggtaaaacttgttcgcctttgagacacttcagtgagttatttgggattcttnnnnnnnnnnnnnnggtggaaggaaaggcatctgaggggctgtgacacactccggctacctctggccacacgccagcttgcttgtgcctgttggactcaccagaggcaggcaggccctgcggctcctctagagcctgccaagcctcctcctggcaattctgggcagggccgatgtctgggccacagctagtccaagcctgtcattgaagacccagtcaagcttctgtctgaaattccaccttcttctgtcccaagtggttgtggacacccccgggcgctggtactgaggaccagcagcagccgagggaggcagacaggctcagagcacgcttccatttatagggaacagaacgcaggcctccgagtgtccacggagcaatgtgcaaatcgcagtgatgagtagagtaaaacctctacttcgagcacagtatctctggcaaacacaggggactgcagtcgacaatgctgcggagtacacccgagtacacagtcagacatttgttcggtaaacagtaaatgcgtaagatcaatgaccttgagaggcctgtctgtgctccagacgtgtggttcacgtggagagaatggctgccactcaaagtatcttcacatgaaaacagggcttgaggcacacacacaacagacagacacacacgggttcacccaanaaggtcatctgtgtactggactntaactttgttcaacatggattttggttttgtggaatcttaatgcagacactcgtttacctcacacccttggatttgtctgtttttggacnnnnnnnnnnnnnntttgtttgtttctttctttcttccataacatcaatgcttcgtctgaatatcatcatcgttcaagagttgggggaagaacgacttcatatgcacagggccgggtggggaaatttgttttggctgtttgctgcctccattcagattttcctatcgcagctcagctggtgacctgaaggcgagcaacaggcacaagggtccccagggccttccggatggccgctttcacctcctgcctgggccaccgagtctctacacaggaaaatgagtcacccgactcaaaaggggtgggggtagaggcagggacaaggcaaggaaaccacagataaccaaggtgtttcttccaagtggtcagtttaaaaccaaccaactgcccacccnnnnnnnnnnnnnccccacaaaaaatatttattcagaatcaaagataaaatactgtgtgagagccaggctacaggggccctttctctggggccatcgcttcctcagtccgctgtctgtttcctcatacggaacagtgagacttgaaggcccgcagggtgtgtgcttgcgatgcaggctgacacgggtcacctgtgaacatagaccaaagggcagagaggcagagagctgcacctctatccactgctgcggcttagggcctcctgctcacagaggttccaagacagccgccaccccagccttcacacgagacatcttctggctcaaaccgct

SEQ ID NO: 439165 - DNA, 540 bp, Homo Sapiens
  misc_feature (424)..(424): n is a, c, g, or t
  misc_feature (436)..(436): n is a, c, g, or t
  misc_feature (494)..(494): n is a, c, g, or t
agcatttttgggatcaatttttatttgggcttctcacagtggttagagccactctgtcttcagaacaatcacagcacaggaaatgcgtcactgagactgcccagaaaagtctgaccagctgaatcttattgcttaaaatacacatattcacaataactgacaaagggtaacgtgcctcacacaggaatgtgttcgcatttgcaaatcttctgactggctgtagcaccaaaccctccaccgaccccgtctcattcacgtgggaaagccagcctcagtcacatctccctgggccccctaaacgattccttcaggctccctatttaaatctctctctgaggcaggggcaggcatcctgtaggcgggggggccaaactgtggaccgggggaaccaaggcccagtttccgcaggtttgcattttccgtntttttcgtggcntttagggttagggacgttggcagttgagttcccacagtttaacatttggcccagtttnccccatttttaattggggggaaaggggattttgaggagggttcagg

SEQ ID NO: 439166 - DNA, 551 bp, Homo Sapiens
  misc_feature (99)..(124): n is a, c, g, or t
  misc_feature (418)..(418): n is a, c, g, or t
  misc_feature (425)..(425): n is a, c, g, or t
  misc_feature (447)..(447): n is a, c, g, or t
  misc_feature (473)..(473): n is a, c, g, or t
  misc_feature (480)..(480): n is a, c, g, or t
  misc_feature (486)..(486): n is a, c, g, or t
  misc_feature (515)..(515): n is a, c, g, or t
ctcgtcagatgaaacgagtgtctgcatttagattccacaaaaccaaaatccatgttgaacaaagttaagtccgtacacagtgactttttgggtgagccnnnnnnnnnnnnnnnnnnnnnnnnnncctcaagccctgttttcctgtgaagatactttgagtggcagccattctctccacgtgaaccacacgtctggagcacagacaggcctctcaaggtcattgatcttacgcatttactgtttaccgaacaaatgtctgactgtgtactcgggtgtactccgcagcattgtcgactgcagtctcctgtgtttgccagagatactgtgctcgaagtaggaggttttactctacttcatcactgcggatttgcacattgctccgtgggacactcgggagggcctgcgttccttgttcccntattaangggaaggcgtgctctggaggcntgtttggcctcctggggttggttgtngggtccnaagtanccagggcccgggggttttccaaaaccttngggggacagaagaaggtgggaattttcagacagaag

SEQ ID NO: 439167 - DNA, 1445 bp, Homo Sapiens
ggggaggtctggcctgcttttcctccctgaactggcccaatgactggctccctcacgctgaccactcctctgggctggcctcctgcactcgcgctaacagtcccaggctccaggacagcctgcgttcctgggctggctgggtgcagctctcttttcaggagagaaagctctcttggaggagctggaaaggtgcccgactccagccatgctggcgctactgtgttcctgcctgctcctggcagccggtgcctcggacgcctggacgggcgaggactcggcggagcccaactctgactcggcggagtggatccgagacatgtacgccaaggtcacggagatctggcaggaggtcatgcagcggcgggacgacgacggcgcgctccacgccgcctgccaggtgcagccgtcggccacgttggacgccgcgcagccccgggtgaccggcgtcgtcctcttccggcagcttgcgccccgcgccaagctcgacgccttcttcgccctggagggcttcccgaccgagccgaacagctccagccgcgccatccacgtgcaccagttcggggacctgagccagggctgcgagtccaccgggccccactacaacccgctggccgtgccgcacccgcagcacccgggcgacttcggcaacttcgcggtccgcgacggcagcctctggaggtaccgcgccggcctggccgcctcgctcgcgggcccgcactccatcgtgggccgggccgtggtcgtccacgctggcgaggacgacctgggccgcggcggcaaccaggccagcgtggagaacgggaacgcgggccggcggctggcctgctgcgtggtgggcgtgtgcgggcccgggctctgggagcgccaggcgcgggagcactcagagcgcaagaagcggcggcgcgagagcgagtgcaaggccgcctgagcgcggcccccacccggcggcggcagggacccccgaggccccctctgcctttgagctttctcttctggtccaacagacaccctccacatctgaggtctcaccttcgcctttgctgaagtctccccgcagccctctccacccagaggtctccctataccgagaccccccatccttccatcctgaggaccgccccaaccctcggagccccccactcagtaggtctgaaggcctccatttgtaccgaaacaccccgctcacgctgacagcctcctaggctccctgaggtacctttccacccagaccctccttccccaccccataagccctgagactcccgcctttgacctgacgttcttcccccttcccgccttcaggttcctcctaggcgctcagaggccgctctggggggttgcctcgagtccccccacccctccccacccaccacgctcccgcggcaagcccgcccgagcaacggaagccaggccaactcgcccccgcgtcatccgctctctcgcat

SEQ ID NO: 439168 - DNA, 1482 bp, Homo Sapiens
  misc_feature (1460)..(1460): n is a, c, g, or t
aattttataaaaacttttatttttccttacaaactggggtagttaggagacctgataatagcttttttattttcttggcaccaaagcaacttacttatgtgttccttcttgcattatctgttccagatcatagtcaagttttccaattcgttttactaagctagcaaaattttttataccaaaaagagtaaaatcaaaacaaatgctcctttgtttatagatgaaaatctggagcaaaataacacaacattaaaaaaacaaaactttgcaaacacatcctaaagctacacacattgaagcgtttacagcaatatgctccctgggttcgttctcccttcccccaatcctctaaactgtgcctttgggtctcagacccttgtcccgggggtccctctgaatccacctttcaagaggatggagctgggccactaggctgaggtctggccctgttctcctcatctgccaaagcctcacagtactgcgctggccagtccttggggtcttgattatggaccttggccacaaacttaagaactttcatcttgctggtttccaggttggttcgcgggccccactggaattcgtagtcgacggggtcggtgtggggtatccgccggtattccaggtaaacgctgtcgcacaaagtcctcagtaatgagtttctttggatctccgaaaattaaatgcttcttggtggggtagaccccctaagcgccgcagaaagtcccaggcttcagtttccttgatggtgttgcccttcataaagatgagccctaagacgatcatcaggaggcccgtagtgggcgtgccttggtcaccccctcatctcggcatcctcctccacaggctccagggtgttgatgaggatgtaagtgttgctctggggttcaagttccaccagcttatacccgaagacgtactggaggcgctcggcggcccgtttgaagaggtcggggaagatgtccttgtagtccccgatgacgtgcttcagtatgtcggcccgctcgatcggaatgttcttctggtctggtaatcagcaagaactgcaccagctcggacactttcagctccagctgcttctggctcctgggccccacggcgggggcggcctgggcccggcgggcgccctgaggcgaggggccctgcgacccctgcgagccgcccggcccgcgggacgtgctcggggcctcctcggcaaagccgtctctgagaacccgggcgtcttccccggcccgcgaagccccggggtttccgctatggctccagtctctgtccctctcggcctggccgccagagcggccccggttcctcggtttttgcaacatgtctccggcggcaggtgccggcgcacactccggtaggcaagcagccgcggcggggattgcgggtcggcgacccgctaacgccgatcccgggaattccggaccggtaccagcgggtgtgggcgaccgggttttcgngtagggtgggtttggggtgagt

SEQ ID NO: 439169 - DNA, 480 bp, Homo Sapiens
  misc_feature (69)..(69): n is a, c, g, or t
  misc_feature (232)..(263): n is a, c, g, or t
  misc_feature (432)..(432): n is a, c, g, or t
  misc_feature (454)..(454): n is a, c, g, or t
ttttttgcttcaaaaatacagtatttattgtaataactacagtagcaagaagaaaaaaacgaaggttanactacgtgtttagcagcagagctgatataattatgaatataaacaattactattgggagaaaatacattacactcattgcttggaaccatcgaataatacttatatatgtacgaaatatagaaaaataaaataggttaacataataaggatataggcaattannnnnnnnnnnnnnnnnnnnnnnnnnnnnnnnccttacaaactggggtagttaggagacctgataatagcttttttattttcttggcaccaaagcaacttacttatgtgttccttcttggcattatctgttccagatcatagtcaagttttccaattccgttttactaaggctagccaaattttttttataccaaaaaggngtaaaatccaaaacaaatggcncccttggtttatagatggaaaatccg

SEQ ID NO: 439170 - DNA, 583 bp, Homo Sapiens
gactctcggtcatgttctcggagtctagcgcatggtagaattcataggctgagcggccaagcagctcctcagggtggtagccaatcagttctgtgattctgtcatcacagtaggtgatcttcatgtccatgctgtggcggctcaggaaggtcttgctatccagggggatgtccatgtgggatgggtgctggattggttcacacatgatgatgaggcaggacagcaggggctccttgtagccacacagactattgtgaggagggcagttgttgtagactttcacctggcccgtgcagtgcaagaccttccaggtggctgacttgaggttgacagtacggcctctgttggtgaccgtgcacttcatcctcatgaagaagtcccgctctgtggacatgtctttgctttttttcccaaaaccagagccatttttgagactcaggttctcacgaatctcctacatggtcgcagggatgagtgaagtcaaagatactatgtcctgttagctccaccatgtgtaagtcccagtgaacttgctgatgttttctgacagaaagatcagtgtcgccatcagtgcactgtggaa

SEQ ID NO: 439171 - DNA, 1796 bp, Homo Sapiens
  misc_feature (1339)..(1353): n is a, c, g, or t
gatcgagctcggtacattaggcgcgttctgcgtggggttcgcccgtgacacaattacaactttgtgctggtgctggcaaagtttgtgattttaagaaattctgctgtgctctccagcactgcgagcttctgccttccctgtagtttcccagatgtgatccaggtagccgagttccgctgcccgtgcttcggtagcttaagtctttgcctcagcttttttccttgcggccgctgaggaggcgataaaattggcgtcacagtctcaagcagcgattgaaggcgtcttttcaactactcgattaaggttgggtatcgtcgtgaggcaaagaaaatggcggaaggaaaagcgagccgcgagagtgaagaggagtctgttagcctgacagtcgaggaaagggaggcgcttggtggcatggacaggtacgcacctccatcacccgcctggttggctggcgatactctccgggaaggcctggacgcagcttgcccacgttgatgacggggtcatcctcagcttggcactcaccaatctgtcgctgtcgctcttggactcgggaaggagcaagtcactggctttctcagaccattaacaagctctgtgtctctctctctacagccgtctcttcgggttcgtgaggcttcatgaagatggcgccagaacgaagaccctactaggcaaggctgttcgctgctacgaatctttaatcttaaaagctgaaggaaaagtggagtctgacttcttttgccaattaggtcacttcaacctcttgttggaagattattcaaaagcattatctgcatatcagagatattacagtttacaggctgactactggaagaatgctgcgtttttatatggccttggtttggtctacttctactacaatgcatttcattgggcaattaaagcatttcaagatgtcctttatgttgaccccagcttttgtcgagccaaggaaattcatttacgacttgggctcatgtttcaaagtgaacacagactacaagtctagtttaaagcattttcagttagccttgattgactgtaatccatgtactttgtccaatgctgaaattcaatttcatattgcccatttgtatgaaacccaggtaagtgttttaacttaagaacaagaatgaaacagtcacctatgctttagatgaaatgaaatgtacttgaaaatatcaggctttaaatgaaataaatatattagacgatttgagttgtgggtattatactcttgcatgtattttgtattctactcctcattaaatgtgtttgaaatttttagtgaacaaattgttaaagacaaatgaaggcatttgagatttgtacttannnnnnnnnnnnnnngcagtttgtgtaactaccttaaactgtgtattttatttcctaaatacaatacttgctatgtatgcagtgctttgacttaatgtaatttgcctctatacctttatttagaagctttcatgtaaccctgcatgtaatgtctacttttcttttaaaattttcatgaatgattgtaataagtcactgttattgaagttttctgtttttctttaagactgaggtatcttttaagcatcataccatttcaaatgatagttaccattagttcaaggctgtttgtttttaaagttatttcagctttttaaaaaaatattttgctttgtatagcagattttattataatatttaaactgtaacatacagatttacagtttgtggtggagttggtagacttaaaaaaatgggtagcatttttcatattatgagtagcgaacatttgaatttaa

SEQ ID NO: 439172 - DNA, 1083 bp, Homo Sapiens
  misc_feature (8)..(8): n is a, c, g, or t
  misc_feature (19)..(19): n is a, c, g, or t
  misc_feature (52)..(52): n is a, c, g, or t
tgacactnacacaaatatnaatacagtgtccccgcccccaatcgacatcatnttcaacttaggaccctggcatctactccttggggtacctgtgactctcttttacacccccaagggtctgcctcagatctacttaaggggcggaataacctcctaggcacctgaattgagggatagcttcaacctgtgcatcatcgtccgaattcccagtcataattacaaggccagtctttagagcatcggttacgaacccttgccacaaaatgcatgactttcagtttgctcgattccacgtgtgctcggggcccccagaagaactcatactccaccggactgctacggggcaccggtttataaatcaggtaccctctgcgcacaaactcttctgtgacgatcttcttcggatctccaaagatgctgtgctgacgtccaggctgcattcctaacttccccagcactttccagaccagagcttccttggcgctgttgcccatgatgaagatgagcgctaatatagacatcaggagacttttcttggtgccctgaaaattgctccggggcactgaaggcttttgtgcttgggcagtgctcgaggcttcttcaggggtggtagaggcctcctctggagtgctcgggtcttcctcggggccgctcaggtcgtcttcgggggtgctcgctaccacagaggcggccataggggtctcggaggcctctgaggcctggattttgcgattgttgcggttctcttctgcggctctcgcattacggcggcgccgactctttcgtccccgaggcatgtctcctgctagaggctcaaagcttacagcagtcctagggaaggatgcttgtagcctcttcaggaagcaacagctttataccgtaagaagctgctgccgctgaagctaccaatgtcaatagagtctttgtagcaataaacaagccgttctcagctacaaagggtagttcccacgccagctgacttgcgcgagcagccgccgccagcacttgccgcagctgcaagcccgcgagaaagctcagcaaatttgccccgcctctcctgccacgcacactcctagcaccaag

SEQ ID NO: 439173 - DNA, 1531 bp, Homo Sapiens
  misc_feature (1451)..(1487): n is a, c, g, or t
  misc_feature (1509)..(1509): n is a, c, g, or t
ttttttactattcgttaggcttttatttttctctatgttctgcagtaactaaggaaaatcatggtaaatgtcaatcttcacacaacagcagacacaaagggtttcagaaacgtcagatatgaagaaatcctccatccttcttcaacattttactgggtatttcaacttcaaaagaacagcttatttctataagtgctgtacaagatcatagattatgatggaacgacttcattttagaacgttagcaaaactgttatactaaatgtcaatgacaggaaacaaagaaaaaaatttgttcaattatatttttaaacatattgttattctcaacaaacggaattttaaaacgaatacaattttccattatcaaaagcaaacactctatttcgcagttgaacaatgatcactgatcacaaatatcaaatacagtgtcccccgcccccaatcgacatcattttcaacttaggaccctggcatctactccttggggtacctgtgactctcttttacacccccaagggtctgcctcagatctacttaaggggcggaataacccctagcacctgaattgaggatagcctcaacctctgcatcatcgtccgaatcccagtcataattacaaggccagtctttagagcatcggttacgaacccttgccacaaaatgcatgactttcagtttgctcgattccacgtgtgctcggggcccccagaagaactcatactccaccggactgctacggggcaccggtttataaatcaggtaccctctgcgcacaaactcttctgtgacgatcttcttcggatctccaaagatgctgtgctgacgtccaggctgcattcctaacttccccagcactttccagaccagagcttccttggcgctgttgcccatgatgaagatgagcgctaatatagacatcaggagacttttcttggtgccctgaaaattgctccggggcactgaaggcttttgtgcttgggcagtgctcgaggcttcttcaggggtggtagaggcctcctctggagtgctcgggtcttcctcggggccgctcaggtcgtcttcgggggtgctcgctaccacagaggcggccataggggtctcggaggcctctgaggcctggattttgcgattgttgcggttctcttctgcggctctcgcattacggcggcgccgactctttcgtccccgaggcatgtctcctgctagaggctcaaagcttacagcagtcctagggaaggatgcttgtagcctcttcaggaagcaacagctttataccgtaagaagctgctgccgctgaagctaccaatgtcaatagagtctttgtagcaataaacaagccgttctcagctacaaagggtagttcccacgccagctgacttgcgcgagcagccgccgccagcacccgtcccgctctcgacgaattcgagctcggccgatttggcctgatnnnnnnnnnnnnnnnnnnnnnnnnnnnnnnnnnnnnncggccgccaccgcggtagagcntccggttcccctatactagtct

SEQ ID NO: 439174 - DNA, 484 bp, Homo Sapiens
  misc_feature (290)..(290): n is a, c, g, or t
  misc_feature (413)..(413): n is a, c, g, or t
  misc_feature (418)..(418): n is a, c, g, or t
tgttgccccatgaatgaaagatgaacgcctaattatagacatccaggaagacttttcttggtgcccctgaaaaattgctccggggcaactgaaaggcttttgtgcttgggcagtgctcgaggcttcttcaggggtggtagaggcctcctctggagtgctcgggtcttcctcggggccgctcaggtcgtcttcgggggtgctcgctaccacagaggcggccataggggtctcggaagcctctgaggcctggattttgcgattgttgcggttctcttctgcggtctcgcatntagcggcgccgactctttcgtccccgaggcatgtctcctgctagaggctcaaacttacagcagtcctagggaaggatgcttgtagcctcttcaggaagcaacagctttataccgtaagaagcntgtgncgctgaagctaccaatgtcaatagagtctttgtagcaataaacaagccgttctcagctacaaaggg

SEQ ID NO: 439175 - DNA, 2396 bp, Homo Sapiens
  misc_feature (872)..(880): n is a, c, g, or t
caaggccccctgcccggggaaaaataaagtagctcacgataatggggccggtgaaatgctctgctccgtctaaaattaaatcaacttaattagagttttctgcaaaccattgataataaccttttgaaaattggaaaaatgggaaaccggtttttaaagaattaacggatttgggggtttaatttttattttgttttaaaagaaacagtatttattaagaaattatatgttgaattctcctacagtctgtgaagatggtttcttccatttccacagcacaagacaacagctaagattatctggaaaacactggcaatgcttgggaatggagagttcctaggaacaggaggtgaaatgacatgatgtatgcactaatttaaacttttggatccaagggcaagacagtcttttccttggcaatctagtccttacttgtccatggaatctcatacccagactgaagtaataattggatcatttagttcagtagagcggagcatgctcaacttaatcacagatcaaaccaacagttctttaactattatatcacatctgaaatatctgcattctttattaataaaaagggtgcttatacagggcagaaatataactttttcaagtattttatcattatgatctgaagtactttaaactataaattataaataaattataaaaactagcataagatgcatcttttcttacatgacattgttggaaataagctttaaatacagaattgcaatatcacctgactttatatatgatcaacagtgaaacatgctaatcataaaaatagcttttacaaatatacatttgtatatagtgtctccccttaccattcataaatgcctttcacattttaagactgnnnnnnnnnccataattagcaaaggggaaaacacatttacaatttaaaccataaaaacctgacaattgtacagcttaaaacatagaagaaatggaatttctaaaactgagcaatactgtccattttatttatttgggtttttatataaattgaaccaaagatgctgctgtccagtaagaaacctcctttcacatttctgggggttgtcacagtttctcttttctgctttgtggcatcatgcgttatttcagatcactttatctgtagaaacagctcatgacccccatcttcatcgaagtcctcctctatcccatctgtcatctcttctccatcggcatctggccctccttcagcaggctcctctgtagagtgatctgcaatctctgacacacattcctcttggatcagcactagactctcttccaattgcttcttctgagcttctgcctccgccttctgctgtttctcaatcttctccaggcgccctagcaaggagtcaattttagttttgatctgggttaattctttcttgatggtctgtaactcatctgatttcaatttagaacctgttgacccactggcagtagatctcgatccacctttcatggaaaagactcctttccccctgcgagtcgttgtgactgccactctgggacgcttcagcggaattactgcacggggagttggaggcacacgcccgtggtaatcaaataaccgattgtagaaatcatctctgtagtaatcatagtcaaagacataaccgccaacagacaggaaaggttcctttgattcaagtctgtaaagtgcagaaaggggcctcttgtttccaggttttggtctgtatggtttgggctctcctgccatgttgatatcaagtggttggccggcgatgactctggcattttctccagccactgcagctcttgcatgtcgctcactcatgtactgtacaaatgcataacctttgtgaacggaacatccaactatttttccatactttgaaaaaatggcttcaatgtcaactttcttgacaattgccgtatttagattgccgatgaaaacacgggagttgatggacttggggtcattcttattggtgacgttgctggtctgtgttttgccagtcatgattggctctccttgctttaatccgagcgggagtaaaatgttgggataaaaatgagatttagtataaaatacagtatggcggtggaagaaggaatgaagcgcgtttttttctcgcagtctctgcctcaggcactgacacgtgactcggagccaggctgacttgcaggcagcggggaaggactgagtctgcgaggggggaagcccacggagcccaactctggctggcgaggcggcggcggcggcgacggggagcctggcgcctgagagcggcaacaccagtggcaggcagcaagcggcagcggcagctcgcggcgaggctgccttcgctgtgagcccagacgagcaggtgcccctcacgctaggctgagcacacgcacacgcacacgcaagataggca

SEQ ID NO: 439176 - DNA, 473 bp, Homo Sapiens
  misc_feature (20)..(20): n is a, c, g, or t
  misc_feature (25)..(25): n is a, c, g, or t
aaaattcctaaaaaactgancaaanatgtcccaatttaattaattggggtttttaataataaaattgaaaccaaaagatgctgctgtcccagtaaagaaaacctccctttccacatttctgggggttgtccacagtttctcttttcctgctttgtggcatcatgcgttatttcaagatcactttatctgtagaaacagctcatgacccccatcttcatcgaagtcctcctctatcccatctgtcatctcttctccatcggcatctggccctccttcagcaggctcctctgtagagtgatctgcaatctctgacacacattcctcttggatcagcactagactctcttccaattgcttcttctgagcttctgcctccgccttctgctgtttctcaatcttctccaggcgccctagcaaggagtcaattttagttttgatctgggttaattctttcttgatggtctgtaactcat

SEQ ID NO: 439177 - DNA, 972 bp, Homo Sapiens
  misc_feature (21)..(21): n is a, c, g, or t
atatgaatcttttttcaattnagagtcacaatgaatttacagattgagtcttcctattcaaaagcatgaaatcttgtgtttaagtctaattttatgtaacttagtagtgttttatgattttgttcactaaggtgctttgaatttatagtttatttctagatgttttatcatttggctatcattttcaatagaatgatttattccactttattttctattttatcccattgtataagaaagtagttggtttttatgtatgaatgttataatcaaccacaaattgtgattcctacttgtttctaaggtatacttttgacttctcctttccaatgtgtctcttatttctttcttgtatctagttgatttgagatcagtgttgagtcacagtgattcaggtggcatgcttatcttgttcgtgacatcagtgggacgttttaatgtctcagcgtttaacttgtatgaagacatgtattttccttgccataataaaaaagtatctgtgtgttctcaaactattaagactctctggggaaaatgtagatgttagatttttgtcaaagccttctcagtgtccagagggattatcagaaggtcttttcctttgctctagtagtatgtttaattatattaatagaatacttaagaccaaatcattattgtattcctgagatgttctttacttattagtatcatgactttggttatcaatatttataattaagattcatcattctacatcttgcttttatgtgttttttgtccagatttaactttatgctgacttaaaggaagaaatattataaaacaaaaacctctatattctacaatcatctattggttttggattattttctgcttaagtgtagaagaactagctggggctgtctgggcctgccgtggtatatttctggattttgctcatcaggcaagttaggtcctcgagcccttctagagtccattttaatgacagtt

SEQ ID NO: 439178 - DNA, 1517 bp, Homo Sapiens
  misc_feature (983)..(1018): n is a, c, g, or t
  misc_feature (1364)..(1423): n is a, c, g, or t
ggggaccggctgcctggctgacttacagcagtcagactctgacaggatcatggctatgatggaggtccaggggggacccagcctgggacagacctgcgtgctgatcgtgatcttcacagtgctcctgcagtctctctgtgtggctgtaacttacgtgtactttaccaacgagctgaagcagatgcaggacaagtactccaaaagtggcattgcttgtttcttaaaagaagatgacagttattgggaccccaatgacgaagagagtatgaacagcccctgctggcaagtcaagtggcaactccgtcagctcgttagaaagatgattttgagaacctctgaggaaaccatttctacagttcaagaaaagcaacaaaatatttctcccctagtgagagaaagaggtcctcagagagtagcagctcacataactgggaccagaggaagaagcaacacattgtcttctccaaactccaagaatgaaaaggctctgggccgcaaaataaactcctgggaatcatcaaggagtgggcattcattcctgagcaacttgcacttgaggaatggtgaactggtcatccatgaaaaagggttttactacatctattcccaaacatactttcgatttcaggaggaaataaaagaaaacacaaagaacgacaaacaaatggtccaatatatttacaaatacacaagttatcctgaccctatattgttgatgaaaagtgctagaaatagttgttggtctaaagatgcagaatatggactctattccatctatcaagggggaatatttgagcttaaggaaaatgacagaatttttgtttctgtaacaaatgagcacttgatagacatggaccatgaagccagttttttcggggcctttttagttggctaactgacctggaaagaaaaagcaataacctcaaagtgactattcagttttcaggatgatacactatgaagatgtttcaaaaaatctgacnnnnnnnnnnnnnnnnnnnnnnnnnnnnnnnnnnnnctctatgcaatctgagtagagcagccacaaccaaaaaattctacaacacacactgttctgaaagtgactcacttatcccaagaaaatgaaattgctgaaagatctttcaggactctacctcatatcagtttgctagcagaaatctagaagactgtcagcttccaaacattaatgcaatggttaacatcttctgtctttataatctactccttgtaaagactgtagaagaaagcgcaacaatccatctctcaagtagtgtatcacagtagtagccttcaggttttcttaagggacaacatgcttaagtcaaaagagagaagaggccccactaaaagatcgcagtttnnnnnnnnnnnnnnnnnnnnnnnnnnnnnnnnnnnnnnnnnnnnnnnnnnnnnnnnnnnnctgttgatatgagatcaagtccctacggcccaacatagtgaacctcctttttcactgaaggtgttatatattttggtctgtactgcacattcct

SEQ ID NO: 439179 - DNA, 1326 bp, Homo Sapiens
  misc_feature (47)..(47): n is a, c, g, or t
  misc_feature (1033)..(1033): n is a, c, g, or t
  misc_feature (1063)..(1063): n is a, c, g, or t
  misc_feature (1066)..(1066): n is a, c, g, or t
  misc_feature (1116)..(1116): n is a, c, g, or t
aggctggtaccggtccggaattcccgggatgaccgcggctccgcggngtagtgccccgacaaggtggagcccggcgggcccgcgagtccgagacctgtcccaggagctccagctcacgtgacctgtcactgcctcccgccgcctcctgcccgcgccatgacccagccggtgccccggctctccgtccccgccgcgctggccctgggctcagccgcactgggcgccgccttcgccactggcctcttcctgggtgagcaggacctggtcccggcgggcgggtgggcgggcgcagagtagggcgcggcgtggctcaggttaatccaacaccctctccccgtcaggaggcggtgccccccatggcgaggccggcgagagcagtgcctgcttccccccgaggacagccgcctgtggcagtttcttctgagccgctccatgcgggagcacccggcgctgcgaacctgaggctgttcagcagggcgcgggacggaaacgggcgtccctctcagacccctgcgggtcccacgtggctgtgtgaccttgggctgggccctggccctccctgaggcttccggcttccctgggccgggtgcggtgggcgttccgaagggccagtcccccaggccacgcccagaaccgcgcccctggggcttgggacccccagggcgaaggtgggtgacctgcatggctggtgccaccctctcctttcacgcagctgaccctggagcagccgcagggggattctatgatgacctgcgtgcaggcccagctcttggccaccctggcgcggctcatccaggccaagaaggcgctggacctgggcaccttcacgggctactccgccctggccctggccctggcgctgcccgcggacgggcgcgtggtgacctgcgaggtggacgcgcagcccccggggctgggacggcccctgtggaggcaggtgagcgcccgcgcctagctctgcagccccaggcgggggcgcaacggctaacccgctccctccgcaggccgaggcggggcacaagatcgacctccngctgaagcccgccttggagaccctggacgngcngctggcggcgggcgaggccggcaccttcgacgtggccgtggtggatgcgnacaaggagaactgctccgcctacaacgagcgctgcccgccgccgctgcgacgccggaggcatcctcgccgacctcagagtcctgtggcgcgggaaggagcagcaacctccgaaaggggacgtggcggccgagagtgtgcgaaacctaaacgaacgcatccggcgggacgtcagggtcaacatcagccaccagccccatagggcgaagaac

SEQ ID NO: 439180 - DNA, 988 bp, Homo Sapiens
tggaccctatacttggcccctctgtaggatatttttgagcggcgcccctgtttgtgtgtttttcccagcccgcactttattttcgaatttaaaactcagggtcaattcctggggttcccaggcaaccctccctcgagcccactcactaggggccagccctagatcttgaaggccaaggtgagtccatcgcccaggggcaggaggctgatgtagaccctgacgtcccgccggatgcgttcgtttaggtttcgcacacactcggccgccacgtcccctttcggaggttgcagcaccttcccgcgccacaggactctgaggacggcgaggatgcctccgggtcgcagcagctgcaggcagcgctcgtagtaggcggagcagttctccttgtccgcatccaccacggccacgtcgaaggtgccggcctcgcccgccgccagcagctcgtccagggtctccaaggcgggcttcagccggaggtcgatcttgtgctccgcctcggcctgcctccacaggggccgtcccagctccgggggctgcgcgtccacctcgcaggtcaccacgcgcccgtccgcgggcagcgccagggccagggccagggcggagtagcccgtgaaggtgcccaggtccagcgccttcttggcctggatgagccgcgccaggttggccaagagctgggcctgctcgcaggtcatcatagaatccccctgcggctgctccagggtcagcagcctcaggcttcgcagcgccgggtgctcccgcatggagcggctcagaagatactgccacaggcggctgtcctcggggggaagcaggcactgctctcgccggcctcgccatggggggcaccgcctccccaggaagaggccagtggcgaaggcggcgcccagtgcggctgagcccagggccagcgcggcgggcacggagagccggggcaccggctgggtcatggcgcgggcaggaggcggcgggaggcagtgacaggtcacgt

SEQ ID NO: 439181 - DNA, 1051 bp, Homo Sapiens
  misc_feature (185)..(257): n is a, c, g, or t
aataagccaatcacaaaaagataaatactacacaattccacttaaatgaggttatctacagtgatcaaattcttagaaacaaaaagtagaatggtggttactccggactggaggaagcaggaaatgagaaattgttcagtggatacagattgagtatcctctctgaagatttgtatatttaaaannnnnnnnnnnnnnnnnnnnnnnnnnnnnnnnnnnnnnnnnnnnnnnnnnnnnnnnnnnnnnnnnnnnnnnnntcctctgttaatgcttccaacactattatgaaaattttgtagtgaatttttaaattccagttcagtttggttctttttaaaaatggctattttgtctttcaatttttgggtcatttttactggattccttggattgggtttctacttcctcttgaatcttgatgagcttctttggtatccagattctgaattctatgtctgtcattccggacatttcagtccttgctgaggggctagtatgcttatttgacgttttgaattgccagagttcttgtgctgactcttttgagagggctggtgttcctttgtcgtcttgtttttatattattcatttaccttgagggcttaactgtggtatatgttgagtatagtcaattggcttcatttctggatactttcagagggccaaggctctgtatgggatctttgtggctagattcttgctctgggttttacaggtgctctatactggcagaatattttgaaattgtaatttcggcggcaaaccagtagatggcgcttaagagtaattgccggcaggctctgactcagcgctggctctttggtattttgtattcgcagtcatgctccatagttcaggggagagagatgatccttttgccaagtcctctcctggcccttagaggagccccctccaatcactggagctgcacttacgtttcctttgttaggtgttcggagctgtgggggctctctccggcagaggctaaggcttgcagacaggccgcaacccttccctgaaaggccctgagagagacaagtctcatcccgcg

SEQ ID NO: 439182 - DNA, 611 bp, Homo Sapiens
  misc_feature (144)..(160): n is a, c, g, or t
  misc_feature (264)..(439): n is a, c, g, or t
ttacatgtagtgtgctttttattattaccatgtgccagcaatcctaaactatgtcaatgatagaacaccttcccataagaaataattttttgttctaactggtctaattgttacagttagtgttacagttagcgttgagagtgnnnnnnnnnnnnnnnnnactgtgataaaatatgattaccattttagccatggttaagtgtacagttcagtggcatgaaacacattaatgtttagttttaataaaatatttgttagcttcannnnnnnnnnnnnnnnnnnnnnnnnnnnnnnnnnnnnnnnnnnnnnnnnnnnnnnnnnnnnnnnnnnnnnnnnnnnnnnnnnnnnnnnnnnnnnnnnnnnnnnnnnnnnnnnnnnnnnnnnnnnnnnnnnnnnnnnnnnnnnnnnnnnnnnnnnnnnnnnnnnnnnnnnnnnnnnnttgagtatcctctctgaagatttgtatatttaaaatttttttctttatctgattgagttgatttgaagaatcagtttttgagctctgagattccacagcttgatctattcctctgttaatgcttccaacactattatgaaaattttgtagtgaatttttaaattccagttca

SEQ ID NO: 439183 - DNA, 1050 bp, Homo Sapiens
  misc_feature (5)..(5): n is a, c, g, or t
  misc_feature (13)..(13): n is a, c, g, or t
  misc_feature (16)..(16): n is a, c, g, or t
  misc_feature (36)..(36): n is a, c, g, or t
  misc_feature (48)..(48): n is a, c, g, or t
  misc_feature (57)..(57): n is a, c, g, or t
  misc_feature (61)..(61): n is a, c, g, or t
  misc_feature (72)..(102): n is a, c, g, or t
tttantataaacntcntatgaaataatgttgcaaanatgacaaaatgnacacttagnacangcggttatttnnnnnnnnnnnnnnnnnnnnnnnnnnnnnnncaccacacgattctgtagaaccaatgttatgtcaccaccaggagagcaccaagcaaggcaccattggaaagaccacatacttggaaagtctctataaataaagtaaatgctaatctggtcgaaaaatcggtgtctttggtaaaaattctatgaggatgacatattccatcatgttattcgtttcacatttccttttgctcagtctccaatgcaagcacagcttgtggtataacctattgttttcccattctaataacttctcaatcgatcttcgtgttcttttactgaggcaaataactggccacatactgcaacctaatgtgcagcagcaacaaaggcagccacaaagtagccaacgtacattaacaggaaggttcttcttaagacaactgttaactctgttgatgctggctttaaattcttcaggagctacttttccagttaatgaagaagggaattcagattcaaatttgttgctcagtccaaatacggtgacgtgaccggagccgcggacgaccaccgggtccggcgagtacttgagcagctgctcctccagggcccgctcctcgtcctcctcttcctcatagatttcgtcgaaatccccatcctgagcctccgagctcccctgcccaaagggcctgactcccggggttggcgccggggtaccggcgggcgaggcggcggaggctgaggggagtcgccgctgccgccggctccgaggccgcggagttcgctgtcggctgtctcggctccggctacagaggggatggggtctggaccgtcgccgccaccgccgccgccattaccatcagcaataacaacaacacaatgtcaacatccgcccagaggccgacacctccacaagcacagacgccgctgccgccgccgcagcagcagcaactcaggaaaccacagatcccgggaattccggaccggtaccagcctgct

SEQ ID NO: 439184 - DNA, 603 bp, Homo Sapiens
  misc_feature (175)..(204): n is a, c, g, or t
tttttcactttttatgctaagttcaaatgtatttttttgataatacaaaaaagtaatccttgaaaatcagaatacataacagaaaagagcacaataacttaagtattaaacatctgtatgaaataactgttgcaaagattgacaaaaatgcacacttagaacatgcggttatttnnnnnnnnnnnnnnnnnnnnnnnnnnnnnncaccacacgattctgtagaaccaatgttatgtcaccaccaggagagcaccaagcaaggcaccattggaaagacaacatacttggaaagtctctataaataaagtaaatgctaatctggtcgaaaaatcggtgtctttggtaaaaattctatgaggatgacatattccatcatgttattcgtttcacatttccttttgctcagtctccaatgcaagcacagcttgtggtataacctattgttttcccattctaataacttctcaatcgatcttcgtgttcttttactgaggcaaataactggccacatactggcacctaatgtgcagcagcaacaaaggcagccacaaagtagccaacgtacattaaccaggaagtcttcttaagacaactgttaactct

SEQ ID NO: 439185 - DNA, 1482 bp, Homo Sapiens
agtccttggcaactattcttttattgaacatcagtgaacagaaagatgcttgatgttaggaggaagctttccctccctgccctcccccattgcaccccggaactcagcaaaggtgagccagccacagagcataacactgtggctgggacacatgtccatgtgtgtttcacatacgtgggcatctgtgccacaagggtcatttggcaccacagttcatcagctgtgtttccccttcctgccctgctgcagcgcccacaggttgcgaggaaaagcctgcgctgtgagcagggtccccggcagggcccacccacccaccagtggagatcgggcctcagagctgggcagtcatgggagttcagggcctggctcgcctcggcagcctggtcttaaagagggacttgcccgaggcctcgatgtaagtgacagtcatctctttggagctgatctccacataggcaaagccacccagtgagtcttcagtcccatagtggaagcgcagatagccgttggggaccttgcgctggtgccgctttgaggggtccatgaaattcccagccccactcagcacgtagcccacgccattctcatcttgcaggtactgcagattgtgatcgtggccgcacaggtaggcagtgaccccgtatgtggccagcagtggccgtagctgcttgaccaggcagtgggtaggcccgtgctcggctatggaccacacggggtagtggccagccaccagcatgtagtcctccctggccgccgccagctgtttcttgagccaggacagctgtgtgcgggccagcttcacgtctcggggcctctcaggctgctggctgaggaagtcatctgagttgccacatagtgtcactgtgtccagcataaaaatggccacagacatattggtctgtgggatcttgaagtgcaggcggtagaaagggctggggaagttccagcgcttggagatcttagagtatgcaatctgggcagagacattgccaaggtggtcatggtttccggctagcacgtaccagggcactttgcgaagggagcggtcagagaatacgtcctcaaaggtctcctggaacctcttgtcattgatgtcttgcacaccagtaaagtaaaaattgtcccctagagacaggatgaagtctgcacccaggatctgcacagtccgagcgatctccttggcattggccatttcccgggccgtgtggaatggggcattggggacccctccccagtcacccacggctacaaagcgcagggcaggggtggcaccatcagccagggagggtagcaacaaggcttgcaggatgagcagcgccgtccacatgtccatccagggggagacacaggccagtcaccggaggctctgagaggctggtgggctccagagtagaactgccggtccctgagcctttattccctgaggaggaagtggatcattagtgaggatgatgcagtttctccgagggctgtcccgggagc

SEQ ID NO: 439186 - DNA, 968 bp, Homo Sapiens
agaggtcccacccatttcatcgcaggacgccagattgggattcgtggcgcacagtagccaggacccccgtaatgggccaccagggccgtagctgcgtgaccaggcagtgggtagcccgtggctcggctaatggaccacacgggggtagtgccaagccaccagcacgtagtcctccctggccgccgccagctgtttcttgagccaggacagctgtgttgcgggcccagcttcacgtctcggggcctctcaggctgctggctgaggaagtcatctgagttgccacatagtgtcactgtgtccagcataaaaatggccacagacacattggtctgtgggatcttgaagtgcaggcggtagaaagggctggggaagttccagcgcttggagatcttagagtatgcaatctgggcagagacattgccaaggtggtcatggtttccggctagcacgtaccagggcactttgcgaagggagcggtcagagaatacgtcctcaaaggtctcctggaacctcttgtcattgatgtcttgcacaccagtgaagtaaaaattgtcccctagagacaggatgaagtctgcacccaggatctgcacagtccgagcgatctccttggcattggccatttcccgggccgtgtggaatggggcattggggacccctccccagtcacccacggctacaaagcgcagggcaggggtggcaccatcagccagggagggtagcaacaaggcttgcaggatgagcagcgccgtccacatgtccatccagggggagacacaggccagtcaccggaggctctgagaggctggtgggctctagagtagaactgccggtccctgagcctttattccctgccgtcgcggggcgggcgttgcggccggtgcccagctgcagatccgcaggcgatcgcactcctggcggccccagctttaagcaggcagcggccgatccgccctgctcgagggctc

SEQ ID NO: 439187 - DNA, 1116 bp, Homo Sapiens
  misc_feature (43)..(51): n is a, c, g, or t
ttttttggcgaggttggttcaaaaaaatgggaattgcgggggnnnnnnnnnacgtttgggcacgtgaaccccccggtggtgttggcccaagccggtgggccccttggggtgttttgacccagggccagtggggtaggggccccgtgtctcggggttaaggggcccaccacgggggtaggtggcccagcccccccaggcaggttagtccctcccctgggcccgccggcaagttggtttcttggagcccaggaacagcctgtgtgcggggccaggcttccacgtcctcgggggcctctcaaggcttgctggctgaggaaagtcatttgagttgcccacatagtgtcactgtgtccaagcataaaaaatggcccacagacacattggtctgtgggatcttgaagtgcaggcggtagaaagggctggggaagttccagcgcttggagatcttagagtatgcaatctgggcagagacattgccaaggtggtcatggtttccggctagcacgtaccagggcactttgcgaagggagcggtcagagaatacgtcctcaaaggtctcctggaacctcttgtcattgatgtcttgcacaccagtgaagtaaaaattgtcccctagagacaggatgaagtctgcacccaggatctgcacagtccgagcgatctccttggcattggccatttcccgggccgtgtggaatggggcattggggacccctccccagtcacccacggctacaaagcgcagggcaggggtggcaccatcagccagggagggtagcaacaaggcttgcaggatgagcagcgccgtccacatgtccatccagggggagacacaggccagtcaccggaggctctgagaggctggtgggctccagagtagaactgccggtccctgagcctttattccctccctgcctgcctcctccgtgctgggcgccgccgcgacacgtcccgcggacattcaggagtcccttcagtccctgccgtcgcggggcgggcgttgcggccggtgcccagctgcagatccgcaggcgatcgcactcctggcggccccagctttaagcaggcagcggccgatccgccctgctcgagatcccgggaattccggaccggtcc

SEQ ID NO: 439188 - DNA, 783 bp, Homo Sapiens
tttttttcatggttcaaactgacattttaattaaatgtgatgataggttgagtaacctagcagtactctaaaatgacttttggttatggctttttccatattatgtttaggctgaggcatccctaaatgattcaactgtaattcctcttcttaaacatgagatttatctttacaaaataatttattttcttaaaattacaagttaattctatagttcatgcatacataatctcagcagatatcagctgtatgtgtacacacatacatataggtatttgtatatacacacattacataattttttaaaaaacttattagtagggtagaaccacgaagacaaagaggctttgtgtaatgtgatggaaacacatttgcaggacgaacaacaggctgctgtgagggctgcatttaccctttctgctgtaagacttggaaaaacatggatagtggatatttaatccgcataacagaaatttcagggtgcagaaaacttcccacaatttttatagataatgtcaatagacaggcattcaatgcagggaatacacagtgtgacagtatacaaaaataagcaggttgatggtttagatttatgagacaagagaaagaaatagtagatgatgccataattctccttttatggagttatgaaaattgttcattttatataaggtcaggtgctttcaaatgtcaatgagaaaaatatttaaagggagaatcaaatctaagacgtggagagatctttataaaaatgaccttcaggccaggcacggtggctcacac

SEQ ID NO: 439189 - DNA, 1359 bp, Homo Sapiens
  misc_feature (732)..(769): n is a, c, g, or t
gtgttccttggcggtccttcacactccttgcacactacatggaagagcaggtcccctcgaccctccagctcccgaggcaggcgccaggtgtagcaatgagtgcttgagcccttgcaccgtctaacctaagctcctggggagccgatggaggaccagtgcagggggcctctggtgggtcggaactggcccggtagaagccctccatgcaggggcaaacgggggctgctgggttgggagcgtgactgcggtcagggcatggtgagcagggagcattcccagcagaagacttatagagcccccgtgttcaggcttggcaggccttgtctcctcgtgctggttggtatccaggctggcagcggcagcccccgacagctaccatccacttgccctccccgttgcagtgcagcctgggggggctgcctcctgcctggccccctactccatcctcctctggctctgcatgagccacacaggtgcccacatgctgccaccagggtaggcccccccagccccactggcctgcgtctctggaaaggaagcaaaggatcggagcacggcagggcaggtgtaggagaagagcctgacagcgaccagggccaggcaggcccccgtgtcctgtaagagccacgtagaatccgcgttgggtgagaggccctaagctccgctttttgacgttcagttgcagtccagcccgctgcccagccgcgtggggtcccacagcccccgctgcannnnnnnnnnnnnnnnnnnnnnnnnnnnnnnnnnnnnngctctcgtctgctgcaattgtgtccaccttggtccagcttttgaggtgccagaaagaaacgctgtcagggctgtcgggctcctcagcctgacggtagtaaagggtgaaggtctcgcggcaggtgccgccgctcacacccaggctggagcatgcccgcacagagaagtggagtcgaatgtgcgccctctgggccccgcgccgctccacaaagtgtgtctgcaaccaattgtcctgcccggtgcctggaggggcccctgccacatgacatgcctcaaaggtccgagtcaggcgtcgctggtcgtccagaacactcacctcgtcccacccccctggtgggtaggtgagccagccaatctcagatgtctctccggtggtgtccagcaatacctcttccagagccagaactgaagacaccaggagcagcacccataggctacacaccatgcccgccactctgttccctaactgggcagccccttcagtagccatgggacatcttcagggcgtccaccatcgccccagccaccaccctgctcctgggtggggctgcagctttgcaagactcagggtgtacagctaagcttgcttcc

SEQ ID NO: 439190 - DNA, 1676 bp, Homo Sapiens
  misc_feature (463)..(463): n is a, c, g, or t
  misc_feature (922)..(935): n is a, c, g, or t
  misc_feature (1557)..(1608): n is a, c, g, or t
ccccccagggtggccaccagctgccccccagggtggggcccccgcaagcccaacttgggctggggtctctggaaaaggaaagcaaaggttctgtggcccggcaaggacaggtgttagaacaagaagccttgcaagcgatcaaggggccaacgcaggaaccccgtgtttctgatagggccacggtagaaccccgctatgggtgaaagaccccaaacctccgctctttaacgttcagttccagtacagcccgctgctcaggcccgtggggtcccacagcctacgctgcagaggtacaacagcagcagtagcagcaggaggagggaaagctctcgtctgctgcaattgtgtccaccttggtccagcgtttgaggtgccaggaggaaacgctgtcagggctgtcgggctcctcagcctgacggtagtaaagggtgaaggtctcccggcaggtgccgccgctcacacncaggctggagcatgcccgcacagagaagtggagtcgaatgtgcgccctctgggccccgcgccgctccacaaagtgtgtctgcaaccaattgtcctgcccggtgcctggaggggcccctgccacatgacattgcctctaaggtccgagtcaggcgtcgctggtcgtccagaacactcacctcgtcccactcccctggtgggtaggtgagccagcccatctcagatgtctctccggtggtgtccagccaatacctcttccagagccagaactgaagacaccaggagcagcacccataggctacacaccatgcccgccactctgttccctaactgggcagccccttcagtagccatgggacatcttcagggcgtccaccatcggccccagccaccaccctgctacctgggtggggctgcagcttttgcaagactcagggtgtacagctaagcttgcttcccnnnnnnnnnnnnnnctgcaaggggttattccagttctttctcttcatttactctcctcccttcctccaacagccacccctttttctgccattcgaggacacaacaaagaagagggcagtctgaaacctagaagagagggttcgccaggaactgaccatgccggcaccctgatcttggacttcccagcatctagactccagtgtcacaatgaagacaaacaggcttggcacctcctttgcttgttgatctagagattggcggttctctatctctcctcgtgtctgagtctcagaagtctgtgaattgggtggactataatccctttatttcttcccgttggccgcagtctctgcaggtctgcgccccccgaggcctcgcagtggacccggggctcctggagctcgcacggtgccacccgcgtcttctccagtccggggaccccgttgcacccggcccgggtccgttcggcgccgagagtccctgggattccggggtggacctgacgctggcggcaggggctgctccagaggtggggcgccgggagatcctgggggcccgcgtcgagatcgccgtcgccaagctgggtcccgggtcccgccgcccgctgctgtagagccgcggctggagcgaacgcannnnnnnnnnnnnnnnnnnnnnnnnnnnnnnnnnnnnnnnnnnnnnnnnnnncagcccctttggccgccttcccactcccttcttccggggagccgagcccgccctcccggcctaggcgg

SEQ ID NO: 439191 - DNA, 245 bp, Homo Sapiens
ccaagcccgggttcggaaacaccagcgctccggagtgtgaagatcgagcaagggaagctgaacgaccaggctaacacgcttaccgacctagccaagacccagaccgtcatgtacgaccttgtatcggagctgcacgctcagcacgaggagctggaggcccgcctggccaccctggaaagccgcttggatgcgctgggtgcctctctaacaggccctgcctggcctcatcgcccaagccatacgcc

SEQ ID NO: 439192 - DNA, 506 bp, Homo Sapiens
ggtcaggcactgaagcctggtcaggcactgaagcctggtcaggcactgaagccaggtcaggcactgaagcctggtcaggcactgaagcctggtcaggcactgaagcctggtcaggcactgaagcctggtcaggcactgaagcctggtcaggcactgaagcctggtcaggcactgaagcctggtcaggcactgaagcctggtcaggcactgaagcctggtcaggcactgaagcctggtcaggcactgaagcctggtcaggcactgaagcctggtcaggcactgaagcctggcgcctgcctcgggagctggggggtcgaggggacctgctcttcaatgtcgtgtgcaaggagtgtgaaggccgccaggaacctgccagcggtggtgggggcacttgtcaccgctgtcagggatgaggtccacttcgaccctcagccagagaggccggacctgagagccgagtgttagtggggactccgtgcacacgtaccctacatcttagaggtcag

SEQ ID NO: 439193 - DNA, 1028 bp, Homo Sapiens
  misc_feature (50)..(63): n is a, c, g, or t
  misc_feature (974)..(974): n is a, c, g, or t
  misc_feature (1013)..(1013): n is a, c, g, or t
ttttttttcttgtccacagtagagtttaataaaaatattcactgaaagannnnnnnnnnnnnnatcggcccaaagctgaataagttagttagctgtgtccctggtcctttgcgatggtgtgaggctacatcctcccccagatggctacgatgttggagtccgtcagggcggtgaggtaggtgaaggaggcattggccaccactgtgttcaccatggtcttggtcaccacctggccaagggcccagggctggggccacttcaggatctgtgtgggggcctgcagggctgccggcagcaggggtggctgcttcaggatgttgctgacgtcgtagagccacacgttgccctcctcatccccacagagcacaatccccttatcagggcaggcgctgagcgagaagtaggccaactcggtggacgaccattgcagccgcgccaggaccaccactgccactgtggactggctgccccggcccccccacgtctgcctccagctccacaggcagatggtgcccaggccgctccccttggaggccacgatgtcctcattcacaaatgccagcccatccactctccgtccagatgcctcggagccctcagagaagacgaattccacttcacacaccctcctcttttggggctggtccagccgcacgtcccagcagcagcagccgccctcgcagccggccagcaggcgggcgtccgggcaggaggcgacagggcagaggcgcagggggatagaggtggtgtccagtgtgagccgctggctggcctggaattcgtagtcctggttgggcacccgatgtcccagaggatgatccgcttgtcataggaggccgtgaagagatgggtctcgtgggcggggctgaagcacagggtggcgatggccttcttgtgggctcggatgaccccgcagcagaagccggcacgcacgtcaggcagccggaccaggcccgtagcctgcagcggcagcnactccagcgctcttgtggcagctgtgtgacacatcaganggtcaggcacagaaa

SEQ ID NO: 439194 - DNA, 1039 bp, Homo Sapiens
  misc_feature (3)..(3): n is a, c, g, or t
  misc_feature (82)..(82): n is a, c, g, or t
  misc_feature (85)..(85): n is a, c, g, or t
  misc_feature (87)..(87): n is a, c, g, or t
  misc_feature (115)..(115): n is a, c, g, or t
  misc_feature (130)..(130): n is a, c, g, or t
ccncgcactgccacgtctggattgccccctctcccagccgctcgaagcacagcccacactggtctcgagtcctggggctttnttntnctgtgcactgcagaagtgcagggctccnacttcacagcaggtngctgccatcggagcctgccacaggctgccctccacctgggccgacggggaggcacacgcccgcttgctgggagagaggctgagtgggacgtcgtctggccgtttcaaggccgccagtctggccctgggcttgtgggcagctccagcttctgggggcttctctgggctgttagccttttgcacctgggtcctactggcggccaccagctcctcagagatcatccgcacccgccactgggtgaactcgctgagggactcgggcccgtagcggacatccctgacagccgacttcacaaagtccgcctgggccttctcagcctcctcttcaggacccagtgtggccatgaacttctcccagtgagctgtgaccctgctggtcagctcccgattcaggttctccacctgagagtaagttgaggacgcatccttgccattgaccttacggagcgtgggcaggagaaaggagactttcaggttgtcattgaccgtcaggaaggggttgccctccaggctgagttcctcgagcttggggaactggcacaaggcagtaacatcccccagctggttgttggcgcagcggaggacacgcaggtgggacaggcccaggttgtccggcagcgtctccaggtggttgttagacaggtcaagctcctgcagctgcgtcaggcggcacaggagtttggggtccaggtgctcggaaagcagctccaatcctgacaggccgctgcccggctcttactccagactccggatcttccccagccggtcgctcttggggcgcccgcgctgcattagcagccgcgccgagagggggcccatggcgaggaggcgcagcccgcgctgacccagtcggccaccccggcgtgtggcgtcgccctgcgtctcctggagcccggcactggcgtccgcg

SEQ ID NO: 439195 - DNA, 1059 bp, Homo Sapiens
  misc_feature (5)..(5): n is a, c, g, or t
  misc_feature (7)..(7): n is a, c, g, or t
  misc_feature (23)..(23): n is a, c, g, or t
  misc_feature (25)..(25): n is a, c, g, or t
  misc_feature (40)..(40): n is a, c, g, or t
  misc_feature (50)..(50): n is a, c, g, or t
  misc_feature (58)..(58): n is a, c, g, or t
  misc_feature (61)..(61): n is a, c, g, or t
  misc_feature (74)..(74): n is a, c, g, or t
  misc_feature (92)..(92): n is a, c, g, or t
  misc_feature (97)..(97): n is a, c, g, or t
  misc_feature (127)..(127): n is a, c, g, or t
ccccncncccagccgctcaaagnanagcccaaagctggtntcaagtcctngggctttnttnttctttgcactgnagaagtgcagggctccanttcanagcaggctgctgccatcgaacctgccacanggctgccctccaccttggccgacggggaggcacacgcccgcttgctgggagagaggctgagtgggacgtcgtctggccgtttcaaggccgccagtctggccctgggcttgtgggcagctccagcttctgggggcttctctgggctgttagccttttgcacctgggtcctactggcggccaccagctcctcagagatcatccgcacccgccactgggtgaactcgctgagggactcgggcccgtagcggacatccctgacagccgacttcacaaagtccgcctgggccttctcagcctcctcttcaggacccagtgtggccatgaacttctcccagtgagctgtgaccctgctggtcagctcccgattcaggttctccacctgagagtaagttgaggacgcatccttgccattgaccttacggagcgtgggcaggagaaaggagactttcaggttgtcattgaccgtcaggaaggggttgccctccaggctgagttcctcgagcttggggaactggcacaaggcagtaacatcccccagctggttgttggcgcagcggaggacacgcaggtgggacaggcccaggttgtccggcagcgtctccaggtggttgttagacaggtcaagctcctgcagctgcgtcaggcggcacaggagtttggggtccaggtgctcggaaagcagctccaatcctgacaggtccagactccggatcttccccagccggtcgctcttggggcgcccgcgctgcattagcagccgcgccgagagggggcccatggcgaggaggcgcagcccgcgctgacccagtcggccaccccggcgtgtggcgtcgccctgcgtctcctggagcccggcactggcgtccgcggtaactgagcccaggaggcggcgccgcgcgagcccgtgggcgttaacgaccggaagaagcgga

SEQ ID NO: 439196 - DNA, 2055 bp, Homo Sapiens
  misc_feature (6)..(6): n is a, c, g, or t
  misc_feature (24)..(24): n is a, c, g, or t
  misc_feature (32)..(32): n is a, c, g, or t
  misc_feature (35)..(35): n is a, c, g, or t
  misc_feature (46)..(46): n is a, c, g, or t
  misc_feature (49)..(49): n is a, c, g, or t
  misc_feature (57)..(57): n is a, c, g, or t
  misc_feature (61)..(62): n is a, c, g, or t
  misc_feature (66)..(66): n is a, c, g, or t
  misc_feature (69)..(69): n is a, c, g, or t
  misc_feature (78)..(78): n is a, c, g, or t
  misc_feature (149)..(149): n is a, c, g, or t
  misc_feature (157)..(158): n is a, c, g, or t
  misc_feature (164)..(164): n is a, c, g, or t
  misc_feature (176)..(176): n is a, c, g, or t
  misc_feature (179)..(179): n is a, c, g, or t
  misc_feature (218)..(218): n is a, c, g, or t
  misc_feature (224)..(224): n is a, c, g, or t
  misc_feature (299)..(299): n is a, c, g, or t
  misc_feature (342)..(343): n is a, c, g, or t
  misc_feature (381)..(381): n is a, c, g, or t
taaacngatggttacgatgttggngtttgttnggntggtgaggtangtnatggaggnattnntcancantgtgtttantatggtcttggtcaccacctggccaaggcgcccagggctgggggcacttcaggatgtgtgtggggggctgnagggatgnnggaagnaggggtggatgnttnaggatgttgctgacgtcgtagagccacacgttgctctcntcattnccacagagcacaatccccttatcagggcaggcgctgagcgagaagtaggccaactcggtggacgaccattgcagncgcgccaggaccaccactgctaccgtggactggctgccccggnncccccacgtctgcttccagctccacaggtagatggtgntcaggttgtttttttggaggccatgatgttttatttacaaatgccagcccatccactctccgtccagatgcctcggagccctcagagaagacgaattccacttcacacaccctcctcttttggggctggtccagccgcacgtcccagcagcagcagccgccctcgcagccggccagcaggcgggcgtccgggcaggaggcgacagggcagaggcgcagggggatagaggtggtgtccagtgtgagcagctggctggcctggaattcgtagtcctggttgggcaccccgatgtcccagaggatgatccgcttgtcataggaggccgtgaagagatgggtctcgtgggcggggctgaagcacagggtggcgatggccttcttgtgggctcggatgaccccgcagcagaagccggcacgcacgtgcagcagccggaccaggccccgtaggcctgcagccgccagcacactccagcgcttcttgtggccagcctgtgtgaccaccatcagagcggtccaggccacagaaaagaactcctcgccgggtgccttgtacttgtggagcacgatgcccgtctggcaatcaattacgcacacagcctccccgccgcacgtggccacggtctgggatgtggccccctcctcccaggccggctcgaaggcacaggcccacagctgggtctcgaggtcctgggggctgttgttcttgctgtggcactgcaggaagtgcaggggctccagcttcacagcaggctggctgccatcggagcctgccacagggctgccctccacctgggccgacggggaggcacacgcccgcttgctgggagagaggctgagtgggacgtcgtctggccgtttcaaggccgccagtctggccctgggcttgtgggcagctccagcttctgggggcttctctgggctgttagccttttgcacctgggtcctactggcggccaccagctcctcagagatcatccgcacccgccactgggtgaactcgctgagggactcgggcccgtagcggacatccctgacagccgacttcacaaagtccgcctgggccttctcagcctcctcttcaggacccagtgtggccatgaacttctcccagtgagctgtgaccctgctggtcagctcccgattcaggttctccacctgagagtaagttgaggacgcatccttgccattgaccttacggagcgtgggcaggagaaaggagactttcaggttgtcattgaccgtcaggaaggggttgccctccaggctgagttcctcgagcttggggaactggcacaaggcagtaacatcccccagctggttgttggcgcagcggaggacacgcaggtgggacaggcccaggttgtccggcagcgtctccaggtggttgttagacaggtcaagctcctgcagctgcgtcaggcggcacaggagtttggggtccaggtgctcggaaagcagctccaatcctgacaggtccagactccggatcttccccagccggtcgctcttggggcgcccgcgctgcattagcagccgcgccgagagggggcccatggcgaggaggcgcagcccgcgctgacccagtcggccaccccggcgtgtggcgtcgccctgcgtctcctggagcccggcactggatcccaggaattccggaccggtaccagcggggaaggaa

SEQ ID NO: 439197 - DNA, 1011 bp, Homo Sapiens
acatcttgcagagtaaatgtagtagtgaatgtcagagcatcaccgttaagagagtttgaagtacttgctaatggtgtggctaccatattttcagctcctgcttttagtataattaagtaatagtaatttgctgcatctggtttctgaaccgtactgcagcccaaaatctgcttttagaggcaaggcggatttctgacaaaagtaactgatccttttggatggcataaattcactttggggactagccctattcttcctctgaggtccttcgttcttcaatttattcaattcatcaatcaaaagtgttctcttcccagttgcaattagaagaagtctttctgcttcagcttcttctagggacccttttccatgttcttcatcaacacagcagttaagagcctggctagcttgatagatcactgtctgttgcatatttatttcgttattgagttcctgcattttctgtttgatattaacttgacaaggaaaggcattatttttttcatccagttttgaagtaacatcttccttccgaacaatcacctgctttattgatggacgttctgtttctttgaatctttgagatctatatgcatcaatgctgtaaagaagatcacgatcttcagaaccaaggctatcaccagattcagctcgagggacacgagttctttggaattttcctggttttggactttcatcacttctgctggtgtctttcaattccagtctaggtgtggacactaaactctctggacttaccacaccaactgtttgtgccaatggtgcaagtaaagacattgaggagatattcagtgcatcttcctgttcttcgctgctttctgctaatgcttgatccatctcctcttggctcttctccatatctagttcaccttcctctaggacatcactgaagaggtcattaattactttcgaactattgatatcatcatcatccacactcatctcaatttcacgtatcacttcaattttctgctcaaccttgggtctgat

SEQ ID NO: 439198 - DNA, 1146 bp, Homo Sapiens
aggatctcctgtcttcgtgcctccgataagcttgatcaactcctctgcgtcttctccatatcagttcacctcctctaggcatcctgaagagtcaattattactttcgacctattgatatcatcatgggtctgatgttacttttaaggatttgtcctcttctaataacaatgttattttcaaagggctagatttcgtcatttcgcattcagtgaaacctttaggttctgtactagaatttttggctggtatctggttttcggtcaccttttctgttactggaagtgactgagtttttgaaacaccttggtgttttttgaggggagtgctctgacagtgagtttcctgtttggtttctagttgtttgctttttgagtttccgcctttttctgcactccatatattgcccttgtcaaatcggccacgaagacatgctagttctttttgacgttcctgcttgagctgttgtgctaaatgggtagtagatgaagatgtgtcttgcttgaataatctttcttggatggcctttgtatttggagtaataatgggggttctgtggggtgtgctacgagctggactttctttgctatgttcttgacaacgctctccaaagcgttccaggaaaggcttaattcctgttcctcctggtgtcgtagatttgtctttagattgagattgcagacaaatttctctacttaattctcccttggatggaactgtctgggataaagttgacttcacaattggtttcgatacccccgttttcagaggactaataggagtttttggaagtagctcaggattttgtccctcacaacttttagcatcagtgatagatgtagtagatttcactggagaagtagctttcacagagctggaaattgaggcattaaccaaagacgcatcatcagcacttgaggatagggctttattcaaagaggcatcgccatccctttgggaacagaatgtagcttcctgcttaacactgctgctattgatcctagcagatgctccacttgcagaggaaaatttggataaacaagcggtaccaggctgttcttgtacactgttttgttttgcaaatgagtgatttacatcatcttcccaggagcaaatagttgcagcaagattggccagacggcccttct

SEQ ID NO: 439199 - DNA, 1564 bp, Homo Sapiens
  misc_feature (29)..(29): n is a, c, g, or t
  misc_feature (744)..(791): n is a, c, g, or t
aacaaagtggggcaaagcatgcctaaggntggctccaacatctctctcccgggggcttcatggcccctgatgcccggaggaagagtccaaacccgggcttaccagagaaggggctggtggggcaggggcccaggttccagaagcccgctggggtccgggcttgggaacagctccccttggtgatccagaaggaacttggtgaaggtgttgatgggattaatggccttgagggtgatggccgcatccttggcccacagcaggttagggccgaaaacaacagccaggttagtgttggtcatcttgttctggtcactgtgtgcagaaatctgcaccaggaaagcagtcaggaaacgaagcacctggtagttctcctcgggcagcgtctggaggacctgcagtgtcgctggcaccctctggctttcatcaatgttgaggaagcccaccacatgggggtagaggtcaaaggtgagcaggggctcaggaagctcccggaggaaggtcttgaggatgactgctggcaggtgcagctcattgtactggtcgaaatccacaggcagccccatgttgtacttctgctgcacttcccggaccacttgggtgttggccgacctccggaagatgccctcggtggtgagagcgtgggcctgtaagtaggcaacagtctccctgagtacaatgggaatgggctcctgctctggattcttctcctggaggtgctgcagcgagactccaaactgctggttnnnnnnnnnnnnnnnnnnnnnnnnnnnnnnnnnnnnnnnnnnnnnnnncttctgtgtggatttcaggaagtcgtcatatttgagcacttggcgagggatccccagctgctccagcttcacgtgctcgctcagctcgctcaggtaattcacatagaagatcttctgcccgaacttgaagctgatgaggggcttgaagaggatgagcagagttttgatgaacatggttggatgcacgatgtacaaggccttgatgttcttcttgtacttgcggtcaaactcccggtaggcatcacggagccagctgagggagggcttgttgtcgctggtcaggccgtggtgcagatacagaagtgtgtagtcactctccacgtactggtccagggtgtgcttcaggtaccccaggagcttgctgtggtcgagctggtggctggggggcattcgacaggcactaaacacaatgatcttccgcccatacttgtcatctcctgccacctccacgatctggtgccgggcgatgtcatagtatgggtcatcccacttcaggtgtgtgacaagttccggggagctgcttttggagtcatctgacttggggaagtcaggcatttcatccgagggccagttcttctcatcgatggaggccagcttcagctggttcagagcctcgctggtgtcatccaaggtcagatcatcctgcagctctgagagcggatccatggccaagcctgtcccagacagccttgccctgcagaaccttaagagaaaccgcgctcgggcactgctccctctgccacgcctgcctcgtgccgaattcgccacccagc

SEQ ID NO: 439200 - DNA, 1144 bp, Homo Sapiens
  misc_feature (177)..(177): n is a, c, g, or t
  misc_feature (201)..(201): n is a, c, g, or t
  misc_feature (319)..(319): n is a, c, g, or t
gcgggagtgcagggttctgctggggtagagggcgagtcccaggtactgactgtagtgggtttgctactgaagtctttgcttgctgtcctgatctctttacctgggtagtcctggggactgccaccttccctggggggctgcagattgctgcgagtggcacccatgacagggaagatntagtcgctgggaaacaggaacctngtgtccactttcccgccactctgtgtcctgcagtgcttggtcttggaagcccttttcgagttgacagagaatccggaggtagggcacctctgcccaggtggcacactccggctggtgnagtggcattcggctggcaggcctggggatggccgagggaatgggcagttgactggaagatttagcagctgctccccgcaacttggctgctctggtctcctcactggctgctgctctcccactgggcccggctctcccccggactgggggagtcgatcgggtaagaggagaagatgctgggcttttggatgcagggaacagatttgcaagtgggtgactccctcttcatgttggagggcctctttccagatgtagcccggagagccctgactgaccccttcctatcattactccggagtcgaggcgtcaggctgcttggggagggggtgctccgcgtcaaagagttcacagtggtcagcaggtctcggacaggactatccttcagcacaaaggtctcccgccgaggactgggcttcactcggcgaggcccacaggccctcgcctgcgctctcccgatcctgcagggcacactgctccagctgagcggccagccggttggcctcatcgaggatctcctccagcttctctggactgagggggcctaggctgagcctcacaccctggggggcaggtgccactgcatttgggtcacttcggtgggagaggccccgtcgaagtggtttctctggagtcaccaacactgttatgtcttcctcctcacggctgtcagatggtgacagccccccaaagtccaaggtctcatccacaataaaccttacatcttcctccaaatcctccatgtccagccagcaggagcgagagtccagttagatctgagcctgtgtccacttcccgcgccgccttatcttccacgcaacaggctttc

SEQ ID NO: 439201 - DNA, 1735 bp, Homo Sapiens
acagagaatataaaaatacattcactttattttagaaaaatgaagactcatagagtaagcttatcacaaactggcctattaggagtcacagaattcacaggaaacaatttctgaagaccaggtgcctgctgccacctctccaagcaggccagagtccagtagagaatgcgattcaggaagatggctcctcagagggcagggaggttagctacggaggccgctcacgtggaaatgtccagtgaaccaatgccaaggaagaagataaaattctctggggctgaccacaacagtgggggtggataaagacaaaccacttgcctgtacttctcatcttctatttgttcatttcactgctggaaggtgacctcttttcccctaatcttctttcaacccagagagtttaagtcttctccagctcaatcctaatccaccccatttcccatggtctctactcctgggagaccagccctggtggcatctcttcctcctgtccctgggccagaatctgctggagtcagggtctgctgggtagaggcgagtccaggtactgactgtagtggtttgctactgaagtcttgcttgctgtcctgatctctttacctggtaggtcctgggactgccactttcctggggggctgcagattgctgcgagtggcacccatgacaggaagatttagtcgctgggaaacaggaaccttgtgtccactttcccgcactctgtgtcctgcagtgcttggtcttggaagcccttttcgagttgacagagaatccggaggtagggcacctctgccaggtggcacactccggctggtgagtggcattcggctggcaggcctggggatggccgagggaatgggcagttgactggaagatttagcagctgctccctgcggccggggcaggcgttgagagttgctggtagaaggctgtggggccaggacggatctgatgggggtgggtgggctggctgctgctctcccactggggcccggctctccccccggactgggggagtcgatcgggtaagaggagaagatgctgggcttttggatgcagggaacagattgcaagtgggtgactccctcttcatgttggagggcctctttccagatgtagcccggagagccctgactgaccccttcctatcattactccggagtcgaggcgtcaggctgcttggggagggggtgctccgcgtcaaagagttcacagtgggcagcaggtctcggacaggactatccttcagcacaaaggtctcccgccgaggactgggcttcactcggcgaggccccaggccctcgcctgcgctctcccgatcctgcagggcacactgctccagctgagcggccagccggttggcctcatcgaggatctcctccagcttctctggactgagggggcctaggctgagcctcacaccctggggggcaggtgccactgcatttgggtcacttcggtgggagaggccccgtcgaagtggtttctctggagtcaccaacactgttatgtcttcctcctcacggctgtcagatggtgacagccccccaaagtccaaggtctcatccacaataaaccttacatcttcctccaaatcctccatgtccagccagcaggagcgagagtccagttagatctgagctccagcccaccctgtgtccacttcccgcgccgccttatcttccacgcaacaggctttctccccctcgtgccgaattcgccacccaggcctcgctcc

SEQ ID NO: 439202 - DNA, 1090 bp, Homo Sapiens
  misc_feature (816)..(866): n is a, c, g, or t
  misc_feature (870)..(871): n is a, c, g, or t
  misc_feature (873)..(873): n is a, c, g, or t
  misc_feature (1053)..(1053): n is a, c, g, or t
cgggtttgggtcagagcacttccggctccgccagtgggtgcagtccagcccacaggccgaccacttgctccaacgggctccagctgccgtccacgtagacgatgacagcagcggaggcgctgcggctgacgtgccacgatgttcttggccacgcaggtgtagttggccgtgtcagcaaggcgggcctgtcgcaccaccaggctgtgctcccgcgtgatgtatacattggggtccagggacgggtccaccaggtcctcgttccggagccactccacctcggctggagggatgccctccggtggacggcagggcagcacgatgccctgctccagggacacctccttggccagcggctcctgctcgaagttcttgcgcaaataggctatgcggatgtaggccttctgactcttggtggtgcccgaggagctccatgccacgcactggcaccagtattcctccagcccgaacaccttctcgacctgctgccttgagacattaatgcggacctccatggtgggcagcccactgctcccgtctgtgctgcgctcgatcacgtggtccacctggcgcacccactccccgttgcacttgaagaagatctgcgtggcgggcacggccttgcacacaagcagcactggcttgttcttgacgatgtacacatcctcgggctccaccaggaagtggggaagcaggtccgggttggcaccaggcactgggttggccacggtggcactctgctgggcacccgagccgcggagccaagcggcgaggactatgcccaggagcgctggccacaggccgggccggacggccatnnnnnnnnnnnnnnnnnnnnnnnnnnnnnnnnnnnnnnnnnnnnnnnnnnngggnngntttagcgcctcagcccggagccccagctcggggcgcccccggggcccatgccagcggactgcgctgcctccgggcggccggctgccgggcgcacgcggcgcgtggctcccttgggcacgggagcgcagcaatgcagccggggcggagcgcagcgccagccgcgccgcgcaccgagccagncgcgccgcggagcccatcccgggaattccggaccggt

SEQ ID NO: 439203 - DNA, 1039 bp, Homo Sapiens
ggtatggacaagcgcacagccacggaaggcgacccgggatgaggcccacataggaggccaagtcctcagggccagaacccgtgggacacagagctcactggaccatcccgggtgccaggtccagtgacctgggcacacctccccctgccgtgccggggtgctgggttcagagcactccggctccgcccaagtgggtgcaagccaagcccaacaggccgaccacttgctccacgtgctccatctgccgtccactgggcacagggtggcgcaggctgttttctggacattctgccccctcacagaaagcgcccccgttgagaggcgccgggttggtgcagctccggctccggtttctgccagccgcgcccacagctggcgctgcagacggaccactcggtccacggtcgaccacccaccgttcacgtagacgatgacagcagcggaggcgctgcggcgacgtgccacgatgttcttggccacgcaggtgtagttgtccgtgtcagcaaggcgggcctgtcgcaccaccaggctgtgctcccgcgtgatgtatacattggggtccagggacgggtccaccaggtcctcgttccggagccactccacctcggctggagggatgccctccggtggacggcagggcagcacgatgccctgctccagggacacctccttggccagcggctcctgctcgaagttcttgcgcaaataggctatgcggatgtaggccttctgactcttggtggtgcccgaggagctccatgccacgcactggcaccagtattcctccagcccgaacaccttctcgacctgctgccttgagacattaatgcggacctccatggtgggcagcccactgctcccgtctgtgctgcgctcgatcacgtggtccacctggcgcacccactccccgttgcacttgaagaagatctgcgtggcgggcacggccttgcacacaagcagcactggcttgttcttgacgatgtacacatcctcgggctccaccaggaagtggggaagcaggtccgggttggcaccaggc

SEQ ID NO: 439204 - DNA, 1293 bp, Homo Sapiens
  misc_feature (112)..(112): n is a, c, g, or t
  misc_feature (719)..(728): n is a, c, g, or t
  misc_feature (1256)..(1256): n is a, c, g, or t
  misc_feature (1278)..(1278): n is a, c, g, or t
aactgtccatttttactgttttttgctccatatcaggaaatattttggtaggaattaggagaacaaaaaggcacttttatcccatttatttctttaaaaaatgtaaggattntcatttatattgaaaaataatattaatcattttgctgttaacacaattctctgatgcggtgctgtacagtcatttttaaatctcttgctaacattttattggcagtatgtatttctaccattgtaaccaccattgtgctattgtatctcttcacttctgtgaaagtaatattttttataaaatacactgaaatttaacctcagtaattgagtccattttcaagtgtggtcaagaataatcttcttggcttacccctttacataagcattataaactaaaatgaaaaccaaaccagacacctgacatagagtctttattttaccccaagttttttgggccactgacattgaatgcaacaactgatttcatacaactgagttactctgttcactccactgaatgcaacccatatagtttcttgcacaaggtgcatctggattccaaatattggatttgagttgactctactcatttattatacactaaagaaattttgttcttcatagttaaatgtactagcatttaatttatattttacatacaacttgcaataatgaaattccttatgtcaggaccctgaaaataagcacatttgaaaactcttagnnnnnnnnnnttctgtaatgtcctctagatttagattatgagccctgaggagttattggcaagatttgtgcaaaataaaatatggggagacttgggagttgtctttgtggtttcaaaagtgtaaataaccaattcagaaaacaaaatggaaaaacgaccccttgttaccttgattcactgtatgtggaaaaataatgtaaccaaaagggaagagctttaataaaacttatgttaataactctatgaaacatataagctaactatatatcaaacatttcattgagtttggatgtattttccacatattaaaaaaatagttccctaaggcagctttatggaaactaatataggttggttttacaatttaaaaagtatattctataatatataataaaacaaattgttttaaatgtttagtttcacacatacatagtaccatgattttctttgaaagataaggatgtaatgatttagataaagcatcatgtaaagaaatcctatatcatttatatgtgtaattcatttcaaatgtcacaantaaagcatcatcctcaaatatntcatctgtcaataat

SEQ ID NO: 439205 - DNA, 1583 bp, Homo Sapiens
  misc_feature (1397)..(1397): n is a, c, g, or t
  misc_feature (1430)..(1430): n is a, c, g, or t
  misc_feature (1444)..(1444): n is a, c, g, or t
  misc_feature (1475)..(1475): n is a, c, g, or t
  misc_feature (1517)..(1517): n is a, c, g, or t
  misc_feature (1527)..(1527): n is a, c, g, or t
  misc_feature (1534)..(1534): n is a, c, g, or t
  misc_feature (1536)..(1536): n is a, c, g, or t
  misc_feature (1541)..(1541): n is a, c, g, or t
  misc_feature (1552)..(1552): n is a, c, g, or t
  misc_feature (1560)..(1560): n is a, c, g, or t
  misc_feature (1572)..(1572): n is a, c, g, or t
  misc_feature (1576)..(1576): n is a, c, g, or t
  misc_feature (1580)..(1580): n is a, c, g, or t
tggaccggtccggaattctcgggatgcccgcactgcccccgccgcgggctagggacacctggcccgccaccatgacttccagcaacgatagagatgcccggtcgaggtgaaggccgaccccgaccgccctcatggcgtcgctgcacctcctgccgtcgcccacgcccaatctcgaaattaagtacaccaagatctttataaacaacgagtggcagaactcagagagtgggagagtgttccctgtctataatccagccacaggagaacaggtgtgtgaagttcaagaagcagacaaggcagatatagacaaagcagtgcaggcagcccgcctggctttctctcttggttcagtgtggagaaggatggatgcttcagaaaggggacgtctgttggataagcttgcagacttggtggaacgggacagggcagttcttgcaaccatggaatccctaaatggtggcaaaccattcctgcaagctttttatgtggatttgcagggcgtcatcaaaacctttcgatattacgcaggctgggctgataaaattcatgggatgaccattcctgtagatggagactattttacctttacaagacatgaacccattggagtgtgtggacagatcatcccatggaacttccccctgctgatgtttgcctggaaaatagctccagctttgtgctgtggcaatacagtagttattaagccagcagagcaaacaccactcagtgcactctacatggaagccctcatcaaggaggctggctttcctcccggggtcatcaatattttgccaggatatgggccaacggctggggcagccatagcttctcacattggcatagacaaaattgcattcacagggtctactgagggtggaaagcttatccaagaagcagctgggaaaaagtatttggaaagagtaactctggaacttggaggcaaaagtcctaatattatttttgctgatgctgacttggactatgctgtggagcaggcccaccagggtgtgttcttcaatcaaggtcagtgctgcactgcagctctcgcatcttcgtggaggagtccatctatgaggagtttgtgagaagaagcgtggagcgggccaagaggcgcatagtggggagtccctttgaccccaccactgagcagggtccccagattgataagaaacagtacaacaagatcttggaactcatccagagtggtgtggctgagggcgccaaactggaatgtggaggcaaaggactgggccgaaaggggtttttcattgagcccacagtgttttccaacgtcactgatgatatgcggattgccaaggaggagatcttttggccctgttccaggaaatttttgagatttaaagacgatggattgaagttatcgaaaagagccaatnaactcagactttgggactcgttagcagctgtcntttactaatggacntcaacaaggcccttcacagtgtcttctcgcnatagcaagctcgggactagtttgggatccaattgttcacaangccttcaaancgcccananccccntttgggggganttcaagangtcttggtaatngggnaganaaa

SEQ ID NO: 439206 - DNA, 1542 bp, Homo Sapiens
ttcttggtaactttttttctcttttattgccaagtttaaatttacaaggaagttccagttttcatttccaccctcgtgttcagtacccacgaagcatgagtcatgctggcgaaagcaggtacttccctagagcggtcccgaggctcagaggcatcgaggttttctaaccctcggttctcactgggacaaaaattatttacatatttttagctcaaggaaacataaggaactcgtacagtgtaggcccaatgtcaagatgactacattaaatgcttcagatttatttattgcatctagacaagaagatcaaaatcagttcaccccacgcctttttaaaaaacggtgcatctcagagaccttagaggaatctagcgcgtctggcagggctgcgcttcttcacctgccccttaggttgcttgtgaacgcaagtgttctgggttgtgggaggctgccaaggctccgggagagggactgggctgggacagcggcagaggaggggctgctcacggaggcccctcctcccaatcccacgcgatggtgaaggctggcccttcctgcctgggggagcgcctcagctggccccatctgacctgctgggacaggtaccttgcacgtccagaaagggacgagcacacctccacaacaatattcaaagccaaggtttgggagttcctgcggccagccctgctccctgacttggcaaacccagccggaggtgcacaggggaagggtggaccagggcctgggccataactctaagtgctctctgcagggacttggggggcgggccggatgggtctgtgggggctgacctcagacctctgaggctatgacctgagtgtcagaagccacagcccccactgtgggccttcccacactcctggctcttcctctggatgccaggggcccagcgtgtcctgtctggactggcctgtctgggagcgccccagctatgaggtttgacgggagctcctgaagacatagctgtgcccactgccgctgagacctgggtgaggtggggtcctttgaagccaaaatggctggtggcctccaatgggctggctcccagacctccttacataagcaaagcttctgggagccctggttataggaaatcctcaccccacacacctggaggtgtcccccagacgcaagttgccagccccagctgaaagaggcccctgagagtgaccctgcaagcccacatggggactgcccttttcttggccagggatgcagggtagaagccctgccctgagcagtgtcttttatcctccgctggtcctcccagtcacctttaatcctctgctggtcctcccgggcatgctgtccagccctgaccaagacctctctccttcagtgctcagtggttacaagaccagttggagcccagagacttctgacagcaggctggtggcccacccgtgtggcatggagtgagctgcaggctgttcctcctggtcacgccttggggtggggcagccacttgccttctctagtttctgctgccccacagacagagtcatttcaaaaccagaagtg

SEQ ID NO: 439207 - DNA, 426 bp, Homo Sapiens
  misc_feature (404)..(404): n is a, c, g, or t
attgccaagtttaaatttacaaggaagttccagttttcatttccaccctcgtgttcagtacccacgaagcatgagtcatgctgggcgaaagaggttacttccctagagcggtcccgaggctcagaggcatcgaggttttctaaccctcggttctcactgggacaaaaattatttacatatttttagctcaaggaaacataaggaactcgtacagtgtaggcccaatgtcaagatgactacattaaatgcttcagatttatttattggcatctaggacaaggaagatcaaaatcagttcaccccacgcctttttaaaaaacgggtgcatctcaggggaccttaggagggaattctaggcgcgttctgggcagggctgcggtttctgtcacctgccccttaggttncttgtggaacgcaagtgttctg

SEQ ID NO: 439208 - DNA, 1525 bp, Homo Sapiens
  misc_feature (52)..(52): n is a, c, g, or t
  misc_feature (1432)..(1432): n is a, c, g, or t
  misc_feature (1519)..(1519): n is a, c, g, or t
agacgccgagaaggtcaaagagatcgagatggtgatcatggagcgtagaagnctctcagagctggccgccagcacctccgtgcaggagcagaacaccacggacgaggagaaaagcgccgccgccacctgctctgagagcacgcaatggagcagacccttcctggatatggtgtaccacgcgctggacagcccggatgatgattaccatgccctgttcgtgctctgcctcctctatgccatgtctcataataaaggcatggatcctgaaaaattagagcgaatccagctccccgtgccaaatgcggccgagaagaccacctacaaccacccgctagctgaaagactcatcaggatcatgaacaacgctgcccagccagatgggaagatccggctggcgacgctggagctgagctgcctgcttctgaagcagcaagtcctgatgagtgctggctgcatcatgaaggacgtgcacctggcctgcctggagggtgcgagagaagaaagtgttcaccttgtacgacattctttataagggagaagacatttttttggacatgtttgacgatgagtataggagcatgaccatgaagcccatgaacgtggaatatctcatgatggacgcctccatcctgctgcccccaacaggcacgccactgacgggcattgacttcgtgaagcggctgccgtgtggcgatgtggagaagacccggcgggccatccgggtgttcttcatgctgcgttccctgtcactgcaattgcgaggggagcctgagacacagttgccgctgactcgggaggaggacctgatcaagactgatgatgtcctggatctgaataacagcgacttgattgcatgtacagtgatcaccaaggatggcggcatggtccagcgattcctggctgtggatatttaccagatgagtttggtggagcctgatgtgtccaggcttggctggggagtggtcaagtttgcaggcctattgcaggacatgcaggtgactggcgtggaaggacgacagccgtgccctggacatcaccatccacaagcctggcgtccagccccccattccaagccctttcccatccttcaggccaccttcatccttctcagaccacatccgctgcatcatcgccaagcagcgcctggccaaaggcgcatccaggcaaggcgcatgaagatgcagagaatagctgccctcctggacctcccaatccagcccaccactgaagtcctggggtttggactcggctcctccacctccactcagcacctgcctttccgcttctacgaccaggggcgccggggcagcagcgaccccacagtgcagcgctccgtgtttgcatcggtggacaaggtgccaggcttcgcgtggcccagtgcataaaccagcacagctccccgtccctgtcctcacagtcgccaccctccgcnagcgggagccccagcggcaggggagcaccagccactgcgactctggaggcaccagctcgtcctccaccccctccacagcccagagtncagcag

SEQ ID NO: 439209 - DNA, 394 bp, Homo Sapiens
  misc_feature (161)..(161): n is a, c, g, or t
  misc_feature (372)..(372): n is a, c, g, or t
gggggctgtgtttaatcttgcgctgtgctttgacaaattctaagaagctggtgctgccagccgacggggcttctgagagaggaagggcagctcacacaggctccacagagagaaagaccttgaacgcccaccatgatgaacgagctgtggcgcagggcggngggctggctcacctgggcaccttgtccaccgatgcaaacacggagcgctgcactgtggggtcgctgctgccccggcgcccctgggtcgtagaagcggaaaggcaggtgctgagtgggaggtgggagggagccgagtccaaaccccaggacttcagtggtgggctggatttggaggtccagggagggcagctattctctgcatcttcatgcnccttgcctgggatgcggccttt

SEQ ID NO: 439210 - DNA, 1710 bp, Homo Sapiens
ccggaattcccgggatcgcggcagtggtggcttcccatccccaaaaggcgccctccgactccttgcgccgcactgctcgccgggccagtccggaaacgggtcgtggagctccgcaccactcccgctggttcccgaaggcagatcccttctcccgagagttgcgagaaactttcccttgtccccgacgctgcagcggctcgggtaccgtggcagccgcaggtttctgaaccccgggccacgctccccgcgcctcggcttcgcgctcgtgtagatcgttccctctctggttgcacgctggggatcccggacctcgattctgcgggcgagatgcccctgggacacatcatgaggctggacctggagaaaattgccctggagtacatcgtgccctgtctgcacgaggtgggcttctgctacctggacaacttcctgggcgaggtggtgggcgactgcgtcctggagcgcgtcaagcagctgcactgcaccggggccctgcgggacggccagctggcggggccgcgcgccggcgtctccaagcgacacctgcggggcgaccagatcacgtggatcgggggcaacgaggagggctgcgaggccatcagcttcctcctgtccctcatcgacaggctggtcctctactgcgggagccggctgggcaaatactacgtcaaggagaggtctaaggtaggacgcgctcggcgccctgccgcagctgctcccgcggggacgggaggcactcggagtccgttgtatgtcgacttcccagggccgtaagcgaactttgttttttaaccaagaagtcagcctggtttgtctctactcgctgcttccccccacccctcgccccagctcctctgagcgaaagtcaacgttaaggggctcaggtgaaccatgatgatgaccttctgttgactttgaaatattggctcttgtgggtgacaaaagccagacaagctgtggctgtggtccgattttaagacgaggttctcaaagatccaaaggagggaaagggtattggaaacactgtgtatcatctgagacacacgtgtcctcatgatcttaaatgcctactttaaagccacctaatactgcccttcattgtggtcagaagagatttctacaaaagcactcagaattctggaggcagttgtgattttgccatgtggcagttggtttgtggagttgggcaggtgtgaaagggtaaaactccacttctgaatgctgcttctgccccctgggacccagcacattgttagaccatcttcttgactgaaaattctctcctgatgctgagccctgcaccaccaccttccttttcctaactatgaattgatggcaaagtccactcaaaacaaccagttaagtgctcacgagagagtagtcaagcacctccagaaagaaaccgggtttttgttcacatagcaggaagtgactccctgggtggtaatttatcttggaaacacaggtagattggcagaaaaacgggaacatgtaggtaccgcgatgttggtgcatgtccattactttgggataggctttctcagtctttcctcaaatgatagttgagccagttttccagtggcaattctgagtgacttgcgcttgtcttatggtgtggtcaagggacgttcagaactacggaaaactttaactgaaacagcgaagcagagtataccggcatgagagggaagatgaacactcacctatgta

SEQ ID NO: 439211 - DNA, 1042 bp, Homo Sapiens
  misc_feature (50)..(86): n is a, c, g, or t
gatgatagactactataggggaatccgcaggcttatcgcggtggcggcgnnnnnnnnnnnnnnnnnnnnnnnnnnnnnnnnnnnnnatcaggccaaatcggccgagctcgaattcgtcgagagcggagtctggccgcagtcgcggcagtggtggcttcccttccccaaaaggcgccctccaactccttgcgccgcactgctcgccgggccagtccggaaacgggtcgtggagctccgcaccactcccgctggttcccgaaggcagatcccttctcccgagagttgcgagaaactttcacttgtccccgacgctgcagcggctcgggtaccgtggcagccgcaggtttctgaaccccgggccacgctccccgcgcctcggcttcgcgctcgtgtagatcgttccctctctggttgcacgctggggatcccggacctcgattctgcgggcgagatgcccctgggacacatcatgaggctggacctggagaaaattgccctggagtacatcgtgccctgtctgcacgaggtgggcttctgctacctggacaacttcctgggcgaggtggtgggcgactgcgtcctggagcgcgtcaagcagctgcactgcaccggggccctgcgggacggccagctggcggggccgcgcgccggcgtctccaagcgacacctgcggggcgaccagatcacgtggcatcgggggcaacgaggagggctgcgaggccatcagcttcctccctgtccctcatcgacaaggctggtcctctaactgcgggagccggctgggcaaaatactacgtccaggagcaggtctaaggccatggttggcttgctatccgggaacctggaccaggttcatgttccgccacgttggacaaccccaaacggtgatgggtcgcttgctcacctgcatcaactatctgaacaagacttgggatgccaaagctacatgggggatcctgcggatatccccgaggggccatcatcctagcagcatgtgaagccattttgaccgaactctgtcgtctggcaaatcggaggaacc

SEQ ID NO: 439212 - DNA, 1100 bp, Homo Sapiens
  misc_feature (708)..(767): n is a, c, g, or t
  misc_feature (1047)..(1047): n is a, c, g, or t
gtacctgcttaatgggcactttctcttgccccatcattacaggcattgtggtcagaatggtcccactgctgcccaccagggttggtacttgaagggcagccgtctggataggggtggtgagggcggtgagggccgggttctggaccgcagccataacagggctgccatctgtcttcagtgtggtcaaaacaagggaatctgtcttgatgatctgaggctggaccaggaccgggacctgctgcacctgtggcgcagcacctgtctgcaccgtagccggggcaagggtctgcagcgtgccattggccgtttgtgtcagcacccgctgggcctgtactgtctgcacctggctgctgaatggtgaccggctgtacctgggaggatgtcaccaggctttggacttgaggctgaaggacttgaaagctagtagctgcattctggtatatcaaaggctgctggatgatcctcgtctgcggagtggtgctgaatgttggcgtgatcattaccgtctgttgttgcagctgagtttgaggttgaggctggggctgggggcggggctgaagaataggagttgccctgggtgtggtgggaactgaggtgggagaaaccttgacttgcagagttggagcctgtggggaggccgccgagggagagaaggaaggtaatgtgacctgggtgaatgaccgttgcactgaagggtccacagctccnnnnnnnnnnnnnnnnnnnnnnnnnnnnnnnnnnnnnnnnnnnnnnnnnnnnnnnnnnnnaccactaccaccactgccaggaaaggagctacacagctgttctgaaaacaagtcagggaactctcccacttgattactgacaaattgcagcatctcgtcgatgtctcccagggtcagctcgtcgcccagctccgtgagggtctccatggtctccagaccacccagctcgccgctgtcgtccatcgcccggctcagcgcagaagccccccctgccgtcccgctcagggagacgcgggggcggtgccgtcgccaccgcccatgacacccgacaacccccgcnccggcaccgcctcaccgacgggtgccacccgccgccatgtttgcgttgcgccc

SEQ ID NO: 439213 - DNA, 1243 bp, Homo Sapiens
  misc_feature (12)..(12): n is a, c, g, or t
  misc_feature (20)..(20): n is a, c, g, or t
  misc_feature (31)..(31): n is a, c, g, or t
  misc_feature (34)..(34): n is a, c, g, or t
  misc_feature (48)..(48): n is a, c, g, or t
  misc_feature (51)..(51): n is a, c, g, or t
  misc_feature (54)..(55): n is a, c, g, or t
  misc_feature (57)..(57): n is a, c, g, or t
  misc_feature (66)..(66): n is a, c, g, or t
  misc_feature (110)..(110): n is a, c, g, or t
  misc_feature (141)..(141): n is a, c, g, or t
  misc_feature (145)..(145): n is a, c, g, or t
  misc_feature (154)..(154): n is a, c, g, or t
  misc_feature (171)..(171): n is a, c, g, or t
  misc_feature (174)..(174): n is a, c, g, or t
  misc_feature (181)..(181): n is a, c, g, or t
  misc_feature (192)..(192): n is a, c, g, or t
  misc_feature (1211)..(1211): n is a, c, g, or t
ccttttgacaanactcaatnaattcctcaanggncaccacaccatccntgnttnngnccatcttcnggaagaagctctccacgtgttcccttggggcctcctcccggagngcagggtacgtgtacttgcccatcatgtcanaganggacttcangatgtcaagcatttccnccntggtgangcagccgtccntgttaaggtcatacaggttgaaggcccaattaagcctgtcatctacagttccccgaagaatcacggacaaaccagccacaaagtcctcaaaactgaccgagccatcatggttggtgtcaaaggcattgaagagaaaagtggcataggtgctggagtctccttgaggaaagaactgggagtaaatctgcttgaagttctcctcattgacaattccgctgggacattcgttcttgaagccccggtacaggacctgcaactccttgcgcgtgaatttggtttgctcctgcagctgctccagaccctcaggccggtgacacacggtggacaattcaaattcatcgtccacgctgtctgggtccagcaggcggggtctgtgggggcggagggaggctggggcggctaatgtttcactgactgagggcagggcttggggcccgcagcacggcagcagcttgaggaatcgctgcttcagcgcttttttagtgggccctggagggtggcccgtgagctggtcgtaggagccgtccaggtctcgggaatcggacaaactctccttgcggccctggccccgcattgcccccggcgccccgctcccgcccgggccgtgggagggggcgccgggtggccgggatagggcgctcacacggcgccccctggcggcctactgtgctgtcggggctggggaagtccgggctgaggctgagtctgggaatgggcccggggtctgaggtctacccggaggtcctggagcaggagagggaacactaggcagcaggtgagcgcagagccggaggcagagcggagactgagcagcggagccgagcacgagcggcactctctcctcccgccccactccccgcggctgtcaccgcctcctcccactctttggcgctgccagggactggctccccatacccccgccccccaccactatgcagcccgggggaggcacccggtgaaagcgacagcgtgggtcgacatatcccggaatatccggaccagtaacagcctgcatgttnaacacagctgttcatagttacaatagcaacgg

SEQ ID NO: 439214 - DNA, 2251 bp, Homo Sapiens
tgcatagccattgtgttttattagatctggtatatttcttactttacaaaatatatagaagagcccaaaatgcaaagcagtcaacagtcttctgatggggaagggggctctctgggggctctcccctcagattctggccaactgggagggtaagctaaatgggacgagcaggtgtgctaaggggtggccgcatggctggggtgctgacaatggggttggaacctgggtcctatggtccctgccctctaggtgtgctaaggggcatctctgggtagattgagtcaagcaagaagagaccctagggaactgaggaggttatctggggtggggtggggagagcccaggttgattgaagattctagtgaatgcccccacactgggttcagatgctatgcctgcctccctccttccctctcccttctaaggcatccactgtggggagtgataggccccaagttcaggaaggtcccaagtctatagagaacatgggaaacaaaaactcaagtcatagccctcaaaacagggacgataagcaaggagggtgggatgaaattttggcaggcatcagccaggacatcccccatccacattcccccaccacaaccaccaccaacacatgcaggaaagaaggagaggaagcaatgccagagatgagccagatatctggccccaggctctccatggataccgaggagggtgtggaaaatttctggggcatttctaaggagacaaggtcttctgcaaagcctggaaacttatattttgatggcctgtggtagcagacctgtggaacttggagctataacctggtatgcctgagcaatcataatctgtccaggcccttctattctcaaccccagccacctcctaggacctatccattgactcaggcccaagatttctccctatacattcttgtccccctcccacagggctctcaatggctggtctgagaagccagccagtgccaagaatggagcattctctctgagaggggagtcttaggggaaatgtttatgaggtcagggatgggggaagcaccatagcaggagacatctgtctagtgtgtttctagagtaggggtaggaggtggggaaccgctcaattcctacaggaggggcactctcaacactgggtgtcaggcaggaagggggtgagagctggtgggagttgggaacaccccccgagatgcactctgcccactctctggccccttcagctccagagatctggactactgaatccccaagctcttggatccctccagcccccagggaggcgtaggatgaggatagacctgggaagagaagggtgaggtccgcctggactagggttagagcatggtccccccaggaaacactgaccccctctcctgggggctagatgacattgtcaaagagctgcatggacctcatgatgttctcatccttttgacaagactcaatgaattcctcaatggtcaccacaccatccttgtttctgtccatcttctggaagaagctctccacgtgttcccttggggcctcctcccggagtgcagggtacgtgtacttgcccatcatgtcatagatggacttcatgatgtcaagcatttcctccttggtgatgcagccgtccttgttaaggtcatacaggttgaaggcccaattaagcctgtcatctacagttccccgaagaatcacggacaaaccagccacaaagtcctcaaaactgaccgagccatcatggttggtgtcaaaggcattgaagagaaaagtggcataggtgctggagtctccttgaggaaagaactgggagtaaatctgcttgaagttctcctcattgacaattccgctgggacattcgttcttgaagccccggtacaggacctgcaactccttgcgcgtgaatttggtttgctcctgcagctgctccagaccctcaggccggtgacacacggtggacaattcaaattcatcgtccacgctgtccgtgagctggtcgtaggagccgtccaggtctcgggaatcggacaaactctccttgcggcacctggccccgcatggcccccggcgccccgctcccgcccgggccgtgggagggggcgccgggtggccgggatagggcgctcacacggcgccccctggcggcctactgtgctgtcggggctggggaagtccgggctgaggctgagtctgggaatgggcccggggtctgaggtctacccggaggtcctggagcaggagagggaacactaggcagcaggtgagcg

SEQ ID NO: 439215 - DNA, 1500 bp, Homo Sapiens
  misc_feature (87)..(88): n is a, c, g, or t
  misc_feature (1315)..(1325): n is a, c, g, or t
  misc_feature (1439)..(1439): n is a, c, g, or t
  misc_feature (1441)..(1441): n is a, c, g, or t
tctcacttgtttaaggttaaccgatttccagtggttcaggagaggggaaaccacagagtctctgaagcatgtctttttatgttctcnnattgttctggttctctttggcttccagatttaatatggttttatccttactcgtagagtcttggaatgcaatattatcatgagctggacttgtgccttgggcctctatcgtgggagaagctgatcttgtatcctcctctttcttacagagcgagtttctgtcaaggtcacaagaagccatattcagaatttctaatccaggatcacttgaagttatagtaccgtctgtcgatgaagtgtgtctgggtaatggtagtgaggaatattccctggactgcagcaggctctcaggacacacgcgttcaacaccattctcttccatacttgggtcatcattcatcctgatgcagcctgagagattcgttcctgggctggggccacttgtggggcctgggcacttgtgttgtctttttacatccaaagcaccatcctttacttctccatatgtgggcctttcaacacagaggtgtggattttggttggctacaccctgagaaaggtgttgattccagggttggaactgctgtaaaactatccagagataaggcatccagcagaggtgtgtaccagcacgtatgtttcaaggtcaggggtgtctgatgtattcttgcttcttgaccaccatatagtttgtggcaacactgcttcaatttttcttgaagaggttgttgaattgcatctgcgcaggacagggaatcatagtgaggaaattcctcatctaaaaagcttcttcagtttccttgtcttctgctgaagtgcctggcaagtgttcgataattcagtatttatagtttgaaggttccgttgttccgaaattgcttcctctaatttatgcagtaaagacgtagctttttcactggcagtgtgggcttctcgatctcgatccttaccctggacatggatagttagtgctggattgtagcagtgtggccaggaaagaaagcaatggagtgctcactcttatgatgcaggcaaaactgaaaatgtgtttttcttctcagggaagtgataagcctctcctgaacttctgcaattctgtgtttgcatgggcttggtatgcctgagctatttctacagcggttaaagtcctgatatgtcaagttgcctctttctgcagagtcgcctctttcatcagcaggctgttgataccgcctctcttacaactccccctttacttcctctgctcactgttagtcgctagggactgaacttgcagttcctctttgcnnnnnnnnnnngtttgttgttgttgttcctcctccatttttatttcatggtttgcagggcatctgaggagatgtcccctgaatctaatgtagccatgagccaccctacctgctcctccacatccntncgccgttggctggtttcttggaggctcttcctaaggatgccttcctggttgacagcatc

SEQ ID NO: 439216 - DNA, 1618 bp, Homo Sapiens
  misc_feature (612)..(612): n is a, c, g, or t
  misc_feature (678)..(678): n is a, c, g, or t
  misc_feature (1465)..(1511): n is a, c, g, or t
  misc_feature (1555)..(1555): n is a, c, g, or t
  misc_feature (1560)..(1560): n is a, c, g, or t
  misc_feature (1565)..(1565): n is a, c, g, or t
catcctcatcatcacatttattgacggcccctaagaggcggggctggggacagaacgtacaaagacaaggacctgccctcaaaaagcttccattctaaggagacagggacagaaaaatacagaatggtctttcctgggtatggcccactctcacctgcacaggtcagaagcccctggcctaccttgccccagggtctggagcatgtgtggacacgtagtagccccagggccatggtgtccctggccccacagccgaggcctgatcacctggctcctaggctgtgggccccagaatttgggggaaaggtaggctcaggacatgatgtaaaacactcctggcggccttggcgttgtgcgagcccagtggagtggtggggtgcgacaggtccccttggcaaggcccctaggggacccaggcatcttcccaggcccctgtagttgagtcaagttctttaacggggctggtccatcaccctagaggccccggggcacggaaacaaaaaggcagggtgtcttcagcgccagaggcataaagccctgcccgcccacccccagccccctctcgggcctcttttaggggaccctcctccccagctcagcctccagggccanggtcctgcctgaggccacgtgggaggggcctgcccctccccccacccaggcagtgggggaggaggnaggagccacgcatcaagtttgtctaggccccccaactggggggccgcaccgtggatcctaccggtgggggggctctggctgtgagggccgagggcttagcatgggggccgggccgagggggcacccgggggagcccttcagtgggggcactgggcgggagtccaaggggggcaggctccggggcactgctggtggcccccgggcggccccagtgggcaggacagctgcagccgggaaggatttggggggatcagcagccgaggtgggggccggctgggcagaacgctcccgacgccgcagcagctcctgcagcttctctgcctgcgtccgcctcaggtgggccagggcgcggccacgctggaaggcaggcaggaaggcctccaggctttgctccccgagcagcagctgctccatctgctcctctgcctcctgctccgcctcttctagctcagcctgcagccagcccagcgcgcagtggggactccagcgatgcatgctttcctccagtcgctgcagcttgtccgcgcagttctcggccacctcacgaagctcctggtatttgatggccagggcagcccggcccatctccaggcggggccgcagggccaggttctccttggccagcgcgtagttggaggccaggcaggcctcacgctccagctgcaggccctggaacttcctgctgagccgcacgatccggtccagcttgggctcatcctgaagcaggtcccggagctgcccggtgctgaggatcccaaagcgccccgggctgccgggctccggcccnnnnnnnnnnnnnnnnnnnnnnnnnnnnnnnnnnnnnnnnnnnnnnngctcggctgctggctcggcccgctcggcccgtccgccccggctncgctncgctncgctccgctccggctccaggatccgctccatcccgggaattccggaccggtac

SEQ ID NO: 439217 - DNA, 1646 bp, Homo Sapiens
  misc_feature (410)..(445): n is a, c, g, or t
  misc_feature (1132)..(1175): n is a, c, g, or t
gaaagggaaacaaaatggtgctttattttattttatttattttaaaaaggcgctacagtggcaggacgctgctggggatggggacacacagtgtaagtggtagattttccaagacttcccctccctattgtcctccgagttcctctcttcctggtcctatcagtagcataggattcaacaaaagccttcatgaatgcctctttatttctgaaaaggaacttctacccctccctttcccatttccagacttgaaatccttcatcagctatctcacttccatgttgaaaccaggaccactgattgtaagtctgaaaatctgggtgtcctaccccataaccaggccaagatatctgcccccaatgctaaagtctctgaatatttcctttctgtacattcaatatatttgggcnnnnnnnnnnnnnnnnnnnnnnnnnnnnnnnnnnnntatctctgtttctttcttcttagataaacctttcatatatgtcatatcctaatttcccaagcctccccacttcttgtttgcgagcctaagcaagactcaagagtttcattgatttcactaggtccctcagcatcatttctttctcatcttctcaccccaggtatcttcccccatcagttgtttcgcccgtcttctgaaatctcccctttttacacctgtgcctaccgaaatctcccctttttacaactgtgcctactactctgctgatattccaagtcccacagttggtatgggggcccatttctcaccagacctggctgcttctaaagctcggcctattgcctaaaagaggatttcaggtcagaggagacagactatagtctaaagaaccatttagagttaaggtagggggtagttgttccctgtagggggcttgtgggagaagatgccagatcgcattaataggacagtgtgatttaaagtgcaacttaaagcaaagcctgggtaataatggaggagattccaaaagggtaagtcagaaaatgttttcttctcactgtttcatccaagagtctagaggcttgagtctgggggcttagaatagacagcaggggaatgggaagaaagcatagcatggccaaataaaccagatggaggttaacttgccaatggataggaaggtatagnnnnnnnnnnnnnnnnnnnnnnnnnnnnnnnnnnnnnnnnnnnngcagtacatcttgtccctacacactgaaagaaataaggtaagtcctaatgttgaataaagttgaagaacgcagaagctggctcttggccttctgttctctgtttcagatttttcaagtttttgtggttcttgtttttatgccaactagaaggtaatggtggggtttactgtagatggacaccgaagggtctttgttttcaagatatcgttagttgagttcgaggagagatcaatataacaagaccttgtgcaattatagttggtggtgatcatgggtctagcctcaaaattttgtgtttctctgcaaggctctgtacatagatgcatgtatatattctgtagcttgtaacaattggctgagaccaccttaaactgcaacttgacttatagtgggactatgcagtaccactatgtgaggcttccttggtaccaaagtgagaccagaaagcactctagggatttggggctttg

SEQ ID NO: 439218 - DNA, 917 bp, Homo Sapiens
  misc_feature (216)..(323): n is a, c, g, or t
  misc_feature (721)..(721): n is a, c, g, or t
  misc_feature (792)..(792): n is a, c, g, or t
  misc_feature (866)..(866): n is a, c, g, or t
  misc_feature (915)..(915): n is a, c, g, or t
agcggggcttattctggcaagtttctccagctctacaagaacttctagtgctctgggcagctgcgaggggtcaagaaaccacatccccaaatccagcgggatctcagagagaaaggctgatgggaagctgcccagggctgacctggcacatgctgggaaaacccctcggtgccaggcaggaggcagagcgtctgcagctcctccctccccaacacnnnnnnnnnnnnnnnnnnnnnnnnnnnnnnnnnnnnnnnnnnnnnnnnnnnnnnnnnnnnnnnnnnnnnnnnnnnnnnnnnnnnnnnnnnnnnnnnnnnnnnnnnnnntgtacctggccagattttgttgttcttcccctccctccactcatacccttaacacagatttaccaagggcagagaaaatgcatgggaatacacagccaagaagcaatccagtgccccttccactcacagctaagttcctgttgacgaggcggcccagctccccaggcgtggctgtgttccggatatccacatcgtggggcgacacataaagctttgtgtcattcaagtcaaagaactcgacttctgtgagacccacccaccacgagttgccccagtttggacaggatctccatggtcacgtagatggcatctttgatctcgtctgccctcattctctgtttgtccttaaagaagagaaaaataacaccaaaggatataagtcatgacaggcttgaatntcggctctgcctctgccaccactgccttcaaaaagttagttaaccttcagggtctcagtctctccatctgnacaatgaggataagaatagcacccactacctatggttatgtacaatgattaaatgaattcatactgtaaagcantcaaaatagaggccctgtgttactggcactctgtgagcattctgtttgnaa

SEQ ID NO: 439219 - DNA, 1252 bp, Homo Sapiens
  misc_feature (1156)..(1156): n is a, c, g, or t
  misc_feature (1175)..(1188): n is a, c, g, or t
  misc_feature (1193)..(1193): n is a, c, g, or t
agcgaaattgaagcaaatcaacagcaaatacagcaggattcagggaggcttagtttacaacgtactttgtacctcctgccatttaaattattttgccactctgggcttctgaaaacacaaagggagatacagccctccaactatgagccttgcagagagagacaaaagggccagaggtcctgggatggaatactagagcccccaccttctcatgctttggaaacctgccagagcgcttaccctgctggaagattaatgaagactccattctgtgtttcataacagtagcgttgttttctccatcaaaaacagagggtcaccgaaatgtgctgaaaagatgtggtccagcaaggttctgtagtcccacctcagtgcctgtgggctgtgtttttcactgtaacaagcactttggtaaactagaaagaataaaggattctcaggatgtgttcaaagctaagagagttttcattttaaaaagaaacatacatactcactccatggctttcctcatcctcctctcttttttcttcttggtgggaagctggatgcggggcatgcatcattctgtatggacaaatgtgttatgtccacccatactcttgtgacaactccccagcactgtcctgcaataccatgctggccttggtagtaaaactccttggtatctgtgagagtcctctttttctatgccctagactacttttaaccacttttctctggaatgactcccacatttggttgggtattgaaagggtaacagcaaaatgatgattgtggagatggatctattaggtctcatgttggtcccctggttgaaactattttcaaaaaagccccaacaatgggcctgtcaccttgctagtcatccattcttaatgcctatttatcagccctctgaggtcatataaaagttgcatcttttgaaccaagtatttgtatttactatgggaaaggtgtggactacagattcgtattatattattttaatggattttaagtaatttataagtatgctgagtgtaaattttttttaaaaactgtattataaaaggacatatcctgtgaaatataacattttactgtttaatagaataattctataagaagaatgatttatctcacccacggaactaataacatcccggatgcaatcaanaggcactttgtaatttccnnnnnnnnnnnnnntcttngctggggggttaaggggtaacaagatatcatctgtataaagtgcagtatatataactca

SEQ ID NO: 439220 - DNA, 442 bp, Homo Sapiens
  misc_feature (307)..(324): n is a, c, g, or t
tcaggacacttgtttattttaaataaacaggtaattaagacaaagtcttataagaatttactgagtgtacatcagcaagtaacaaagtcttgaggaattttgtcctgtttatccatatattttagccttcatcgtttggcatacaggtagtgacctggattgggataagaaatataaggggataagaaatatagttgtctttgctacttagattcctgacttccacggaaggtcttttttttcctgttgtctttgtaaagcttccatatacattgtttatcaaaccaactcttcaacgtgattgagnnnnnnnnnnnnnnnnnngtattgtttagtaatttggtaatttaatgttttatcctgtacttaccacagagaaaagccaataatcacaatatatgttgtcttactgacccataacccattttctgagggtggcagg

SEQ ID NO: 439221 - DNA, 484 bp, Homo Sapiens
  misc_feature (290)..(290): n is a, c, g, or t
gaggcttagtttacaacgtactttgtacctcctgccatttaaattattttgccactctgggcttctgaaaacacaaagggagatacagccctccaactatgagccttgcagagagagacaaaagggccagaggtcctggggatggaatactagagcccccaccttctcatgctttggaaacctgccagagcacttaccctgctggaagattaatgaagactccattctgtgtttcataacagtagcgttgttttctccatcaaaaacagagggtcacagaaatgtgctgnaaaagatgtggtccagcaaggttctgtagtcccacctcagtgcctgtggggttgtgtttttcacttttaacaaggcactttgggtaaactaggaaagaaggaaagggtttttcagggatgtgtttcaaaggctaaggaggagtttttcattttaaaaaaggaaacatacatacttcactccatgggttttccct

SEQ ID NO: 439222 - DNA, 1220 bp, Homo Sapiens
cggcgcggcgcggctcagtagttccccgggcgcccggctccctggcgttagacgtgctgtgttgtgatcacgtgggcagctccgggcgcggcgcttgttttggtttccttctaacttgcccacggcagcttcggggtgagcgactttcctgcaccagctgccgcgcctgctcacaccctgacctcgttttcgggctctctgagcccgcagttccgcaagcccctggggcgggctcctgccatgccgctagtccgctacaggaaggtggtcatcctcggataccgctgtgtagtccgaaaggacagaggatgtgaatgtggatggatgatttggatacaactgtcacactgctccccacagggaagacatctttggcacatcaatttgtggaaggcgagttctcggaaggctacgatcctacagtggagaatacttacagcaagatagtgactcttggcaaagatgagtttcacctacatctggtggacacagcagggcaggatgagtacagcattctgccctattcattcatcattggggtccatggttatgtgcttgtgtattctgtcacctctctgcatagcttccaagtcattgagagtctgtaccaaaagctacatgaaggccatgggaaaacccgggtgccagtggttctagtggggaacaaggcagatctctctccagagagagaggtacaggcagttgaaggaaagaagctggcagagtcctggggtgcgacatttatggagtcatctgctcgagagaatcagctgactcaaggcatcttcaccaaagtcatccaggagattgcccgtgtggagaattcctatgggcaagagcgtcgctgccatctcatgtgagcccttgggtgtggggtaactgccttgcttctgcccccggcacttgccatgttccagtggggggcagatcctcaggacttcacgggtatggttgccagctgtgttcctggcccctggacacacagtgtggcatcctcatgtttgcacactttccccaggctccagtggcctggatgtcaatgtttacaaaggggcaaggacctctcatggatcactggcctctagccctctgtttttgtttgatgaattctgttataacctatggggtcaggatatgagtcctgggcattatttatccaggacccatcctcttgggtgggttttgggtgttggctgggtaaggggagccggggacttctg

SEQ ID NO: 439223 - DNA, 1093 bp, Homo Sapiens
  misc_feature (318)..(326): n is a, c, g, or t
  misc_feature (368)..(378): n is a, c, g, or t
ggtccgtcattgctcgccccccgaagaaagaatagggcttcccccgacaacaaataaaacccccgaggggatgcaattgccgtgaccccataatgcgttatgtacaggtatttctttcaacaccgaaacacggagggcttaggaggcccagtgtccccatgaggaggttccttcgccccctttggaaaacattgccaatcccaggccccctgggacctgggggaaaatgtggcaaacatgagggattccccccctgtgtgtccaggggcccaggaacccaagctggcacccataccccgtgagttcctgaggatttgnnnnnnnnntggaacatggcaagttcggggggcagaagcaaggccagttannnnnnnnnnnaagggctcacatgagatggcagcgacgctcttgcccataggaattctccacacgggcaatctcctggatgactttggtgaagatgccttgagtcagctgattctctcgagcagatgactccataaaatgtcgcaccccagggactctgccagcttctttccttcaactgcctatacctctctctctggagagagatctgccttgttccccactagaaccactggcacccgggttttcccatggccttcatgtagcttttggtacagactctcaatgacttggaagctatgcagagaggtgacagaatacacaagcacataaccatggaccccaatgatgaatgaatagggcagaatgctgtactcatcctgccctgctgtgtccaccagatgtaggtgaaactcatctttgccaagagtcactatcttgctgtaagtattctccactgtaggatcgtagccttccgagaactcgccttccacaaattgatgtgccaaagatgtcttccctacacagcggtatccgaggatgaccaccttcctgtagcggactagcggcatggcaggagcccgccccaggggcttgcggaactgcgggctcagagagcccgaaaacgaggtcagggtgtgagcaggcgcggcagctggtgcaggaaagtcgctcaccccgaagctgcccctcgtgccgaattcgccacccaggcctcgctacctta

SEQ ID NO: 439224 - DNA, 2691 bp, Homo Sapiens
  misc_feature (2515)..(2515): n is a, c, g, or t
  misc_feature (2582)..(2592): n is a, c, g, or t
  misc_feature (2635)..(2635): n is a, c, g, or t
tttttaaattaaataaacttttattttggaatgatactagatttacagagaagttgcagagatagtacaaagagttcctgtatacccttcacccagcctaccccaaggtcaacatcttacatcaccatggtacatctgtcaaaaccaagagactgaaattggtatattaactaaaattcagacttttttcagatttccaattttcccactaatgtcctgtttttgttccaagacccaatccaggatgccacattgcactgaagacactctcccttttcaattctattactggtcacctcagtcaactttcccggggaaagagaatgcatgggaaaagctcttgtccttattattgaactggagaaactgaggcttaaaagtgccgagtgaccaagttcccttagagggcagtgagaacaaggcctgccttactctgttccctttccccagggactcttggttttcagaagcccctctggaatgtcctacctggcctaaccccataccagcagtgcagacaaggaggcactcctactacagtgggtccagcccatggagagactcacttcctgccccaacacctcttcccctagaccctgagggccaggacaatgtcttagtgccttccaacttggcagagtgaggccccatgagacagagagaaagggggaagagggaaatacctttatccaaataaatacccatccaaaattatttgtgataggtgaaaaatggccacaagctctttgtggttcccctcatcaagacatgtagtctgtttctcatcccttgaatctgggtaaagccttgtgatttgctctgaccaaaagaacttagcagaagtgacactgtcctagtcccagttccaggccaagaactcaagaagtctttcagcttctactctcactctctttggaatcctgaagccatcatgtgaataagcctgagctagcctgctggagaggccacatggaggagaaccaagcaattccagccaacagcctgtcacctgccaggcaagtgagtaaggctatcctagaccatccaggcccagctgaggtaacagctgaccttagctccatgagggatcccaggtgtgagcagcagaactgccctgttgagcccagcccaaattgccaacccataggattgtgggaaaatacagggtttgtttctagctgccaagtttggggatggtttgttacacagcaaaagctaactggtacacaattctgcatttctctcttggtaatgggatcccagttttattgcaggaggcagtgtgccagtctcagtagatggaacacgattggtctattcagccatgacaattctgttccctgctgtcttagctttgtttgcagctagaggtgcaatggtagctggctcgggccaagggcatctaagtgaagatatgcagagggagagagcaggaaacagacttctgacgaggttttactttctgatagaaggtgacgggtccagctagtttggcccttcctcttcctccacccctccttccttgaacgcagacatgattcttggggatacagcagccatcttgggaccatgaagtaacgagcactgagattaaggcaaaaggatccaagacgtgacccctaccttcgtggagttgttgaaccaataccattagccacccatctccagaatccatgctatgtggaaaaacaatcttctgtttgtttaaaccactgcaatcaaggttttcctttccttgcagctgaatgtagtccatataagaggttacatagacaaaaatgcagagggatccttgtccttgggaatttggagccggcagcacgtggctcttcaagcccatctctgttctccttctcggtaatgcttcaagggtaaggccatgatcctattgtcacagaggtgggaactggggctcccacactgtacagtgagtccaaggccttgtagctggtgagaggggtgcccagagtcagaccctctcgccaggtgcaaagagaatgcacccctgctatcccttctgcatggcccagcctgctggaggccaggtgtgtcttctgggctcttgaaggtggcagcaggtgccaaggaggctgctactgcaagtctggtgtggatgctcccaggtacacccttaggtctgagagagtggactggacaagcttggcggggatggtctctcgctgcagttgctggtaggccgcgtagcggtggcagcccccaaaggagtagaagtagtcacctccctgggcccctttgatccagaggacatcgatggggggcacgctgtctgggtcctcccggatcgtgtccacgaggctctgcaccttggcggggtccaacacggacggcagcggccggatgagcacgctcagcggcacgttgtgcaccgcggcgatgcggcccgagtggatgctgccgccctgcgcgccgccgctcggcccgggcccctcgggcgccccccgacccgcgccggccctgcccagcgttcctcctgcacgcagccccatcgtcgccnccgccgcgggactcgccgcctccccccggccttaactccggccgggccataccattccgcgcggccnnnnnnnnnnncccgtgccagggcagcgcgcgtttctcccccgaccctgccgcngtccggcctcgaccccgcggtccccagcccgactccggtccgctcgccaggtgccg

SEQ ID NO: 439225 - DNA, 469 bp, Homo Sapiens
  misc_feature (20)..(20): n is a, c, g, or t
  misc_feature (96)..(191): n is a, c, g, or t
aaagttcctgtatacccttnacccagcctaccccaggtcaacaccttacatcaccaggtaacatctgtcaaaaaccaagagactggaaattggtannnnnnnnnnnnnnnnnnnnnnnnnnnnnnnnnnnnnnnnnnnnnnnnnnnnnnnnnnnnnnnnnnnnnnnnnnnnnnnnnnnnnnnnnnnnnnnngaagacactctcccttttcaattctattactggtcacctcagtcaactttcccggggaaagagaatgcatgggaaaagctcttgtccttattattgaactggagaaactgaggcttaaaagtgccgagtgaccaagttcccttagagggcagtgagaacaaggcctgccttactctgttccctttccccagggactcttggttttcagaagcccctctggaatgtcctacctggcctaaccccataccagcagtgcagacaaggaggcactcctactc

SEQ ID NO: 439226 - DNA, 1442 bp, Homo Sapiens
  misc_feature (714)..(714): n is a, c, g, or t
  misc_feature (941)..(975): n is a, c, g, or t
tttacaaaacaaaacgcttttatttggtccattggagcctgagtcggaagccactgtggagaatcctatggtaaaggaacgggactgacaattgataaaatagtctctgtgtcacaagagctggccgtatttacagggttaaaaatattcacagctcagagtacagggaggccaaaggggagtgggaatgtttctccaggtgaaaaggccccggaagcccctgccggggtaggagggggagtgggggcgaggccggcccgctgccgggagtgaggggccaggagggcacgcagaaagctgggctcagacgtccacacactcctgggcttctgtggggaggtgggagcggctgagccctgcccgtgcccacgatgtgctggggtccctctctggcagggccgggccgagggacagggttggctgaggagcctgctggtcccagtgtgcccggcagcagtgagcggtgctgagaactggtgcccacccacagcgggcctggcgcccgcctgcacccagtcatggcttcgatcctggcgggcactccaggatttgcatagtgtcgctggggggctggccaagggccccttcttctgagacaggcaccgccccgggactcgccgctccacaccagggctccagggaccccgcctgccctgtgggggacagggacccgggctctgggggaaaactgaccttatgccccgtgaggggtgngtccctgatcccaccccagggtcttggcctctgacacccacatttggttttgcggacagagctcctggctgcctagcccgcaggagaccctgagcccacagggaggggcagcctggcctcggcccccgtcgggtgttggggctggcaggtgagcggggctggttcacagcccgcctggttcgaggtattctgcgtggcggccaggaggcctggccaggcggactgtnnnnnnnnnnnnnnnnnnnnnnnnnnnnnnnnnnnccatgggaagctgagccctgggctggcagctccctgggcggggtcctgagattctggctcaagcgtcctctgtccggggtctccctcataaagtgcgtgtgggggtggggggtccgtctgtgcacagcccctgccccaggcatggtggtcacagcggtcggggcccatgcagaccggcgacctctggcgtgagtggggggctgtgggtccccttggaggctgtccagtcactgaggaaggcctgggctgccttgcgatgtgccaggcggtgggtgatagagaagccggcgttgccctctagctgggacaagatcaccaggacctgcctgtgcaggggtggcacgctatcctgggtacgcaggctgccgcgtgtggacaccacgttgaagctgtcggtgcagtcacactgcacgtgcaggtaggccttggggtgtcggttctccaccaccacgatgagccccgcccaa

SEQ ID NO: 439227 - DNA, 1340 bp, Homo Sapiens
  misc_feature (62)..(77): n is a, c, g, or t
  misc_feature (133)..(144): n is a, c, g, or t
  misc_feature (251)..(251): n is a, c, g, or t
  misc_feature (295)..(295): n is a, c, g, or t
  misc_feature (338)..(338): n is a, c, g, or t
  misc_feature (385)..(419): n is a, c, g, or t
gtaatacagggcccccgccccgggtatcttgcccggtgtcgcaccaaggtggcccgagggannnnnnnnnnnnnnnngtggggggcacaggggccccgggcttttgggcgggaaactggccttttttcccccnnnnnnnnnnnntcccttgtccccccccccggggttttttgccctttgacaccccacaatttggttttgcggacagagctcctgggctgcctagcccgccaggagacccctgagccccncagggagggggcagcctggcctcggcccccgttcgggtgtgggngctggcaggtgagcggggctggttcacagcccgccctgggttnggaggtattctgcgtggcggccaggaggcctggccaggcggactgtnnnnnnnnnnnnnnnnnnnnnnnnnnnnnnnnnnnccatgggaagctgagccctgggctggcagctgccctggtcggggtccctgagattctggctcaagcgtcctctggtcggggtctccctcataaagtgcgtgtgggggtggggggtccgtctgtgcacagcccctgccccaggcatggtggtcacagcggtcggggcccatgcagaccggcgacctctggcgtgagtggggggctgtgggtccccttggaggctgtccagtcactgaggaaggcctgggctgccttgcgatgtgccaggcggtgggtgatagagaagccggcgttgccctctagctgggacaagatcaccaggacctgcctgtgcaggggtggcacgctatcctgggtacgcaggctgccgcgtgtggacaccacgttgaagctgtcggtgcagtcacactgcacgtgcaggtaggccttggggtgtcggttctccaccaccacgatgagccccgcccaaccgtgtgtcaggtagtagcaggtcatgccctcacggccctcgtgccgctctccgcggctctcggtgagcaggatgatggcgtcggccagcgtggtcggctgggcttccacgggctccaccatgaccagcctcgagctgtacacagccagcacgtggcccggcggctctggggaggctctcgggacccctgccgaggggctggaggcctggggggcaggggtgcccggcaggggcaggcccaccagtggttgaaggcgcagcacaccacagcgtactcgccaggctccagcatgacgtcgcagctgacgaacttcttgaccgcgcgcttactgtgggccaggaggcggcccaggctgaggtggccgccgctgccgaacgtggcccggaacaccaggatgcacaggtccgagcaggtggctgtccactgcgtccgagcgcctgctgccctcctg

SEQ ID NO: 439228 - DNA, 1426 bp, Homo Sapiens
  misc_feature (72)..(80): n is a, c, g, or t
  misc_feature (197)..(231): n is a, c, g, or t
gttaggctcgtcatagggatggcaacactgagagccccaccaggggtagggggtcgagattgggccttgggnnnnnnnnnttccgggggttgtgggcgttgacagttgaagcggggtcttgtttcaaaaccccccccggggttttagagggtattctggggggcggcccaggaggccctggccagggcggacctgtnnnnnnnnnnnnnnnnnnnnnnnnnnnnnnnnnnnccatgggaagctgagccctgggctggcagctcccctgggcggggtcctgagattctggctcaagcgtcctctgtcggggtctccctcataaagtgcgtgtgggggtggggggtccgtctgtgcacagcccctgccccaggcatggtggtcacagcggtcggggcccatgcagaccggcgacctctggcgtgagtggggggctgtgggtccccttggaggctgtccagtcactgaggaaggcctgggctgccttgcgatgtgccaggcggtgggtgatagagaagccggcgttgccctctagctgggacaagatcaccaggacctgcctgggggaggggaccggtgaggacctgtgcaggggtggcacgctatcctgggtacgcaggctgccgcgtgtggacaccacgttgaagctgtcggtgcagtcacactgcacgtgcaggtaggccttggggtgtcggttctccaccaccacgatgagccccgcccaaccgtgtgtcaggtagtagcaggtcatgccctcacggccctcgtgccgctctccgcggctctcggtgagcaggatgatggcgtcggccagcgtggtcggctgggcttccacgggctccaccatgaccagcctcgagctgtacacagccagcacgtggcccggcggctctggggaggctctcgggacccctgccgaggggctggaggcctggggggcaggggtgcccggcaggggcggcccccagtggttgaaggcgcagcacaccacagcgtactcgccaggctccagcatgacgtcgcagctgacgaacttcttgaccgcgcgcttactgtgggccaggaggcggcccaggctgaggtggccgccgctgccgaacgtggcccggaacaccaggatgcacaggtccagcaggtggctgtccacggcgtccgagcgcctgctgccctcctggaagagcgcgaactccagcgaggcccgctccagcaccgtgagcgctgttacccccacgggcgcgctggccgagctgggaaagcagccctgcacccgcgcctcctgccagtccgagtgcaccttacagatgtccacggagtcgaagtacctgacaaagtcgccgtactccatccagaagacaccctcactgctgccgtgcggcatgagctcgccacgcaggtgccccggcccctcgtgccgaattcgccacccagc

SEQ ID NO: 439229 - DNA, 1159 bp, Homo Sapiens
  misc_feature (960)..(960): n is a, c, g, or t
  misc_feature (964)..(964): n is a, c, g, or t
  misc_feature (976)..(976): n is a, c, g, or t
  misc_feature (1009)..(1009): n is a, c, g, or t
  misc_feature (1015)..(1015): n is a, c, g, or t
  misc_feature (1035)..(1035): n is a, c, g, or t
  misc_feature (1068)..(1068): n is a, c, g, or t
  misc_feature (1090)..(1090): n is a, c, g, or t
  misc_feature (1110)..(1110): n is a, c, g, or t
  misc_feature (1119)..(1119): n is a, c, g, or t
  misc_feature (1126)..(1126): n is a, c, g, or t
  misc_feature (1145)..(1145): n is a, c, g, or t
  misc_feature (1147)..(1147): n is a, c, g, or t
aaaccaccccaaaaagtgagtttctaaaggaggagctaaaaataaagaccatgaaagtgttgcccatggtgatagctccagacgtccggagacggtgttcagcgctgctgcaggagagactttatcttctattccgttggtctgcctatctagaaagcaaaatttcaaatactgagaccgatagatgaagatgctttcgcttcttccctgtttcatccagttggggactaagtgtccttcggtttggactgtgcagctcgggtcaccttctctgtggaacagcaagtgaagaaagaggcgcagagccctgtgttccaaaccctggagacaattgagaaagtgggaacccattattccccaagcccagccagcaaacctcaccgatgaaacagataagcacttcctgcaggtggggccgacactggccaggacacagccctctctctcacagcagtgttccaggttgttttgtgcacaaaatttcacaaaggtcagagctcgtctctccaaaccgatgagctttgcggttaacctgaattcactgaactgggatttattattattattctattttacctctaacagaagtttaaggttcgtgtaagtttcgttcctctctgattgtaggggagacgcccagagcgccatttggaggagagaacctggcatcctttccttaccttgatttcaggtacccagctcctagcaaatgtgtcttcctcccagggttctttggggtaaagaatttggtgagaaggagctgaatgttatggctgcgtttctcagccacttgctcggagccaagcatcctctcaccctttctttcaactggtagccagaaaatacgggttgagcatcagggattctcaaccgtgtcacgctccagccctgcctgttgtgacagacgtttcctgatgcctgttgctctctggaatgaaggtcatgggcagtattacccanacanccatttaaattnagtcggcttcgtgacctgttgtgaaaggatggngattgncgtgccagcacgtgacatgnactcggatgcctgcgcacacaggtgctccttcnggaaggtgaggtcagcccgtgngcccaccgccatgtgagtgngctgctgcngtgaccngttgctggaatgttctgcncngcgcccagtgcc

SEQ ID NO: 439230 - DNA, 1349 bp, Homo Sapiens
  misc_feature (23)..(24): n is a, c, g, or t
  misc_feature (158)..(158): n is a, c, g, or t
  misc_feature (165)..(165): n is a, c, g, or t
  misc_feature (167)..(167): n is a, c, g, or t
  misc_feature (181)..(181): n is a, c, g, or t
  misc_feature (191)..(191): n is a, c, g, or t
  misc_feature (198)..(199): n is a, c, g, or t
  misc_feature (202)..(202): n is a, c, g, or t
  misc_feature (206)..(206): n is a, c, g, or t
  misc_feature (232)..(232): n is a, c, g, or t
  misc_feature (239)..(239): n is a, c, g, or t
  misc_feature (248)..(249): n is a, c, g, or t
  misc_feature (256)..(256): n is a, c, g, or t
  misc_feature (264)..(264): n is a, c, g, or t
  misc_feature (267)..(267): n is a, c, g, or t
  misc_feature (290)..(290): n is a, c, g, or t
  misc_feature (307)..(307): n is a, c, g, or t
  misc_feature (325)..(325): n is a, c, g, or t
  misc_feature (334)..(334): n is a, c, g, or t
  misc_feature (336)..(336): n is a, c, g, or t
  misc_feature (340)..(341): n is a, c, g, or t
  misc_feature (343)..(343): n is a, c, g, or t
  misc_feature (345)..(346): n is a, c, g, or t
  misc_feature (354)..(356): n is a, c, g, or t
  misc_feature (360)..(360): n is a, c, g, or t
  misc_feature (364)..(364): n is a, c, g, or t
  misc_feature (366)..(367): n is a, c, g, or t
  misc_feature (373)..(373): n is a, c, g, or t
  misc_feature (375)..(376): n is a, c, g, or t
  misc_feature (384)..(385): n is a, c, g, or t
  misc_feature (387)..(391): n is a, c, g, or t
  misc_feature (393)..(393): n is a, c, g, or t
  misc_feature (395)..(395): n is a, c, g, or t
  misc_feature (412)..(412): n is a, c, g, or t
  misc_feature (414)..(416): n is a, c, g, or t
  misc_feature (419)..(419): n is a, c, g, or t
  misc_feature (421)..(422): n is a, c, g, or t
  misc_feature (427)..(427): n is a, c, g, or t
  misc_feature (429)..(429): n is a, c, g, or t
  misc_feature (431)..(431): n is a, c, g, or t
  misc_feature (434)..(434): n is a, c, g, or t
  misc_feature (441)..(441): n is a, c, g, or t
  misc_feature (443)..(443): n is a, c, g, or t
  misc_feature (452)..(452): n is a, c, g, or t
  misc_feature (459)..(459): n is a, c, g, or t
  misc_feature (462)..(462): n is a, c, g, or t
  misc_feature (465)..(465): n is a, c, g, or t
  misc_feature (477)..(477): n is a, c, g, or t
  misc_feature (483)..(483): n is a, c, g, or t
  misc_feature (486)..(486): n is a, c, g, or t
  misc_feature (493)..(493): n is a, c, g, or t
  misc_feature (499)..(500): n is a, c, g, or t
  misc_feature (503)..(503): n is a, c, g, or t
  misc_feature (548)..(548): n is a, c, g, or t
  misc_feature (558)..(558): n is a, c, g, or t
  misc_feature (579)..(580): n is a, c, g, or t
  misc_feature (595)..(595): n is a, c, g, or t
  misc_feature (600)..(600): n is a, c, g, or t
  misc_feature (898)..(898): n is a, c, g, or t
cagaggtttctttttaagtaaannaaaagaaataaatcttcattttcacattttttgttgcagtccaaaggtaactagttggttagtggctatgtccacttggacacatgctacaggagggcagcattcacatggaagcactcagaaatacggcatcngtcaggncncacggcactgggcngccgaatgcnctgtcgnntgncaanaacagccagtggagaccttaaaacancatgganagacaaganncataaanagaaaacnggnacggttaagaagcagaagaccgncaaacacagaaggccanacacccgtggcccatatnccacaaacncngggnnangnntggcaccnnnaaanaaangnnccgcancnnggtcaganncnnnnntngntttgacagccggcaaanannnaanannggacngnanaangaaaggnanccaacactncccacancanacnggtggagtcacnggaaancanaagaggngtatgnngangggaagaaagggaggcgggcccgccttaccccctgccagccgtangccacggccngcccagcgaggggcaagaatnnggtgtgacagacganctcantggagcacggcagtcccggcacaatggaacttggcaaatggaaaaggaaacccctaggcttggccagattttccaaggtcactgccaatagttacagggcacattatgatagatgtgcagtgtgacagcccaaaatcacacctgcagcagttattggtgtagaggttcggaaggtacagattccaactacagaaataattcatttaataataattgttgcccaatattagaaactgaatgatgtctgcaaggcatccagcattatcaaattcttgggcgtactcgggattgttttttnggttggttctaagaaaaactttggaaaagatcttatctagctatgaaaaaccacccactccttgccttattccagaattactgagaaggaatctaatacacacacaccccaaaactgcagcaagctcagaagcggtgaactgcacatgatgacttccagtctctattgtcccaatcttttttcattcatgttatttatgggtaaaagaaaaccagatggggtcaggaatatcccaggttcttactacatctctagtgtaccagctcctggcattttcattctggtctgactctagctaaaaccatttcatgttttgctttgaagaaatggataacatgaaatgataatttggctttacaaccttggaaaattgttcccggcatcccgggaattccgggccggtgcccggccacacgggcgccccgccggggcgcgcgtccgggggttgggg

SEQ ID NO: 439231 - DNA, 745 bp, Homo Sapiens
  misc_feature (481)..(481): n is a, c, g, or t
  misc_feature (487)..(487): n is a, c, g, or t
  misc_feature (508)..(508): n is a, c, g, or t
  misc_feature (510)..(510): n is a, c, g, or t
  misc_feature (514)..(514): n is a, c, g, or t
  misc_feature (516)..(517): n is a, c, g, or t
  misc_feature (520)..(521): n is a, c, g, or t
  misc_feature (523)..(523): n is a, c, g, or t
  misc_feature (534)..(534): n is a, c, g, or t
  misc_feature (542)..(542): n is a, c, g, or t
  misc_feature (545)..(545): n is a, c, g, or t
  misc_feature (559)..(560): n is a, c, g, or t
  misc_feature (579)..(580): n is a, c, g, or t
  misc_feature (582)..(582): n is a, c, g, or t
  misc_feature (596)..(596): n is a, c, g, or t
  misc_feature (599)..(599): n is a, c, g, or t
  misc_feature (607)..(607): n is a, c, g, or t
  misc_feature (614)..(614): n is a, c, g, or t
  misc_feature (623)..(623): n is a, c, g, or t
  misc_feature (628)..(628): n is a, c, g, or t
  misc_feature (645)..(645): n is a, c, g, or t
  misc_feature (652)..(652): n is a, c, g, or t
  misc_feature (660)..(660): n is a, c, g, or t
  misc_feature (663)..(663): n is a, c, g, or t
  misc_feature (665)..(665): n is a, c, g, or t
  misc_feature (669)..(669): n is a, c, g, or t
  misc_feature (671)..(671): n is a, c, g, or t
  misc_feature (673)..(673): n is a, c, g, or t
  misc_feature (677)..(677): n is a, c, g, or t
  misc_feature (693)..(694): n is a, c, g, or t
  misc_feature (696)..(696): n is a, c, g, or t
  misc_feature (698)..(698): n is a, c, g, or t
  misc_feature (717)..(717): n is a, c, g, or t
  misc_feature (728)..(728): n is a, c, g, or t
  misc_feature (732)..(732): n is a, c, g, or t
  misc_feature (740)..(740): n is a, c, g, or t
  misc_feature (742)..(742): n is a, c, g, or t
tacacaatataaatgctttattgctagcacagaggtttctttttaagtaaattaaaagaaataaatcttcattttcacattttttgttgcagtccaaaggtaactagttggttagtggctatgtccacttggacacatgctacaggagggcagcattcacatggaagcactcagaaatacggcatctgtcagggctcacggcactgggctgctgaatgcactgtcgtttgtaaataacagcaagtggagactttaaaacatcatggatagataagagttataaatagaaaactggtacggttaagaagcagaagatcgttaaatacagaaggctatatatatgttgcccatattccacatactctgggttatgtttggtacttttaaataaatgatctgcatttaggttagagactggattggatttgacagctggaaagatggaagaagggatggaagaaggaaaggaagctaacacttncccacnccaaactggtcggagtcactngnaaancnnaannanaataactgcgntgggcagnaanggaggcgggcctgnnttaatacccgacaactgtnngnccaggcctgccccntgnaggggcanaatgggntgtgcacanggcantacatggcaccacggcntcctggncacaaggncantngacnanangcanaagacaaccccctagnntngnccaatttttccaagttcangcccatagatnacgnggcccttntngat

SEQ ID NO: 439232 - DNA, 3204 bp, Homo Sapiens
  misc_feature (55)..(55): n is a, c, g, or t
  misc_feature (58)..(58): n is a, c, g, or t
  misc_feature (536)..(643): n is a, c, g, or t
  misc_feature (3007)..(3098): n is a, c, g, or t
gagtgagaaaagtatttccaaagactttacttcatttataaaagagtagatatgnagncaaggcgtctgtggccccatagtatttaatgcactcgaaacacgtttaacttccagggtagatctgatgtcctccctccacccgtaactcccctgaaatctccttagtgtttagtggtgctgtgcctgctttctcacacacaccacttggccctcgtgactcatctcatacatgcatctcaattctcagcctccccacagcccagactttctgttttaacctcacagctgcccagcgtgatggctgtgtccagcccagctgacggattggccatttcaacgtgaatcccaggcactccagccttcctttgcaggtgccatttcctgacctgggttactctaccaagttctctccagcttttgtctccacagcagcctccccacatcccaccaacacaaacacgcagcacatgcaagcacaaacacacgtgcaaacatgcttaaataccatgtacacatgcacacaggtgtatatgtgnnnnnnnnnnnnnnnnnnnnnnnnnnnnnnnnnnnnnnnnnnnnnnnnnnnnnnnnnnnnnnnnnnnnnnnnnnnnnnnnnnnnnnnnnnnnnnnnnnnnnnnnnnnntgttcgcattaaacacatgtgcaatacaaattcatgtacacatatgctcgtatgtgtgcatacacaatacacagatacccccgtacatcaacatgcatcaaagcacatgcatacacagagacatgcgcaatgtgcacaggtacacacatgcacacatacgctttgggagctgggttcacatgctgagtggatggtgtgttctgaactagaagcccaaggccatggcccacttacctcagtgaacctcacctgtgctccgtgtcagcagccacacctggatgtcacccggaattgcccaattctggccctgacaacaccgcaaccaaggaagaggcacaagacccaggagacgatggtgctggctgatgccgcccctccctgaaggctcagagcctacacttgctgggtgctccatggccatgtgaagcccaggggagctgagtgatggcaccgcaggccccaggagtgctcctctggcttcacatgcacccaagctgtgatttttcagataaatatgactcagaagacctcggtgtttctgtgtgatttgcctacctaatgtcggagatgggtattacaaaatatttttggttcatcaaatggtttaaggtaatttctcagtaagatggcttggctcacacgccattttcaagaatgctgagaaaggagagtgtgccatcaagctgtggaatcgcttggtacgctgtggaattccgtggtaagacgtttttcaaggactgaagtgcatggaagaggaaaggaaacctttgttgcctattcatgtgttatttccaggtctcgacccaccagtccccactgcctcccttcgtagctcctctggttcccatgtgagtccctccctttgcatccacacgatgcactgcgtcactcatctgcacgcatcttgctttccagagcagactaaaagcccctctggacacagaaagtgcctctgtctcttttaatagctattgtacctcacagagcatttaaatttttattgatgggttaataaataattgattgatggggaccgaaactaatctttaaaattgattgtcaactgaaaacctgcacaagatatcccactgtttaacaatagagaggagctattgcagctgctgtgacgactggcaatgtcctcttctttatcgcacctctaagaaatctgctggcaaatgacttcttggatactgtttcattaaggaatttctcaatggataaagtttttactattctaaaagtatctttgtgtcttcacagtaggtgctgtatttggtttggaggaattttattagtctaaaggacataatttcttccttctaggagcttacagaggactagaggatgagttacctgcagaacccatcactctatggaacctccccggcgggtgtcttgcaccctaggattacacacatgtagtaacacaatttatttccacattctgtagccaaagcctaatgggtcagggttcatcagtttaccacacggcggtcatctcatgttgatcagggtcggggttcatcagtttaccacacggcggtcatctcatgttgatcagggtcggggttcatcagtttaccacacggcggtcatctcatgttcatcagggtcggggttcatcagtttaccacacggcggtcatctcatgttgatcagggtcggggttcatcagtttaccacacggcggtcatctcatgttcatgagggtcggggttcatcagtttaccacacggcggtcatctcacgttcatcagggtcggggttcatcagtttaccacacggcggtcatctcatgttgatcagggtcagggttcatcagtttaccacacggcggtcatctcatgttgatcagcgtcggggttcatcagtttaccacacggcggtcatctcatgttgatcagaagccttgacagcaagcctagatgtctttggtcccagatcactccagcctcatccatacacccttgtgacttttaacctctaagtagttatcctaaatccagtccttaaacaggatcatacctggaggttgtgtaactgcacctgctccggcaactttcatgactcagcacagaggaagaagccgagcgcgattctccaacacactggggtaagtactggctggcctatgtcctgggtcgtccaagagcaataattgttcacaatgacaggtcaagtcacctccagagtgtataactaatgtaacccaagagtgggcgaatcgcatggcggttgttgcaagcatctgtctgagaaccaaggtaacgaactgactgctgatccaaggcaggcactcaacggtaggattttaaggtccacagatgtgggaatgaagaactccatagaagataatgatgnnnnnnnnnnnnnnnnnnnnnnnnnnnnnnnnnnnnnnnnnnnnnnnnnnnnnnnnnnnnnnnnnnnnnnnnnnnnnnnnnnnnnnnnnnnntgacaggagagaaactaacaggaagttgggtggaagcagcgcggacccacggcgcaccgaacgcactccaacagaacccgacgcagacacgcgctttcaaccggcg

SEQ ID NO: 439233 - DNA, 1683 bp, Homo Sapiens
  misc_feature (1391)..(1391): n is a, c, g, or t
gataaaaaaacaggtttattggggacctgagggagccaaggtctcctttggtcccctcactcccagggtggtatcaggctgcaaggccctctatgggtagaaaagcccaatcacatgatccatgggcattcctggcaagaggtcagatctctctactcctaattcgaaaacttccaaatcctgatttcagagtcaacagcaaggtcagaggctagagtcctgatgggcatggagctcaggaggctggcgagttgctcagcaacgtctgtggggctgcgcacatggaagtagaggccaggaaggccacaggaaaattgccccaaaagaagtttccaagagggtttacgcttggacagggcatagaacctggccgtgagattgcactttgggtatgatggggtcagtcaccgagcaggcctggggagcagagaacctccccacttgccctgggcatgccaaggctccatggtctaggctcagtggtgccaccacagcctgtcacatgtcccagctcctcactgctgggacatctccaggttcttgatgggatacaggtaccacatcactacccctgaagggttgatgatcactgtgaagttggtttcatctcggaggccactgatgatgtcacctgagtagacgtcctgggcctcatatatcacagacccggtgaagttcagctggccaagggaggagtggtagcgataaggcatatcggtcctgcagctgaagaagactaaggcgctagccttgttggacagaggccgcatgtacacttcgatgagagatttttccttgtgaatcctgcgtccctggatgcctaagggatcctggttgattttgatcatgagtggattctgcagaatgtccatgttctgggcggagatggtacgcaggtctgtggacatcaagaggggggctgccagcaccgtccacagggccatctgggcccgggattgctctaagctgagaccaaagttcccaatgagcagcatgtcagggtcattccagtgcccagggccggccactggctgcagtatgtcctggtgctccacgaaccaattcaggatggagagcacgctccaccaggagtcctggatgtcatcatagttacgccagaggttgcagatgtccgccagcagactgtagttcacccttggggggaggccgccttcataggctggccagctgcaggagaaggcgatggggcggcctgtggcattcagggcagcagccatcttggggtacccctgggcccgctcctcgggggtggagaagcagccatccagcttgagcatgtctaccttccactcggcgaaggtctgagcatcctggaccaccttgtccagtgtggtgcctgggtaacccatgcaggtgaagttgcccatgtncgcgtagatacccaacttcaggccccagggagtgaacgtagtcaggcaggaaaggaatgccatgagggaagcgcttggggatctgcatcaggcggccactggcatcgcgaccaccgatccagcagtcatcaatgttggaggtatgtgtagcccatgtcccgccatccatcctgtgccatccggtcagccatctccatgaagagctggtcacttatgcaagtttttgggtccctatcacaattaaaggttgcagggggagcgtttccaggcccaccagccccaggtttggtgt

SEQ ID NO: 439234 - DNA, 1122 bp, Homo Sapiens
atcggggggtttccctgggagttccttaaggggattcccggggtgagattttgggtccaaggaggggggtttttgccaaaaatgcccccattttctgggccgaggagatggtttccccaaggttctggtgggccttcaaagaggggggggttgcccagccccctgtccacaagggcccatctggggcccggggatttgcttttaaagctgagggccaaaagtttcccaaaggagccaggcatgttcaggggtcattccccggtgccccaggggcccggccccttggctgccagtatgttcttggtgctccaccgaacccaattcaggatggagagcacgctcccaccaggagtccttggatgtcatcatagttacgccagaggttgcagatgtccgccagcagactgtagttcacccttggggggaggccgcctttcataggctggccagctgcaggagaaggcgatggggcggcctgtggcattcagggcagcagccatcttggggtacccctgggcccgctcctcgggggtggagaagcagccatccagcttgagcatgtctaccttccactcggcgaaggtctgagcatcctggaccaccttgtccagtgtggtgcctgggtaacccatgcaggtgaagttgcccatgtccgcgtagatacccaacttcaggcccagggagtgaacgtagtcagccaggaaaggaatgccatgagggaagcgcttgggatctggcatcaggcggccactggcatcgcgaccaccgatccagcagtcatcaatgttgaggtatgtgtagcccatgtcccgccatccatcctgtgccatccggtcagccatctccatgaagagctgttcacttatgcagttctttgggtcctcatcacagttaatgttgcagcggaagcgttcccaggccagccagcccatgggtggtgtctgcaggagcccattgtccagcatcagcacctgggccacatgtcccagcaagagcactgtcttcagcagcatcgctctggactcagcttccgaggacctgaccagatctggtctgcgtgtatcagctgtatgtgttgggctcgaagcgttcagacctgccgccgcttctgactcgaatccg

SEQ ID NO: 439235 - DNA, 1873 bp, Homo Sapiens
  misc_feature (123)..(132): n is a, c, g, or t
  misc_feature (1829)..(1829): n is a, c, g, or t
  misc_feature (1836)..(1836): n is a, c, g, or t
  misc_feature (1846)..(1846): n is a, c, g, or t
tttttgctgggtacatggaggttcactctaccattttatttttgtatttgaaagttttcatgataaaaagtttttaaaaagagaaagggtaccttgcgtccaaacaagtctgtatttaactgnnnnnnnnnntaattgcattcctaactggccttgaatagaagggaataaatgtcctgggagatagatggcatgtttgttgaaagaatgaagggtgaagagataggatcaatcaggcacccccaggacaaaaggaaaacttatacagcaagtaaagacatgtagctatcttgggctgaaaggtaagggaattaattggtcaagtccaggctcaactctggcccccaactcccaagtccatggtctcaactcatttcccacaaagccttcctggagctagcaagagaaggtgttcccacctgagactattccattttgcctgaacagcactatgaacaagacccaaaggcagagctatgcacggaggggcaggcctgggatgaggtaggcttctgtcctaagtttctcaacagcctcaagacatcaactggggaaaggaacttttctctggtgaccctgtacttaaccagtaaagcttccaatcatcttaaatgatgtaacaaaatgtgcatatgtaagtttttacaccataccctaaatacaaggacctcagaaccctgaggagtatgggagatccacccagaaaatactccttgggcagcacagtgcaaggcctggggcactgggtgctcctgcattcaaagcccaaggaggacctagctaggttgctctgccactagctctctccaaaggggagagccaccagggaagacaagtgccctgtagcctttgctaaaagaggagggcttgggaaatacggaccaaagcaagacaggcaagaacccatcattccttcactttgactgttacccctgtccttaggaagagggacaggaaatcaattttaagacacaactcctggacaggtttgtggacacatctggggaatatgaacctcctttgcagccaggttgggagagaaataaaggaaaagaagtaggggttggggtggagccaccagagagaagagcaggctgaggtgctgggccaggggcactgctgggcagagcacaagctgcaggacctgggagcattgctacttggcctcattgtgttgtcaccatcaccactgccagcataccaggcacagcaggggcagctcctgggtgtgaggcaagtctggcatctctaggaagtacaatcttctggtcactttggaaaaggaggggccagacgatgccagacatcatccatagaggtgagatttgaatccagcaccccgtgtagtgccaccagagtccctaactaaaggtaccccaggtccatattacaactacttgattaaagaacaggtttattggtgacctgagggagccaaggtctcctttgtgaccctcactcccaggtggtatcaggctgcaaggccctctatgggtagaaaagccaatcacatgatccatgggcattcctggcaagaggtcagatctctctactcctaattcgaaaacttccaaatcctgatttcagagtcaacagcaaggtcagaggctagagtcctgatgggcatgggagctcagggaggctgggcgagttgcttcagcaacgtctgtgggggctgcgcacatgggaagttaggagggccagggaaggccaccagggaaaatttgccccaaaaggaagttttccaagagggttttacgttttgggacaggggcataggaacctggggcccttgagttttgcatttttgggttttgatgggggtccantcacccnagcaggcctngggggagcagagaaccttccccatttt

SEQ ID NO: 439236 - DNA, 1538 bp, Homo Sapiens
ttgccccatatgggcgacgcagcgttatgagtgacgcgttttgggcaagaggcacaaggatggtctgagggaccggtgggtagagcgacctctcacataaggctggagaagcagcaggttcaggggcagattggaatacaagctggcatggtagagtacaagacacaacctttacgctggggccgcgccggcttctagggccccaggagcctgaccttgcagcttttcattgaggaagtcaaacacattccgaggagctgggcggcccccaggcctggcccctcttccccggcacctggggggcttgttggtgccagccttgccaaccctggtctgcttctgcagggtctccacacactggtccagcgacttccctcgaggcaacaccacagcatggatgggctccacccggccttccgcgtgtcggcccaaacccttgccaaactcatagcccatcttggtgaggagtctggagcctatacctcgcgtgtgcacctcccagccagcaaaggcagagctgcaggtcccagagtccacagcatctgaccccaccactctggcatagctggagtcacccgtaccgtcgctgtctgagtcggactctgtggcctctgtgcgcagtgggggcaggatgccgtccccctccaccacggcctccctcagcagcagcgagtcaaacttgactgtgtagtagccgttgtccacatcggtgatgcgtgctgcgtgccagaggccatcctggtgcttggccagacacgcagagccggcctgcagggagctcaggtctgggtcctggaaggggcgcagctcatccagagagaccacctgcccatgggagaacctgcagttctccttaaagcggcactttccctccaggaagaacgggcacggcttcagagacttgtgagtggggtacaggtaaagcacacggacacccgccgagccatcctccgcctcttccgttcccaccaccatggcgttgtgatactccagagtgccccaggagctgtagtagggcgcgctcacctttgtcccactcagctcttcctcgtcctctccctcttcctcctcctgcccacctgccgcagattctggccccgcctctgctttaggaacggtctctgatccggacccacgggccgctgctggtgcctccaccgcctcagtgatggcctcccggaaagcctggtactcagcatcttcctggcggcccgggcgctcttcgtccagcgcggccaacaacctgctcttcctgacagacaccaggctggcctcggtgagctcgatgagctccttcaggtccccctgcagctggcgcaggtcagcctgctcagacgaatccaggccggcgcccaaggccagctccacctgctgcagctgcgcacggtaggtctgcaaggccgactccaggctctcctcgtccatgctgagagagggaggcgctggaccagggcggctagagcggcccggcgcccccttttcgccccagcagccgatcggcacttcctcccgagcgccgccgcttccggaagtccgct

SEQ ID NO: 439237 - DNA, 1030 bp, Homo Sapiens
  misc_feature (644)..(644): n is a, c, g, or t
  misc_feature (760)..(760): n is a, c, g, or t
  misc_feature (930)..(930): n is a, c, g, or t
  misc_feature (932)..(933): n is a, c, g, or t
  misc_feature (952)..(952): n is a, c, g, or t
  misc_feature (962)..(962): n is a, c, g, or t
  misc_feature (983)..(983): n is a, c, g, or t
  misc_feature (999)..(999): n is a, c, g, or t
  misc_feature (1010)..(1010): n is a, c, g, or t
  misc_feature (1016)..(1016): n is a, c, g, or t
  misc_feature (1018)..(1018): n is a, c, g, or t
  misc_feature (1024)..(1024): n is a, c, g, or t
tttgacactgtgatgaaatcactttaatgtccttgccaaggaaatgcccaagacactggcaggtgggcaagtaagtgtccagatgggaccccgcagctctgtctccactcagcagtgtccgcacgccccaggccagcaggccggcccctcctcgggcaacactggtcttcctgagggcagcccgtgctggggtcccacgcttcgtccatagtgcttgtggggtctctagaactcagtcatcttcttgtgggtgtctgccttcctctgctcctgctgcaggccggcttcctgagcccggagctgccccagctggcgctgggctcctgccagcttctcctgcagctgggctgacgccacgctatgccggccagcgttgcgggcgagagcctcctggatgctcctgatgtcccgctgggttcgctcgatcttctcctcagtctggaagagccgcagtgagaggcccgcttggcactcttgctggcatggtacatgtccttgctcctcctccccgctggggccgccccggcttctagggccccaggagcctgaccttgcagcttttcattgaggaagttaaacacattccgaggagctgggcggcccccaggcctggcccctcttccccggcacctggggggcttgtnggtgccagccttgccaaccctggtctgcttctgcagggtctccacacactggtccagcgacttccctcgaggcaacaccacagcatggatgggctccacccggccttccgcgtgtnggcccaaacccttgccaaactcatagcccatcttggtgaggagtctggagcctatacctcgcgtgtgcgcctcccagccagcaaaggcagaactgcaggtcccagagtccacagcatctgaccccaccactctggcatagctggagtaacccgtcccgtcgctgtctgantnngactctgtggcctctgtcnctgtgtgggnaagatgcgtcccctccacacngcctcctcaacagagnagtaaacttantttttntngcgttntcacat

SEQ ID NO: 439238 - DNA, 1534 bp, Homo Sapiens
  misc_feature (139)..(157): n is a, c, g, or t
tctagcgatgggctccccgctaagggcgtgtgcctgaggggggggtcaggcgctaggtgagctcgaacccccagtggcggcttggatattcgggggatcccccctggatggtacggcctcttattcccgaaggcacctnnnnnnnnnnnnnnnnnnntccgccctttgcgcaacccggggttgtagttttgcgcgggggtttccccacccttggggtccagggggatttccccttggggggcaacctccccaagccagggggtggggttccacccgggcctttccggggggttgggcccaaaaccctgcccaaaattcatagcccttcttgggagggagtttggagcctatccctggggggggcacttcccagccagcaaaggcagagttgcaggtcccagagtccacagcatctgaccccacccatgcaagagacggacagagggcagaggactggtgcagagtcctcggcgtccgaccccaccacttcctggctcctgggctccgcagctgctgccatacctctggcatagctggagtcacgccgtaccgtcgctgtctgagtcggactctgtggcctctgtgcgcagtgggggcaggatgccgtccccctccaccacggcctccctcagcagcagcgagtcaaacttgactgtgtagtagccgttgtccacatcggtgatgcgtgactgcgtgccagaggccatcctggtgcttggccagacacgcagagccggcctgcagggagctcaggtctgggtcctggaaggggcgcagctcatccagagagaccacctgcccatgggagaacctgcagttctccttaaagcggcactttccctccaggaagaacgggcacggcttcagagacttgtgagtggggtacaggtaaagcacacggacacccgccgagccatcctccgcctcttccgttcccaccaccatggcgttgtgatactccagagtgccccaggagctgtagtagggcgcgctcacctttgtcccactcagctcttcctcgtcctctccctcttcctcctcctgcccacctgccgcagattctggccccgcctctgctttaggaacggtctctgatccggacccacgggccgctcttggtgccttcaccgcctcagtgatggcctcccggaaagcctggtactcagcatcttcctggcggcccgggcgctcttcgtccagcgcggccaacaacctgctcttcctgacagacaccaggctggcctcggtgagctcgatgagctccttcaggtccccctgcagctggcgcaggtcagcctgctcagacgaatccaggccggcgcccaaggccagctccacctgctgcagctgcgcacggtaggtctgcaaggccgactccaggctctcctcgtccatgctgagagagggaggcgctggaccagggctggtccccggccgggcacctcctccgcgcggtttcccagccgcagccacagagagcccgccggcctcaccggctagagcgcccggcgcccccttttcgccccagcagccg

SEQ ID NO: 439239 - DNA, 928 bp, Homo Sapiens
tttttttcattaaaataattcttttaattattgatgctttgaataagaagtccattttactaaatttagtataaattatttttcttaaacagaacctgtttgctggatctcagttaagttcactttgcagttttcagacacaatgactcatattcaacttttctctttaaggattcagtggcttgattcctgacatttcctctttaagaggaatcttatgtcatcttctgaaatcatgtatatgggtaataatattagtgtcttctcttctgaagatgtgattcttttaatgccatgttctcttccctctggtgacctgacttagattgtagcagcactagaagctattaagagatttggggcagttgaggaagccttaggtaattgttaagagtagaagtatttttaaaaagctgtggagagtggtttgggaggggattttgtccctggctgaagctggtccatgcctgggtaaactttacttataaaagaataccaggaacacacaaaatattcttctcctctttcttttgcaatccagttttggagccaaaaaataatctgtgtgcacatgtgttttgataatactgtctcgacttaggtggggaaattaaattcaggagttttatgactttcttttgttctgagtatcactttagagtataaaaagtttttcaaaagttctttatcagaaatagtttcaccctatgttgaattaacaatacccaggattgtgagacataaatcaacatgagtaggaagctccatctgaggttcataattgtttgtctatcttggcaagatttattcagcagcaccataatgggggcccaattcttttgcaccaggctcaggcagcttcaggaagcagctgcgggtgagtgatgcactcctaccaagcacgtgggtttctaagataaaagaacac

SEQ ID NO: 439240 - DNA, 437 bp, Homo Sapiens
ggcccgcttagcatcgttatcattcgacaccctgagatgaaaacctggccttccagccataattggttctttgctaagttgaatataaccaatatctgggtcctggactactttggtggaccaaaaatcgtgacaccagaagaatattataatgtcacagttcagtaagtacttacacatctttcacctaagattgccgcccttacagccatcctcagccttctaaggcgaggggggtttaaccgtttcatgtgccctggacaccctgggcagcctggtaaagccgctgaccccttctcagaataatgttttaaacacataaaatacagaggattaagaagaaaatcaactataatgaaatacatttatgaaaatatttgtaaatgtgtggtataatcgttttattaatatattaaatataagatctagttaaaacc

SEQ ID NO: 439241 - DNA, 1268 bp, Homo Sapiens
  misc_feature (26)..(26): n is a, c, g, or t
catctaagtccatcattgttgcctancttggaagtttattcagaagccccgtaatgggggccaatccttttgccccaggctcaggcagctcaggaggcagctgtggtgagtgatgcactctaccaagcacagtggcttctaggaataaagaacacatactcaactaccttcaaatgccaatgggcaatttaaaactggtactcattcctcttcaagagcaccactggaaacatctttggaattgatgggacaaaacttatttgattatagtgaaggatatttctctacgaaaatggcttcaaaataggaaaaaagtagctaccacatcttccaggaaatccaataacaggtcaactctattggtaaacaagcaagtaaacaagcaagcaaacaaaccagcatgtgacagaaaactggctaatattctgggacgctttccagagaaacattaagccttttaagtgtgtatgagccactttaagaaacttcataagtgttgctaaattcaccacagtctgcttcactgaactgtgacattataatattcttctggtgtcacgatttttggtccaccaaagtagtccaggacccagatattggttatattcaacttagcaaagaaccaattatggctggaaggccaggttttcatctcagggtgtcgaatgaataacgaatgctttgcaatatccatttctgtttcattcaccttggtcacagttcctgacagcattatgtgaacacaaaggggactttgtggatcaaatccatgtttcttgcagaagttggtctgtgccaaagtcatggtcagtgtagcatatggattctcctgcaggttgctcacggagagctgcagcgggctcaggtagaaatagggcacgccgctgcccgcgcccgggggcccgtcgctgagcgagaggacgtcggcgaagggccggccgcgcaccgcctccagcgtggagatggtggccagagcgccccagtcggagacgtgcgtcacgaagcgggccacgcgcgccgcgtcctcgcggggtggtagcggcggcagccgggaggcctcgtcccagtccccgtggtcccggccgccgcgaccccgcgcgggcgacacgagcagcgccaacagcgtcgacgccagcagggcggcgagcagtgcgcgcgcggacccgcgggatagcccggccatggcggtgtctccaggaagagtcccgggccccaagacctgcagggacccagccggagctcggcgcgcccaggccccgccccccgct

SEQ ID NO: 439242 - DNA, 2266 bp, Homo Sapiens
  misc_feature (41)..(42): n is a, c, g, or t
  misc_feature (45)..(45): n is a, c, g, or t
  misc_feature (53)..(53): n is a, c, g, or t
  misc_feature (55)..(55): n is a, c, g, or t
  misc_feature (58)..(58): n is a, c, g, or t
  misc_feature (63)..(63): n is a, c, g, or t
  misc_feature (443)..(476): n is a, c, g, or t
  misc_feature (487)..(517): n is a, c, g, or t
  misc_feature (2101)..(2174): n is a, c, g, or t
cagccgggctacttatttaaattttaaagctggagcaacannttntatacatntntantattntttttttcacaaaagatgatagtatttatcaaacacactccatctacatttgagcaggatgtgtgaaagaaaagaaaataaaccaggcctcaaggattccatccaaaatgaggtagacattataagggacagaaatccccaaattaaatgttatagttgacatagaatagtctttaaaacccattgattttctcagacatttgatccaaggcattatttccagagactgaacctagaaagaattgcttaagactaggagtcttgttccagcctagatcccacactgttggaacatctatacttagtataccacattatacataggcactgacatggacctgtgtggcatttaattttctaatgcttgttcatctctggcnnnnnnnnnnnnnnnnnnnnnnnnnnnnnnnnnngacctatgtannnnnnnnnnnnnnnnnnnnnnnnnnnnnnnaaaagtatataagggtaggatagtaaaattgtgcagtaacgtttcttgtgaaagtggtggaaagtggattgccttgtcgacatgctggaatgtgcttccattggcagaagtaaggctttcaaaactagtcgttttcatttttctctagcaactgggaatattaataatcgaagatgtgttggtataaaaataatcataataatcccaatgaagtggtgttaataattatatcacaagatataatagacattatagatattataagatatcaaaaaaaagaagatgccataaaatctttgagatgatttatacgttaaatgcggcctcctgtgccgccctggggcgccactctcgctgggttcttggcggtgctcaccctactccacctgctcagcccaggctcctgcgtccccagagtcaggccatgggagcgaggaccttgctgcgaccctagacaaggacaatgaggagggggtgcacgtggagtccccgcggataggctgtacgccgggcaggagcctttgcgggggtgcacagcctcctctggaagccctggttgctgccgggtgcctgctgcgccctgcgagctccgcggttgtggagccaggcctgcactgcctgctctcggccccgcctgcggaccctctgccctttgtcttgcccgtggggcccggggcctcagctggcccggggttcctgaagttagctgacgatgggctggcctctgggactgagtcgtgggccttgtgcactggccgccacgtcaccagcgccaggcctccccgcggtgctgctggagatgcgggatgcccgggctctggctctgctgggtcccctggcgctgcgaaccccgtcaccttccatcgcggccaccatgctgcccgctggtcagccctggtctgcagacttcctgggacccctccggcaccaaggaggcatcactcacagccgcttgcgacaccggggccgcctgaacctccgcccaggtgcgccgcgcaagtggctccagccagccagccctggcccatgagccggactttcggctccccgagatgattgccctcggcagggatacacggctatggaggaggtagcggataccttccgaagtttgtggacactcttctgccacaccaaaagtttcaccatcagctgcgatgccgactgaggcgcagagacccctccgggatgtggaccaggcagtgcctttgcatgggcatccgcagtgctgaccacccgcaagtgcagatccccacttcgtgttcctcctcctccacgttccacatccatagttctctcaccatttctaagcaggagaaatcaaaagaaacttgcatccagtgaccacctggagcacacctgcagttcgcaagttaggcttcctgctgcagtgaggggagcaagcactgcctggagccagggagcttctctgaaggaggtgttggaaaggacttgttccagaatttgggcttgtacttgggagcttgggggaaggttgaaagaagcctttgctccagattggatgctgtcagaggcagggtggattctatcacctggcatcttccccaatcttaccccaaccannnnnnnnnnnnnnnnnnnnnnnnnnnnnnnnnnnnnnnnnnnnnnnnnnnnnnnnnnnnnnnnnnnnnnnnnntgtcagccctttgcgagtcctggcatccggagacgttcccgtcgaccccgaggagaggtcagccggagcctcagagctccgacacacaagca

SEQ ID NO: 439243 - DNA, 974 bp, Homo Sapiens
  misc_feature (61)..(71): n is a, c, g, or t
  misc_feature (348)..(348): n is a, c, g, or t
  misc_feature (350)..(350): n is a, c, g, or t
  misc_feature (362)..(363): n is a, c, g, or t
  misc_feature (400)..(400): n is a, c, g, or t
  misc_feature (413)..(413): n is a, c, g, or t
  misc_feature (459)..(460): n is a, c, g, or t
  misc_feature (491)..(492): n is a, c, g, or t
  misc_feature (535)..(535): n is a, c, g, or t
  misc_feature (561)..(562): n is a, c, g, or t
  misc_feature (621)..(621): n is a, c, g, or t
  misc_feature (651)..(652): n is a, c, g, or t
aaagaaacttaccctaattaacatttggttccaatctttttgtataaatttatcaaagtcnnnnnnnnnnntcccagatttcagcatgtgccaaagcacccctttaattggaattaaaagatatgtttgtgatacatgtttacgtcaagttaaagaaatacacacatccaaatcttttaggaataccaagcctcaaaattaatctgatatacatacataggaatataaatactggatagttccctaccaatgaattatgagaactactccaaaataaaaacaacacagttttagttaataaagaatatcacatgactgtgttatttttcacattacggcatatctganangcagatatatcnnccactcattacctaggtctctataattactagaatangactttgggaganacttttaaaatcagcttttttgatattattatttatatgagaaatnnttttttgataatattatttatatgagaaatnnattttttaaaaatctgatcatttcagaaaggagtaagtacaangacataagcatttcagtattttaggnntcagtttcaaaatggcttaaaaattattaatactggaaggtttgatgaaatcagttacnttttagacaattaacttagtgatacagatnnaataatgttatatgaaagaaatatcaaaatagttttcaaaaaatatattaccagaaagtgcaaccaaattaagatttcagaatctctctagaagtattttttaaatagtggtttagagtacttaagtgtatgtttaagtcacataggttggatataagtccttctggtcatttacaatcaggttgctagcagtgtgctcttcagagatataaaatgcacaaattagtgaaaatgcctaataaattaattacagaaaagcccatttttttcctatataaacttaaccctaactggtaggaaggccattttttagggaataaca

SEQ ID NO: 439244 - DNA, 2740 bp, Homo Sapiens
  misc_feature (23)..(23): n is a, c, g, or t
  misc_feature (33)..(33): n is a, c, g, or t
  misc_feature (35)..(35): n is a, c, g, or t
  misc_feature (50)..(50): n is a, c, g, or t
  misc_feature (81)..(81): n is a, c, g, or t
  misc_feature (88)..(88): n is a, c, g, or t
  misc_feature (92)..(92): n is a, c, g, or t
  misc_feature (117)..(117): n is a, c, g, or t
  misc_feature (128)..(128): n is a, c, g, or t
  misc_feature (157)..(157): n is a, c, g, or t
  misc_feature (188)..(188): n is a, c, g, or t
  misc_feature (192)..(192): n is a, c, g, or t
  misc_feature (201)..(201): n is a, c, g, or t
  misc_feature (204)..(205): n is a, c, g, or t
  misc_feature (229)..(229): n is a, c, g, or t
  misc_feature (264)..(264): n is a, c, g, or t
  misc_feature (274)..(274): n is a, c, g, or t
  misc_feature (277)..(277): n is a, c, g, or t
  misc_feature (287)..(287): n is a, c, g, or t
  misc_feature (307)..(307): n is a, c, g, or t
  misc_feature (310)..(310): n is a, c, g, or t
  misc_feature (321)..(321): n is a, c, g, or t
  misc_feature (328)..(328): n is a, c, g, or t
  misc_feature (337)..(337): n is a, c, g, or t
  misc_feature (351)..(351): n is a, c, g, or t
  misc_feature (389)..(389): n is a, c, g, or t
  misc_feature (396)..(396): n is a, c, g, or t
  misc_feature (474)..(489): n is a, c, g, or t
  misc_feature (512)..(512): n is a, c, g, or t
  misc_feature (529)..(529): n is a, c, g, or t
  misc_feature (586)..(586): n is a, c, g, or t
  misc_feature (588)..(588): n is a, c, g, or t
  misc_feature (599)..(599): n is a, c, g, or t
  misc_feature (723)..(723): n is a, c, g, or t
  misc_feature (727)..(727): n is a, c, g, or t
cttcctctctctccacgggtgtntatgtgtgtntncatatagatattatnctagctatttagaaaatttcctgagcctccngtctccnttcnacttatattttaactaaaggttacngagaaatagcnggagccgtttcaaaagcctgtctcccatnacatatccgccattgaggctgggaggcagtnttcncttcccccntcnngcggcttttaaatatcattatgcnaatttttgcctttgcctcctgattcaactggcgtntttgagtccnccnctcaaaagcnttccttaacccgagtcaccnganaaggtgcgtcngacgtcngccgaatcncttcccatgacganagcctgactgtctccccgcctcaaaaaggataccgccnagtagtnatgtgaatcatgactggtagaggggactgagcctgacgttgaacggcctggaagtgacacagccgtgttcaaacactnnnnnnnnnnnnnnnnatccggcggtggcatgggggcgncacacttgtcgcgtggncgtcccattttttgtcgtctggtgggaggggaatattaatttggtcacagccagccngnctatatgtgtnataaaggaaggactgcatggatcctttatcatacactcctctcctccatgcaccaattcctatgcaaaatcctgccagagacagagatacacacaaaagcttgagagtgctcaatctgagagcnagtnaagctgcaggaaagcagctgcagagaagtatattaagacagggcatgggaaagagggaatcacagcgagtgccccactgtcgccctcattactttcctgttgctacagatagatgatagctgcactcacacagcaaagcagatggctgagcaaactgaagcccagacttctgagtaagtagtcatcttcaaggttatcatcaccagacatggaagcagcttctgataagctgaggcaggacagggtatgtgttatctctccagagctcttttgtggtctccagtgaggcaacgtgctgagagagggcatctgtttctgtgggccatgtcctttcaacatgttttgggacagctctgttttcttctatgtcttcaggaagctcaattgcgtatcctttgtgtactaattctagcccaatatcaagtttcttcccattggctagtatcatataagtagatctttggccaagttgagatcccagtctggacatagctagagatcttggctaccagaggcttccagtcagcacaatgagtgagtctatcaaactcatccaaagcttcctcttcccactggtcacctgagggagcaatccgtgccagactacattctattgcttgaaatggaaggcttaggaagtcactcctgagagccctgaggtccttcagtgggcaatctccattatctccaaagtcaacaaaatagaggtccaagttcccattctccaaggtgccgaggacccgggctcgataccaggaaccatttgtaggtaaaggtgctgctacaatgtctcctacatgcacagtcaagtcttcaggcacactattctcatagtgctgggtcatctcattgacaagcttatccaattgcaggctgcgggagccaacgatctggatccagaagtggttagggtgctcagaagcagaaacgtagacttctaggtactcatcagcatgaaaactgaagtcaggactggggatttccaacatgggcatctctgggatggcctgggcttcagacttctgaaagctgtcatcactaggtttctcccaggaaccgtcctttgacactaccacagccatgtcgcctcctcctttgggtggaggagtcaccaggggtgcagtcggctccatgctagaactggtgttttcccataatgctggctctccagctccacctggctctgtcatgtcttctctttctcacactgattggctgttttgcgtgggaccctggtttctgcagaatgagcaattctcttccgaagttcttcatcttctgaaactttctccagtatcaaatgcttggctgctgccacttccttctgtgttcctgagatttttataagtcttgatagtagtaatgtcccttctgattctttgtcacaggtaattttggctccagatgccttacagatagaacgaattgtctcgccgcctctccctatgattctgcccacagatctctggggaactgaaagctgctcagacactggggtattctctgtcaggatctgatggattgctgctttggccttgcacacctgaacaggaaaaccactgataagcagcactcgctcatcgcctacatcctctgtgtccacatcaatccgagcacctgtctgtttccgcagctgtttaatattggctccttgccggccaatgatgagtttcacagcctcctggggaacccgcatctctatctcaatgtcatcttccccaacaaatgtcagccgctcttctctgctttccctatacctgcggtataggatataggcaactgttgcactggctgggatcccaaggcccagggctattttctgaatggtggacaggcttgtccaagaagtccgttcagtagacattttctgctgtactctttgacttatatccttcggtctccatcctcgcctttaccgctgctccagtcagccgtcgagtgcgccgcctcgcgcctcaccccagctgcagccaccagcgccgccgcctcccactcacaccaccacagtgagcc

SEQ ID NO: 439245 - DNA, 779 bp, Homo Sapiens
  misc_feature (229)..(322): n is a, c, g, or t
actctctatgtgctcgctgccctctgggctgtgctcctcttctatcggttatgtccttactctatcgcctctcctcgtttctaggttctccccgcctctttctcctctgtatacattcccaatgcatcgaggggcgtctccttgcccttgcccgtcaagggatccgcctctgggccctttcggatcggctcccccatcgcctccttgtttcttgtgttctgtgttatcnnnnnnnnnnnnnnnnnnnnnnnnnnnnnnnnnnnnnnnnnnnnnnnnnnnnnnnnnnnnnnnnnnnnnnnnnnnnnnnnnnnnnnnnnnnnnngcatattaaagaaaaagacttttatacatagtaacaaactgcaggtaagaatgagacattactcattttccagggtaggaagtcttatgaatgatttatatcagggaacctctaaagagtaaaggttccctacggaactctggtagcaccagttccagggctgagcacgcttcagcgagttcattgcaggcaacatacagcaaagcagatggctgagcaactgaagcccagacttcagagtaagtagtcatcttcaaggttatcatcaccagacatggaagcagcttctgataagctgaggcaggacagggtatgtgttatctctccagagctctttttggtctcagtgagcaacgtgctgagagaggcatctgtttctgtggccatgtccttcaacatgtctgggacagctctgttttcttctatgtcttcaggaagctcaattgcgtatcctttg

SEQ ID NO: 439246 - DNA, 770 bp, Homo Sapiens
tcggaccctgtgtttctgcagaatgagcaattctctttccgaagttcgtgcatcttctgaaactttctccagtatcaaattgcttggctgcttgccacttccgttctgtggttcctgagattttttagtgagtcttgatagtagtaatgtcccttgtgattctttgtcacaggtaatttttgggctcccagatgccttacagatagaacgaattcgtctcgccgcctctccctagtgattctgcccacagatctctggggaactgaaagctgctcagacactggggtattctctgtcaggatctgatggatttgctgctttggccttgcacacctgaacaggaaaaccactgataagcagcactcgctcatcgcctacatcctctgtgtccacatcaatccgagcacctgtctgtttccgcagctgtttaatattggctccttgccggccaatgatgagtttcacagcctcctggggaacccgcatctctatctcaatgtcatcttccccaacaaatgtcagccgctcttctctgctttccctatacctgcggtataggatataggcaactgttgcactggctgggatcccaaggcccagggctattttctgaatggtggacaggcttgtccaagaagtccgttcagtagacattttctgctgtactctttgacttatatccgctgctccagtcagccgtcgagtgcgccgcctcgcgcctcaccccagctgcagccaccagcgccgccgcctcccaccggacgcgtggg

SEQ ID NO: 439247 - DNA, 996 bp, Homo Sapiens
  misc_feature (112)..(112): n is a, c, g, or t
cctgtgagccatactgactgaggctctcaaagcccacacgcttgcccagtgagatgcaggcgatccgccggggctgggtgcacgccacatgactgaagccagcagccagcangtactcgggcacctgattgggcttgccacagccggtgtcgccgtccactaccaccaccttgtgcttccttcagcgtctgcaggattcggttcccatactgggcgatggggagggctgcccgctcacgctgcagcttggccagacgcccaaatgcctgcttctggccaaagtccaggtagtgcaacagggctcggcggaactcagccactctctccgcgggcaagtgcctgcccagtccctgagagccccgcgtggcagggccaagaacagagaggttgatgcggtaacgtgggtcgtaagtgcgaggtaggtcggccagcgctgggatgctgtgcttgggctgtcacagggtctttcgtcctcccttcctggacggtcttgacgattctggacactctctcgcagcgcgttcaaagaaggtccaaaacttctgacattcctcagaaccctgacggatgtaatcctcttcacggaagaaggcatcttccaagaggcgacgcgtctctggacaattccagtcccatttctccaaggcctcttcctcgctgggagcccggtggtggtctcggcgatccctgccctcccttgttctaggaggaggcatgttactaatccacaataggagtctcagttctgatcacccaaaacaaatattctcatccattccccacctgcaacaatttaagaggccagtgcctgcaatagagaactactttctcttcaaagagctaatttttcctcctggtcacgggacaggaccaccacagatgataaacgtggccagaggcctgcttgagctggtgacactaagggtacctcatgacatctgcagtgatctctgggcatggacacaagttcattctgggttttcaggccctggattc

SEQ ID NO: 439248 - DNA, 1081 bp, Homo Sapiens
ctggaccggtccggaattcccgggatgctgtgtgcgcaggcgcaagactagcgctcttgggaccggaagttaaggcgttcgcggcgtgtgaatccagggcctgaaaacccagaatgaacttgtgtccatcccagagatcactgcagatgtcatgaggtaccctttgtgtcaccagctcaagcaggcctctggccactttatcatctgtggtggtcctgtcccgtgaccaggaggaaaaattagctctttgaagagaaagtagttctctattgcaggcactggcctcttaaattgttgcaggtggggaatggatgagaatatttgttttgggtgatcagaactgagactcctattgtggattagtaacatgcctcctcctagaacaagggagggcagggatcgccgagaccaccaccgggctcccagcgaggaagaggccttggagaaatgggactggaattgtccagagacgcgtcgcctcttggaagatgccttcttccgtgaagaggattacatccgtcagggttctgaggaatgtcagaagttttggaccttctttgaacgcctgcagagattccagaatctcaagacctccaggaaggaggagaaagaccctggacagcccaagcacagcatcccagcgctggccgacctacctcgcacttacgacccacgttaccgcatcaacctctctgttcttggccctgccacgcggggctctcagggactgggcaggcacttgcccgccggagagagtggctgagttccgccgagccctgttgcactacctggactttggccagaagcaggcattttgggcgtctggccaagctgcagcgtgagcgggcagccctcccatcgcccagtatggggaaccgcatcctgcagacgctgaaggagcaccaggtggtggtagttggccggtgacccccggttgttggcaagttcactccggtgcccccagtaccctgctgggctgctgggctttcaatcatggtggaggtgcaccccaacccccggcgggaatcccctggaatcttcatggggcaaagacgtggtggggcctttttagaaaccctcc

SEQ ID NO: 439249 - DNA, 1295 bp, Homo Sapiens
  misc_feature (46)..(46): n is a, c, g, or t
  misc_feature (69)..(69): n is a, c, g, or t
  misc_feature (78)..(78): n is a, c, g, or t
  misc_feature (657)..(657): n is a, c, g, or t
cccgccggctccggagcggctctgccttcccgagcgcgggacgggncgccctgggggaggagggcgaangaccgcggncgatggctccgcgggcactcccggggtccgccgtcctagccgctgctgtcttcgtgggaggcgccgtgagttcgccgctggtggctccggacaatgggagcagccgcacattgcactccagaacagagacgaccccgtcgcccagcaacgatactgggaatggacacccagaatatattgcatacgcgcttgtccctgtgttctttatcatgggtctctttggcgtcctcatttgccacctgcttaagaagaaaggctatcgttgtacaacagaagcagagcaagatatcgaagaggaaaaggttgaaaagatagaattgaatgacagtgtgaatgaaaacagtgacactgttgggcaaatcgtccactacatcatgaaaaatgaagcgaatgctgatgtcttaaaggcgatggtagcagataacagcctgtatgatcctgaaagccccgtgacccccagcacaccagggagcccgccagtgagttctgggcctttgtcaccaggggggacgccagggaagcacgtctgtggccatcatctgcatacggtgggcggtgttgtcgagagggatgtgtgtnatcggtgtaggcacaagcggtggcactttataaagcccactaacaagtccagagagagcagaccacggcgccaaggcgaggtcacggtcctttctgttggcagatttagagttacaaaagtggagcacaagtcaaaccagaaggaacggagaagcctgatgtctgttagtggggctgaaaccgtcaatggggaggtgccggcaacacctgtgaagagagaacgcagtggcacagagtagcagcaatgacttgacttgaagagctctaagagactgaaaacttatatgaagttgccttgggaatatttttatatattttatacagtttctatcatggagtcagcaggcacgtggataaaacctaaaagggaatattattgctgtgccatatacagaattcagtttgctttgaaacaagttttggttgaaagagtctgttgaaaattttattatacttccagggaaggaaagagctgtttttatcttcttaaccactccaggctttactctttccaggcccttaatccaggccttggggtgcacactggaggtttttcattatgaagaggatgtgccggggtactatttatgtcccggctgggcttatgctcaggggggtgtgggtaattgtggatcatg

SEQ ID NO: 439250 - DNA, 975 bp, Homo Sapiens
  misc_feature (32)..(32): n is a, c, g, or t
  misc_feature (35)..(35): n is a, c, g, or t
  misc_feature (44)..(276): n is a, c, g, or t
  misc_feature (278)..(278): n is a, c, g, or t
aaaaaaattttgtttttcgccaagactgaagngantgcggaatnnnnnnnnnnnnnnnnnnnnnnnnnnnnnnnnnnnnnnnnnnnnnnnnnnnnnnnnnnnnnnnnnnnnnnnnnnnnnnnnnnnnnnnnnnnnnnnnnnnnnnnnnnnnnnnnnnnnnnnnnnnnnnnnnnnnnnnnnnnnnnnnnnnnnnnnnnnnnnnnnnnnnnnnnnnnnnnnnnnnnnnnnnnnnnnnnnnnnnnnnnnnnnnnnnnnnnnnnnnnnnnnnnnnnnnnntnccttgctcttcttgctccaaatcctgggaacgtctgaatcaacaggcggacatctgtcaaaccttcctagcaactacgcctgcggatggccaacctgaccctggaagacagtggggtttagttaagcacagattgtacatcgggggcctcataaggcgcctggaagcattcaagaacaccacgcttgtaaggacaaagcactcggtcacgggcgcctttacttcggagctccgcgctgctgctggacgagcgtccgttgagtcccagccccaatttttccaggaaatggcggtgagccctctagtgagatattttttggcctgggcctcagtttctccatctgtcaatgggggaagggtaaggcgggctagaggaccccgaccaggtcggctgcagccttcggaagctacggcccagggacgccacaccaaggcaggtctgcgggacgaaagaacccaagaacccgggcgcgcattggcgccggtcccgggctcaaggggcagcaacgaggagacgctggacctggccgttcctcgcacacatctctaaccttctgtgcctctcaagggagatggggtgagcatagccacctccactggagcccgaaaatccccggccgagataccgccactaaaaaggtacacatgcgtcaaagcctctcggagccatttccgctaacgtactcagggcgacgggc

SEQ ID NO: 439251 - DNA, 1002 bp, Homo Sapiens
  misc_feature (957)..(958): n is a, c, g, or t
  misc_feature (966)..(966): n is a, c, g, or t
  misc_feature (976)..(976): n is a, c, g, or t
  misc_feature (982)..(982): n is a, c, g, or t
  misc_feature (985)..(985): n is a, c, g, or t
  misc_feature (989)..(989): n is a, c, g, or t
  misc_feature (992)..(992): n is a, c, g, or t
aggttcataagaatggccattttacttttcacttcattccaacataagttcttgtgtatcatagcagaagtaaatgacagaaatgctgaacctttctagtttaatagaaacaatgtttaaatattctaagccgtggattataagtagaattaaaataagtgatccaaaacacaagtcatccctcactttatagctacatggcttagtcacatgcatatttcaatccagccttacaaccaccccatgggctaaaaggatggaggatgagaactgctgtctccactttacaagtacagaactgaggctctggatgatcaacaatcggcccaagggctgacacctataagtatcaaagccaaggccacggctgagttctcagtaaatccaaggtccttcatgacatgtaggagaagtacaagcaccaggatgactgggaatgtctgtttaaaaatggctaaatctgcttgtttaaggtaattagatccagaggacttggcacaaaactgagtttcaaaaggggctttgaagagcaggtattgacatgtggcagagattgggttcatagaacatgttcttggttattcagggaagaggggcatgtttctgagtaatcagaagccctgtgtgagaaaggaatattttctaggatatctgtgtggctcatggagctgctggatgaacttaagatgccctggacccaggccttcccactgggaggcctggcctgctagagggcaatggctgtacatgggggaaccaggctgcctggaagcctcctcatgggagtgaaagtgaaagcctgtcccaagctggctgaatggcaggcacgttgctccttggcccattcctgtggtcctgtctccatccccttgggtcctcttgatttttctttctgccaaacagctttcccctagatatccaaggacttggttcttttctccaagtagacttggttcnntccacaanagtagatacngcctcnttnctantanctttgggaaa

SEQ ID NO: 439252 - DNA, 1675 bp, Homo Sapiens
  misc_feature (46)..(54): n is a, c, g, or t
gaaattttaaggttatttttatttacaacttttgaaaaatgtacannnnnnnnnacatgggttacttgtgcaaagttagatttggaagtgataaatgcataaaaggtgacaatagaacattagacaaaacatttacaagccttgtcccatactgctacttaaaggtactatatatctaaaagtataaatatccaaaaaaagatcgcagacattggctttaaggttctcagatgctgaaagggaagaaattaaagcatgcagcaataactcaggatttgagtggaaaatagtttgccacagatatgctatgctcccttccttgaattcattaaaactctaaaataaagatggacaattgagtttattcacttagggcagcactgatcctttaaaaagattaaaggagctccaactttccctagctcaaaaactcacgattgtttccattcctctgctcccacacctcttttaaaaagcaaaaacccagaagaccaataattctgaaacttggcatgagtgtgcccagtcagcagcttgcaaagagaggatgtgtcagttactacaattgctgtactcctttagctgagtccttcaactttctccttcttgccagtaaatactacgttgtaattcatatgactgagatcttagtatcacaggatttttagctcccatgcctccttcaaaattgtttacatggatttgtttctattctctgtaggccatattccaaacacattcacttctaaatccaacacaagtgaaggaccagccaggatgaaacacttcagcaatcattttgttaaaaataacatcctggtcatcaagctaagcataagcacctcttgtataacaattcatcttaaaagcttaaagtacaataataaaaataactgcctgaaaactggaaatgaaatacaacagaaaaactgaagcattagtaatttttgcaagtaacccaggtacagtacatttgatttcatagagggtgttttctgatgtttaaggagagggtagaaggggtaggaaaacttggcaaggaagatggaaacagcacaacagttattttgcttttaataaagtaaatgtaatgacaggagtagggaggtgacaaacacatcaatatatatttttcttatggccagcttctttaaactgtacccggggtcaacaatcacgccagctttgttctactattgcagaaacacgcttttcatattcccgtttgttctcctggtacagctgagcagcctggctgtttgctggactattgggattgggttcatccaacagagactgtatggatgttagaatggaagacacatcataggttggactccaacggttctgaagtatgtccagacatatactaccatctgcatagacatcctcaaacggggtcccttcaggcccgaaaatgaccgcgttccacaccattatgttgttctcggacggagccccgctgactccggctggaggatcctcctgcaacctcttgaagtcccgcatgaggcgccgccgagccggggtggacatgtcgcgagcggggtcaggggtggggcatacactggggtctcgggttcccgcggcgggcgaggaggccgaagaggctggagaagcaggagaaggggaggcggaagcacccagaggaaccgcgctgcctctccgaagtcga

SEQ ID NO: 439253 - DNA, 945 bp, Homo Sapiens
  misc_feature (260)..(260): n is a, c, g, or t
gcccaacccggaaaaaacctggaaagcccattagttaaattttttggcaaagttaaccccagggtaccagttaccatttgaatttcataggaggggtgtttttctgatgtttaaagagaggggtagaaggggtaggaaaacttggcaaggaagatggaaacagcacaacagttattttgcttttaataaagtaaatgtaatgacaggagtagggaggtgacaaacacatcaatatatatttttcttatggccagcttctntaaactgtacccggggtcaacaatcacgccagctttgttctactattgcagaaacacgcttttcatattcccgtttgttctcctggtacagctgagcagcctggctgtttgctggactattgggattgggttcatccaacagagactgtatggatgttagaatggaagacacatcataggttggactccaacggttctgaagtatgtccagacatatactaccatctgcatagacatttggatggaacatcttagagacaaatctaactgtaggtggtttatttggatattcttcagtgaattctattgtaagtttaaatgttccatcctcaaacggggtcccttcaggcccgaaaatgaccgcgttccacaccattatgttgttctcggacggagccccgctgactccggctggaggatcctcctgcaacctcttgaagtcccgcatgaggcgccgccgagccggggtggacatgtcgcgagcggggtcaggggtggggcatacactggggtctcgggttcccgcggcgggcgaggaggccgaagaggctggagaagcaggagaaggggaggcggaagcacccagaggaaccgcgctgcctctccgaagtcgagggtcggtctggcgccggctaagcacgacgcgtggtcgacgatatcccggaattccggaccggtaccagcc

SEQ ID NO: 439254 - DNA, 1056 bp, Homo Sapiens
cgggccccaatggtaagggccccacccaggatagaaaccctttcggcaatcacttttggtaaaaaaatgcattcgcgggtgctgcaagctaagccttaggcccctctcggtttaaccaattcattctaaaaagcgtaaagtcccattattaaacatccctcccggaaaaccggcaaatgaaattccaccgaaaaagtggaagcattagtaattttgcaaagtaaccccgggtaccagtccatttgatttcatagagggtgttttctgatgtttaaggagagggtagaagggggtaggaaaaacttggcaaggaagatggaaacagcacaacagttattttgcttttaataaagtaaatgtaatgacaggagtagggaggtgacaaacacatcaatatatatttttcttatggccagcttctttaaactgtacccggggtcaacaatcacgccagctttgttctactattgcagaaacacgcttttcatattcccgtttgttctcctggtacagctgagcagcctggctgtttgctggactattgggattgggttcatccaacagagactgtatggatgttagaatggaagacacatcataggttggactccaacggttctgaagtatgtccagacatatactaccatctgcatagacatttggatggaacatcttagagacaaatctaactgtaggtggtttatttggatattcttcagtgaattctattgtaagtttaaatgttccatcctcaaacggggtcccttcaggcccgaaaatgaccgcgttccacaccattatgttgttctcggacggagccccgctgactccggctggaggatcctcctgcaacctcttgaagtcccgcatgaggcgccgccgagccggggtggacatgtcgcgagcggggtcaggggtggggcatacactggggtctcgggttcccgcggcgggcgaggaggccgaagaggctggagaagcaggagaaggggaggcggaagcacccagaggaaccgcgctgcctctccgaagtcgagatcccgagaattccggacc

SEQ ID NO: 439255 - DNA, 863 bp, Homo Sapiens
gagtggggcaacttggaaaggcgccccgaggtgtcaaacccacgcgcgaagggcgcatgtgtagagcgccgaaccgttcggaacctccgtgactgcccccgtgatcaaaccaccccaggtctgagaaagtagatcgatttcattggaagatcccgtgtcgggaatcatttttcaagagaattcggttaatcctccccatgatttctggacgtcacactattgggtccattccagaaggaacctatttcctgctctgaccagttctactgtttgttgtgagtaaagttttccttcaagcatatagctgacatgtgagatagtaacattcttttctcagctgtaggatgatattcttggcttctttcactttggatttttcatttgccaagctaaaactcacagtttttgttggttgtcttggtaattttttcagcagtgtagaagtgttggtgattattttgcatggtgcagctataaaagacctgcgtttgcccatctctgcccaagtttttattccttttctctgttcattcgcttctttatgtcttcaagactatcttgaaaggactttttcaggcatctttccttggccatcttttgccttaaaacctacttcttcctctttcagggactccaggaaggccggggggaggtggggctggcggaagtggacgcggcgaccctcctgccgcaggcgcgtccagaacgataccttggccactacttctgcaacagctatcttcctcctcctcacatttcaaggctcttcgaagctctccagccacggctagccccgcgcactgggccctccaggaccgtaccaccgtccgccgtcgcctggaactaccgccgccacattcccc

SEQ ID NO: 439256 - DNA, 530 bp, Homo Sapiens
  misc_feature (38)..(38): n is a, c, g, or t
ggctgtttgctggaactaatgggaatgggttccatccnaacagagactgtaaggatgttaaaatggaaagacacatccataggttggaactcccaacggttcctgaaagtatgtcccagacataatactacccatctgccatagacatttggatggaacatccttagagacaaatctaactgtaggtggtttatttggatattcttcagtgaattctattgtaagtttaaatgttccatcctcaaacggggtcccttcaggcccgaaaatgaccgcgttccacaccattatgttgttctcggacggagccccgctgactccggctggaggatcctcctgcaacctcttgaagtcccgcatgagcgccgccgagccggggtggacatgtcgcgagcggggtcaggggtggggcatacactggggtctcgggttcccgcggcgggcgaggaggccgaagaggctggagaagcaggagaaggggaggcggaagcacccagaggaacccgctgcctctccgaagtcgagggtcg

SEQ ID NO: 439257 - DNA, 793 bp, Homo Sapiens
  misc_feature (561)..(561): n is a, c, g, or t
  misc_feature (659)..(694): n is a, c, g, or t
tctttaatgtgacttggggtgatagatccggggatcactatcacattcctctggatttgaaatcggatcaaaatctggttggttagtggcttgaacctcaacccaggcttattcaaaagcctctcaagctgttcatggttgaagtttgacaccccgatgttcttcaccagcccggtgatcaccaggtcctccatggcctcccacgtgtccaggaagtccgtgtcactgggaataaccatgttgctctcgtccagaggcaagtcctgcactcgaggatgtgagaggcagaaggaaagttcactgcagctcatgatccattctggatgaggaggcttgaaacccatgggccagtgtatgaggtagaggtccaaatagttcagcttcaaggccttgagactctttctgcatgctgtttccaccaaggacttcttatggcaggtgcaccacagcttagtggcaatgaacagatcctcccgtcttacagcgccttccttgatcttgcaacggatccctgctccaacctccctctcattgtggtaaaagtaagcacagtcgaagtgnccggtaccctgcgtcaatggcctctttcactgcctcggtcactttccctggagaagccttccaggagctgaggcccacggctgggatatctcccatgnnnnnnnnnnnnnnnnnnnnnnnnnnnnnnnnnnnnacgcgactaccgacaggcaccgcgcgagctactgaggcgctggcgacccgccgttgcgactggctggaagtgccttgtgacggctgacatcccgggaat

SEQ ID NO: 439258 - DNA, 1700 bp, Homo Sapiens
  misc_feature (116)..(116): n is a, c, g, or t
  misc_feature (137)..(137): n is a, c, g, or t
  misc_feature (141)..(141): n is a, c, g, or t
  misc_feature (1566)..(1601): n is a, c, g, or t
gctttctgttctgttctctttagctctgttttgtagttaacaacagtaataaaaggtggacataatgtatgtaagacttatgcttaacttatgcttaagtcttcacgatggatganatggacaattataccattganaagnagctggttctgtctgacagctgttatctggtgatctctcatgtcatagttctaccaagactgagcacattggtctctgtcattttgggtgcaatctctccaaagcaacatccgtcattgattttcagtgattctttcgggggccaagagccttggaccacacaagcacaatccagtctctgttgtgactttatgcctcctaagccatccttcctcattatctaatttttggtatcacagtaacctcttacatgagagaaggtttagatggttgatattcccacttccagccccaacaatctcacagtgaaggtgccaccaagtattcatgttggcttccatttacttgcagagtctctgcgattctcatattcaaccaggagcggggctgagcggccccgaccagggcggaagatgacagcagcccgaacctataattttcacagtgtaagttcaggccgccctcatcctccacgccggccagagccacccagctcaactcccggccaaacaccagaatggccaaggctctgcatgatttggctaaattcctctcctcttgaggtcccaagacaatttgaagctcctgggccttgtcagagaatcacttaacacagccttttgacagttggttagagtaggttcaaaacacgtttttgtgcagttccaagtgtctgggggaagcctcacaatcatgacagaaggcaaggagaaacaagtcgcgtcttacatggatggcagcaggcaaaaagagagcctggatattctctttaatgtgacttgggggtgatagatccggggatcactatcacattcctctggatttgaaatcggatcaaaatctggttggttagtggcttgaacctcaacccaggcttattcaaaagcctctcaagctgttcatggttgaagtttgacaccccgatgttcttcaccagcccggtgatcaccaggtcctccatggcctcccacgtgtccaggaagtccgtgtcactgggaataaccatgtcgctctcgtccagaggcaagtcctgcactcgaggatgtgagaggcagaaggaaagttcactgcagctcatgatccattctggatgaggaggcttgaaacccatgggccagtgtatgaggtagaggtccaaatagttcagcttcaaggccttgagactctttctgcatgctgtttccaccaaggacttcttatggcaggtgcaccacagcttagtggcaatgaacagatcctcccgtcttacagcgccttccttgatcttgcaacggatccctgctccaacctccctctcattgtggtaaaagtaagcacagtcgaagtgccggtaccctgcgtcaatggcctctttcactgcctcggtcactttccctggagaagccttccaggagctgaggcccacggctgggatatctcccatgnnnnnnnnnnnnnnnnnnnnnnnnnnnnnnnnnnnnacgcgactaccgacaggcaccgcgcgagctactgaggcgctggcgacccgccgttgcgactggctggaagtgccttgtgacggctgacatcccgggaat

SEQ ID NO: 439259 - DNA, 1156 bp, Homo Sapiens
  misc_feature (973)..(973): n is a, c, g, or t
  misc_feature (986)..(986): n is a, c, g, or t
  misc_feature (1043)..(1043): n is a, c, g, or t
  misc_feature (1045)..(1045): n is a, c, g, or t
  misc_feature (1047)..(1047): n is a, c, g, or t
  misc_feature (1052)..(1052): n is a, c, g, or t
  misc_feature (1059)..(1059): n is a, c, g, or t
  misc_feature (1071)..(1071): n is a, c, g, or t
  misc_feature (1079)..(1079): n is a, c, g, or t
  misc_feature (1094)..(1094): n is a, c, g, or t
  misc_feature (1101)..(1101): n is a, c, g, or t
  misc_feature (1113)..(1113): n is a, c, g, or t
  misc_feature (1127)..(1127): n is a, c, g, or t
  misc_feature (1137)..(1137): n is a, c, g, or t
  misc_feature (1140)..(1140): n is a, c, g, or t
  misc_feature (1143)..(1143): n is a, c, g, or t
  misc_feature (1149)..(1149): n is a, c, g, or t
attgagagtaagtcagacacagcagttctttatttaaattgtggatagtttggtaggtagggggagagagagatggtagcaaattctgtgccttcaatgtagcattatatgaaaggtagattttatattggcagagaaatagagctattattagtttctatttatctagcaacagaggaaaacaaaaaatcatgtaagaaataccagcatttgcacaataaattaattctccctcttccctggtaccagagtccttaccacccctgaactttgaatcacaaaagctcaagtaaaccttcatgtgtagctaccagtttgtgttcttaatcatgttccccctgagtttcaaatatgttaaaaatcccccatgcaatctgaatcagacctttgtctttcctaggttacaaagactcaaatggccaaccatcaccattatgttacctgaggtcacttaactctgtggctttcaactctgtggctttcaactctgtggctttcgtgtaagatggcggtatagggccatggacaccaatgccaaagaatagtttcagggtttttttgcaaaaacattgtgtcatccatgaacatgaagcatttaccaactaaacataccctaaaatagtttctgttgactaaatctttcatagttcattcattgtctggtgagagcacagagctaagaggaccagcgttagcatatattagagtcccttaagaggtacttgctttgccgtgccacataaccataggtcacccacctctagttctacaggaatccatcatctctgttggaataactcaaaatacaggctcttgatggtaggttaaaaacatggtcctgttatgtgatagataacacaatactgtgttttgaagttaagtcgaaaattgtaggggttatcagtaacctagaaaagaaaacagcttgtccatgtagaaagattagaggatctaaattaaattggaaattgtnctatttgcatcantcttctccctaactttatcaataaagacctgatttccctcactttattctggaactnanantgtanacatganatccataggtgnatagaatnggggtacagactttntgatatntgtttaaagatnaaggagactgtaanctgattcaantgngtntgtaanactagta

SEQ ID NO: 439260 - DNA, 1586 bp, Homo Sapiens
  misc_feature (19)..(19): n is a, c, g, or t
  misc_feature (42)..(42): n is a, c, g, or t
cctaaattaaaatgggaantgtccctatgccatcaacctccncccctaactttatcaataaagacctgatttcccctcactttattcctggaaactgatattgtaaccacatgaaatcccctaggttgtatagaatgagggtaacagaacttttatgttatctgtttgaaagaatgaaaggagcactgtaatcctgaattcaaattggagtcttgtaaacaactaaataatagtatgtgatactatggaaatataatatatgacccggaaggattaaagaagttgtcattagaatatgtgggatttatgttacacataaataagcagtcatctaagaggactaacatggagtttttcacaaaatgaaaaagaaagaaacaaagggttgaatagtacaatgaagactgtattacattcagacaataaggaattgtctttttatttgcagggcaaaacaaaatctttatctgtggtgatagaaagttcagggtaatatatatggaagcatgaaatgaaaaattgtggaacaaactatctaagaatataaatatagtctctcttttcataaatattcaatacgttatttgacacattggtttgagtgaagctccacaagtacaattttaagcatcttgatttgggctgaggtccagtaaattatatattcccaacaactatcagagctctcccactaaaaatacatgctcacgctctactttgaaaatattctaagataattatttccattttcatagtaactagtacagttatgactagcattctctcaggtttctaaggaaagaaaattattctgagatactgttaataagagaaaatgtggtaatagagaggggcattttcttaaaattgtgctaaagctgtcatttttatttttaatgactttaactgtgctagacaagattttattttcagccacagaaataaaactatccaacataactctttagtctgctgcccaccaatcttctagcccctcccagtgtcaacctcacaatgggtttaattcagtttgaaagcataaaggcaacatttagcaaacagaattatcctgactgacaattgctcatctccctctgagagaagattcagtgaatggtaacacctaggaaggagggctatagaatgttttctctgtagatgccaaggaaagccacttaacatattgtttggtgataatagaaaaggcacagaattttggaaggcttattgccagagtctgcaaaatcaagtttaaaagtaagagaggttttaataccagactttccatcactccaatgtacaggaagaaagataccaaaagaaataccagaatcatttcaaatagtcccctcaaatagtctcatttgatgactacctttccaagcattgctacatttatagccgaattatgccagattcccccaggggactgactgcttagtgcttatcacacaatgctatattagtgaagttttaaaagataaatgcccaagaatttatttaaagctttttgatttgaggttatcagactgaatttttatctagggttatttccacattattctacagtgaaaaagagagtcaac

SEQ ID NO: 439261 - DNA, 1337 bp, Homo Sapiens
  misc_feature (12)..(17): n is a, c, g, or t
  misc_feature (37)..(37): n is a, c, g, or t
  misc_feature (39)..(40): n is a, c, g, or t
  misc_feature (44)..(44): n is a, c, g, or t
  misc_feature (47)..(47): n is a, c, g, or t
  misc_feature (59)..(59): n is a, c, g, or t
  misc_feature (61)..(61): n is a, c, g, or t
  misc_feature (63)..(63): n is a, c, g, or t
  misc_feature (157)..(157): n is a, c, g, or t
  misc_feature (206)..(207): n is a, c, g, or t
  misc_feature (209)..(210): n is a, c, g, or t
  misc_feature (212)..(213): n is a, c, g, or t
  misc_feature (217)..(225): n is a, c, g, or t
  misc_feature (227)..(229): n is a, c, g, or t
  misc_feature (241)..(241): n is a, c, g, or t
  misc_feature (288)..(288): n is a, c, g, or t
  misc_feature (290)..(290): n is a, c, g, or t
  misc_feature (292)..(292): n is a, c, g, or t
  misc_feature (307)..(307): n is a, c, g, or t
  misc_feature (313)..(313): n is a, c, g, or t
  misc_feature (324)..(324): n is a, c, g, or t
  misc_feature (357)..(357): n is a, c, g, or t
  misc_feature (410)..(410): n is a, c, g, or t
  misc_feature (1243)..(1243): n is a, c, g, or t
  misc_feature (1292)..(1292): n is a, c, g, or t
tatttcttcccnnnnnnccccattcaaagatcacacncnncccnctnccccaccgcatncnantagcgggaggtaaaggcaaaaagaggaaagtgcaagcgatcgttacagctcagttcgtgagaacctctggtttcatgctatactttcccagccnaaaagttactaatttacgaagttcagatactgaaacttaaaaatcaacnncnncnnaccnnnnnnnnncnnngtcacactggtngcggcccattgtgtcggagtctggtaaatggccacaagacatgttcnananacgtccatgactccncttgcngtgtgggagcngcatccacagacttctggaataattggcctgtnaggaagctcatcaaagctgcaaacagtacaatgaatgcaatagagagccaganggccttattagcctttctgatggaggacttgagatttgttgcccaggaagctattgtgtcataaactgaagagacatcccactttgatggattatttttcttttcagaaagacttggcttccttgtcctttctactgtttcttctccagatggctctgagtcatctttagttcaactgcttgaccttctactgaatcgatcattattttccatcccagccaccattcctgcatttccaatatttctgggtaaagaggcaatagtcactcttcgtagagaagatggcttggagtttagagaagctgaacgttttttaatttggcagtcatcatcatcttcaagaggattgaaagacctttcattctgcagaagaacctgtttcagttcttctaattcagcgtgctctttggcatacatcctcttcaagttttctacgtgctgaatcatcacttcaactgctttactaacccggctttcctgattgatggctcccaacatctcagccctactggccactcgtgctgcacactggctaagaaactttatactcttctccagcttcttaatgatttcctgtgcctggttgtcatcttcacacagaggtgttaaagactctaatagttttaaacagttagtgatttctttcttcaaattttcttctgccaagtcacgggacctctcttcaagcttcactctcttctccaaggtaaaccagtcacacttaaatcccaaagataatctgagaaattctgcctccacctccttctcattagcagaagttgttctcactttgtctaaggttaaccgatttcacagtggttacaggaagaggngaaaccacagaatctcctgaagcatgttccttttatagtcttctatggnttctgggtcctctttggcttccagattaaatgggtttatccttac

SEQ ID NO: 439262 - DNA, 1134 bp, Homo Sapiens
cgatctgtgagtgtcacttggagtaatcaaaggtgctaggccccactgaggttgaagcagctgttgtctgttccattcaaagatgctgtgagcattacagcgtctctatgcaacatccattaaagcacctggaagggggttttggaaacggctcagaaaggagcaaggtgtgtccgttcccattcttgccttaggtggctgttccgttacccaggctatgctgtctcagtggccaggtggctgaggaggaagtctgaaggccgcatagttgcaagtggcttccctagggccttgcaggggacaagcataggcccaaagctagaggaagcttggaagggcgcccacgctgggtcctgcggggctctgcatactgcaggccaccatggcgctagctccttaccctctggagtctgtctcatccaggagaagacagctggctggcctcagagcgttacatgcaactcgggtgaaaacatttttacatgacacagacacacaatgggctttacctctggataaacttagaaactttccatccaaacgaaaagggtgtatcttctgtatgttgccaagaagcctaaactgagtacaaggacgatcttactttaatcaagttccagaatgagggtacacagcttcgaaaagcagtctgtagcagaagatgcaagggtgtgtgtagccatgtttccagaatataccaaaggaaacacacacaaccccagtgtggccttttgcgaaccctcgatgctgctccatactgggggcaggcggctacttcgtccagctgactttgggaatgtcgtaatgctccgtgagtgtgtccaggtgtctgttgaagtcctccactctctgcttgtgggttttggatgccttctttaggatcctttccatttgccgcttctcctgcattttctcgaaggccgcctgggccggggtccgcttgtccaggccgcgccgcttctcctcctcgttctttttgctcgttcccattgcttccaggagtttcgctttgtctttgtccttctttttcttcttccgcttggtcactcccagctctgcgacgcctttcagcttcaggggtcccttttggacctgctcgtaggcctccatgacactctccagtgcttcggtagc

SEQ ID NO: 439263 - DNA, 2191 bp, Homo Sapiens
  misc_feature (66)..(66): n is a, c, g, or t
  misc_feature (528)..(612): n is a, c, g, or t
caaagaacccgggaataacccttgttccaggtgggcggggtgtggcggggatcaagtgggccacgngaacaaaacccagggggggaaactagggggttatttgaatacgacaaccctagggtgggcgttttatttttaaccatccccccaaccccgaactaagaaaaagaggatggtcttcgccgggggaaaaaagaattttgtcgtgaaaggaggtgtgggcggataaaataaatatttcttccacaccacaataaagggatcctgggggctggggggagtccccaagttaggccggttgtctccattgtaaagcaggcctcagaaacaaccaagaagaccggtccccgaaaattctatcaagccagttataggaccccggacctaggggtagtaaaacaaagcgggccgacgctaggccctttttcccaaggtgggattaagggaaagccccgccccagtacctaggtgtttgtgcgaattttgatgtcgctccatttttttctagatatatcgggccttcttcannnnnnnnnnnnnnnnnnnnnnnnnnnnnnnnnnnnnnnnnnnnnnnnnnnnnnnnnnnnnnnnnnnnnnnnnnnnnnnnnnnnnacaataactgacttttgctttattgtgtaatttacacaggacaaccccaaattccacacttcgtttttctcttctgccttcattattctttcaatatctacgtcaacagaaatcgtttctcccaataacatatgtggtttgatcctcagccaggacgcacaggccctacaagatcccagccctccaacacggacacctggaccctcccatttgactgcagccttgtctgtttgtaccggggctctgccctggtcctgtcacccctgagacgtccgtaaggtaggaatgccaaacaggatctgtgtgatgtgtcaactctgagtaaatacaagaggctgctaggagcccccagctgaggattgagaggcaggctgtgtctggttccatttcaaagaatgctgtgatgcattagcagcgtctgctatggcaacacccattagaagcacctggaaggggggttttgggaaacgggctcagaaaggagcaaggtgtgtccgttccattcttgccttaggtggctgttccgttacccaggctatgctgtctcagtggccaggtggctgaggaggaagtctgaaggccgcatagttgcaagtggcttccctagggcctgcaggggacagcataggcccaaagctagaggaagcttggaagggcgcccacgctgggtcctgcggggctctgcatactgcaggccaccatggcgctagctccttaccctctggagtctgtctcatccaggagaagacagctggctggcctcagagcgttacatgcaactcgggtgaaaacatttttacatgacacagacacacaatgggctttacctctggataaacttagaaactttccatccaaacgaaaagggtgtatcttctgtatgttgccaagaagcctaaactgagtacaaggacgatcttactttaatcaagttccagaatgagggtacacagcttcgaaaagcagtctgtagcagaagatgcaagggtgtgtgtagccatgtttccagaatataccaaaggaaacacacacaagccccagtgtggccttttgcgaaccctcgatgctgctccatactgggggcaggcggctacttcgtccagctgactttgggaatgtcgtaatgctccgtgagtgtgtccaggtgtctgttgaagtcctccactctctgcttgtgggttttggatgccttctttaggatcctttccatttgccgcttctcctgcattttctcgaaggccgcctgggccggggtccgcttgtccaggccgcgccgcttctcctcctcgttctttttgctcgttcccattgcttccaggagtttcgctttgtctttgtccttctttttcttcttcctggaaaaagacatgaggaggcggcgggtcggaggatcagggccaggggtcccgagaaaaggtctaagggggatgaagacggaatcccgcgggccctcgggcctcaccgcttggtcactcccagctctgcgacgcctttcagcttcaggggtcccttttggacctgctcgtaggcctccatgacactctcccagtgcttcctcgtgccgaattcgccacccagc

SEQ ID NO: 439264 - DNA, 1079 bp, Homo Sapiens
tgaaatgtcaaaggtcattttatttacctagtctccttagaaatggagtccccaactactcattcaaaagaaatcagacataaaataaacagacatcatatatgatatccttacttgtgccatgttttccaagaccagtgcatatttttagacatctcttattcgcccagccatctgcatgacatgggtatttattagtattaccagttggtgctcaaagtcaaacaaaaatattttagttaataatgggcagtaaaatatgattttacattattttaaatatttgggagagttaatttgttagctaaataattcaagggaaagagattattcaactggtcataatcaccccctgataatattattactaatcttaattatttattacatcatctctttctcaatggatctaatgttttaattttttcccctattggtagagaacaataacagaagtaatttttatattatacacttggagaaataaagttgaaacagaattaaaaatatttctcaaacaactgtatcacaatataaattaaactaattcatttttgtgtagacatacgaaatcacaaaaataataacactgaaataattctaccaatgcagtgatggaaacacttttcttatgtaccaagacatagataggtaagagaaataaagaattgaagtgaattagaaaatccattttattgcttgggtttaaaatagttgtgggatacaagtatttacaatgctattggagtcaattattgacaacactttgcaacagtaataccatttctagcttttcaattggcaatacttagaaccttactgtagtgacctgattttaaataccatattatatttactaagttaagagctagtttttactctcttccataatttcattacatgaatgtaagatgatggctcaaaaatgacgacttatagtttgaatttatgtgtatgcaatatacatatgagaaccaaattcaacaagtgacatgaatgttactacatgaacattgaattgtattgcccttgtcagttatttcctctgttcaataaatactgaaggtcacaaacacctt

SEQ ID NO: 439265 - DNA, 1563 bp, Homo Sapiens
  misc_feature (155)..(155): n is a, c, g, or t
  misc_feature (171)..(171): n is a, c, g, or t
  misc_feature (671)..(971): n is a, c, g, or t
actgagtgtatttattctttatttttaggcctaaatttatcttaccttttattgattttataatatactatactctttcattttagtctgcatatgttagccaaagaagatatgcccctgttttaagaaatctctgtaaaaaatgtcaagtgtgnccaagaattctttcanggaaacaagctcctctagtttgtcttctatatttagagcttcaacagttacctatattactggtaactcccaaatataccttcaaacttgttttttgggcccaagttttttgcttcatatatatctgttttgaatatcccataaataattgcatctaaagcatacctccactccattgttctcaaagataaaaccaaacctgtgctgcttcttatatttctagtatttaagcgtcacctgccacccctttacctgagctacaagtcacgcattgcattagactcctctgctttcttctttcacctctaactagactattaaccaaaaattttttaatataactttcaaaaggtattttattacatcatttccatcctttatgtttgggttcaagccctcattaactttaacatggattcttggagtaccctccttactgatttttttacacatgtccctcttttagtcagtactaccatgataataccatggataataannnnnnnnnnnnnnnnnnnnnnnnnnnnnnnnnnnnnnnnnnnnnnnnnnnnnnnnnnnnnnnnnnnnnnnnnnnnnnnnnnnnnnnnnnnnnnnnnnnnnnnnnnnnnnnnnnnnnnnnnnnnnnnnnnnnnnnnnnnnnnnnnnnnnnnnnnnnnnnnnnnnnnnnnnnnnnnnnnnnnnnnnnnnnnnnnnnnnnnnnnnnnnnnnnnnnnnnnnnnnnnnnnnnnnnnnnnnnnnnnnnnnnnnnnnnnnnnnnnnnnnnnnnnnnnnnnnnnnnnnnnnnnnnnnnnnnnnnnnnnctaatcatactacattttctttagaataaaagatcacatacttcagtttgccattcgcagtctggccccattgtgccattctagacttacctcctgccactccccaccagctttgttttgtcttagccacacaaaataatctagcgtctctaaccagtcaaacattttaccttgtgccttggctcactctgtgccttttctccagaatatctttctgtgtacttttctcccatccttttacctttaaacctgctgctatggtttgcatgttgtttggcccctccaaaactcatgttgtagttcaattgccaatgtaatagtgttgggagatggtacttttaagaggtaattaggttgctaagatggattaacatctttctcttgacactgagactgggttctcctgggaatggttagttcccaagagagtgagttgttataaaacaaggctgcctcttctattttgcgctttttgtttgcacaaactcggtccccttctgtttctctacgatgttttgatgcagcatgaggcagtcatgagaacgccaccagatacagctgcttgatccgaattttccagccacagaaccaa

SEQ ID NO: 439266 - DNA, 1796 bp, Homo Sapiens
ctaggttttcaaagattttattaaaaaaaccaaagatatataacactaaaacaacaccagcggacttctccccacctcccagtctgctgatcagtaccctctctcccagggctccacctggatggtcctgaggcccaaaccctgcctgtcagctgcctcctgccctacaaactggtgactgctctcatccagcttctgatctgtttcatttaagatgattaaaatactcccctccccaattcgcttaaaaataattttcaaagattaaaaatttcatttgtgtgtgtgtgtttttttaaataagaactttaaatgtgggatatctccttcttcccctaggtccagttgaggactctggggtgcctgcctcttcaccccaggaagccagctgccacttgatgccccttggaaattttcaggaagtaatttctttcaaattttccctgcagtcacaaattccacaaactgcttgcataaacacgctgtcttcattataggcaccactcctcagctctggaaacctgatctctttctgtcaactagaccacatgcttcagattccctttgatgtagttgaggatttgttggattcggtggggctcattgcggtctggccggcagcttggcgtgatttccagcacataatcaggaccatatgctgtgaaaaactcatgatccgggatctcagaggatagtgttttccctaggatgaccccggtcaagtatgtccagcatcgagccgtgttggcaaggttatagcctcctcctcccaaaatgagtgttgccaactgccattgaaggatgtacttaagacacttgccaattcccactggagtcatgttaaaggagcacatgggatccccagctattgtgtcagctcccagctgtaagaccactgctttgggattaaaggcttggtatacttcctttagtacactttcacagatctggtaatatttttcatcttgtatgccatcctgaatgggcacatttacactgtagtaccgtcccttccctaggccaacatcagacacgtcacctgttcctgggaaaaatcctggggagaatttgtgcagggacacggtcatgactttggaggtgaaactgaatgcgtcttctacaccatctccatggtgcagatccaaatccacgtagagaatacgctcaaatttccgtcgcaatcgtaatattcccaggacagcatcattgagataacaaaaaccagatgcttcatctttctttgcatgatgccaccctccagaccagttaattgctactttgcacattccgtcaatcaggcattgggcagctgtgatcgtagcccctcctatagctgctgcatagtcaaatatcccttcagtggctgggcagtcataacctagcccatattctatggagtccggatgatcatcatcgccctcttggctgaccttctggagatgctgcagataagcatcagtgtggaaggtggccatctcctccatggaggccactttaggcttaactatcctcatttgcttatgcagtgcatatgcttcaatcaaagaatgcaccatactggcccgtttggggatcttggccagggagtcacacatactgacatactcgggactatagatataaaccgggaccagcgactgcccactgtccgccggttcctccggctcctccatcttccgcttaaaaccgttccgcagccaccttccagatctggcttttttcggactcggccagggttccagttcctgctcctctgatcggccgcagcggatcccgggaattccggaccggtccac

SEQ ID NO: 439267 - DNA, 1419 bp, Homo Sapiens
  misc_feature (508)..(508): n is a, c, g, or t
aatattccattatatctttatttatttatttacttttaacgactactccagcagatcagggctacccccaggcagtgtgtggagcctattccattatactaaatgcattatgctaatctttgcagaaagacgtaaggtgacctaatcaaagttctagtattaatttcaactgcattgatgataagggtcaaagattgtcatatttttagctaaattaataaataatctattaaggtatataccttattaaggtctatcaatctattaaggtatattacaggggttgcttggatttgagaaaaaggaaaacgagtatgtggatgagggagacaaggagaataatttcattcattcattcactcaaaaatcatatttgcacgtcaagtaccaatcattgcgctaagtgcttaggaaacaatgacacaatgtccttgcttttgaaaatcgtgcagtttagtgcgaatacatgaatagagcagtaaaactggcactcttggttactcagaantatacattcattcattcattcatgaacatataactgaatgaaggaagccagggagaaagaaagcccggtgacaaaataattccactgaagcccctagtgacttgaaaagaacaccaagaatcgatccctcaatctgagaatgtgtgtggaccttccttcctagaatcacgagagacatcagggcctgcagaggtcccaggcgcggctcttcctccagtgcccgtcagtcaccagcccccgagagcttggaaaacgcagagggtaggggtccccaggccccaaccccacacctgcatctcttcaagccaggcactcccactaggttcagctctctaaacgtcccggaaggaacaaactctgagtcaacctatgaccctcaaaatgaaagtcactcagggtcatttccctcagtgctcagggctcattcacagacagtataaaaggtcaagagaaatggaaactcctctcgaggagccctcagcttcgtgaaagcaggagacacctggggtagatcggacagggagggtaatcccagaggcttctccagtcatatgcagtcggctcggactactcatggcacagtcactgacctttccaaaagggcttcccaggggcggtggccagaggagcgagagcggcggcccaggccccgcacccaacacatctccctctcagcggctctgtgctaaggggcgcagggtaaccaagagcgaccaggaggccgccatcttgaactccgtacgaggagaggaagaggaaaactttattggaacccagaagagagacggtggcaaagtcaaaccccgccgtgcacgctgaaggctccacccgagagaaccaagggatcagttagggaacgtgacctccagtagccacatgggcgggctgactcccgtgccctcccgtccatc

SEQ ID NO: 439268 - DNA, 846 bp, Homo Sapiens
  misc_feature (49)..(49): n is a, c, g, or t
  misc_feature (827)..(827): n is a, c, g, or t
ggaagaagaatggagctttatggccccaaaaagctggacccaagcccanaccctcctcctcaaagcgcagccaaaggcaaggccaaaacttacgagttcgaggtgactcagccaggggcatccggatcccctaccctggccgctcgccccaggacctggcctccacttcccgggcccgggatggccttcgaaacatgggtttgtccccgccagcgagcagcaccggcaccagcagcacctgccgcgcagaggcccctcgggaccgggaccgagaccgggatagggaccgggagcgggatcgagaaagggagagggagcgagagagggagcgggaacgtgagagggaacgagagcggggtaccagcagagtggatgacaagcccagctcaccgggggacagctcgaagaagcgaggccccaagccccggaaggagctcccggacccctcacagaggcccttaggcgaacccagcgccggcctcggagagtacctcaagggcaggaagctggacgacaccccttccggggcaggaaagtttccagccggccacagtgtgatccagctggcccgaagacaggactcggacctggtgcagtgtggtgtgaccagccctagctcagctgaggccacgggcaaactggctgtggacaccttcccggccagggtgataaagcacagggctgccttcctggaggccaaaggccagggtgccctagatcccaatggcacccgggtccgacatggctcaggcccccccagctctgtggggggcctgtaccgggacatgggggcccaggggggaaggccctccctcatcgccaggatnccctgggcccagaatacct

SEQ ID NO: 439269 - DNA, 1870 bp, Homo Sapiens
gttctatggttttttaatgatttgttaagcatgggaaccactgcattccacctcagtttgaacaggcagcaagtaagcaaaagaggcagtgctgtccaatacaggttgagaatggtagagagaaaaagagagaatgaatgtgtgtttgtattggtatgattctttttcttctacaaaacacagtttataaacatatgagcatgtgaatggaaccttgtccactatggctaacatctcaggctctcaataatagaatgtggtagcctaagattttctttcggggtaccaggtagttctgctcaaacggacttcagagaagggacatgccattcatctttgtcccatctaactttggccaggtagaaacaaaaagaagctctctacaggtacccttcctcttgcacaccaagaagtatcgggaagctggtgcaaaggaaagaaaaaaggagcctcaactacgttctttagtgcaactcatttcactctaaagaccccctatctcttctactctcccttcaaatctccagagcgggaaatcagggagcttgctcagtttcttatatcccctgacaactccttcccagggctaaggaaccagccaggacaccatggtccctatggattactctctacatccttaaatagaagcggtagcagcccagggtggagggtggaggaaggtgtgcatgccaggatcttggtgcttttgagttgagaggcttgaattggagggatgagtgaggtatctgtgtgttcaggtctggtccagccactctgccttcttgggggctttgcaagtatggacgtccacagtatttctgcattccttgcaccgtacagcacagcaccagtggaatttgcactcacactgggtaacacgggtgactcgagttgtgtcgtaccctcggccacagcacatgatttcacaaccgtctgttccttttgatgtcttgctgcagacacggcctgcagtgcctagggaacctgcagccttgtccaagacacagtaatctggagagttgtcaaagtagacaagatcagtccgggtggcacggcgatagctttggcgggctgcggtgaagttggcaccatcttgggtggccatcacctgcacagccccatcatagcgtcgccgcaggtaatcacctgtgcggcggaaatctgagagtgcacgccagcaggtgcgcagagtacaggaaccactcacgccatggcacttacactccagcttcagaaaccgccgcacagccgtgcgaccacagcggttattatgtaagttcatgagggcccgggcatccttaagcgtgttctccttggcatccgcgaaggccttggcaaaacggacaccgtagtggatgttgtcactgcagccaccccagtcaaagtccccacgctggtcatggtgtcggccacgggtgtaggggtcacagctgcacacactcagttcaccctggctacaggcgcgagtaatagcgtggactacccctgctgatgagatggcatatacaaaagctgcctctcggctacttctgagcatgacacggccaaagacggtgtggtcccggtccagggtggtacagttccagcggtggtggcggaattggtgctgacactctcggatccattctcgggcaccctcgcccactgaacgcatgatgtctgggtaacgctggcacagctgccgctgccggctcaccaaaccagggatattgtcacagatcactcgtgcccccagtgccccaatgtacctgcaaggcagagatggccctgtcagaacatcccagacctttttctgcattgggagggaataaggaaggggtacgtttagcatccagaccttgaagagattctgtcccctctccctaaccca

SEQ ID NO: 439270 - DNA, 1681 bp, Homo Sapiens
  misc_feature (6)..(6): n is a, c, g, or t
catctnggcacaggcacatgtggctttattgaccactccagccactcagctcagagaaaggtgctgggtgctaggtccaggtacagaacgggaaaggcagagaggatgagcaggagcaagaagcagggatgtggccccaacccatcagccaggcctccggcagagtgcccagcagcagcttccccagcagctccagcgtggccagaaggctgtagtgtgtggcctgcagggccctgggggccagctggctgcagcgcatcatcccagtgaaggtgactgtggtgaccaggcctcccaagaagtgctgcagacataggctcagcaaggctgaccctgggagggcagaagtcagcagtgccccaggctcctggcccctctcttcctcctcaaggccagcccctcacctctcaagattgtgccagcgtccatgctggcccccagggtgtccaggtggaagaccaaggcagtctgacaggctaggcccccgaggcggaagcgcagcaccgacctcaacagaggcagcagtttccagtgcttggccagcaaggtcccacccagggaggagccagcgatggagcagaccacagcacccacaccattccacagtcccaactcgggagcagaaacgccgtggtccagcaggagaagaggaaacaggctgctggcaccctgctcacccagcttgtaggtgagcacaaagcctgccgtccacacggtccccggcacggctagcacgtcccgcagaaggtgcgcggtgtggggacgctgctcggaagggggctgctgtgggagccgccgcagggctggtgcagcccaggccagggccgcggccagccagtaggtggcagccaggagcagaaagagttgcggccacgagaaggtgggcagcagcgccagcagcgcgcccccagctagcgcggcccccagcttgtacgcgaccacctgcacggtattgcccggccccagttcggccggctccagcagctgcacagccagcgcgtccagggccacatcctgcatggcggcacccaggttcaacaacagcagcaaccccgccacagcggcgggcagcccggcctggccagctccaggagggggcagcccggcaagcagcccacacaccaggcccaggcccgccgtgctgcgcgtcacccaggccctcgccgagccctgcgcgtccaccagcggggcccaagccagcttgagcagccacggagcgtacagaaccttggccagccccacgcgcgtcagcgagaggccgccggcacgcagcagcactggcaggaggccggactggagcccgtagggcaggccctgcaccaggtagaggccggccagcggcagcaacttcccgcgcatggcggctcaggccggctgcgaggctgggaggtcgggttccaggtggggtcccgcaaggcgaggtcccctccgcgtggggtcagaggccacaccccggcatggctttggttctgggaccgggcagagtcagcgtcgtacaggctagggtctggacacgtgctctcgggctttaggagcatcaacaccccagaagaaccgaagtcgggtccaaacgggggcgagcggtccggacaccggcggccggcggctcccggcatcccgggaattccggcccgtacccgtaatagccacctgcacggcgacgcggggagggcccaggcgg

SEQ ID NO: 439271 - DNA, 751 bp, Homo Sapiens
gggccacaggcacatgtggctttattgaccactccagccactcagctcagagaaaggtgctgggtgctaggtccaggtacagaacgggaaaggcagagaggatgagcaggagcaagaagcagggatgtggccccaacccatcagccaggcctccggccagagtgcccagcagcagcttccccagcagctccagcgtggccagaaggctgtagtgtgtggcctgcagggccctgggggccagctggctgcagcgcatcatcccagtgaaggtgactgtggtgaccaggcctcccaagaagtgctgcagacataggctcagcaaggctgaccctctcaagattgtgccagcgtccatgctggcccccagggtgtccaggtggaagaccaaggcagtctgacaggctaggcccccgaggcggaagcgcagcaccgacctcaacagaggcagcagtttccagtgcttggccagcaaggtcccacccagggaggagccagcgatggagcagaccacagcacccacaccattccacagtcccaactcgggagcagaaacgccgtggtccagcaggagaagaggaaacaggctgctggcaccctgctcacccagcttgtaggtgagcacaaagcctgccgtccacacggtccccggcacggctagcacgtcccgcagaaggtgcgcggtgtggggacgctgctcggaagggggctgctgtgggagccgccgcagggctggtgcagcccaggccagggc

SEQ ID NO: 439272 - DNA, 387 bp, Homo Sapiens
ggctggtacggcccgggatttgggatgcgggagccgcgtgcgcggtgtcggaccgctcgcccccgtttggacccgacttcggttcttctggggtgttgatgctcctaatatgcgcgagagctcgtgtccacgaccctatgcctgtacgacgctgactctgcccggtcccatgaaccaaagccatgccggtgcgtgtggccttctgtaccccactgcggtaggggacctcgccttgcgtggaccccacctggatacccgatctcccagcctcgcagccggcctgagccgccatgcgcgggaagttgctgccgctggccggcctctacctggtgcagggcctgccctacgggctccagtccggcctcctgccagtgctgctgcgtgccg

SEQ ID NO: 439273 - DNA, 1719 bp, Homo Sapiens
ggggagactcataaaaaattcggaatcgaatcgggggtcccaagtgaaacaagcgcgggcgaaagggaggcccaagaaagcccccacaggttgcaacggggcttgggaggctccagccaaaaaggaaagggttgcaaacgcctcttattaaaaaaaccggaacttggaaagaacgggattaaaaaaccccccggaaggaggccaacggcccaaaacttcggggtaaaaccgccttcgtgatctgggaagtggtccccaccaaggccggaaagaacggccttcttcccgccgtaaaaaggcccctgtttgaagaccgaacccggcccagagaagccactcgcccttctttgtcacttaaaaccctgtcccgacgcggatctcacgtctagacctctgtctttaaagcggatgtagagcgcgttctaaccgttccctaaccattgtgtcaccgcgaaaggccggggctgtgtggaaccgtcccgcacgtgtgcgatgaatctggctccgctgagaacggatccgtgggctgtctggcgcgggctggggcagcagccgagagttagtctacagagctagggcccgagggtggacctgcgtgcgcgtctcgtcacgaaaggaagctctttttggagaggcaaaacgtggtcgcccagatccggcgcagctgtagccgtgggcgctgtgcagtgacagccacacccgccacctgtcacgatcacagttccagggaaaggggaagggtcaaggagaatccagcggaaacttcttcccatctcacgagctctcccttctctccgtggcccccaaacactcgcatttaacgaataatcccatcaagtgagttccagtccgatttaagcggtggttccacatagtctgttggctgcggaaacttctttggtgtcagagtccggtcttcccgagaccacgaatggccatgtcaggttcactgggtgcacgtagccgttctcatagcggtcctcctgcaacagctgccgcaggtgagcgatgtaactggaagccagccggagcgtgtccagcttggagagcttagtgtcggggggcacccagggcaggctggtcttgagcctggagaaggctttgctcagcacgcgcatccgggcacgctcacgggcgttggccgcgttccgctgcgactgcttgcactctgcggctgagcccttggccgggaggggcttcttgccaccaccgcccgcgctaccacctgcgccgccgcccccagccacacggggccgcttcctcttgcagccttccgcgctgccggctgtgcccagagcgcagcgctcctcctcgccgtcggggtcctcctcctctgccgacgagttgtcactgggcgaggcgtactgcgctctacgccgcggaggggcggcctcttggaggcggggaccgggtactcccgctgcagcccccgaagctccatctcctccggatcactcaccgagcccgtggacatcccgttgtcccccttgcccacacgcgtcctctttcctcccccctggccagtctcgctgtctccgccttccgctccctggcggaggcggaggccagagagcgctccaaggaagactaaaaacccaggccgggaagcgcggggtgagaaagcgaggtgggtggcgagagcgtgagcgcccctctgctgaccccggggagcgtggactacgagttggcgcccaagtccagaatccgcgcgcaccgcgg

SEQ ID NO: 439274 - DNA, 1929 bp, Homo Sapiens
  misc_feature (1231)..(1239): n is a, c, g, or t
  misc_feature (1623)..(1797): n is a, c, g, or t
  misc_feature (1866)..(1866): n is a, c, g, or t
  misc_feature (1901)..(1901): n is a, c, g, or t
ggaattcttcgggatcaagtgtaatctgtgttcttttttatttggtcatatcttccattctttcttacctaattcctctaatatctctctgtgagcctaaaccaataattatatattacattctattgtctttcttatataactgcagaaagataaatatcactttgtttgttcctgtaggttttctttagtgtaatccatagcagttattgcattggagcagcagtccctcactttgaaaccttcgcaatagcccgaggagctgcctttcatattttccaggttattgataagaaacccagtatagataacttttccacagctggatataaacctgaatccatagaaggaactgtggaatttaaaaatgtttctttcaattatccatcaagaccatctatcaagattctgaaaggtctgaatctcagaattaagtctggagagacagtcgccttggtcggtctcaatggcagtgggaagagtacggtagtccagcttctgcagaggttatatgatccggatgatggctttatcatggtggatgagaatgacatcagagctttaaatgtgcggcattatcgagaccatattggagtggttagtcaagagcctgttttgttcgggaccaccatcagtaacaatatcaagtatggacgagatgatgtgactgatgaagagatggagagagcagcaagggaagcaaatgcgtatgattttatcatgtcctaataaatttaatacattggtaggggaaaaaggagctcaaatgagtggagggcagaaacagaggatcgcaattgctcgtgccttagttcgaaaccccaagattctgattttagatgaggctacgtctgccctggattcagaaagcaagtcagctgttcaagctgcactggagaaggatacccccaggtattcattttgacctaatttcacctcaagtggagaatcgctgaccttgaaccagcgcccttcgacagctctggcccctcaaacctcaccctgacctcctgctgcctatgagctactgcacatacctcaaggccatatgcagttgtggccctgcaccaaattacactgaatctaggaggggagttggcagtggcggtatgaaaaaccattgaacagttttctcgatggcctgactcccttataaaccagagccttcagaccccttacaaggcttaatggcacattttactttgcatttgcttggaagtgagttaagcgnnnnnnnnnctctaagaaaatcgcaggcttctttttttaaaatgctgactttatggaaccagaaacggatactggcaggctaaatgtccactgcttcttgaaaaatctcttagttactattatttagtagcaaatcagattgtgcaagtttgaacgcttgtttccctcccataataacaatgccacatgttgcttgtgtgataaataatctttgtttactgtggacacttcggcaatttggttcatcttggtacagaaaatacaaagacaggactaatattttattcattttttatacttagtaactaggacagggatctgtatttagactatattcaagcctcgctctgtcacccatgcttgagtgcaacctctgcccactgtgttcaagcnnnnnnnnnnnnnnnnnnnnnnnnnnnnnnnnnnnnnnnnnnnnnnnnnnnnnnnnnnnnnnnnnnnnnnnnnnnnnnnnnnnnnnnnnnnnnnnnnnnnnnnnnnnnnnnnnnnnnnnnnnnnnnnnnnnnnnnnnnnnnnnnnnnnnnnnnnnnnnnnnnnnnnnnnnnnnnnggtgtgcgtctccgcgcccggccagttacataagattttaaaaatgtattgtaataggctctctgattnttagaaggtttcatgtgtgcccgcagtatttaatncactggtatcactttaggtatcaaacta

SEQ ID NO: 439275 - DNA, 984 bp, Homo Sapiens
  misc_feature (228)..(228): n is a, c, g, or t
  misc_feature (279)..(279): n is a, c, g, or t
  misc_feature (333)..(333): n is a, c, g, or t
  misc_feature (591)..(591): n is a, c, g, or t
  misc_feature (784)..(784): n is a, c, g, or t
  misc_feature (865)..(865): n is a, c, g, or t
  misc_feature (880)..(880): n is a, c, g, or t
  misc_feature (897)..(897): n is a, c, g, or t
  misc_feature (901)..(901): n is a, c, g, or t
  misc_feature (909)..(909): n is a, c, g, or t
  misc_feature (911)..(911): n is a, c, g, or t
  misc_feature (914)..(915): n is a, c, g, or t
  misc_feature (919)..(919): n is a, c, g, or t
  misc_feature (923)..(923): n is a, c, g, or t
  misc_feature (929)..(929): n is a, c, g, or t
  misc_feature (942)..(942): n is a, c, g, or t
  misc_feature (944)..(944): n is a, c, g, or t
  misc_feature (947)..(947): n is a, c, g, or t
  misc_feature (951)..(951): n is a, c, g, or t
  misc_feature (957)..(957): n is a, c, g, or t
  misc_feature (966)..(966): n is a, c, g, or t
  misc_feature (979)..(979): n is a, c, g, or t
gtgtgagccaccgcgcccggtccaactgaacggttttataatcacaaggggcctcctggcaggtcactggcaccaggagccacgctggtgcttgggaacggcgtgtggctgagacggggaggtgggcaggaagaaggccttcgatggctcaaactggggaactgtgaggaagtagagggcctaagcctctcctggacgccctaacctggggccagggggcagcccgcnggagggccacagcccaggccaggtgcccagcaggctggaccactgtctgcncttgatagccgctctacccgaggccactgtgcaaggccgtgggggacagcactntcctatcattgagaatctcatggtctcatattcacaagtaaacgtgcctctcaatgcttaggacagggtgcatcactgaggtgcttacactttgaaaccacacgccaggaagatttcttcaacaggaaagtgctgccagtgccggtcggccttggggcaggaggctgctgctcctaaaaaattccgttcacctttggccaaagttctgagccagcccccgccggctgggccctcccctcaaggcccccaccaacagtnaaagaggtggtgggtggcagacaggccacagcagggcaaacccacacagaggacccccgagccgactctgtctagtcaacagtgaccacacgtgacaaccagttctccctagaaaacccagcctggaattcccgaggaccacctagcagctagcacagctctccaggcacgtggggtcttttctctgcctccnaccagagaacatgcaggaggatgggggtttggacctccaggagagccgacacccctcagagctgattcaggaggctccaanaatccatcagggcanacaggctgcatcaaggncttntaagaggnanagnngggncctnaagctnaaaaggggtgctntnganaacnaggctnttcaggggngctttcccacagntcatt

SEQ ID NO: 439276 - DNA, 387 bp, Homo Sapiens
gcatgctgctgcatggttttattcctcatgggtagatgaacacacactggtatatggggaaatcctcacccgccctccgctgctcttctggaggtctgtcctcttgctttcctcctctgccccagcctggtgctgccccaagccctgccctggcaaagagagaactgtgcacagcggggaggctctccaagccagaggcctcgcacgcagctgaggaatgacgcaggggcctgcaggcagctcacgcggagacaggtctgtctagtcaacagtgaccacacgtgacaaccagtcctccctagaaaacccagcctggaattcccgaggaccacctagcagctagcacagctctccaggcacgtggggtcttttctctgcctcctacca

SEQ ID NO: 439277 - DNA, 426 bp, Homo Sapiens
  misc_feature (374)..(374): n is a, c, g, or t
gaggtataaatttttcttttttaaacatcacaatataaaatgttaactggtgatgtagtaaaccaacatgataatttgtcttatttgccttactagcattaccaccatataggcacttttccacgtagtcaaattatgaacagcatttttctataaggcatattccatgcacatcatttacagaaaggtaaattaaaaaatagaaaagattatggagcatgaaatccgcgtgcatgtaatgtaagcatatgttttatatgtatttttctctctgtacagaataataaatatcactatatctgatgcaagtaattcacttccaggattgtgcatattaagcgatcagactaatcccatgcattaaattattatcntgcacttatcattaagactccattaccatggtatgtggatatatacaggaca

SEQ ID NO: 439278 - DNA, 435 bp, Homo Sapiens
  misc_feature (42)..(79): n is a, c, g, or t
  misc_feature (419)..(419): n is a, c, g, or t
ttttttttttggagaaccaactcatctttattaaatgcatcnnnnnnnnnnnnnnnnnnnnnnnnnnnnnnnnnnnnnnatagcacatacttcaggcttgcggcaccaccccatagagctggtgaggaagtaacttctgcttctcattgcaactgtagatccatcggggacgaacgaatgccagggaggggttgtccatcagggcctcctcaaagctgggatcccattcctgtgctgtgatcacaaactgaacccggtcactcatatagtcctcgagctccccattgaaggctgtgacgtatcggatgagtttccgccgttcgtccccaggggaactccccgtaaaggaaagaagtgtttgccctggggaaggaaatctggggagctcaggggactgggcagattcagggagggttccnggggtttccgcaatgt

SEQ ID NO: 439279 - DNA, 1921 bp, Homo Sapiens
  misc_feature (64)..(64): n is a, c, g, or t
  misc_feature (1836)..(1872): n is a, c, g, or t
gtttccgccgctcgtccccagggaactcccggtaaagaaagaagtgcttgccctggaagaaatnctgggagctcagggactggcagatcaggaggctcctggtgttcctcactgtccgtgttctcatccgtggggcctgcatacgggtcttcccccattctcctcctggccagggggcagtctgtgttctttctgctctgccaccctcctcagctcatcctctgtgtccccagaatcttccgccccattgtcctgtccttctgactgtaccccctcaatgtctatatcttcctggagcactggtgaggctgctttggtctcttcaggggttgggggcttctggggtgagctgggtccagctgcctgagtgggcttggttttggtctggggttgcttctgaggaagcttgggggcttcatctccgctgccaccgctgtgagaggcctcatcctcctcactgctggaacctggccctgccatgaggtacctccgggagggcagccgccgacgcatgcggtgacagtccagcacccactccttacgcacgatgcggcctcccaggcctaggacctggctgtacttgggggtgttggcaaaggcacagatgaggtgcgtgctgtcccgggtccagtctggccgatacttggccccaagctctagggccttatctcgcagctcggagcggaaggggttctggaagccactcagcaccactaccacaccctgaaggatcttccccagctcctctgggccagctcggggtcgtctgggctcggtgccttctcctcggggtttgcctgtcactgccccctgtgctcgggcagggactggggctgtggctggggtacgagttggagctggcaatttaggtctcttgggaacagatggcgacagctgggctggtggtttgctgggggtcttcttttcttcttggttcaaatccaacttcctcttccctttgggagactcctggggcttggaggtgctgcctatggccctggagactggagaggctgaggaggcagcactagaagcctggagggtagcagctgcatagctaggtcctgctgggtcgctggctgtgactggggatgtcttgttgatccggctgaagaagagagcccccggcctcagagagttggcgctctcatcctcctccttcacacggaactggccaagcttggtcactgtcaccttctgggacggggcctctgcctcatctttgtctggggggctatgaaaccgtacaaaactcaagccaaagggggagtccttgctgtagggctggctgcaaacaattttgacccggtcccagcgcttctcggcggctgcccggaccagcttgtcaggcccaaacatgcgaacgcggttggggtttgagccactgcggctctcggaaggggacatgaaagatgaggtgaccagaaggacctcatagtcttgctccccagcgcctccagctgaactgcccaccagcacctccacgaaagctgagccatcattcccaatgtccacactgtgtatctgctcctccttctccaactgtaggaccacagagatggtcttctcgcctgccttggctgcccgccattttcggtaagtgtctgccttgagaagattttctgcacagtgagtcgagtcctggctgctgcaggacacgacatggcggaggcggatctccggcatgtcaacgtcgtgggcttcgcctggccagaaggatgaggtagagtatggggtccgaggggcagggagagtgggagggagcggggtgcgccctgcgctggctaaagtccgcccgctctcgacgaattcgagctcggccgatttggcctgatnnnnnnnnnnnnnnnnnnnnnnnnnnnnnnnnnnnnncgccgccaccgcggtgagctccattcgccctatagtgatctatacatcc

SEQ ID NO: 439280 - DNA, 1483 bp, Homo Sapiens
  misc_feature (66)..(66): n is a, c, g, or t
  misc_feature (121)..(173): n is a, c, g, or t
  misc_feature (191)..(192): n is a, c, g, or t
tatattatttcaacatgtaatcgacataagaattacaatattttacatttgttttctaagtctttnaaatctggtgtacattttggactcattgcatgtctcagtttggacaagccacatnnnnnnnnnnnnnnnnnnnnnnnnnnnnnnnnnnnnnnnnnnnnnnnnnnnnnttctaggtagtctatttnnagttcctctcttctcccttaagcctctggaactgtgatgggaataatctgtcatgtgaattcctagcacttatcagcacctctcattatcacttggcctccttgcattatttatttttgtgatgcatttgtcttgtctcatgaactaacttgtaaactctatgaagtccaggaccaaagacacatgtaatctcaagactggaaatatctttaacaaaaccatcaactaattattctgttgatgtgtggctcccctgtaccaagtccctattaagtgagcttcagaatctccttgaagcaaaattctgtggttgaggtattcacacatgctaaggtaggcaattctttgggtcgtgctacaagggcatcttcttttcaggatcttaaatctgttccctgaagtttgcatcacatgaaacaaatcaacttcacatgataggtcatttcatatttggagagagtccagtagttttctctcttctaggtgagtcctggaaggtttaatcaatccttcttcacttgccctgtttttgagttctcgtcatcattttgctcttccctgatataatgccagcttgattaaagtcttcaaatgctgaacacagcacttcagaggtggtctgaccagtaaagacaataactgtatcactattggctgcctctacaaaacagttctaccaggcatcggggcacattaccttgaggaagcgggaatggcagaggagagccacaacaaacatattaactcatactatctttgcattgtttgcttttagtctagaactctttgcagataaaccacacaattctttaggttagtttttcttcgtatcttcctatcttttcaatcgagttagggaatctttgggctttctgtttttggaggaggtcttctgaccgaagagccgacttgcagagatcactttgaggaactaagctgagaatccagaaagcttatggaaaacaggccttgacaccagagaaccatgtatactctctagcagccagagggctttggctgaaaacgacgatagcaactacctgtttcttcattcaaattgctctcctttcctttacctttaataggaattatttcctccacatatttaccttacagagaagggcggggagaagacgcggcagactgaagtaaatgcagggaaaaaactcacaggtagagaggtagagacggcaggcctggcccgttgcgggcagccagggtaaagtggagcgtccgctcccgccctgggcgcatcctcgccgccgccggaccttccgcctctgctccatcc

SEQ ID NO: 439281 - DNA, 1605 bp, Homo Sapiens
  misc_feature (53)..(63): n is a, c, g, or t
  misc_feature (75)..(75): n is a, c, g, or t
  misc_feature (80)..(80): n is a, c, g, or t
  misc_feature (352)..(352): n is a, c, g, or t
  misc_feature (358)..(367): n is a, c, g, or t
  misc_feature (516)..(516): n is a, c, g, or t
  misc_feature (840)..(848): n is a, c, g, or t
  misc_feature (1245)..(1269): n is a, c, g, or t
  misc_feature (1294)..(1450): n is a, c, g, or t
cgaggcgggagagtgcgagcgcctaagagcagcacatgacattataaaaagtnnnnnnnnnnntgacggtttccntatcntggcgtcagggagccgcgccccctatacatcggcaggggtttcttcgtctaccccaagtggctccacccttcatgtttgtattctaccacaaggcctgagggctgttccttcaccaaatatttctgtgtagcatcacgagaggatgcccgcgcggcgcggcgcgtccacagcgggccaacatctttctacacgcagaccgacgaacacgtttttgcctgtcaagcagcacagggggaaacgctgggttataagcgccgcagagtcgaccatnactacnnnnnnnnnncgcgcgtgctaaatgacttgggggagcgggagggcggggcagcaagcagagcagcagaaagggcggggggagaatagcgaaaaaacgggggcgcaacttgcctggtttagaggggggtgggcgggaatttcttctcactagcgcgctcnggatattgggggcgctctcagtcgtcgtatatgggatggcactattaccctccctcaactggggggagtgcaaaggatgcgtattcgctgttcattcacccagcaaacaacatcggcgctctcgccggggtgcttaacaaaccgccgtcccccagcggggggacagtattttcttggtgaatgtggggggggcgggagctgatgtgcgccaaaaggccacgtattggtgttcccgatttcaccaccaggggacttgctccccacagggcacaagaccgacgacgtatcgcataccaggtgttttcacgttataccccgtgagtnnnnnnnnncacggggccccaacaagtaagggggtgcgtgccagagccttcttccccgggccctagggtcgccgcgggcagatctgcgcccgtagaggtagcacctgggggggctgggcaatcccgggtaatgggaaagtgggccggcgcctggtgcatttggctttttcatcaagttggcaccagcgtttgtaaggaggaagaggccgtttttagggagaatggtgatttgagataaagccgcgaaactcacaaaattcaggtcgtatgctgccgtaattctaaaaatacattttgttttggcttgggtaattttgttcaggagaaaagtagttagagacgaaactctgaagcttctggatttgataagtttgtcagtggggaagggacaatgctaccgggttgnnnnnnnnnnnnnnnnnnnnnnnnncgagatgaagtctcactctgtcatnnnnnnnnnnnnnnnnnnnnnnnnnnnnnnnnnnnnnnnnnnnnnnnnnnnnnnnnnnnnnnnnnnnnnnnnnnnnnnnnnnnnnnnnnnnnnnnnnnnnnnnnnnnnnnnnnnnnnnnnnnnnnnnnnnnnnnnnnnnnnnnnnnnnnnnnnnnnnaccatgtttcccaggctgttcttcgaacccctgacatcaggtgtatccgcccacctttggctcttccaaagtgcctgtttttatcaggccgtgagcctcccgtgcccctgcccctttttctttgggaagaccttaactggggctcatttcccggg

SEQ ID NO: 439282 - DNA, 794 bp, Homo Sapiens
tgcatttaaatcttttaattcacttcatcctgtattttaaaataaatgttttccatatagattttccccttgggggggaaaagaattcagggtcttaggttccaggcagttcaaaaacagccacgcggttcttttttctccaccagaataccacaatagcagaacttaagaatcgggatatgaaaagggaggcgtggtcctggcagtggcccctggccggcaggaatacacagcaacacccaggcaggggcagcggctgcccccatgccagcctgcccatccctttattccagccagcctcctggcacagggctgggcccacatcctggcctctgcatctggatcagggctggtgctggtcagcctggtcactctggccagtgctcacactggaagtccatcacaggcgaagtcacctccttcccgtgttaaataacaagaatgccaacaccccacgcacgtgtcatctccagtgagcagacgtccaggcttcccgaagcttcctggctggaaaccgcgcagggccggcagcgccctctccaccaagggacacagcagcggcgcctcctccgcggcccgggcccccatcccgcggctcgcgctgccaggacgccccaggtcggagcctgcccccaccccgcacccggaggccagcagcccagtcccctaggccgcgcagcgccagcgagagcgaggctgcagggcgaggcccggtgaggcgctcgagaactggccgggaggagaagtcaggcggcccacccgccacggcagcctccggcgcacgcagagccgct

SEQ ID NO: 439283 - DNA, 1259 bp, Homo Sapiens
ccagtaagaaaacagatatatgcggtattttaaaaactgattttacaaaatccagccatgagatgtacaactcattccctaggaaacagcccaggaatggccatcttctccagccccgtacgctctccccagtagcccagggcacccagcaaccatcccctaggagaacaggcaaggaccctcgtgggaagatcccaccacagcaacacctttcttcagggcgggctctgtccgcaatgtgtgagtcaagacaatccattccattcaagaccaatttactctcaaattttgccaacacagaaatattatccttaaagaaatgtgcatttaaatcttttaattcacttcatcctgtattttaaaataaatgttttccatatagattttccccttgggggggaaaagaattcagggtcttaggttccaggcagttcaaaaacagccacgcggttcttttttctccaccagaataccacaatagcagaacttaagaatcgggatatgaaaagggaggcgtggtcctggcagtggcccctggccggcaggaatacacagcaacacccaggcaggggcagcggctgcccccatgccagcctgcccatccctgtaatgacagcagggcaggagatgcagctgtggccctgggggcaggtgggctctgaggctgcaaacaccctgagtgccagtggtcccagagggggtgaggcctctatctgtacctttattccagccagcctcctggcacagggctgggcccacatcctggcctctgcatctggatcagggctggtgctggtcagcctggtcactctggccagtgctcacactggaagtccatcacaggcgaagtcacctccttcccgtgttaaataacaagaatgccaacaccccacgcacgtgtcatctccagtgagcagacgtccaggcttcccgaagcttcctggctggaaaccgcgcagggccggcagcgccctctccaccaagggacacagcagcggcgcctcctccgcggcccgggcccccatcccgcggctcgcgctgccaggacgccccaggtcggagcctgcccccaccccgcacccggaggccagcagcccagtcccctaggccgcgcagcgccagcgagagcgaggctgcagggcgaggcccggtgaggcgctcgagaactggccgggaggagaagtcaggcggcccacccgccacggcagcccgacgccgtgggtcgacgatatcccataacttccggaccggtaccagcc

SEQ ID NO: 439284 - DNA, 1593 bp, Homo Sapiens
  misc_feature (1493)..(1513): n is a, c, g, or t
acccggcaacaccccagctcccccaccgaacgtgcccccccacggtcactgccccgtgttctgcttggttcccctggtggtttggcccaggagcctgtgaggatgaggatgaagacgacgacgggaagacccaggatctggttgccctgcatgtccaagggaaggagcggtcgaggagggtgggagggggcataggaagagggagttggcccccctgagtcatcaagacctgccacaggacccccaccctcatatgggccaaagtcattggaggactcacagaagttgacctgctcctcccccttgtctgggggctcactcagggtacggacatcacttatgctgagggtagcctcaggccctccccccactggaaccctggagctaccccctagttcttcatcttcatcatcctcacaggtcaacaccagatcttcctcctcctcttcctcctccagatctgggtcttggggaaccaggggtgttggcgctgggcaattaccacctcgcttcacgtatacccagtgtttctgtggcatgatgctagggggtgtgtaggtgggtctccggagcccagccccaggaaccactgcccccctcccatccccaccatcatcgcacagctcatctgcctccagcagcagctttccagatgtggcccctccactgccaacgacaggggctgggaatacagggccacctcctcgacgctccccactgcccactgcagaagctgcaaatgcctcttgggaggaagatgagaaatcagtggactccctggggctgaagtagttgctgctgctgggagattgattctcactggcccggctggaggcatgggagcgcgcagagcccatggtagcaggggccacagtgcccccactcccggatggcaccccagcaccagggacagtgacagaggtggctgcagcagtagtgatggtggtggtagctgaggcccggccttctcggagtagttcagtgcacttgtccacaatgtgccacatttggagcacagaccccactgtaaggaagttgacaatgtcagcagcagccatgctgaggcggccagtgtaagcggaggctaggacagtctcaaaggcgcctgggtccatgacactgggcagcgagatggaggtcatgcctttgagtaggacctgatcatggaagtaaggggaggaggcagccaggacagcccgatgagcccggaactcccggccctgcactctgatagatacatcgcagagctggccctgcagacgctgctgattgagggactccaagagggcactggtcacctcagggaaggacacatgtaccactgcagctgctggcaggggtagtgggggcggagccagcgacagcggcaggggaagtgctgccccactgggagacagaggagatggctccatgttgtggagggaggggatacccccccagccacaggaacaaagaaaggaggagggcggccgggggggtctcgggccgcgcgnnnnnnnnnnnnnnnnnnnnntcactcggcggccagagcagcaacctgggccgacagcgtgggtcgacgatatcccgtaattccggaccggtaccagccta

SEQ ID NO: 439285 - DNA, 1342 bp, Homo Sapiens
  misc_feature (282)..(282): n is a, c, g, or t
  misc_feature (439)..(439): n is a, c, g, or t
  misc_feature (593)..(593): n is a, c, g, or t
  misc_feature (809)..(809): n is a, c, g, or t
  misc_feature (1028)..(1028): n is a, c, g, or t
  misc_feature (1030)..(1030): n is a, c, g, or t
  misc_feature (1033)..(1033): n is a, c, g, or t
  misc_feature (1037)..(1037): n is a, c, g, or t
  misc_feature (1040)..(1040): n is a, c, g, or t
  misc_feature (1048)..(1049): n is a, c, g, or t
  misc_feature (1059)..(1059): n is a, c, g, or t
  misc_feature (1066)..(1067): n is a, c, g, or t
  misc_feature (1069)..(1069): n is a, c, g, or t
  misc_feature (1076)..(1076): n is a, c, g, or t
  misc_feature (1078)..(1078): n is a, c, g, or t
  misc_feature (1081)..(1082): n is a, c, g, or t
  misc_feature (1126)..(1128): n is a, c, g, or t
  misc_feature (1130)..(1130): n is a, c, g, or t
  misc_feature (1132)..(1133): n is a, c, g, or t
  misc_feature (1135)..(1138): n is a, c, g, or t
  misc_feature (1145)..(1145): n is a, c, g, or t
  misc_feature (1154)..(1154): n is a, c, g, or t
  misc_feature (1159)..(1159): n is a, c, g, or t
  misc_feature (1163)..(1163): n is a, c, g, or t
  misc_feature (1167)..(1168): n is a, c, g, or t
  misc_feature (1171)..(1171): n is a, c, g, or t
  misc_feature (1173)..(1173): n is a, c, g, or t
  misc_feature (1189)..(1191): n is a, c, g, or t
  misc_feature (1199)..(1199): n is a, c, g, or t
  misc_feature (1202)..(1202): n is a, c, g, or t
  misc_feature (1210)..(1211): n is a, c, g, or t
  misc_feature (1213)..(1213): n is a, c, g, or t
  misc_feature (1215)..(1215): n is a, c, g, or t
  misc_feature (1217)..(1217): n is a, c, g, or t
  misc_feature (1219)..(1220): n is a, c, g, or t
  misc_feature (1224)..(1224): n is a, c, g, or t
  misc_feature (1226)..(1226): n is a, c, g, or t
  misc_feature (1228)..(1228): n is a, c, g, or t
  misc_feature (1236)..(1236): n is a, c, g, or t
  misc_feature (1250)..(1250): n is a, c, g, or t
  misc_feature (1258)..(1258): n is a, c, g, or t
  misc_feature (1284)..(1284): n is a, c, g, or t
tcttaagactgtataattgatggaacattgggtatgaattaccttatcttaaagcatttaaaaaataaaataattcataaaatgctgccatataataaacccttgaatgctaatctatttcctaagtaaactcacatatcataaaactcagagccttgaactatgcatgtcttgaagctctgtgctgatttcaagtgttacattgggggaagctagggttcaaattcatttttattctctcagaagagtaaaatacaaacctaaaacctaaattagaaaaanatgaagctttttttaacttttaaaaaattgtttgagttacacttaactttatcagcaatgtgtagacacactgccagttgtcatataagcattctacagcaagataccaacccagagttcttgctaattttatatcgtgtgctgctttagggttaanacctatcctgactgctagtatttatggcttaaaggctgccacgcagtcatgacaacgtatccataatgccagcatcaccaatgcaggtttaaaaaagagcgagcatacttttctataattagaggcctattctgttacagtaaaagcataaatnaagtgctttatttttattaaacaagtatttcaagtgttccttccaaataaaaacagcaaagttttgaagctatactcatcaaagattactagtacattgtttctagcggtagaagttttttgtgtcgtatttccatgcatcgtttttgctttcaccatctgatgtcctgtttgtattgtaactgttgggtgtgtggttatgacattagagctaacnttctctttcacatcactatggcatcctttcttacgaactcctgttttatagatctatgtaagagcacaatttgaatatgatccagccaaggatgacctcatcccctgtaaagaagctggcattcgattcagagttggtgacatcatccagattattagtaaggatgatcataattggtggcagggtaaactggaaaactccaaaaatggaactgcaggncncantccntcncctgaacnncaggaatggnatgtttnnangcgtgtntngcnntgcttggttataaaaacaaagccctgaccatccattttccaatnnnanannannnnagagtgnaaaacctgnttganatantccnnccntnacgagccaaacaaaannnaaattagncanccaagaanncnanancnncagnancnagtgagancctagttgcagagncagggctncattttacacaaaaagaaaggaaggnctggaaagagattggatgagcagccctgagccaagtcatggtctcacagcagagccct

SEQ ID NO: 439286 - DNA, 426 bp, Homo Sapiens
  misc_feature (27)..(27): n is a, c, g, or t
  misc_feature (49)..(49): n is a, c, g, or t
  misc_feature (57)..(57): n is a, c, g, or t
  misc_feature (100)..(100): n is a, c, g, or t
aagaaaacaaaagtaaaataaaccttnccccaatttccctccgtccttncctttggnaaggtcctgggttggtaatgtgggaaatagggtacgcaaaacnggtcctggggtgctttgtgaatgagagtgttttttatgtgtcttctccccaacaccatgtgcgccctaataagactagtgttttcctcttgaatgctggcagttttactacttcttcatatgtgacaagatctaattgatcaaacactgcattgtgctttgccaaatatttatctttgtactgcttctttttcttgccaaaccaagtacagctggcctgctgctcctgtttggtcttctccatggcaatgcaagctactcgccattcctgaagttcaggagaaggaatgagacctgcagttccatttttggagttttccagtttac

SEQ ID NO: 439287 - DNA, 1111 bp, Homo Sapiens
  misc_feature (17)..(17): n is a, c, g, or t
  misc_feature (19)..(19): n is a, c, g, or t
  misc_feature (21)..(21): n is a, c, g, or t
  misc_feature (28)..(28): n is a, c, g, or t
  misc_feature (34)..(34): n is a, c, g, or t
  misc_feature (36)..(36): n is a, c, g, or t
  misc_feature (40)..(40): n is a, c, g, or t
  misc_feature (45)..(45): n is a, c, g, or t
  misc_feature (55)..(55): n is a, c, g, or t
  misc_feature (65)..(66): n is a, c, g, or t
  misc_feature (70)..(70): n is a, c, g, or t
  misc_feature (76)..(76): n is a, c, g, or t
  misc_feature (78)..(79): n is a, c, g, or t
  misc_feature (84)..(84): n is a, c, g, or t
  misc_feature (92)..(92): n is a, c, g, or t
  misc_feature (95)..(95): n is a, c, g, or t
  misc_feature (109)..(109): n is a, c, g, or t
  misc_feature (112)..(112): n is a, c, g, or t
  misc_feature (121)..(121): n is a, c, g, or t
  misc_feature (123)..(123): n is a, c, g, or t
  misc_feature (125)..(125): n is a, c, g, or t
  misc_feature (140)..(140): n is a, c, g, or t
  misc_feature (169)..(169): n is a, c, g, or t
aattgacatacagcctngntncatgggnattganantcanaccantacattttgntttatcatcnntagngccaantnncattntccccagntcnccactctggaaganccnactagccancncngactcccaaagattntgactctaactctttcttaggagacgtcntggtggaatgcacagtcttgggtgccatctgtgtctgcaccccatcaggcttccattgaacatgaacaattctataattctgaccatcattgttgtcccaaaagacttgcccattagcatggtaagaaatgcagaactcaattttctgctcagttggaatgacagggggtaagtcaatggcaaatgagaaggtatcactatctgtgccaccatacacatttttcatatagacacagtctacgtcagtgtagtttttccaagaatcgaaagtgatacggatctgaactttcttctcaaaactcacatttttgactttaacagtccctgtcactgttcgctcttgcaacgagcagttctccagacagacaaagttcttctgaaagtggctccggaaacttaagtaatcggttgaaggctgagggaaatctaaaatcaagtttttctcctcgtggtgttttaaggcagaggagatatcattaaggtccaagagatcaaactgcagatcccacgctggttcttctgggaggtcggagaagacatggatcgcagtgagagagaggcccttggagtcagcaaacacaacgcgcttcttggcttggttgtgtgagcacttccagtcattctgtgatttggctttgtgttttatattgagacatgatttcaggggctttaatttattcacaaaatgtcgtcgttgaaattcatcgtacgggcccaggaaactcttcacaggtggtgaatgtgccaagcaaagcctcatggccacatccacgggcatgaccgaacttgtcaaaggacgtggatctaaaacctggatcattctggtgcagctcattaggcagagaggcggcggaccctaaaagccagcacccgctgcctgcacaaattcgaaccacagctccaggccttgcccccgcggcggtcgctgggagagactccgct

SEQ ID NO: 439288 - DNA, 1455 bp, Homo Sapiens
caggcgtaaaacgaacaagacaggataaggccctgacagagaaacctgtgatcaaagaattaggtcatagatcttaaagggtggtctagaacatccacatacatgtgagagtccagcaggtaaaatgtcagtaggcacagcttaggtgtgcaggctccaggtgaccggtctccgcacggctcatataaagtggatccagctctcttcgcactcagcgcgaggcatgtacagcgcgtggttaccacatgtacagactgtagtcacggtggtcgttgttgttccagtactcggcagccgccacttggtagcgcaccacgaagtgcacgcgggacccgagctccagcagcaaggacggtcctgtaaagccgaaggtgaaaacgtcctccgtgccctcggggcctgcgggtccgcgccaccgcgccaccgcctcgtgggttctgcgccagcccgagaaagtgtagcgcacagccacctgcttctcgaaggccacgttgcacacgcgcaccgtaccgctgatgccaaggtccgagcaagtgacacgctccaggcacacggagctgccgctgcaggcgcttgccaaaagtcggcggcctcgacgggcggcgggaaatcgggcaccaggcaatgcagggtgaactccaggtcctggctgctgcagcacaggtccgagttgattgcgagccgcgacagcacgtgcagcggcacggacgggtcgtctcccgcgttgaacaccttgacctgtgccagctccaagcccagggcgtcggcgaagcgcacgcggagcttctggctgcagcccggccgacacgcagcgcccggcgcgcccgcggccttctggcggcgctagggggagctgggcagtgagcgcgcccgccgcaggatgatgggccgcaggcgggggtcgcagcccgacggcgctggcgttggcggcggcgcgcggcccgggctcccaggggcctacaggcccgcggctccagggccacgccgccgtccaggtccgacaggcagctgaggctccgggggccgagcttccgggatcccagggcgctaggcaggaccgcggagctcgggcctctggacatggccccgccggccgtcggaagatgaggcagggatgagagacgacctcccgaccccgcgacagctccctccgtgctcagaagccgcagagagtccaccgtatctgcaacctgcgggggacctctcgggcccggtgcgccctacccttggttcgccaccttgctcctcgagtccttgtccaggtcctccgcttcttgcggttaaagaaattgtaagagtggggagtttttctctagtggaagctttcagaggcctcccgggatgcgcagggtagcgcctcttttttcttcttgcttccttggaggttcttacaagaaggctgcgttccgggagcggcccctcccactttcccggtccgcggcgttacttccgctc

SEQ ID NO: 439289 - DNA, 718 bp, Homo Sapiens
  misc_feature (391)..(391): n is a, c, g, or t
  misc_feature (393)..(393): n is a, c, g, or t
  misc_feature (411)..(411): n is a, c, g, or t
  misc_feature (414)..(414): n is a, c, g, or t
  misc_feature (421)..(421): n is a, c, g, or t
  misc_feature (427)..(427): n is a, c, g, or t
  misc_feature (436)..(436): n is a, c, g, or t
  misc_feature (468)..(468): n is a, c, g, or t
  misc_feature (496)..(496): n is a, c, g, or t
  misc_feature (525)..(525): n is a, c, g, or t
  misc_feature (546)..(546): n is a, c, g, or t
  misc_feature (588)..(588): n is a, c, g, or t
  misc_feature (644)..(644): n is a, c, g, or t
  misc_feature (646)..(646): n is a, c, g, or t
  misc_feature (669)..(670): n is a, c, g, or t
  misc_feature (681)..(681): n is a, c, g, or t
  misc_feature (686)..(686): n is a, c, g, or t
  misc_feature (691)..(691): n is a, c, g, or t
  misc_feature (704)..(704): n is a, c, g, or t
gctggtaccggtccggaattcccgggatccgcccatacctcaacttcgcacgactgcgtgcctcaagccgacgcagcggcctactctcgcactgcagacggggaaactgaggcccgaggcggccggggtggggcagacctcccggcgagcccgagcccccgcccccggctagccccgccctggcccgtaagaagcacccggggcgcgaggcgaaggcgcacagcgcggggccaggctgggtccagcagcgcgatggcagctcagcggctgggcaagcgcgtgctgagcaagctgcagtctccatcgcgggcccgcgggccagggggcagtcccggggggctgcagaagcggcacgcgcgcgtcaccgtcaagtatgaccggcgggagctgnancagcaactaaacatgaanaantggatcnacgggnacctggagnagctataccgcagcatggaagcaaacatgccngatgagatcaacattgatgaattgttgnagttagagagtgaagaggagagaagccgnaaaatccagggactcctgaantcatgtgggaaacctgtcgaggacttcatccaggagctgctngcaaagcttacaaggcctactacaggcagcccggcctcctccatccaagcccctcnancaacggcagcctcagcctcctcnnaaaccggcccngactntgacncctgaccttcttncactctccctgccc

SEQ ID NO: 439290 - DNA, 704 bp, Homo Sapiens
  misc_feature (603)..(639): n is a, c, g, or t
ttttattgttacagaaccattaaatacaacttatacacaagcaagctgggcggcgtccggggggcagggagagtgcaagagggtcaggggtgagcagtccgggcccggtcctggagggggctgaggctgccgtcgtgggaggggcttggctggcggaggccgggctgcctgtggaggccttgaagctttgccagcagctcctggatgaagtcctcgacaggtttcccacatgacttcaggagtccctggattttccggcttctctcctcttcactctctaactccaacaattcatcaatgttgatctcatcgggcatgtctgcctccatgccgcggtacagctcctccaggcgcccgtcgatccacttctccacgtccagccgccgctgcagctcccgccggtcatacttgacggtgacgcgcgcgtgccgcttctgcagccccccgggactgccccctggcccgcgggcccgcgatggagactgcagcttgctcagcacgcgcttgcccagccgctgagctgccatcgcgctgctggacccagcctggccccgcgctgtgcccgctctcgacgaattcgagctcggccgatttggcctgatnnnnnnnnnnnnnnnnnnnnnnnnnnnnnnnnnnnnncgccgccacccataagctgcggtccccatagtagtcatcgtcgcgggggctgggtgggtgttgtc

SEQ ID NO: 439291 - DNA, 979 bp, Homo Sapiens
  misc_feature (15)..(17): n is a, c, g, or t
  misc_feature (19)..(19): n is a, c, g, or t
  misc_feature (24)..(24): n is a, c, g, or t
  misc_feature (26)..(26): n is a, c, g, or t
  misc_feature (34)..(34): n is a, c, g, or t
  misc_feature (41)..(41): n is a, c, g, or t
  misc_feature (50)..(50): n is a, c, g, or t
  misc_feature (58)..(58): n is a, c, g, or t
  misc_feature (64)..(64): n is a, c, g, or t
  misc_feature (68)..(68): n is a, c, g, or t
  misc_feature (75)..(75): n is a, c, g, or t
  misc_feature (79)..(79): n is a, c, g, or t
  misc_feature (93)..(93): n is a, c, g, or t
  misc_feature (97)..(98): n is a, c, g, or t
  misc_feature (113)..(113): n is a, c, g, or t
  misc_feature (115)..(115): n is a, c, g, or t
  misc_feature (118)..(118): n is a, c, g, or t
  misc_feature (122)..(122): n is a, c, g, or t
  misc_feature (124)..(125): n is a, c, g, or t
  misc_feature (136)..(138): n is a, c, g, or t
  misc_feature (140)..(140): n is a, c, g, or t
  misc_feature (147)..(148): n is a, c, g, or t
  misc_feature (154)..(154): n is a, c, g, or t
  misc_feature (163)..(163): n is a, c, g, or t
  misc_feature (169)..(171): n is a, c, g, or t
  misc_feature (184)..(184): n is a, c, g, or t
  misc_feature (186)..(186): n is a, c, g, or t
  misc_feature (197)..(198): n is a, c, g, or t
  misc_feature (201)..(202): n is a, c, g, or t
  misc_feature (209)..(209): n is a, c, g, or t
  misc_feature (212)..(212): n is a, c, g, or t
  misc_feature (222)..(223): n is a, c, g, or t
  misc_feature (228)..(228): n is a, c, g, or t
  misc_feature (230)..(230): n is a, c, g, or t
  misc_feature (251)..(251): n is a, c, g, or t
  misc_feature (255)..(255): n is a, c, g, or t
  misc_feature (266)..(266): n is a, c, g, or t
  misc_feature (289)..(289): n is a, c, g, or t
  misc_feature (312)..(312): n is a, c, g, or t
  misc_feature (329)..(329): n is a, c, g, or t
  misc_feature (646)..(646): n is a, c, g, or t
  misc_feature (668)..(668): n is a, c, g, or t
  misc_feature (883)..(883): n is a, c, g, or t
  misc_feature (944)..(944): n is a, c, g, or t
  misc_feature (950)..(950): n is a, c, g, or t
ctaatgctacacatnnntnaagtncncaaaagtntatttantaaaaatanagctacgnaaacgnatgngacatanatanatttaatttgcgtncgcnncgctgtgtgcggctncngcnttantnnccgccgcgcgnnncngtgtggnngcagtntgttcttgntttgtnnntcatgcgcagtgntngcttggcgagnngcnntgcttgngcnttgtgctttnncgctncncgcaggtagccttaaagacanagcncctctaaagancgcttgtgtaaatacatgtgagntatagccaccactgttttccttncttttatttttccagtncttgggagaaaacatcctcctctgatgccaaagccctgaaatcaagggtttccacgtaccctgcctaatacccgacgtagctcttgatgccaccgtccttgtgctgtggctggcggtgtctcagcctgaaacataaaccccacatgccccaggagcgatgtgctccctgaaacagacaaccacacgctgttggggagagaaggatggagataggatggagataggatggagatgtggctcttctcatctttgaagccagcagggcatcccggagcaggaggctggccgggctccccaagcgaaggcgttggtgtctntcattaggtgtgtgttagggtncagcaccggccgtcacaggatgctgataagcgcgctgagaggtggatgaaacaccaaagtctgtttccccgtccgcagtgggtgttgcctctttgtgtgtgtcccgatgttcctgcctgtgagtcggccttactccgtttccttagcgcccatgacacgccaagtcccgtttcgcactcggcttctcacccgcccagctcggctagggagggggnttttttagcacctaatatgcttcctgccattgcgcaatctgagcctgagcaactgaaaccnccattntcattagtgcaatgtcatatctgatccca

SEQ ID NO: 439292 - DNA, 945 bp, Homo Sapiens
gctgggaggcttttttcggggtcctttccctctggttcaagttaaaattgagaaaggagggtggtccattttcccttttttccagctgctcctaactggctcggtcttatcctggatctcccctgaaacaagcttcctccatttcttttctcttgagtggacagctgggcctgaagctgatccactctgattcccatcttctcattttctgaggacatcttctggttttgttctttcagttgaagcagctctgtctcccaatagtccttctgttctttcactttcagttccaacttcttattgatgctctgtagggtttctagctcctcctgcttcttttggagctcagcctgcatgtctgagttctgcttctggaggctgatacagctgtccttcagctcctggttttctttgcaaagctccttgttgtgctgctcaatctcttccacctctccctgagtggtaacaaccaggatgtcttcctcattttctggacggaattggaaaggaatacttgctccccggaccacaccatcctcatccacatagcagaactggtaatactcatcatccttgggcaggtagtaagctttgaattggacttcctgctgtttagctgatttgttgtttaggtcaatgggcaaagtaacccacatgaaggtgtaatactcacgggttgtcttccaccccactctaaagatgccaatccaatcctttcgacgagggatgaaatgctgggtgaaggtataatgacatgtgacgtcccctccagggatgtagaacttctccacactgttaaagatgacctgagagaaatgacagtgatccagcaagacagctgatgtggggggatctttgatggtctcctccatggtaggggtccagggacagcaaccagcagcggcgcgacagcaacagggcagagatcccgggaattccggaccc

SEQ ID NO: 439293 - DNA, 1025 bp, Homo Sapiens
tggcctctcactggaacatgatgagagggacctttgtgatgacgggtccatcagtcagaagagggtacgatggctgaagtaaaattaagatgcctggtctccagttttctgccacacaaccatgcttgtagaaccagaaatttgggagcactgcataacaaatggttgatgtagatgtttcaaacaacatctaatctagttagacgtggcacctggccagagtaactacggttcactaaaactattctggattaggcttaataccgtctgcaggaccttttctctggagggggctggcatcaaccacatggcagccaggattctccatccgctggtaggacatttctaccttgttgacggaacacactgttggcctcaagttctgcttcttgccctggtcttctccatgccccggccctgcagcctctgcaacctctcctcaggactcacagtgagcagcaggataaggtcaggtttgagcaggtcctctggccactggtacacagggtgatgggctgggggcaggtgctggagacccccactcacctcagtggctatggcataggtggccgtgctgtgccagtacctgtctacaatcacaggagatttggcagattctttagctatttcggaggccacaatataattgcccaaagagtaaaaagctcttctaatgatagttggttcatcatcaaagatcttcctccactggccaatgcaagagggtggtgactttaagaggacagccttaagtgaatctgccactgactgggtcaccgtggttttacccgtggcatccagtccttcgatggcaactacctggaactttcctttctggatctgttttgggcactggtcgaccaggtcaagcactgcccgggcttcaggaataaaggaggtacactgtgcacaagcttttccctcttcttggaattgccctctcccttttgctgactctccaactgggaagtgtcgcccagattggaacctcgaaatcgcctttcttccaccagattgaatcccgg

SEQ ID NO: 439294 - DNA, 1042 bp, Homo Sapiens
ggggtccggttctggataccccccacttcacctcagtgcctaatggcataggtggcccgtcctgtgccaagaacctgtcgtacaatcacaggagaatttggcagattctttagctatttcgggaggccacaatataagtggcccaagagtaaaaagctcttctaatgatacttggttcatcatccaagatcttcctccactgcccaaatgcaagagggtggtgactttaagaggacagccttaagtgaatctgccactgacttgggtcaccgtggtttttacccgtggcatccagtccttcgatggcaacaacctggactttcctttctggatctgttttgggcactggtcgaccaggtcaagcactgcccgggcttcagaaataaaggaggtacactcctccaaaacggccggggcggcttcccggtccgggaaggccacggaattgggcaagtctggcccctccgggtgcagcgggggctccggggacgggcacgacctgtgcgcagcccacctgcagccgcctgccgtcttgcacctcccagaggcgctgccacagctggccgcgcgggtcggcctcgaactcgcccaagtgcgggcgtggtgcctcctggcaggcgcccagcagctcgagcagcgcttgccgggtgtcagggtcatccagggggtcgcgcagcaggaagccttgctgtgcgccgccggcctggccgcccgggcagtagcagagcagcctgagcagctggcaccgctggaaggggccgcggcgcagctggtgcagcaggcgctggtgcagccgcgccgcccggaccctggccccgcagccggcgtccggggtcacgggcacgcacagcgagtagctgcgctccgggggccccagcagcgccgccaggcgggggtcgggggcgtctgcgtcgccgggggcgtcggcgcctagggcgaagtgagccagggtgcagtcgggaagctccaggacgaagcggcgcggcggagccatggccccagcgcagaccccgcgatgcaaggaattccggaccggtccagc

SEQ ID NO: 439295 - DNA, 1038 bp, Homo Sapiens
  misc_feature (561)..(643): n is a, c, g, or t
tattttgcgtgtaacacacttggagaaaagaacagtgtttaatgtcagccttcattttcttctaacttgtatgtatagttttctcatcgaaaattcatttttgtaggttagtatgaaggaaatagcgtttggattttttgctttatattttcttgtttgggccaattaagggttgttaaataaattggaaaaaatcctactactttaaagagcgtaaaaacgtggaacatgtcttatctaaactcttaaaacgtgtttgttgctgtcaaatatgacttgagttcctgatcgggttatcattgcctaaagacacaggactattttttttattaagataactttgtttttatcttaataaaagagatgatagtcatttcctgacagttttgtctgacggaatgcctcctgtataatagtttaaaataattatttttagtgtttggaaaacagcatttaaaagtttgaacagcagaagtctgttttaagaagcttctgttaacccttgaaaagaatcttcctgtgggatattaaaattttggattgaacttgtgcaaacagtannnnnnnnnnnnnnnnnnnnnnnnnnnnnnnnnnnnnnnnnnnnnnnnnnnnnnnnnnnnnnnnnnnnnnnnnnnnnnnnnnnaatctgttcagttgtgtgtaaggtggaatacctacccgaaggtttttctgtaaggtacattaaataatacatgtacaattctttttgaattgtaaagggctttatgaacatcaattataatcatttcgcttattaggttctgcagaaagtattctctcaaaagttatactttcatccacgaatgaacaaagacttttgtaattggaactctaaaaaaactgaaacacgtatcatatggacattaattcctttcctatatgtattttcatgcctgggaattaaaacagaaatgttgcctttccagccatgaaggatgctgagtggtttagatttgcaaacccatttgtgcctctttttgtattgaactctacataatttaagaaatttccaaatct

SEQ ID NO: 439296 - DNA, 1653 bp, Homo Sapiens
  misc_feature (572)..(589): n is a, c, g, or t
  misc_feature (1337)..(1337): n is a, c, g, or t
  misc_feature (1352)..(1352): n is a, c, g, or t
  misc_feature (1367)..(1367): n is a, c, g, or t
  misc_feature (1461)..(1461): n is a, c, g, or t
  misc_feature (1471)..(1471): n is a, c, g, or t
  misc_feature (1499)..(1500): n is a, c, g, or t
  misc_feature (1502)..(1502): n is a, c, g, or t
  misc_feature (1520)..(1520): n is a, c, g, or t
  misc_feature (1524)..(1524): n is a, c, g, or t
  misc_feature (1527)..(1527): n is a, c, g, or t
  misc_feature (1547)..(1547): n is a, c, g, or t
  misc_feature (1550)..(1550): n is a, c, g, or t
  misc_feature (1570)..(1571): n is a, c, g, or t
  misc_feature (1580)..(1580): n is a, c, g, or t
  misc_feature (1593)..(1593): n is a, c, g, or t
  misc_feature (1599)..(1599): n is a, c, g, or t
  misc_feature (1607)..(1607): n is a, c, g, or t
  misc_feature (1614)..(1615): n is a, c, g, or t
  misc_feature (1628)..(1628): n is a, c, g, or t
  misc_feature (1630)..(1630): n is a, c, g, or t
  misc_feature (1632)..(1632): n is a, c, g, or t
  misc_feature (1635)..(1635): n is a, c, g, or t
  misc_feature (1647)..(1647): n is a, c, g, or t
  misc_feature (1649)..(1649): n is a, c, g, or t
acgggtagggacgcgcgcgaggggggcaggcccgccattgtcgtgatgggatgtaggccttctttcaggagagcgctgtgattgagcaggtcggagcatgtcgtaaggcgattagtgagcagcaatatcgagtggtgagggtagtggtgttgggttcagatggtgacatggttacaacgtcactgcaagagttatggtggagatctagtacggtggattgcagaggcagcgacaaatgagtttaggagactaaagcgcataagggaggcgcatattttatccggcggcagggaccggacgaaagctaggggttgcaaggggtgtgttaggagggttgcttggggtctgtggaggagaggtccggctcctgtgagtgggataattgtgcgggggtttccagggggttcaattaaagcaggatagcctggggtatgggaaagtaggtaaggacgcactataggggggccgggcaattttccctcttttaccaggaaagctgggtcaggagacagctatggccaagtgccatttcatttcctctttgtccgcaccccggcatagatgcctcgagnnnnnnnnnnnnnnnnnngatggctacttataatttatttataaaacattttaccagtgagtgatgtctcaagtgagaggtggtaacagatacacaaagcagtttatagcatgcaatatttcaatgcctctgagaggtagaaacagcttgtgctctcagatggccctcagtccttccccttgtcatctttctgtcctagactgtgtcctaactgctcacaagggttcagcggcatgcaaacagtctttaattggttttcttcaaagaggcattgttgactggaaagactggcttgtatttaaactctgctctttttgcaaatgacagactttctcaacagtatttcagaggaaattttgttctgaacagttaactgaatctgaccagattacagacagcaccacccatattactcaatgctaagacacagcatctttgattttctgtatgtcataacattctgaagcttgagttaccgatggagccatttttgcaactacacatcctccttatagttcttgctttcctttcaagcagatcacagggcccagggcaagatgatttccttgaggagaagtagcctgagccttagaaatgcaatttgtataactgaccagcctggctttccccctcctttaggaatctgattcttcttcctcttcctcctcctcctcttccgtcacatgactctttgtgctcagctccagggttgtttggttgattgatgcttcattgtctacatgcaccaacatatcatgtgactgtncaggtacagtgtganaagacagcatctcancccctcttctagaactgatcattgattggagggctattccttcaacctgtttgtttgtaaacctctaaattggcgccaccacagctagtgagtngcggagaacnggcggcgcaggtggtcacacagaggccnngntgggggggaatggtcgcncggnagnatggaggagggcagaaaggncgngggtcacttgaggcgttcannggtcgtgcnggctccttcaacncacacntctctccncttgcgnntcctgaaccggcnancngtngctggtcaatancnatcc

SEQ ID NO: 439297 - DNA, 1066 bp, Homo Sapiens
ttttggctatttatctataatttatttttaagaacattctgccaatgacatctcaagcaagatgtgataacagttacacaaagcagtctacagcatgcagtgtgtctcaatgcctctgagaagtagcaacaacttttgttctcagatggccctcagtccttccccgtgtcatctttctgtcctagactgtggcctaactgctcacaaggattcaacggcatgcaaacagctgttagttggttttcttaaaagaggtattgttgattggaaagactggctcatatttaaactctgccctttttgcaaatgccagattttctcaatagtattccagaggaaattttgttttgaacacagttactgaatttgaccagactacagacatagcaccacccatattgctcaatgctaagacacagcatcttggattttctgtatgtcataacgttctgaagattgagttattgatgagaaatttttgcagctacacatcctcctatagttcttgctctccattcaagcaggccctagggctcatggcaagatgatttccttggggagaaagagcctgagacttagaaatttaatttgtataatgaatcctggctttttccctcctttagggatctgattcttctttctcttcctcctcctcttctgtcacaggactctatgctccactccagcgtagtttggttgactgatgcttcattctctatatgcactgacatgacgtgtgactgttcaggcacagttggagaagttggagaagacagcacctcatcccctctcccagaactaatcattgattggagggccaatgcttcaaccttgatgtgattcagcaggtcatgcgagggctgccttcaacaggagcagtgtctcctcctccttgcgcagttcctgacccagctcggcatgtttcctggtgacactgctgctcgccacatggcccagtgcttctggacactgcttcttgatggactctgcccattttaattacaagagttactgtttttttaggagtcaggagctggattaatatgagttctttcatcccaggaac

SEQ ID NO: 439298 - DNA, 1613 bp, Homo Sapiens
  misc_feature (6)..(6): n is a, c, g, or t
  misc_feature (11)..(11): n is a, c, g, or t
  misc_feature (26)..(27): n is a, c, g, or t
  misc_feature (37)..(37): n is a, c, g, or t
  misc_feature (40)..(40): n is a, c, g, or t
  misc_feature (55)..(55): n is a, c, g, or t
  misc_feature (62)..(63): n is a, c, g, or t
  misc_feature (72)..(72): n is a, c, g, or t
  misc_feature (74)..(74): n is a, c, g, or t
  misc_feature (76)..(77): n is a, c, g, or t
  misc_feature (79)..(80): n is a, c, g, or t
  misc_feature (86)..(86): n is a, c, g, or t
  misc_feature (88)..(88): n is a, c, g, or t
  misc_feature (96)..(97): n is a, c, g, or t
  misc_feature (106)..(106): n is a, c, g, or t
  misc_feature (398)..(398): n is a, c, g, or t
  misc_feature (490)..(490): n is a, c, g, or t
  misc_feature (509)..(509): n is a, c, g, or t
  misc_feature (547)..(547): n is a, c, g, or t
  misc_feature (658)..(658): n is a, c, g, or t
  misc_feature (678)..(678): n is a, c, g, or t
  misc_feature (684)..(684): n is a, c, g, or t
  misc_feature (715)..(715): n is a, c, g, or t
tttttntaagngaaaaaaatcttgcnngtgagcacanaangaatttggagccacnttatctnngatgtgatngngnngnngcacancntctgtccnncccccaatntccccccacaaataagggctcttttttcccccagaggctctgtataagctcttccacaagtttcattctcttcctaagcctcagtttccccatctgtgcaatggggaggttggattccatagtctcaaactccaggctctgctcaatagaggaaaagggaatgagagaatgcaagagcacagagagaacaggagaacccacaccagggtggaaaggaagggaggagggaaacaggcagagaaggaggagagcgcctgcagctgcctgcctgggagagaggagagagcaggtngcacagcacaggatgcttccagaccctgctcgggctatgtggggccacttcctgtccacttatacggcctgcagcccctgcagtggtaaagntcaggccctggagacaganggatgaaggtttgaatctcacctatggcattagttagntggggccctggaaggagattttcagcacttcagtttcctcttttataaaacggggataaaatatagtgctgtcacataggggcagacacaaggcttggattcaaatccacntctgccaagctgggtgcaanacaganccagatatctaaggttttagctcctggctcngcagccaaggtggggctgcgatggagaagtggggctgggcagggacggtgcttagagcagcactggggtcagggtatgcaacattgagagtgccaggaagggaggagggcaagtgccagagcaggagaacggtatggtccagtgctggtctggacccctttaaccagactcttgcttgagccgccgtggctctcacctgtcgacaccagatccgagacacactcgtacagctccaattctctcttccggtcctaagcttttcatttttcagagagactgaaagtcattatcagaagacgtgacaaacagtctgcttggaaatgtctcagacaaatcctcctgggcttggccctccctcaccctggcacagccggggcaggactcaccacaccaaaccagcggggcctgccgagctctggagccctgggctttcacacctcaggccctaagcacactgcgtggcggccacgtggctctgcagcactctctcctaccagactgggagattcttgagggcgggaatgtatctcatttcccagcattcccagtgcccagagcagggtgtggcacaaaatacatgctcagtgaagatttgttgatctgacaggtcaacattattctcggctgtccctgaaaccgcccaacttctggcttccacagctggacccaaagtgcagcccgggaagggggtcacccactgatgcagcaggcggcagagaaaggtgtcctgggctgtaatttggagaccagagttctgggatcccggatcactgtgtgaccttgagtcagtcctcactcttctctgtacctcaggctcccccactgacctagagtgtctcccggcttctttaggctttatactcttggttaaacttctgccggcggacgcagcagcagg

SEQ ID NO: 439299 - DNA, 1118 bp, Homo Sapiens
  misc_feature (706)..(756): n is a, c, g, or t
  misc_feature (766)..(766): n is a, c, g, or t
  misc_feature (814)..(814): n is a, c, g, or t
  misc_feature (818)..(818): n is a, c, g, or t
  misc_feature (826)..(826): n is a, c, g, or t
  misc_feature (889)..(889): n is a, c, g, or t
  misc_feature (921)..(921): n is a, c, g, or t
  misc_feature (935)..(935): n is a, c, g, or t
  misc_feature (950)..(950): n is a, c, g, or t
  misc_feature (970)..(970): n is a, c, g, or t
  misc_feature (1039)..(1039): n is a, c, g, or t
  misc_feature (1055)..(1056): n is a, c, g, or t
  misc_feature (1058)..(1058): n is a, c, g, or t
  misc_feature (1061)..(1061): n is a, c, g, or t
  misc_feature (1069)..(1069): n is a, c, g, or t
  misc_feature (1082)..(1082): n is a, c, g, or t
  misc_feature (1087)..(1087): n is a, c, g, or t
  misc_feature (1103)..(1103): n is a, c, g, or t
gtctcccaaaaatttaggttttgtaaatacactgtcagggtaggggttaattacaaagagttggtcccgaggcctgggctgcggcctgggccctgggaagtgacagcagccctgtgtagtgttttcaaagatcaggcgtggggacccacaccttggcctccaggcctaaggaggagtgttacgtgcagtagcacccgtgggtgtgatcccaaccaggactgggtctgcctgggtgctccacacaccaccagggcctagccctggactctgcccattgactctcccttaacttcctctgggccttggtgttctcctctgtaaaatggggtggagagagtggcattttcactttctcgcacattactgagcccacatcatgagccagactgtgggccaagcacagagataagatgatagaagacagcaaaacaaggtcttgaagttggatcccagcacgtccattctatcccagacagctcatgactccatggtatgagggatgggggtcatctgggtgaggctttttacctgtttttgtaagagggaaaaaagaaccttgcatgatgaggcacagaaaggaagtttggagccagcattatcttgtgatgtgatagctgagagaggacatcactctggtccaacccccaatctcaccccacaaataagggctcttttttcccccagaggctctgtataagctctccannnnnnnnnnnnnnnnnnnnnnnnnnnnnnnnnnnnnnnnnnnnnnnnnnnggttggattncatagtctcaaactccaggctctgctcaatagaggaaaagggaatganagantgcaagancacagagagaacaggagaacccacaccagggtggaaaggaagggaggagggaaacaggcaganaaggaggagagcgcctgcagctgcctgcctgngagaaaggagagancaggtgtgcacagcnaggatgcttccagacctgcncgggctatgtggggcacttcctgttcacttaacggctgcagccctgcagtggtaaaaacaggcctgganaagaaggtgaaggttnnanttnactatggnttagtaactgggnctggnagagatttcagacttnatttctctttataaa

SEQ ID NO: 439300 - DNA, 1118 bp, Homo Sapiens
  misc_feature (8)..(8): n is a, c, g, or t
  misc_feature (12)..(12): n is a, c, g, or t
  misc_feature (18)..(18): n is a, c, g, or t
  misc_feature (24)..(24): n is a, c, g, or t
  misc_feature (26)..(26): n is a, c, g, or t
  misc_feature (29)..(29): n is a, c, g, or t
  misc_feature (39)..(39): n is a, c, g, or t
  misc_feature (43)..(43): n is a, c, g, or t
  misc_feature (54)..(54): n is a, c, g, or t
  misc_feature (62)..(62): n is a, c, g, or t
  misc_feature (68)..(68): n is a, c, g, or t
  misc_feature (71)..(71): n is a, c, g, or t
  misc_feature (74)..(74): n is a, c, g, or t
  misc_feature (78)..(78): n is a, c, g, or t
  misc_feature (93)..(93): n is a, c, g, or t
  misc_feature (111)..(111): n is a, c, g, or t
  misc_feature (145)..(145): n is a, c, g, or t
  misc_feature (161)..(161): n is a, c, g, or t
  misc_feature (432)..(432): n is a, c, g, or t
cctctaanttanaccacnccaaantnatnccagccggantccnccccacccgancctccccntttttntcntantttnccgcagttccaagtnccctcttccaccagcccnacaaagctcaataaataccaagagacctgcattnacagcaggggaacatntcacacccttgcataagttaaaataaatataacgtacacatctccatcacctaggaggacgtacataaatacatataaatattaattaggagcaataagaaataaattaacgacgctctccttcccaccgggcctagccccagctgggctggtgcctcggtctcttatgcgcctcggtctctgtgcgccttcggtcccgcctcaagcaccgggtggcgtctccgctgtagtgttctgagttcaagttgcctcggaagtcccagttggggantacgctctcgcgcaccaggtacgcctggtgtttctttgtggtttttcggattctttttggggagtgcggggagtcacagttagaaggcggccgggtgttgctggaggaaagtgctgaggtccagagcgtagtccgagggctccgaagtcagattaaagggctcgaggacgggggacacaggggtgggcgccagggatgcggcgttaggggcgtcctctggaggcaggggcgccggcacaccctcttcagccatcaggatctggcagaagacgatggtgagcagcagaaagagaagccttttggctgggttcggttcctcgactggcagctggcgccggacctaaggggagacaaaacaggagacaggtcaggtcgaggcctctggagtcgggtcgttccccagtgactccagggcagcgcaccccgcgaatgcccacttcggcgatactcaccactcgagggtagagaaccctgcggctgcgctttcggtgcccgcgagaggcgctggggcgcccggcaggggccgctgcgggctccgggagagggtcgaaggtgaagatctcaggaccggagccccgccggggtcccgggatggtggagggggccggggtcggggcctgcaggatggtcatggtcgggtggcagctgcgagagtgacacatggtgagccgagcggagtgatcccg

SEQ ID NO: 439301 - DNA, 1506 bp, Homo Sapiens
  misc_feature (62)..(102): n is a, c, g, or t
  misc_feature (159)..(277): n is a, c, g, or t
  misc_feature (279)..(279): n is a, c, g, or t
aatccccccgccctttggttccctgccccgcgggtttttcctggggaaaaccaggtagtagnnnnnnnnnnnnnnnnnnnnnnnnnnnnnnnnnnnnnnnnnaaagaaaagtgtttaagaaagtttttttggggggcccgggggcgcccccccaaaggnnnnnnnnnnnnnnnnnnnnnnnnnnnnnnnnnnnnnnnnnnnnnnnnnnnnnnnnnnnnnnnnnnnnnnnnnnnnnnnnnnnnnnnnnnnnnnnnnnnnnnnnnnnnnnnnnnnnnnntnttttgcagacagtaaatcaattttatttgtgttcacagaacatactaggcgatctcgacagtcgctccgtgacagcccaccaacccccaaccctctacctcgcagccaccctaaaggcgacttcaagaagatggaaggatctcacggatctcattcctaatggtccgccgaagtctcacacagtagacagacggagttgagatgctggaggatgcagtcacctcctaaacttacgacccaccaccagacttcatcccagccgggacgtcctcccccacccgagtcctccccatttcttctcctactttgccgcagttccaggtgtcctgcttccaccagtcccacaaagctcaataaataccaagagacctgcatttacagcagggggaacatctcacacccttgcataagttaaaataaatattacgtacacatctccatcacctaggaggacgtacataaatacatataaatattaattaggagcaataagaaataaattaacgacgctctccttcccaccgggcctagccccagctgggctgtgcctcggtctctatgcgcctcggtctctgtgcgcctcggtcccgcctcaagcaccgggtggcgtctccgctgtagtgttctgagttcaagttgcctcggaagtcccagttggggatacgctctcgcgcaccaggtacgcctggtgtttctttgtggtttttcggattctttttggggagtgcggggagtcacagttagaaggcggccgggtgttgctggaggaaagtgctgaggtccagagcgtagtccgagggctccgaagtcagattaaagggctcgaggacgggggacacaggggtgggcgccagggatgcggcgttaggggcgtcctctggaggcaggggcgccggcacaccctcttcagccatcaggatctggcagaagacgatggtgagcagcagaaagagaagccttttggctgggttcggttcctcgactggcagctggcgccggaccactcgagggtagagaaccctgcggctgcgctttcggtgcccgcgagaggcgctggggcgcccggcaggggccgctgcgggctccgggagagggtcgaaggtgaagatctcaggaccggagccccgccggggtcccgggatggtggagggggccggggtcggggcctgcaggatggtcatggtcgggtggcagctgcgagagtgacacatggtgagccgagcggag

SEQ ID NO: 439302 - DNA, 1837 bp, Homo Sapiens
  misc_feature (4)..(4): n is a, c, g, or t
  misc_feature (14)..(15): n is a, c, g, or t
  misc_feature (124)..(124): n is a, c, g, or t
  misc_feature (141)..(141): n is a, c, g, or t
  misc_feature (146)..(146): n is a, c, g, or t
  misc_feature (154)..(154): n is a, c, g, or t
  misc_feature (156)..(156): n is a, c, g, or t
  misc_feature (163)..(163): n is a, c, g, or t
  misc_feature (173)..(173): n is a, c, g, or t
  misc_feature (199)..(199): n is a, c, g, or t
  misc_feature (202)..(202): n is a, c, g, or t
  misc_feature (210)..(210): n is a, c, g, or t
  misc_feature (217)..(217): n is a, c, g, or t
  misc_feature (234)..(235): n is a, c, g, or t
  misc_feature (237)..(237): n is a, c, g, or t
  misc_feature (241)..(242): n is a, c, g, or t
  misc_feature (246)..(246): n is a, c, g, or t
  misc_feature (249)..(249): n is a, c, g, or t
  misc_feature (293)..(293): n is a, c, g, or t
  misc_feature (325)..(325): n is a, c, g, or t
  misc_feature (340)..(340): n is a, c, g, or t
  misc_feature (360)..(361): n is a, c, g, or t
  misc_feature (380)..(380): n is a, c, g, or t
  misc_feature (439)..(439): n is a, c, g, or t
  misc_feature (445)..(445): n is a, c, g, or t
  misc_feature (486)..(486): n is a, c, g, or t
  misc_feature (509)..(509): n is a, c, g, or t
  misc_feature (619)..(619): n is a, c, g, or t
  misc_feature (1655)..(1706): n is a, c, g, or t
  misc_feature (1815)..(1815): n is a, c, g, or t
  misc_feature (1822)..(1822): n is a, c, g, or t
tggntatagcgganntcccttcttcagttaagttgccactaaagaagggtcagggagacaacttcagaatttgggctgtgagaggagtaaaatggagaggctagaaggaggaatggagttcaanccctcaagagtaaatanatggncctcccangnggatgangaagacaganatgtcatccccggaacccagcttgtngtnggggagangccagcnacggtctcggggggtanncngggnncccnggnccagagcttgggccagagctgtatacctgctgtggtcattaggntcataggccgacagcaccctgtccacagtggnagctacctcacagtnagtagtgacatcccacaggnnatctgttcccaggactagnacatcatctgggcagtgctcatattgtgtcaggtcatacactcgtaccttagggaagcnggaganaaagggcttgatgggcagggtggaactgcagaccttaaggntgtggtctcccaagcgtcgggtnaccccaatggtggccatcacccgagcctttttgccctccccacagaccagaggaaacctgagatcctccagctcgatctttttgtaggcccagccggtcatgttctggtnccggtacaacatcctctgcctcagctccttgggcagaactctgcgggggaactcaaggtgggtgaattcactgcctagcagctctggttttcaggaagccaagcagctgaagacgctggcgctcagtctccggggtaaactcccgggacattggaatgatttcaccattccggacaatgatggccctgctatcgcctgcattggccacgtacaccttgcctagcaggtagatcacaaccagtgcacagcagccccccctccacttggtggccacgccgctcccgggccatctgctcatccatgagctggaaggcattctcaatggcccccactaccaggctctcgtggctcacttccttctgtgaagaccagcaggactgagggccaagcaagtgagagggatcggaggaatctggggtccccggagtggttgggaggcagaggggtggtggcgaagggtcctgaagtatctctaccaggtcctttagctgctctcggatatggcgatgcaggagccgtgaggccatttcagcagctccgccccctgcatgcccatcaaataggccccagtagtagaagcagagtccctggcctcggctaggctccctaggtactcctgtaacactcctccgaccttccacatacaccacttcacagcaagcctggtcctcattgtgccgactcttgccagcattgatgacctcggcgtagcctgtgctccagggcaggcggcggcccgtgtccggggggctttgcacagcccggcccgcgtggtcatcggcgcgtcgcagccccccggggctcagctgcagaaaggtcggtctggagaagctcgctcgagcctcaacagccttcgcgggcgtcgcgctcccgctcccagccttcgcgggagggctcctgggcgcttctggagcggcggcgggcggcgccgaggcggcgttgggcaggtccggggatttggggcgcggaggcggagcgcccccggagctcaccaggtgcgccacggccgagcgcacccggtttagcatgctgcctnnnnnnnnnnnnnnnnnnnnnnnnnnnnnnnnnnnnnnnnnnnnnnnnnnnntggctccgcgtggcggtgctcgcgccagccggcccttccctgctacctggctcccggccagactgggcgggtcccgggcgaaacttgccttgctctggccaccatccantactcgnggcgtacagcctgca

SEQ ID NO: 439303 - DNA, 1167 bp, Homo Sapiens
  misc_feature (64)..(64): n is a, c, g, or t
  misc_feature (66)..(66): n is a, c, g, or t
  misc_feature (119)..(119): n is a, c, g, or t
  misc_feature (144)..(144): n is a, c, g, or t
  misc_feature (151)..(151): n is a, c, g, or t
  misc_feature (153)..(153): n is a, c, g, or t
  misc_feature (163)..(163): n is a, c, g, or t
  misc_feature (255)..(255): n is a, c, g, or t
  misc_feature (260)..(260): n is a, c, g, or t
  misc_feature (310)..(310): n is a, c, g, or t
ccgatctcgtacatcacaggagcatacagtgatcatcttggtatgttttttcagaaatttgctncnccaaatccacgctaggactctggttccgcggcggcctcttctgcctcctcctntgtctgagcgcataagcatttcttntactatntntttggcggantttttgggatactgagaaataggcccaacattgttcaggaaccagaaatcaggtgctgcccagggaagccccagatgatgggtgtggatgancctgnccacatgcaaaggctctggctattaggtgccttcgcctcctcttcattcntcagctcatacactctccgcgtatacatcttctcatcatgcgagataatgagcaaaatgcctcatcgcgctttctgtagcgtccttgaattagcatgcactaagactgttgtgtaggtgccggaggcttagagactggttctcctcgctgaaactgctttatttgcttggcatattttgatctcagattgttaagtatatcatgccaggcgattgatcttcctcttctgctgggatttaattactgtgctttcttcatctctcttcttcagccacctgcaagttgtactctaatttctcttggtttagctgataaattgctttcctctgctgaagctgctgctcaagaatctgcacatcctgctccagcttgatcttgatcatgttgtattcttcgcaatcccagatcctctgcctgttcagctgcttctcatagtcctctactttcttcatgcggttgttaagatactccagctctttggcattatgagcctgaagggcttgctcccatttcttcttattactggccagtagctcttggcgttccacctcaaatgctttctacgaccaagaaggaaaaacactcttgcatctgttttgattgggcaggtcccaccagtgtcaaagaactttcaggtaactataagtgccatatcaccaaccacatagaaaaagtcaaatccaaattcagacctgccaagtttcataagaccaaatggctatggaaggagctgcatggaaattagcattatgaagacgatactccaaatgcggagaggagatgtgccaacagtcccgtggcttagtcaatatcagaggcagggaactggaggaaggccatcccgggaattccggacc

SEQ ID NO: 439304 - DNA, 1544 bp, Homo Sapiens
  misc_feature (1469)..(1469): n is a, c, g, or t
ttttttaatttaaatatatatatttatacggtactttacaaatccctgttgccatatgttctttccattccttaccaaaaatatacagcctcaaagatgttggttgaattgccaaggtcacatagaaaacaagaggtagagacccaggactgttgctctcactgcaacatagttacttctgttagctctgagagttcagtttagatactctttggctaaagaagtcaccatagtgataaatactaataaaagaacatattttataattaaactacaaccaggactttaacctataaattactgctgcctgcaaagaattacaagattaaatttccattgtatatatctctcttttaggtctatatttaaaccttaggatcatttaccctttttgtttgtgaccaccttcaaggcaagaactatatttgagttttgtccctcagaggactgtgaaaggctgcagccttgaaacttttccttgtccttcaaaatttcggtttgaagaggataatgaagtcaagtgactggattctctactccttccttgcttgctttcctccagtatctaggaaactagcactggccccgaggcaccttggtttaagtaaagcaccccatacgggaaaaactgagacctaaaggaccacttcaacctggtgaaacaagcgccaagcaaaaagaggtcagactctggaggacaaccaaatttggccagacaagcttaactgaaatggaaataatgttcagagggcattaaaaaaccctgggggttaaaatctataggtgaaaattataaggatacaaagggaaagggattgcctagtgaaagcagatcgcaaagttaggaataggaatagcctatgcgtgagtttgaaggaattactatctcacaagataccatgccttcgcctttagaaagcgttttcacattctggtacttgagcttctcaaccccatttttcagatgaacaaatggaggctccgggcggagttttgaccagtcatgatcacaagtaataaagcgcggaactaggaacaagttcaggcttccccaaattgttctcagcagtttcccgccgaggacatttaggtagcaaacgggaaggggactggtgaggcttccttagcagcaagagttggcccgacccccaggcggagccagcgggagaatgtggggctcgaactgggcggacattgcagccacgcgggggtgaaaaacccgatttgtaaattcgcaccagctgccgcctgcgttaggccttaaagcgttgttagcgagggtggtgggcggtgcaggtggtcctgttcgtccctctcattggtgccggggataacggacaggtatccgcagccagtcccaaccggagcaaagggagcttcacgacagctacacgctacctggtcctgagcgcgcggagcttgagcgcggcggcggcttcttggggggtggctaagcgtgcgtgtgacgnccgcgcacgctctcgtcccccgtcccgctccttaagtaagagctgggggcagacccttgcctccaacagggacga

SEQ ID NO: 439305 - DNA, 1101 bp, Homo Sapiens
aatatataatattcaactttatttcaaatataccaattttaaaatttatcaatatacccattacgattctttctgagtgacataccacacaaattcaatacggattctctaaagaatcctcttaggctacttcactcaaagtctctgcagctgcctgcactgtgaaggctgcaacataaatctgtctcttcacttctccccaggccttggaagggtccactttgctttcaatatcaaacagagcatcataaattcctgggaatgactcccctgcatacttgttgtggctgcttggagcatagatgacatgcctataaaaaggcctgtctggtaaccctaatggatcaataaatgctctttccagaaacatgagttgatcattcatcattcttaatactattgggttgcttttgtcaaagtcctggagtctctcactgaacttggaagcaatttctgtaaaattctttactgcagaaaaaagtgaatcaaatgatacactgtatgtcttcatttcctgtggatgtttcatagaaatactgtagattttgtcagcatactttcttaaaactacagcataatctcgacaatcaaaagggagcactatggaattggctagctcaaacaccatccctcctcgaacctgggccacagtgaggtgatatttaaacattggatcataaaacttttccaccaactcatatgtttcatagacactgtgatacagtggatagccgctgaatttgtttgtttcccaatttttagtataccgtgctctgcctgaagcaattccaagtcgttggaagaacacctcaaaatcatttccagatcccaatttgcttatcctgggcatgccactgaactctggggaaggactttttttagtccaactttcataaagagatttgccttcaaagccttcatcagggcttttcagctcttttgttaggttgtgtaccaagctgtacatcagcggtgtacaatcaactctcagagtgtagtttccttctatagatgagtcagcattaatataagccacgccacgctcttgaaggagtcttgaattctcctctgcccactcagtagaaccaagaagaccaaatt

SEQ ID NO: 439306 - DNA, 1970 bp, Homo Sapiens
  misc_feature (20)..(20): n is a, c, g, or t
  misc_feature (1468)..(1518): n is a, c, g, or t
attattaattatttactgtntatttacccctaaacaacagcataactcaaataataatgacacacacgtcccgcccatatacacaataccactagcctatctgtcaggctatctggcctttgcttggttcctgatggagctgtctggagacagctccctctgtaaaaatcccgacttaaacacaggggacagaagaaaggggggacctaggtcagatcataaactgacaggctcccagcgtccttagggagtgctaatgtggaaactttgagaacgtgctggacacatctgggcagagggcagaaggcactgtttgtttttatgtggttgatggataaattccatatggggatataagacctgtatatcacccattttaggccaggcatgtggaagcacagtggggttagctactgggtttcattaaccaaaccatgcggcatggtttgggagccatgggaatcgggagcccagagtaggaacctgggtgatgggggaggtccccagagaaaagtttcccttgcattcactgcaagttagatacaacgtgaaatgttaagtccccttttatgtgttttgccactatagaatgtgcaacattttcatcaagatagaaaaggtaaagaaagcaaaactagtattttggcctaacacaaccaagcatgatttgccaattgcgctatcctgtggagaaatctaccactacactatccagggaatctgtggtcagtcctcacccccgcaccctctaacattttacttgcactaaatctgagttcagctaaagtaatgtatcctggaatcagagaagccctagggttggggacaaaacaaggatgggccagtactggcatctcaggtacaggtgacttcctggctgtcctggggaagctcgttgttgaaactgctctctccaaatgttgagtaaggagggacctggggagcttcgatgatcagcagaccctctggggaaagtgaggcaaatactgtcacaggatccacctctgcaggaagctggattttctttgtgaagttcttagaaacaatgccaccttcttgctgtttctcttcatgtttgccagacacctccacgtatccatctttggtcttcaccatcaactcctctggcttgaagctgtgcacattcacacacactttccagggctccccagggaaggttggggggctcctgccctcggcaggcaccccaaacctggcggtggcagtggggccccggggcaccatgcccgaccttagggtgcctggccaggcggaggagagacgaggcagagcccagtcgggccaagaggctgtcaagtcgtctgggaaggggtccatgccaaagccatcatccagcaggcgagaggagaggggagagtcccggaaggggtctcggcgcaggcggcttgggtagtggcaggagaagggcatctgaccgtcagccatggtggctgctcagctcagagannnnnnnnnnnnnnnnnnnnnnnnnnnnnnnnnnnnnnnnnnnnnnnnnnngcggtgtggctgggctagcttattcttcagcttccgaaaatgctgcttttctgcagggagaagcagaaccaaccactgccagggacggttgtgtcccctcgactggggtcccagcccccaaaggtaacccccggggcagatccagcagaatcccagagggtccccgtccgcactgcctcacgacagaccggcaagccaccgtcctcccaggcttcccaggctgcccaggctggcagccagaaccgctgaggtctagagcggagccaggagcttaataaacccagggcacgcgcgcctagaaacttcttctggctccttctgggctgcaagccttctatttatttgctgctggaggctggaggcgggttttgcaagcgtctcctgtcacaggaatattcggaggtgatgaaccagccccggagaatccgcggagggaacagctgggctgtggc

SEQ ID NO: 439307 - DNA, 957 bp, Homo Sapiens
  misc_feature (667)..(731): n is a, c, g, or t
gttgggcaaaacagatggccagtactgcatctcagtacggggactcctgggctggtccgtgggaaagctccgttgttgaaaccgcttctctccaaattgtgagtaaggagggacctggggacttccgaatgattcagcagaccctctgcggaaagtgagccaaaatactgtcacaggatccacctccagcaggaagcctggatttttcttttgtgaagttcttagaaacatgcccaccttcttgctggtttctcttcatgtttgccagacacctccacgtatcgcatctttggtctttcaccatctactcctctggcttgaagcctgtgcacagttcgcacacactttccaggtctccccagggaaggttggggcggcttcctgccctcggcaggcaccccagaccgtggcggtggcagtgggccccggggcaccatgcccgaccttagggtgcctggccaggcggagggagagacgaggcagagcccagtcgggccaagaggctgtcaagtcgtctgggaagggggtccatggccaaagccatcatccagcaggcgagaggtagaggggagagtcccggaagggggtctcggcgcaggcaggcttgggtagtgtcaggagaaggggcatctgaccgtcagccatggtggctgctcagctcagagannnnnnnnnnnnnnnnnnnnnnnnnnnnnnnnnnnnnnnnnnnnnnnnnnnnnnnnnnnnnnnnnctagcttattcttcagcttccgaaaatgctgcttttctgcagggagaagcagaaccaaccactgccagggacggttgtgtcccctcgactggggtcccagcccccaaaggtaacccccggggcagatccagcagaatcccagagggtccccgtccgcactgcctcacgacagaccggcaagccaccgtcctcccaggcttcccaggctgcccaggctggcagccag

SEQ ID NO: 439308 - DNA, 1012 bp, Homo Sapiens
  misc_feature (379)..(443): n is a, c, g, or t
tcctgtgacaggagacgcttgcaaaacccgcctccagcctccagcagcaaataaatagaaggcttgcagcccagaaggagccagaagaagtttctaggcgcgcgtgccctgggtttattaagctcctggctccgctctagacctcagcggttctggctgccagcctgggcagcttgggaagcctgggaggacggtggcttgccggtctgtcgtgaggcagtgcggacggggaccctctgggattctgctggatctgccccgggggttacctttgggggctgggaccccagtcgaggggacacaaccgtccctggcagtggttggttctgcttctccctgcagaaaagcagcattttcggaagctgaagaataagctagnnnnnnnnnnnnnnnnnnnnnnnnnnnnnnnnnnnnnnnnnnnnnnnnnnnnnnnnnnnnnnnnntctctgagctgagcagccaccatggctgacggtcagatgcccttctcctgccactacccaagccgcctgcgccgagaccccttccgggactctcccctctcctctcgcctgctggatgatggctttggcatggaccccttcccagatgacttgacagcctcttggcccgactgggctctgcctcgtctctcctccgcctggccaggcaccctaaggtcgggcatggtgccccggggccccactgccaccgccaggttaggggtgcctgccgagggcaggagcgccccagccttccctggggagccctggaaagtgtgtgtgaatgtgcacaggcttcaaagccagaggagtcgatggtgaagaccaaagatggatacgtggcaggtgtctggcaaacatgacgcagaaacaggcaaggacggtggcaatgtcgctaaaggaacttcgcaaagaaaattcagcttgctgcagaggtggatctgtgaccagcatttggctccacttccccagagggtctgctgatcatcgaaagctccccaggtcctccttatccccatttggagagagca

SEQ ID NO: 439309 - DNA, 1790 bp, Homo Sapiens
ccccagtaggatccagtctgtggggcaagccaggcatttgagggagaatgagcacggggcttttggaggctgcagcctagggccaagggatggaggctcacctgagtgcaggttaggcaggtgaagtgtctccccggaaaccaagctagagtgccccacctgctcggccctgccttctcggatcggatccagcacatccaggcttctcctcctcccgaggaaccagtggtgacagctgaggccatgtgagtaggatcctgaatgaggctttatctctggctgttcgtcccatcgtccaccgtggcaccagctccctcagccagccgggatgggaccagcgactgagagagccagaggcagagaggtgagggtgaccatatcctggactgtgagaggaatgggactctgggcctgtagctgccaagcaggtggcaggtgctccaggctgtgatctgcaccctctgacccctgacattgacctcctaccctgacccctgcctgaccaagccatgtctgaacaggaggctcaagccccagggggccgggggctgcccccggacatgctggcagagcaggtggagctgtggtggtcccagcagccgcggcgctcggcgctctgcttcgtcgtggccgtgggcctcgtggcaggctgtggcgcgggcggcgtggcactgctgtcaaccaccagcagccgctcaggtgaatggcggctagcaacgggcactgtgctctgtttgctggctctgctggttctggtgaaacagctgatgagctcggctgtgcaggacatgaactgcatccgccaggcccaccatgtggccctgctgcgcagtggtggaggggccgacgccctcgtggtgctgctcagtggcctcgtgctgctggtcaccggcctgaccctggccgggctggccgccgcccctgcccctgctcggccgctggccgccatgctgtctgtgggcattgctctggctgccttgggctcgcttttgctgctgggcctgctgctgtatcaagtgggtgtgagcggacactgcccctccatctgtatggccactccctccacccacagtggccatggcggccattggcagcatcttcagcatctcaggacagttgtctgctggccggcgtcacgagaccacatccagcattgccagcctcatctgacggagccagagccgtccttcttctcacagcggcctcagcgtccccagagccgagccagggtgtgagtgcatgtgaacgttgagtacacatgagtgcgtgtatgcccccaggctgggtcagctcttctgtggattgcatggcgtgtgattaaaagcccatgtgttcccacacatccacatcatgggaaggttaatgtgtgcctccttggaactgggtgttggtgtccatggaacttcctctctgtatctcaggtcagtaggcgcagaaacgcctcatgatgaagattcttgagccccatttccaagacccctcacatccaatcctgtcctgtaacatccatcaaggatttccataggggtgactggtgcccacccaagactgcaccagtgcctgctcattgaggagagtaactgctggccaggcagaaagaatatgggctctgcaatgagacagacctggaggggactctctccgttgagcactagcagctggaggagttgggagttcatggctatcatggttgtggtaatcgattgtggggatgaaatgtcattgtgtatggaaggcggggctcatggctgattggcaataaaatggcggctgccgttgtcattgtctcc

SEQ ID NO: 439310 - DNA, 1762 bp, Homo Sapiens
aatgttccagtaagtagtatttatagaaaagatgaatattattaatcataaacagtgaaacatactttgcgtttacacttagcctattggtgtggctataaatcttatttattttagttgtgctctatttcttattgatctttacaatgtgttctctaaagtaataaagtgaatgcaaatatacgtggtcacaggtttattctgagttttaatttattatacaaaagtaaaggttttaatttaatattaatagtagaaaaacactttcttacgtgtgccatatggaaagataaaggatctattctaaaattagctgtgttggttgataagctggtgtggattctgccacatccagcaaagaagataccattaaattacacagtttagctctctctatctatgcattaggaatttgacttccatttgatgttaaagcatatacttggctttaaggacacactaaaactattcaaagtttaattacattcagacaaagatcatctaaccactgttgctacatagggaatatttatttaattatcccttgctatctctattaatcagtttcctcaatttatccttaaaattttcctcaaatgcttagttattttattatttgctttttaaaatattcagtgtcaaaacaaaagtacacagtttaaataattaagcaggcatacttctccctgtctcacctgcttgattctaaattgcaaggtctaccatgtcaaattttagataatcagaacaacactttgggattaaataccaactgacttcatttttactccataagccttctcattgctactttgcatttttcttcactaacctatctgtttgttagtaagtttttcagttccttcttcatcttttctttcccttgtagctgtgagcactccagtagattgcatcactaggttgggtcctgtgagctgttttgttcttttccaagtgtctgattcagcgggccatagaccgcttgccagaaaatcgccattgcttctaggctgacgcttgcctacttgttttgatcgtctgagagaagagactttgtttgccaaaaccacagttgatagaaatagaaaggtacagataagaaaaagcactgcaattataattaagcaaattagcatagccatgttgttgttgttttccgcacagacatcctttttgaaaatttcaccatgacttttgcttgtgttttcaatgctctgtactgttgaaggactgttgctgacgacagaaggtatataaagctcctgttcagatttagaagttaaagctacgatgtgagatgtttcaggcatgtttgtagaattacctttataatctacttcaggagttatagggtttgtgttaatgttttcattttggtttctgcctgtcttgttttgaataactgaatcccaggaagaagtactgttagcccacagacgggtatagtttgcttttgttccaggagacaaagaaaaaactgttgtcatcagaaaggcaagatgtaggtaatgtcctgtgtgttccatgtccgtgggcatacttggcaatcttacaaaatgcttggtcaaaatctgattataacgtgattttgataaaccacttcttttcttgtcttctttttaaagcagaatagacttggagaatatgagccttaaagtaaatctgcagtaaaaaaggatatgtgcagctagttttccacttttaaaaccaaaccacagatgacacatttcctttccactgcaactaaagcacacgccccgct

SEQ ID NO: 439311 - DNA, 2327 bp, Homo Sapiens
  misc_feature (2042)..(2042): n is a, c, g, or t
  misc_feature (2110)..(2110): n is a, c, g, or t
  misc_feature (2165)..(2165): n is a, c, g, or t
  misc_feature (2207)..(2207): n is a, c, g, or t
  misc_feature (2253)..(2253): n is a, c, g, or t
ttaatatatatattttatatttatttagaagctttgaaatagtacagtaaacactttgcaacacggtgtataaactacagaatgtctttgatattttgtgggtcttcagaatacaacattttttataacccacaggtgaaaagaacataatcacaatttctcttgtaaagttggaatagcttgcggaacacttgatcacacaaaaataatataaaacagtcaagtttaaaacagtgatattgcatttataatgcacaaatttcctttatctttatgactggcttctcgtggtgaatataaacatctaaagggctcagtgacatttggagagagaaagatagatagtgctgtaaacaggcacacactgatcggggaggcaaaatctgttgcctctaaagtttctacagttctgcacatttcaactcatttctcaggcctgctgagagcaattaggtcctataattggccatgatgactccatccgaaatctaatactcagttacacatgactaactggatggccaagataatgaagttgaaaagttgatgcttttgttggtcgactttgtgcaaatcatgctgcttcaggtaagtcctgtagaattgactagcatatccttttccgtgtcaaatatggtggtttgtaaggcgctcgcgtattagtcagcagtccatccagctccttcctctccagagtgctgtgaagggccttctctttgccaaaggtggaaaaggaccgctctgccccaggctgggcttctggagtttcaaacacctcagtgtctggaacagagtccatgccaggaacatgcagattgctgcgataatcagcagcctggcgtccatcagaagggacaaaagaaggcatccagcaccgatctgagtggcccagagctttacattcctcagtgcaattggagaagagatccataccagctgactgggcacggttggtggcatcatgatcactatctccctgttcactgtctccatgaccactgtccttagagcttactatgtcggcttcctggaatgcagaactgttaactcggcgaggtctgtcaactagatagctgagctctgctcgctggtgtttagtctcgttggacaaaatgcttccgttggagatgatatcaggctgctggtcggtgtaaccggtgacgatggccccgcaggggttgtgctcagtgtccgtactccgcgaagggctgcagggcttaagaaacatcaggtcggtcttggcggactcaggggtcaggcatacctgatagcagtaattctggttgtggtggtgggagccaaagcccccggactcctctatcggcacctgggccgggttactgggtacattggagctctgcaccagcatgatgtctgacttgctgagtttcttcttgcgcgcccgggcttggcggccacagcaggtcgaacctccgccaccgcagcagcagcagcagaggcagcaatcgctggccagacaagtatagatgttgagcttcttctctttttggcaacgcacggccagcacgatcatggccagcaggaagatgaaggacaccgagcccaacgcgatgatgaggatgagggtgaggtctagcgaggtttccccgccgccagagcgactggggcgctggtgctctcctgaccctccgcctccgctcccgcccccgccctggggctccacggcgccatccaccagctgaaccaccagggtggcggtggaggaaaggggcggctgcccatggtcgcgcacctcgatcaccagctcataaggccgctgggggtcgcgcttggccgggactcggcgtgctgttcgcagctccccggtgcgccagtccatgcgaaagaggttcatttcgttgccacgcacgatgctgtaagtgatccgggcgttctcgccgtcgtccgcgtccacggcggccacgcgggtgatcaggtaacccggctccgccgagcggggcagcacctcacgcgctggagtcccgttgcgccctggtagaggcgccacgatggcaggggcgttgtcattttgatccactatngaggatgttgacagtggcgttaccagccagcgcctgggggcttgccagcgtcccgggctttcacctgnaaaactgaagtccttcagctgctcatagtcgaaggagcgcagggcgtacaagtanccgttctcagagttgatagaaacgtaggtgaagacgctcatnccctggatctggcactcgaggatagagtaggcaagctgggcgatgncgccctcatcccggtcggtggcgctcaccgcgtagatgtaggcgccaggcacttgttttcagtcacatacacgt

SEQ ID NO: 439312 - DNA, 1708 bp, Homo Sapiens
  misc_feature (70)..(70): n is a, c, g, or t
  misc_feature (183)..(183): n is a, c, g, or t
  misc_feature (194)..(196): n is a, c, g, or t
  misc_feature (200)..(200): n is a, c, g, or t
  misc_feature (204)..(205): n is a, c, g, or t
  misc_feature (208)..(208): n is a, c, g, or t
  misc_feature (215)..(215): n is a, c, g, or t
  misc_feature (219)..(219): n is a, c, g, or t
  misc_feature (223)..(223): n is a, c, g, or t
  misc_feature (299)..(362): n is a, c, g, or t
  misc_feature (365)..(365): n is a, c, g, or t
  misc_feature (372)..(372): n is a, c, g, or t
  misc_feature (431)..(431): n is a, c, g, or t
  misc_feature (434)..(434): n is a, c, g, or t
  misc_feature (438)..(438): n is a, c, g, or t
  misc_feature (442)..(442): n is a, c, g, or t
  misc_feature (447)..(447): n is a, c, g, or t
  misc_feature (451)..(451): n is a, c, g, or t
  misc_feature (457)..(458): n is a, c, g, or t
  misc_feature (467)..(467): n is a, c, g, or t
  misc_feature (471)..(471): n is a, c, g, or t
  misc_feature (473)..(473): n is a, c, g, or t
  misc_feature (475)..(475): n is a, c, g, or t
  misc_feature (482)..(482): n is a, c, g, or t
  misc_feature (488)..(488): n is a, c, g, or t
  misc_feature (496)..(496): n is a, c, g, or t
  misc_feature (507)..(507): n is a, c, g, or t
  misc_feature (511)..(511): n is a, c, g, or t
  misc_feature (525)..(525): n is a, c, g, or t
  misc_feature (535)..(536): n is a, c, g, or t
  misc_feature (541)..(541): n is a, c, g, or t
  misc_feature (1705)..(1705): n is a, c, g, or t
taagcagatacattcctattctaaattccttgattcacttaaaatgcatctactgcagtcctaatctatncataactcttcattaggtgctacttatggcaagacctaagtgtgaccactctcaaattttagtgagtttctaataaattctgttctgaaggcacatgtctctgtcttaaatanactctactctnnnaatnaatnntanaaccaantaanaatncccagagggacagtgttcccagagaaaagaattaaaaccatgtgagagtttccagaggaataatgtatttccctgnnnnnnnnnnnnnnnnnnnnnnnnnnnnnnnnnnnnnnnnnnnnnnnnnnnnnnnnnnnnnnnnctnttatgancagataaattactaatgatatcattttaattcattttgttttaaaatgctgtctccccnccnacanaccncctcncgcncccctnncacttcacngcancngngaaagcntgcccnggtttaangaagaggcaangggnccccaaagaaaagngaggaggaanncaagngaatcttctccatcaactaaggattttcacaggtagtaaagatctatacttcgtagtggtcaggtaagcctaatgcaattttgaatttggtaagaaaagaaattaaatcccagaatttattgcaacaatccacaacctcgaattgtttctattttcttattcccaggagctcttctttagaattaacctgtcagaaagcaggaagggaataaccctgatttattactaagagcaaagtgagacttaagcttgaggaatattatgggaagggtcccaaaatgaaagaacacattgtgtttatgctgacaaaaccagatcagtaagtcattaactaaaaatctaggttgacgggcacttaatttgaccttctagccaactagtctccaaagattataaaatcttactatacccttcatataagctgatcatttaaatgatacatgggaattaacctgcttgttgactccaaataggagacgtcagagagcccaagagtgtctgaaggaatcaaagtttttacaaatgatttcattaaagagaaaggccaggatcaaagtctcagtagcaaattgctgcaatccaccaatattaatgggtccctcttcagtggcatataaattgcatccacctacacaaagatcagaggttggacataccattccacaagtcagaccaagtgggttgtcagaaaatatcatcttagcagctccataatagttcttgtttgcaatacttgtgatgaatgatttaatatcaagattagttggacagctcttctgacacggggcatctgcacatttcaggcatctcattgcttctcggagagctcctcgctcaccaagagtcgtgtgcttgatgtcatcaaaattattctccagcttctcacaattaaagcagttcttatcaggatttcttttccaatgtttcttgtctaatttcttggccgaagtggaacacagagttgcatgagtttgtgttcgaggatttaaagccaggatactctcgatgtccgccgagtccttactgagcacaggggccatggcagtgcctacagtctcgagtctgccagtgacaaaccctccttgcgtcctcaagctccagccagagagccaagtgacagcagccggagcgcgagtcgaaaacaggcagactagggccggcggngcg

SEQ ID NO: 439313 - DNA, 1135 bp, Homo Sapiens
  misc_feature (72)..(72): n is a, c, g, or t
  misc_feature (327)..(340): n is a, c, g, or t
  misc_feature (679)..(687): n is a, c, g, or t
  misc_feature (945)..(954): n is a, c, g, or t
aaaatagtttattagtttaacgaaaaggtaaacagatgatggagatgcagaaagagaagcatgcgagcagcnaaaagcattacccggctgtgcaccgaggaaacaagatttaagagatttaagagtggcattaaataaatgaagctaagttttagctacttggaatttcgcattgtcttgtaaaaaaggtaaatgatatatatgattttacattgcagtatataaatctagactctacatatacagtataaatacacaggatgaacacgggcacaacatatatgtcttggtggtcacgccctcaaccaggccaatggttttatttannnnnnnnnnnnnnaccttcgcaccaagaatatcaggctgaggctacatatacttcaacctgcatgagggctgccaccctggccatctctcctacaagcacagaagcacaaatcgaacagggattgaaaacagaagaaagtgctttttgactagttgaaacccagtcagtctttacaatgtgtagtccaatctcctggaaagaccaaaggaaattggaggacttcctggcccgttcttcggtccattgccgcaaatctctaaactttccctggtgcttcttgtggaattcacatggctatttatgcaacgcaaatcccacacaacttttaggagctgtattatgggattaggnnnnnnnnntagctccatgttacaatctgcacttcatattccgggtttgttctctaaatttttggaataaaaactggtattttgagaatcatttcttaaaaaggacaacattctgaaagtgcttcttacacatgtcaatattccacatatggcttttagttcaaaccccagcacagctcagacttggaaggaagagtgtgatggtgttatgagagacaaaagtgtcacttaacaatgatactgtgatagcaagcacgggaacctggnnnnnnnnnngttattgattccatctggaagaatgtacctcttagacaaatgattcagataatctatacagccccatctctttccccacgactaggcacagtaatgctataaaagtaagtaaaataggatgctgttatcagcagggaacatcttctgaggggctattaacgggacaatcactgttcagaaa

SEQ ID NO: 439314 - DNA, 1672 bp, Homo Sapiens
  misc_feature (566)..(566): n is a, c, g, or t
  misc_feature (760)..(760): n is a, c, g, or t
  misc_feature (1420)..(1480): n is a, c, g, or t
ggtaaatataacaatattttattgacatatcctgaattctgtataaatataaagtgctaagtttccaacccctgcccacagggctaggaggaagcgggggagggagtgttaaatgtcagctgagcacaaataattttccagcgccagcacaggtgtgaaaggctcacagacagacacacgcaacatgacacacccatcacttcccaagtccccagcttccccaggaacacagggcttgggctccaggccctgggcagacgaacccacagacagggctcctggttgtcacagcttgttccttggagctctcaggctgccaagggcttcaacatggtggtggaccagggagagtccacggtatagcgtctagctgatttctgccagaggatggggagggaaagagcagacacaccctcggttcccgaccccgaatgagggccagcctcagtcccccagcagaagagcaccaggtcggaaagaccagcatgccggcattcctagagcccccatgtgggggctctctgcaacactctgaaggaggtagcagccctgccagagggtgaggnggactgtgctggcccagagggggagcccaccagtccacagtcagctcctgccagcacagtggggcaggcaggcagaggggcaccacctcagtgacacagcacctgggtctcaaactgcagcagctgccccatgaaactgaagttggagggagatgaccccccggcgctgcttaacgaagtcaaaggcctcgtcncagccgcacacggcgactctgcatgaggtatgccagacagatggtggcagagcgcgagatacccgcctggcagtgcaccagcacccggcctccgctgttcttcacccagtcaatgaagcctatggcctcctggaaccaggcactgatctccaccatctggttgtcctccacagggatactcttgtagcggaaaaggccctcaaagtggttggggcagctggcggacacgttgaggacggctgtgatgccacaggcctgcagcccctgcaggtctgacgagtgactgcagctgcccaggaacaggtagggcaagatctccacagggccaccctggtcgtagacaggagccctggagtcggagcggctggttttgtcccctgttggcggcagcgcaggggcgggggcctcagagcacagatcgggacagcagccctggaagccgtcgaagcctcctcgcaggaagtacacggcagtgggccccgcgcgggtctcgtgcagcagcgcggccagcagcacatgagccgggctgtcgggccggggtccgccaccgaggcactgccctcgtccagcaccacggcccgcgccagctccccgcggaccaggcgcgtcacgcagcgcgcggtcgggcagcaggcaggcgagaacggcggcaggagggcnnnnnnnnnnnnnnnnnnnnnnnnnnnnnnnnnnnnnnnnnnnnnnnnnnnnnnnnnnnnnccggcagaaggccaggaaggggcggcagtccagcagcagcgtgcgttccgcctcccgcggatcccgcagcagcgtgcccagcgccgcgcactccagtcgcgcgccgcctccagccccatggccaccggtgcctcttcctcttcctttcggtctttcccgcgtcccgggctctcgtggcggtggcgcatcccg

SEQ ID NO: 439315 - DNA, 906 bp, Homo Sapiens
  misc_feature (114)..(114): n is a, c, g, or t
ctgatatattctaaaggggatataacgaaatccattttcttctgcaggatattccatgagtttccgattgatggcccaaaactggtcaaatctgtcattttgccatcccatccnagagttgcttgtgatcttttttctgcatttcattgattacttgacttttatgttttaaagcatcagcttctttcatacatgacataaaatgagcttcaattgcatccttagatggacagtgcagaaggtcttttttctggaaaactcttaaaatgtactgtgatgttccaaggaagagctgaacttgatgcacagaagatcaaatagcaaaccaattggataatgccatttcagtggtgtgccttcatattcaaaccatatctcactaatgtcttcttgtctcataaccttctgaaagtgctttttcactttgtcagttacctacgtcagataacttactcttggcaaaagcaaatagtatggttctgcttccctttcagttatctcatcctgatatagcgtgaaacaagttggaattcgtcccaaccacacatctcgaagcacatctttgtcatctgtcattcttccaggagttaaagcagtacatacaggctaaattcttatttcaacccaagccaaacctactccaagctatggctcctccttccggctccccgcactggtggggacgcccagattccgcgctccggtggggcggcggggcaagctgcccgcctgacacactgtcctgcggggacgcggtagcaggactccaggaagcccgcgcagccgcaaaaagcaccggcgcggaggtcggagctgaaccctgctgcacttccgccctctggtatccagcgaatacaaccggcaacgctgcggagccctggcagcgcaccacaagtccagtatccc

SEQ ID NO: 439316 - DNA, 1012 bp, Homo Sapiens
  misc_feature (3)..(3): n is a, c, g, or t
  misc_feature (11)..(11): n is a, c, g, or t
  misc_feature (13)..(13): n is a, c, g, or t
  misc_feature (16)..(16): n is a, c, g, or t
  misc_feature (32)..(32): n is a, c, g, or t
  misc_feature (38)..(39): n is a, c, g, or t
  misc_feature (41)..(41): n is a, c, g, or t
  misc_feature (43)..(43): n is a, c, g, or t
  misc_feature (49)..(49): n is a, c, g, or t
  misc_feature (53)..(53): n is a, c, g, or t
  misc_feature (55)..(55): n is a, c, g, or t
aantatccggngntanatgtcactcagccacncagggnntncnaacatngctnantccatgatcatcacttgattctttttttccccatcttcaggatcaatagcagaaaggacaaacttctttgaggagatctcctagtgtgtgccaactgtcccatctgcagcccacaggacgaaacagccttcctgaatgaaaggtctttcagtcgttgtctgatatattcctaaaggggatataacgaaatccattttcttctgcaggatattccatgagtttccgattgatggcccaaaactggtcaaatctgtcattttgcaatcccatccagagttgcttgtgatcttttttctgcatttcattgattacttgacttttatgttttaaagcatcagcttctttcatacatgacataaaatgagcttcaattgcatccttagatggacagtgcagaaggtctttttctggaaaactcttaaaatgtactgtgatgttccaaggaagagctgaacttgatgcaagaagatcaaatagcaaaccaattggataatgcatagtatggttctgcttccctttcagttatctcatcctgatatagcgtgaaacaagttggaattcgtccaaaccacacatctcgaagcacatctttgtcatctgtcattcttccaggagttaaagcagtacatacaggctaaattcttatttcaaccaaagccaaacctactccaagctatggctcctccttccggctccccgcactggtggggacgcccagattccgcgctccggtggggcggcggggcaagctgcccgcctgacacactgtcctgcggggacgcggtagcaggactccaggaagcccagcgcagccgcaaaaagcaccggcgcggaggtcggagctgaaccctgctgcacttccgccctctggtatccagcgaatacaaccggcaacgctgcggagcctggcagcgcaccacaagtccagtcaccctcggcgcccggagatgacgtcac

SEQ ID NO: 439317 - DNA, 1313 bp, Homo Sapiens
tttttttaaatgacaaatcatatttagaggctttatttaaaaatctctcactgttcattatcaaagttacaagattgcataccaatagacagactgtaaacataggaaattttcgttaaggaaagatgggtttactgtaattcaatcttttacaaaaaattacttgcaagttattgataacagaatttctcttttactttcttaattctcttgaaaattaaaccaatgtttccactttcatgagctaaagttcaaccatggtcaccttaggaaatacccctgtttatttgttaatcagaaatacaaatcgagtggcacatacttccattttcttcttaggccaaaggtttcagcttcattatattttacagaagaccttcagtggtccggtaagtctttcatgtcacagctgaggtttaatgatggcagtggaggaaagcagaggtgatgcaaagtaagaccagcccagttgccttatctgacatggaatctttttcctgtctggcttgcagcagcgaagtgtttctggtcaggttgcctccaccaaacctgattgaagcaaaagggtgacatgctctgataaatcccatttaaggatgattctgttcaggcaaatagttgatccttcaatctgttggctgtgggatgatactaatatgaagaaaattatccgggtagctcagatgttcactcagccactgcagaggtgtttccaacattggctcaattccatgaatcatcacttgattctttttttccccatcttcaggatcaatagcagaaggccaaacttctttgaggagatctcctagtgtgtgcaactgtccatctgcagccacaggacgaaacagcttctgaatgaaaggtctttcagtcgttgtctgatatattctaagggggatataacgaaatccattttcttctgcaggatattccatgagtttccgattgatggcccaaaactggtcaaatctgtcattttgcaatcccatccagagttgcttgtgatcttttttctgcatttcattgattacttgacttttatgttttaaagcatcagcttctttcatacatgacataaaatgagcttcaattgcatccttagatggacagtgcagaaggtctttttctggaaaactcttaaaatgtactgtgatgttccaaggaagagctgaacttgatgcaagaagatcaaatagcaaaccaattggataatgcatagtatggttctgcttccctttcagttatctcatcctgatatagcgtgaaacaagttggaattcgtccaaaccacacatctaaaagcacatctt

SEQ ID NO: 439318 - DNA, 801 bp, Homo Sapiens
agcggcttgttagtctctttaagagatactgagaacaaaatgcttttttgatatctttttgtgtttttgctttttaatgtctttaagtttttgaagggtcccagccaattatctttagaatgtcccacccaactttggatttgtctgtttcctcagaattagatttacctgaatttatcatgttaaacatttttcacagtgataccacatctgtgatgttgtgtaaattatgctaacaccgtatcaaaaggcacctaatgccaacataacagtttatgatatatacaatttgtaattggcagcaacaaagacttaattgcttgaatcattttttcctttttcaaatagacaacgactgaaagacctttcattcagaagctgtttcgtcctgtggctgcagatggacagttgcacacactaggagatctcctcaaagaagtttgtccttctgctattgatcctgaagatggggaaaaaaagaatcaagtgatgattcatggaattgagccaatgttggaaacacctctgcagtggctgagtgaacatctgagctacccggataattttcttcatattagtatcatcccacagccaacagattgaaggatcaactatttgcctgaacagaatcatccttaaatgggatttattcagagcatgtcacccttttgcttccaatcagggtttgcgggaaggaacacttgaccagaaacacttcgctgctgcaagccagaccggaacaagattccatgtcagataaggcaactgggctggcttaacttgcatcacctctgtttctcc

SEQ ID NO: 439319 - DNA, 1597 bp, Homo Sapiens
  misc_feature (59)..(72): n is a, c, g, or t
  misc_feature (74)..(105): n is a, c, g, or t
  misc_feature (330)..(330): n is a, c, g, or t
  misc_feature (1064)..(1064): n is a, c, g, or t
  misc_feature (1073)..(1073): n is a, c, g, or t
  misc_feature (1112)..(1112): n is a, c, g, or t
  misc_feature (1196)..(1196): n is a, c, g, or t
  misc_feature (1581)..(1581): n is a, c, g, or t
  misc_feature (1583)..(1586): n is a, c, g, or t
  misc_feature (1588)..(1588): n is a, c, g, or t
ggctttatttagtaaaatgttaaaataaataaatacaaattgatcagctgctctgtatnnnnnnnnnnnnnntnnnnnnnnnnnnnnnnnnnnnnnnnnnnnnnnctttgaagcacaaaactccaaatacaagtctaccaagactgaaatcacaaagggcatggacaagagacagggttggggtctggctggctcttctctgctaggagctggctgacctctggcctgcccgtcccatcccgcctgactgcagctcaccctgggctgaggacccacggacaccggagagaggtgagggtccaaaggctgctggggaaggggtaggggggntggggtcctcagggaggaagggccttgtgggagggggcgccaagtggaactggagagccctgcttccgtttagaggaggtatttttcagagttcctaccccggctttctggagggcagccccagcttcctgcccctcactttagcaaggggccagaagactgcccagggctgcccactcctgtcttggagaggagctgactcagaggacagtctaagtcagggtgaggatgggagttctgcttcctgccaggggtgcccggcagagggacaggggcgaggttcacacagagcaaagttgcctccactcaacagaagccacgggatctggagaacccaggccctggaaaatgcacctgggccaccatccatctcattaccctaagagccttttgcccctgggtaaaaagtctcctaaattcagccctttagataaataagaagggccacgccctataagagaatgaagagaggaaaccactgaagagtgtgtgtgagctgggaggtgacagcccaagggaggctctgatggccccaagagagaagtatcagaggtggctggagaggcagccgtgcatgcggagacggaagcgtgctgcagacacggtcaccctcacggaaacagctgtgtgtaaccacctccatgcacgctgcctgttgggcctgagccaagcagcagcagggacagagaggcaggtgttgcagggaaaccaggcacacgatttgccagcttgangctgccagngcggccccaccagggactgcccctaactgcctccctatntcaggtacaaccagcaggcttaccccaaagggcctgataaggaaggaagaaatcaaaaccccagaggagctcagcacaggtganacaaaacccagcaggctccatgaaagaaaaaggacccacaggcagcaagaatgcagaggtggagatgacagcaacatggcctcactgttaccaggatgcagcgcctggacaggagctggcaggggactcccagtcatcactgccaccagggcgcagcgcctgatcaggagctggcaggggactcccagtcagggcccagtgggcagccgctccagctctctgaagtgactgcaaagccagctggtctcaaaagtggctgtcagagcagctaaattctgggccgtggggaaagagcagcggagggaaggaggaggaagcaagtggaggtggctggggtggggcagtgtcacgagcgtatgtctcaggtggtcacaggccccccccncnnnncngcccagatc

SEQ ID NO: 439320 - DNA, 854 bp, Homo Sapiens
ccggcacgaagtggtgcgaaggcccaggcgttgttgttgacgggtcggcgagttttcggcgaggttctcgagggggcccttgccggtgacgatggcctgcacgaagaagccgaacatggagaacatggcgaggcggccgttcttgatctccttcaccttgagctccgcgacgcctcagggtcgtcggcaaggcccagggggtcgaagctgccgccggggtagagcgggtcgacgatctcgccgagcgggccgccggcgacgcggtacccctcgacggcgcccatgagcacgacctggcaggcccagatggcgaggatgctctgcgcgtggaccaggctggggttgccgaggtagtcgaggccgccctcgctgaagatctgggagccggccttgaaccacacggcctcgccgaacttgacgccgttgcgggcgagcagctcggggaagacgcagccgagcgcgcccagcatggcccaccggcagtggatcacctccagctcccggttcttggcgaaggtctcggggtcggccgacagccccgcggtgtcccacccgtagtcgccggggaactcgccggtgaggtagctcggggggtcgccggagagcgggccgaggtagagcacgcggtcggacccgtaccacgggctgccggacgacaccggcttggccttggccgcggtcttgcgcatggtgacgcgcgcctccccgaagagcgccgacgacggcaggtccttgaccgccttcccggcgaaggacgagggggagagcgccatcgcggtggtcgccattgctctcaagaagactcgtgcgtgtccggcgtccgtgctctctgagagtggggctgtggtggtgta

SEQ ID NO: 439321 - DNA, 974 bp, Homo Sapiens
  misc_feature (90)..(90): n is a, c, g, or t
gttgccactgaaattcctcgcattttaattgcagcccatgcgatatcgtgggtaatgtaacatccatggtagtacaacgtcaccccggcntcatcgggattactttccccgcaatgctcgtgcacacccgttacttgccggggacaaagttggtgccgaatgccccatgcgcttgttgttgacggggttcggcaacgtggtcagcaaggttctcgagtggacccttgccggtgacgatggcttgcacgaagaaaccgtacatggagaacatggcgagcgaccgttcttgatctccttaaccttgagctcggcaaacgcctcagggtcgtcagcaaaggccgagcgggtcgaaactgccacccgggtagagcgggtcgacgatctcaccgagcggcccaccggcaatgcggtagccctcgacggcgcccatgagcacgacctgacaagcccagatggcaaggatactttgcgcgtgcacaaggcttggattgccgaggtagtcgaggccgccctcgctgaagatctgggatccagccttgaaccaaacagcctcgccgaacttcacaccgttgcgggcgagcagctcggggaagacgcaaccgagcgcgccaagcatggcccaacggcagtggatcacctccagctcgcggttcttggcgaaggtctcggggtcagccgacagcccagcggtgtcccacccatagtcgccggggaattcaccggtcaggtagctcgggggctcaccagaaagcgggccgaggtagagcacgcggtcagagccgtaccacgggctgcgggaggcaacctgcttggcctttgctgccgtcttgcgcatggtaacgcgagcctccccaaaaagagatgacgatggcaagttcttcactgccttgccggcgaaggctggggaagagagtgacatggtggttgcggccattctgattgactaggttctgtgttgttctccaagaatgagg

SEQ ID NO: 439322 - DNA, 1085 bp, Homo Sapiens
ttggcgcgaggaccggggggtgaatcggcacgaggctgaggtcaagcggctcttccgccccattgaggaactgaagaaagactttgatgagctgaatgttgtcattgagactgacatgcagatcatggtacggctgatcaacaagttcaatagttccagctccagtttggaagagaagatttgtgcgctctttgatcttgaatattatgtccatcagatggacaatgcgcaggacctgctttcctttggtggtcttcaagtggtgatcaatgggctgaacagcacagagcccctcgtgaaggagtatgctgcgtttgtgctgggcgctgccttttccagcaaccccaaggtccaggtggaggccatcgaagggggagccctgcagaagctgctggtcatcctggccacggagcagccgctcactgcaaagaagaaggtcctgtttgcactgtgctccctgctgcgccacttcccctatgcccagcggcagttcctgaagctcggggggctgcaggtcctgaggaccctggtgcaggagaagggcacggaggtgctcgccgtgcgcgtggtcacactgctctacgacctggtcacggagaagatgttcgccgaggaggaggctgagctgacccaggagatgtccccagagaagctgcagcagtatcgccaggtacacctcctgccaggcctgtgggaacagggctggtgcgagatcacggcccacctcctggcgctgcccgagcatgatgcccgtgagaaggtgctgcagacactgggcgtcctcctgaccacctgccgggaccgctaccgtcaggacccccagctcggcaggacactggccagcctgcaggctgagtaccaggtgctggccagcctggagctgcaggatggtgaggacgagggctacttccaggagctgctgggctctgtcaacagcttgctgaaggagctgagatgaggccccacaccaggactggactgggatgccgctagtgaggctgaggggtgccagcgtgggtgggcttctcaggcaggaggacatcttggcagtgctggcttggccattaaatggaaacctgaaggcc

SEQ ID NO: 439323 - DNA, 1327 bp, Homo Sapiens
  misc_feature (263)..(306): n is a, c, g, or t
attatggcaccgcgcttaagatgcctcctgcctgagaagccagctcacgctggcacccctcagcctcactagcggcatcccagttcagtcctggtgtggggcctcatctcagctccttctagcaagctgttgacagagcccagcagctcctggaagtagccctcgtcctcaccatcctgcagctccaggctggccagcacactggtacttagcctgcaggctggccagtgtcctgccgagctgggggtcctgacggtagcggnnnnnnnnnnnnnnnnnnnnnnnnnnnnnnnnnnnnnnnnnnnngaactgccgctgggcataggggaagtggcgcagcagggagcacagtgcaaacaggaccttcttctttgcagtgagcggctgctccgtggccaggatgaccagcagcttctgcagggctcccccttcgatggcctccacctggaccttggggttgctggaaaaggcagcgcccagcacaaacgcagcatactccttcacgaggggctctgtgctgttcagcccattgatcaccacttgaagaccaccaaaggaaagcaggtcctgcgcattgtccatctgatggacataatattcaagatcaaagagcgcagcaatcttctcttccaaactggagctggaactattgaacttgttgatcagccgtaccatgatctgcatgtcagtctcaatgacaacattcagctcatcaaagtctttcttcagttcctcaatggggcggaagagccgctttacctcagcctgccttgccttgtcttcctttgaactctccatctctgccccctccttgaattttgccagtgcactcttgagatcctgagatgtgtaggtgttggtgttgatatccagccttttgcctttcaaattatttcggaacttgtcctcatattggagttttgcctctctttccccagtctgaagattcagccgtacgtgggatcctgcagggacagcctgccctggctgaagggcctgccactcatgcgtcgggtggaacacctccaggacttcggcatccagctcctcctcggctttggtttcttttctctctgtttctttggtgctgctcttctctgggttggtcagggcaaactccttcaggttctgatgactgaggcagaaggtgaagcaggcggccatcagcagcccaagcagcatgcccagaggagccatcctagatgaaggcaggctctggggagccatagtcagggaccttcggcctccggcagccgagtggcagacacaactcccacaattccaggcccgctctcgacgaattcgagctcggccgatttggcctgat

SEQ ID NO: 439324 - DNA, 1858 bp, Homo Sapiens
ttttttttacattgtaaacaccacatttatttgtctgaggcttgcaaacctctggtaagaagcacagaacgcagggctctccttcatgctgccctgggccccagctcgccaggcatgcaggacagagctggcagatgagtcagaaatctttgggagcagcgccagggaagcagcaggccctgctccttcccatgcccaatcccgccagcacgggcctggactgcagccaggaaggtgggccagccaggatccccaggtaacttcgccacagggacctcttcttggagctgccttcccttccctccccatccctctccaatccccgcagagcttagagcctgggccacatgcttggtccctcacacaaggaccaaaccagctgctgtcaggctgtttctgtgggtcctgtctctccagtcaggaagccagcagggcagggcaggcctggctctcctcctggaatcacaccgtgcacccagctcagcgctgggcactcagctggggaccgggatggacaaagccttgtccagagaaccactgtaggggagacgtgcatggcagccggactcagcctcctgcagcctccattcatgggctcttggctgggcctgaaatttgttagggcctcaactctctgtggtgcagatgaacacctcctcctccaagaggcccctcaggcttggtgccaggcttgggactgggctctggaaagtcagccaaggctgctacttcaaggccctgaggacagcctccagcttcatggccatagccaggtcgcccttcaccttcagccgtccactcatgtaggcccccaggggccgcagctctctgcatagcagggcccgcaggtctgcctcggccatctccaccaccacatcagggatgccatcaggcaccccgtgtcccactcttcctcgtcctgtagtgaggtccaggaagtaggcgctttgggtgccgctgggcaggacgacattgaactggtagcaggccccgacttggctgaccagggcctcagacaggaagggctgtagagcagtcagtagcccctccgccagaggctgcttcggactggacctggcaccaacttgaggggcaggtggctcaacttcactcaccatctccacggtgtctggccccggggacggggcacctcctgccattgagttcatgcttcctcccaggaagtgcagggccagctgctggagggtgctgtccaggttgggcccagctgggctgtcctggggcggctggagcacggcctccactgccagctccacgcggtctacctccagcccccaggccctggtcacatcgttgatctccagcagaagctggtcgctgatcttgagcttctccatctggatctcccgcagcggcctcttgagcagggccttggtcatggcgttctgggctgtcatgcgtgtggctgtgttcaggtctttcacagtcatcaccgacagcaccgggtcccagatgcgaaactggacatcggctcccacggacagcacagccccgtccttagaggccagcttgcagggagggacgttgaaggctcgtgtcctcagatccaccctctgaaaggagtcaatgaagggcaagagcagaaccatgccaggtccctggggggtgcggatccggcccaggcggaacacaatcatccgctcgtaggtgggcacaatcttcagggcaaaccagccagaaatggggaaggtgaccaacagcagcaagaaccccaggaaactgatgaggccatgacagaggcaggagggccagctctggggtacatcgtaagtcagcggtaggtctgcagctctccgcctctacctcctccccgctctgggcgtgtctttaaaaccca

SEQ ID NO: 439325 - DNA, 974 bp, Homo Sapiens
agcggagtgggggcggtggccgcgtagggcccactggccagtgagggcgccgcgcggaggcgcggggcgtgtctcctgtcaaaagccatgctcggcaggtctgggtaccgggcgctgcccctgggtgattttgaccgcttccagcagtcgagcttcggctttctgggctcgcagaagggctgcttgtccccggagcggggcggcgtggggacaggggccgatgtaccccagagctggccctcctgcctctgtcatggcctcatcagtttcctggggttcttgctgctgttggtcaccttccccatttctggctggtttgccctgaagattgtgcccacctacgagcggatgattgtgttccgcctgggccggatccgcaccccccagggacctggcatggttctgctcttgcccttcattgactcctttcagagggtggatctgaggacacgagccttcaacgtccctccctgcaagctggcctctaaggacggggctgtgctgtccgtgggagccgatgtccagtttcgcatctgggacccggtgctgtcggtgatgactgtgaaagacctgaacacagccacacgcatgacagcccagaacgccatgaccaaggccctgctcaagaggccgctgcgggagatccagatggagaagctcaagatcagcgaccagcttctgctggagatcaacgatgtgaccagggcctgggggctggaggtagaccgcgtggagctggcggtggaggccgtgctccagccgccccaggacagcccagctgggcccaacctggacagcaccctccagcagctggccctgcacttcctgggaggaagcatgaactcaatggcaggaggtgccccgtccccggggccagcagacaccgtggagatggtgagtgaagttgagccacctgcccctcaagttggtgccaggtccagtccgaagcagcctctggcggaggggctactgac

SEQ ID NO: 439326 - DNA, 488 bp, Homo Sapiens
  misc_feature (21)..(21): n is a, c, g, or t
cgcggtctacctcccaccccnaggccctggtcacatcgttgatcctccagcagaaactggtcgctgatcttgagcttctccatctggatctcccgcagcggcctcttgagcagggccttggtcatggcgttctgggctgtcatgcgtgtggctgtgttcaggtctttcacagtcatcaccgacagcaccgggtcccagatgcgaaactggacatcggctcccacggacagcacagccccgtccttagaggccagcttcagggcaaaccagccagaaatggggaaggtgaccaacagcagcaagaaccccaggaaactgatgaggccatgacagaggcaggagggccagctctggggtacatcggcccctgtccccacgccgccccgctccggggacaagcagcccttctgcgagcccagaaagccgaagctcgactgctggaagcggtcaaaatcacccagggcagcgcccggtacccagacctgccg

SEQ ID NO: 439327 - DNA, 2330 bp, Homo Sapiens
  misc_feature (176)..(222): n is a, c, g, or t
  misc_feature (934)..(934): n is a, c, g, or t
  misc_feature (1008)..(1008): n is a, c, g, or t
  misc_feature (1087)..(1089): n is a, c, g, or t
  misc_feature (1095)..(1096): n is a, c, g, or t
  misc_feature (1101)..(1101): n is a, c, g, or t
  misc_feature (1121)..(1121): n is a, c, g, or t
  misc_feature (1127)..(1127): n is a, c, g, or t
  misc_feature (1135)..(1135): n is a, c, g, or t
  misc_feature (1148)..(1148): n is a, c, g, or t
ggaggctattgtgtaaaaatgcctttgtatagttactccagcttagaattatatgtgagaacatttaataattcttcattctgaagggaggctagagtttgtcacgttatatatttcagcaaagtcaacttgacttactcagaatttatttcatctaacttgtacctaggtttggnnnnnnnnnnnnnnnnnnnnnnnnnnnnnnnnnnnnnnnnnnnnnnnttgcttcaacatctgaagtgatttttctccatttaatcataaacaatctacaaccattttgctacaaaatggtctctttaaaaggcctccaaagagttattgaatgaatggctattacctagaatgtaaacatctgttattctagagtagtccaacctttagttataaagagagatgacctacatctaacaagaataaatgtgggcactgttgggaatgatagtaagaggaatttaaaaaacttaggacactgcaatttaaagtataactttatttctatatagctgaagattcttttcactagtacaaaaaggcttttatagtaagtccatgtgtttttaaagaatgaaaattgacaatttttataggtaactaaatttaagaagtttacctttttcctgttttgcttttaataatgtctgattagtatttacctataaatcattcaaatgagatcactgaaaatataaattatacaatatcaacaattttacttttgggtgtgtctcccgccatctattgctggccattttcagagtcctatttggtgtaagttccgctgacggcagggcacgatttgtcatgggacttgtccgtttctttttgctgatcccattttccattgcttccttttcatatgaattgccatctgatgcgatggccgggtctttcataagttctctagttattggacatatcaattcatcagggnttcctgaagaaagggatttaaccttggtcctgagctcttcaattttcctcagcactttactacgcagtcctagngattcaattttcaaatcctcagcccgactttcttttgttagattcaacagttcttttccatcaatgttattcctcttgnnnataccnncaagntctttttaatcttgtgcacnaagccntgttgagncatcctcctctgnccaatcttcggtttattgcttccgctgatgttctgtgcgccttgcttggcaacgtgtttccaggtcaaattgccagatgttcactgttttgtccattgaaccagtagcaagtaaaagggtattaggtgcaaaagcacaagttgtgacatacctggtgtgctgagtcaatgtgtgaagtatattctcagtattagtatcatatactatgacagacttatccactgaccctgagactagcatctgcccatcatgggaaaaagcacaagccagaacaggagcacagtgcccactcagtgtacttttatattttaattcaaaacctaagatatgggtaaaagaaacaatccaaatttttgacttggcaatcctgaccacatgatgccaattcgaaaaaactgaagaccttgttctccatcagaaactggctgtgaagaaaaatcgcagcaggtaattccaagatcatgtgctttttcactatgcagacacctcattttatcatcccacactgttaaatcaccacatgaggagccagtgacaaagaagcttccattaggagaaaatgcacatgccgccaaggagccatctttaacactaccacatctatataatttgtatgactgtgcattccacaaaaccacagttccatcagctgcccctgatgccaaacacgtggagtctggggaaaactggcaaaccctcacagggctgccactaggctgttccatcactgccagcatctgtccattttcagtattccataggacagtggtaccatctgttgaacacgatgccaaaatatgtcctgaaggggagaaacagcagcagtggacagcataggtatgaaacttcaatggagaatgtggcagttcagtaaagtcacgtaacgagtacaggcgaattgttttgtccaaggagcaagtagccaagagggaaaaggagaaggcacagcagttgacatcgtcaccatgatcagctaatgtgtgaatcagtttcaccatgttctttatttgaagaaaaacagcctgcaggagcgggggcgcgcgggatccgccttcaaggtgcccacgggcggtgcgggtcacgtgccgcgcaggtgaggctggcggggcgggcgccggcggagacccagagcagagggaacagccccgcccccgaacgcccgcatcgagggaattccggacc

SEQ ID NO: 439328 - DNA, 591 bp, Homo Sapiens
  misc_feature (16)..(16): n is a, c, g, or t
  misc_feature (173)..(173): n is a, c, g, or t
ctcctcgcctccttgntgcacgatggcctcgctccgggtggagcgcgccggcgcgcccgcgtctccctaggacccgagtcgggcggccggcagcgctccgcctcctccttctgctgggcgctgtcctgaatctccacgaggctctggctcattctcttcccaccacaggcacnaccatgggtcagaaggccttatagcatctctgcgatattgtctggagcactttgcagagttgtttgacctgggcttccccaatcccttggcagagaggatcatctttgagactcaccagatccactttgccaactgctccctggtgcagcccaccttctctgaccccccagaggatgtactcctggccatgatcatagcccccatctgcctcatccccttcctcatcactcttgtagtatggaggagtaaagacagtgaggcccaggcctagggggccacgagcttctcaacaaccatgttactccacttccccacccccaccatgcctccttcctccccttctactcccttttctcactctcatccccaccacagatccctggattgctgggaacgaagccagtggatcatgcaaaa

SEQ ID NO: 439329 - DNA, 868 bp, Homo Sapiens
  misc_feature (761)..(804): n is a, c, g, or t
cactggctcatgccgtaaatccaggatctgtggtggggatagatgtgagaaaagggagctatgaggggaggagggaggcctggtgggggtggggaagtggagtaacatggttgttgagaagctcgtggccccctaggcctgggcctcactgtttttactcctccatactacaagagtgatgaggaaggggatgaggcagatgggggctatgatcatggccaggagtacatcctctggggggtcagagaaggtgggctgcaccatgggagcagttggcaaagtggatctggtgagtctcaaagatgatcctctctgccaagggattggggaagcccaggtcaaacaactctgcaaagtgctccaggcaatctcgcagggtgctataaggcctgctaatcatggcccagtcgcaccaatccttttcgataggatccatttgatccttataatgattccagcaaaattggacagctgtctcatagttcttcaccgtccccccttctgaccctggtgtgcctgtggtgggaagaggctgagccagggcctcgtggggattcaggacagcgcccagcagaaggaggaggcggagcgctgccggccgcccgactcgggtcctagggagacgcgggccgccggcgcgctccacccggagcgaggccatcgtgcagcaaggaggcgaggagcggcggcggcgctgagccgggcccgggtgtgggggcgcctatatcccagccaggcaggaaccgcccgcttcctcggannnnnnnnnnnnnnnnnnnnnnnnnnnnnnnnnnnnnnnnnnnngcccgcggctggagggggagtcgctgcctcacccgcgcctggcgcccgcggctccccccccgct

SEQ ID NO: 439330 - DNA, 899 bp, Homo Sapiens; identical to SEQ ID NO: 131596
  misc_feature (158)..(160): n is a, c, g, or t
  misc_feature (171)..(172): n is a, c, g, or t
  misc_feature (178)..(178): n is a, c, g, or t

SEQ ID NO: 439331 - DNA, 836 bp, Homo Sapiens
  misc_feature (720)..(756): n is a, c, g, or t
  misc_feature (808)..(808): n is a, c, g, or t
gtttgttatttaagaaaattttatttctacttctacagcagaaatacggaaatggtacaggtttgggcaaatcatactttatgaaatggatcctcataccacatccttgtttaatacaggcacgttataacataattcctggattttcaaaatccagccaacacggatacctctgctactctgttttggccttcatagctgcttcctctttcagacgagctttcttttctaagttcaagcttgttaaagtctcgtgtctttgggcagccttcttgccctcaataaccatgaagatgcatcctaccaccgtcagggcaatcattagatagctgatcttcactcgcatcttgttctttgcagcatcaagcatctccaacgagacagtctctgggatttcatcttcctttttgaagcgacctgaccatatgaggatctttttctgccaatccgtaggtttgtgtaaaggcactctgttgtaagtgcgggatggagctccgggactttcctgtggttttgtgcaaaatccatttattctcttcaaatcagagcttccggtaagccttagagatgaggaaacatctctttcacataacctaaaacagcttcctgctgccaggcgcagaccgctgaggctccccatggccacttgctactccgccgaccagcgcagaacttcgccccgctctcgacgaattcgagctcggccgatttggcctgatnnnnnnnnnnnnnnnnnnnnnnnnnnnnnnnnnnnnncgccgccaccacgccgggtttgtgaaactcccgggaggttcgccccctattnagtggattccgtaatttccaagttttcc

SEQ ID NO: 439332 - DNA, 1095 bp, Homo Sapiens
  misc_feature (76)..(95): n is a, c, g, or t
  misc_feature (868)..(868): n is a, c, g, or t
  misc_feature (870)..(870): n is a, c, g, or t
  misc_feature (874)..(874): n is a, c, g, or t
  misc_feature (889)..(962): n is a, c, g, or t
  misc_feature (970)..(970): n is a, c, g, or t
  misc_feature (990)..(990): n is a, c, g, or t
  misc_feature (1000)..(1052): n is a, c, g, or t
atttgggaaaggtctttattgtcagtttagaatgcaacatcttaaggttacatgctttgagtcacatacacgaagnnnnnnnnnnnnnnnnnnnncaaaaaatgcattgacaagggttcaaactattcatgaaatgcagctacagtcgcatgcaaaggaggatcctggttgtattcaaggttccttagtgaaatggtgctaagtattggaaaataatagtaaaaatgcatggtgcaaaaagctctctggctctctttcatggttacatgggagtggactgcttcttcagtcactgcagcattgaaaaaactcttttaagttagcccttaaactgcctggccaggtgttgcttatgactctcctccacctgtttgaacttggactccagtcctttcatttggttctccatcttctccacgtactgcaagtctctctgggtccgcctgtccaagacctctatggattgagacatgttctgcaccttctccagtagctgcctcagctgttttgtgcgggcatcccgtgaacacatggtctgctgtggggcgaccactgtgcagatacacctgccctcgctgtcctgggcagagctgtacacctgccagctctcctcagggttggtgggcagcacgccggtgctgcggtccagcgtcccgccgccggccgccgagagcttggtggtgttgaggcccaccagcgagggcagcgtctgggacatccagttagtgatcatggccatggtgctcagcacgaccccgatcttgagcagcggcaccgacatcgcgcctcgagctgcctccagcgcccgctccgagctggcaccggctcccgcgcccaggcggccttcaggcggcgggcaccgcggcgngnaggngcgcctggctgtgtnnnnnnnnnnnnnnnnnnnnnnnnnnnnnnnnnnnnnnnnnnnnnnnnnnnnnnnnnnnnnnnnnnnnnnnnnnttccccgngcgccagggaaggtggccangcggcctctnnnnnnnnnnnnnnnnnnnnnnnnnnnnnnnnnnnnnnnnnnnnnnnnnnnnnctgcgtctccgggctcctccgccgccaccgggaagcgccatcc

SEQ ID NO: 439333 - DNA, 1106 bp, Homo Sapiens
  misc_feature (1069)..(1069): n is a, c, g, or t
  misc_feature (1097)..(1097): n is a, c, g, or t
  misc_feature (1104)..(1104): n is a, c, g, or t
gaggtcttgacagtcccgggtcactgatgcccggtcaactttccgcaagcaatttttgcagcaaggccggagcctttcttcaagattggaccactctgctcttgaagttcatcgtagtcataggcgccaatttgcctcttgcagctcgttaagcactgacgtcagattcttggacctcctctttaaactgcaataccaatttggcatcggccttgtactcttccaacacaggtatcaaaggcctaagttcatccattttcgcttttatcgccttaaactgcctggccaggtgttgcttatgactctcctccacctgtttgaacttggactccagtcctttcatttggttctccatcttctccacgtactgcaagtctctctgggtccgcctgtccaagacctctatggattgagacatgttctgcaccttctccagtagctgcctcagctgttttgtgcgggcatcccgtgaacacatggtctgctgtggggcgaccactgtgcagatacacctgccctcgctgtcctgggcagagctgtacacctgccagctctcctcagggttggtgggcagcacttgagtgagttcagtgcccatcaggatgaggaagaggaggctgaggagcttccgggccgggtgcatgtctcgctgccacctccaacgacctggcatgcagggccctgggtgctggccggccggcggctgcgtggacgcggacgcgctccggctctggccccggctccgctggctccggcggcggcgcctggctcgtgtccccacgcctggattcagcacccggagcgggcggcgcgcgggctctgctgcgcgaagcctccgctctgcatatttatcgcgtcccggttccggcgcgtctgcctccgggcagggctgggcagggctgggctgggcgggcgtgcgccctcctctctcctcgcctcctaatggctcccccgcgcgcctggcattggcggagagaggcgcgccctgcggagcacgaacgcgcgctgggctgcggtgggtgccaaaagtttgctcggaaggggcgggggcgggggtggcgctgtgggnccccgcgcgcctcgctgtctcccggggnggagggngg

SEQ ID NO: 439334 - DNA, 992 bp, Homo Sapiens
  misc_feature (909)..(945): n is a, c, g, or t
ccagccctggagagttttttagtttgtcgtttgtcaaaaatgcattgaccaggggttcaaactattcatgaaatgcagctacagtcgcatgcaaaggaggatcctggttgtattcaaggttccttagtgaaatggtgctaagtattggaaaataatagtaaaaatgcatggtgcaaaaagctctctggctctctttcatggttacatgggagtggactgcttcttcagtcactgcagcattgaaaaaactcttttaagttagcccttaaactgcctggccaggtgttgcttatgactctcctccacctgtttgaacttggactccagtcctttcatttggttctccatcttctccacgtactgcaagtctctctgggtccgcctgtccaagacctctatggattgagacatgttctgcaccttctccagtagctgcctcagctgttttgtgcgggcatcccgtgaacacatggtctgctgtggggcgaccactgtgcagatacacctgccctcgctgtcctgggcagagctgtacacctgccagctctcctcagggttggtgggcagcacttgagtgagttcagtgcccatcaggatgaggaagaggaggctgaggagcttccgggccgggtgcatgtctcgctgccacctccaacgacctggcatgcagggccctgggtgctggccggccggcggctgcgtggacgcggacgcgctccggctctggccccggctccgctggctccggcggcggcgcctggctcgtgtccccacgcctggattcagcacccggagcgggcggcgcgcgggctctgctgcgcgaagcctccgctctgcatatttatcgcgtcccggttccggcgcgtctccgctctcgacgaattcgagctcggccgatttggcctgatnnnnnnnnnnnnnnnnnnnnnnnnnnnnnnnnnnnnncgccgccccgcgtagagctccgttcgccctatagtatctatacatcc

SEQ ID NO: 439335 - DNA, 891 bp, Homo Sapiens
aaaactcacagataagttatagttatttcaggttctgaaaagacgcagaacatgaagggactcagaagtctggcagcaacaaccttggctcttttcctggtgtttgttttcctgggaaactccagctgcgctccgcagagactgttggagagaaggaactggactcctcaagctatgctctacctgaaaggggcacagggtcgccgcttcatctccgaccagagccggagaaaggacctctccgaccggccactgccggaaagacgaagcccaaatccccaactactaactattccggaggcagcaaccatcttactggcgtcccttcagaaatcaccagaagatgaagaaaaaaactttgatcaaaccagattcctggaagacagtctgcttaactggtgaaaatatactggattatgtttaattatggttctattctctttgaaaacatgaaccatgtgaataaaacctttggacccttttatttcattttgtaatcttaagaacacacacagatagtttattctttcagaaataaaatatatataggatgcttagctgagaacatcatcttctttcatgtgcttcaggtcctgtttagatgaccaaaaagtgtcttcagatcaccttgtgtcttactcttgagtttcttagaatatttataacttataaggctgaagactaaagtgttctttccttttaactatagccagtacctgtcttgatcttagtgtgtcaaaggacccatttgtgttacccacttgcatttggtgttcactccagcagaaattctccttctctggttaccttttatcccatcccaagaatggggacggaaggtgacaaaactggcggatgggacatcggagaaggatgacccccaatgtcatc

SEQ ID NO: 439336 - DNA, 1758 bp, Homo Sapiens
ttcaagtttgagaaatgtagttttattaatagaaggtcatgtcttaccatacacactgtccccagataaataaaatcccaacatctttgaaagcacacaaacacacagttttacagggtacaatacaaagtgaactttgatgatgttcttacttgcatttactaaaaatctgagaaagactgtaatcagtctctaaataattatcttgcgtaaagagaaaagtagagcacaatatatatatatcacaaaccaaatcacactctctgtaacattacaacatggaatttacttaatcaaaaataaaagcaaactggctgaagaaggctgtatcatttttttctcaatattacgctaatttctatttttggcatgaattattaaccttttccattagtaggcaaatgtgctctgcaaattctcggatggcaccacggccaccattacatttgcaaatgtatccaacagccttctgggcagtagaacaggcatcagcaggagcgccacttaggcccactctcttcaagcactcttcatcagacacttcatttccaagatatgccacttctttccagcacaggcccatttcttttctccattcatctacaactgctagcttgtctgatacactgacttccattttgcaatccagttttaaagaagacagcgtctgctttgaacaggccctttctgagattagcctcacctcaataccacttttctttaataaacttatcccaatagcatcttttacatcataagatattatttctttttggtctcctgatacataaatgtggccattggtgagacatccatcaatattgcaaaccaaaagttttatttccttaagcttctctttgccaaaatagccatatcttaatactctttgctctgcaataggccaatcaatatccacatctatatccacactatgttcagctcgcatttcgtagtatgccatttttccaccctgcaagtaacccatctctatcaaatgtcttttagcaaaataaaatgagccattttcatataattctccatcccagtcttgtcgacgaggccgtttagctggatttaaattcagaggttcggtcacttcacgaactcctttctgaatttcactccatcgaaactgatggcgtctcacaacagagaaaacagaatcatatccttcttctcgaatcatttctgcaactttttgaagatcagtaggatgtaaacatggagaagtagcttgaatatttcctacaatgtcaacctcattatgataattaagaaattctatgatggcatctagtgaggtagagctgtcttttgaaacttcagaacttcttcgatgaacttgtgcaccaaattgtttggccacattctcaatttcatcatggtctgtcgaaacccatacactctggaaggcccctgaatccagggccgcacgcaggacccagccaatgagcgggacccccgccaggtgcttaatgttcttcagggggatgcctttgctgcctccccgggccagaattagggctgccaggtgcgggggcttctccacacctcggccctggccgccgcgagagttgcgctgcagcttcggcggccggccccgggacggtcgcccccgcgggttggagacggaggtggcggcccccttctccaccgagtccatcttcctcccacgccttctccccagcttctccacatccgggagctagtccctcaccacctcagctcggcgccgcccgatccccgcctaggccgact

SEQ ID NO: 439337 - DNA, 1005 bp, Homo Sapiens
taattttctgcctaagagaaagttgggccccaatatatatatatccccgccaatccacactctgctgtaacagtacacatgggatttacttaatcaaaaataaaaagcaaactgcctgaagaagctgtaatcattttttctccaatattacgctaatttctatttttggcatgaattatgaacctgttccatttagtaggcaaatgtgctctgcaaattctcggattggcaccacggccaccattaacatttgcaaatgtatccaacagctttctgggcagtagaacaggcatcagcaggagcgccacttaggcccactctcttcaagcactcttcatcagacacttcatttcctatcaagtaaaataaatactgagcaaacatttaaagagacaaagaatattctagctaaataatgcagacagcaaccaacaggtaactctggcaacttcagtaagacctaggggcactgcatataagaatactaaagattagatggaacaaaaatattttacagtataattgaggtccagggttttccctaagcaatcaaaaataaactcttatgagctagagaagaagaatggagcataattgctacctgccatgcatattacaaatgttagaaattttatatatgaattctaagtaagttatttaaatttttcattaagcaaaatttcaaacatatgcgagaaccccaattttatattgaaaatttatcagaatttaaaatcacttagtaatattgttttctatgcactgccccctagtttatttggggaaagggagaagaaggaattcccagacataatattttatccaaaaactcttcaatatttatctctgataaatataattttttatctgacagaatatcattaaacccacaaaatcagtaatagttccttaatatcctctaataacctagtatatgttgagatacccccagctgtctcaaaatgtccttttatagctgacttatttgaatcaggaatgaaataa

SEQ ID NO: 439338 - DNA, 705 bp, Homo Sapiens
ccaaagaagttcacatattatcacagatgttgcaccggggtggcctcctttacttttccccgtaaggtcaacccgggaggaggggacggttggggaggtgtaatctccccttttacggatgattctcaagggcggagacaggaactgtcccaggttatgaccattggcagctacggaacaaggaaggagctggagcccttcctcctgggctctcagcccggccccagtcaccccggatcttgcacatccctggcatgagagatggcccctttccaatagcggtggccccggaggccccagcccctccagcagcccgactccctttgccgacccccgcccaggccgggccgcccactctcgcacatgcgcacttctggaaggcccctgaatccagggccgctcgcaggacccagccaatgagcggtacccccgccaggtgcttattgttcttcagggggatgcctttgctgcctccccgggccagaattagggctgccaggtgcgggggcttctccacacctcggccctggccgccgcgagagttgcgctgcagcttcggcggccggccccgggacggtcgcccccgcgggttggagacggaggtggcggcccccttctccaccgagtccatcttcctcccacgccttctccccagcttctccacatccgggagctagtccctcaccacctcagctcggcgccgcc

SEQ ID NO: 439339 - DNA, 1620 bp, Homo Sapiens
aaggatcaaatgagatctgtttttaatataaagatgttttcttaaaatctctgtatgaaattatctccggagagatagattcaccatgtttgccctgagatttagaggcctctgcctgccactccacaccctgtttgtgaaggcccaagtcactcactatgcaaagaagtcattccctctagttagtgttaaaaccagttatgggtcttcctggcatggtggataatccacacgtggataatcaagagttgactatatgggttcctccctcccctccccttccaccagggatccctgacagaggccacagcgagactcttcagcggatgtagatcatgtcggagatggctccaggcaagtgggtcatgatctgcattcgcagccaccagtagtagtccatggggtggtagcgggtgtagggggtggtggcggtcagggcgtgtgtgacagcatcgatgacaggggacgtgtctgtggagccactgctgcagtaggtctccatcttggcgatcttttcatcaaagtacttcttgccgtagtccttgcgcacgacctcaggcagctcctcccacatcttcttggcgatggcctgaatgctctcagggctgtaaaggctggtggcagcgatgaagttgccgggctccaccacgctgaccttcacgcccagggggtacatctcatagcgcaggcagtccgagaaagcctctaccccgaacttggtgatgcagtacggggagcgggccgggttggccatgcggcccagcatgctgctgatattgacgacgcggcctttggcccttcggatgagggggagaaaggatttcgtcatccgcactgtgccccaaaggttcacttctgccacctgcttgtaggtctccaggctggtgaactccacctccccgaacgttgagatgccggcattgttaacgaggccccacatgcctttctcagggtccttcaggctcgagcggacaatctccaccactttctccacctcttcgctgctgcagacattgagctggacggttctcaatcggtcactgtttaggctgtccagctccttgaccccatcatggcctttgtccttcatcaagcagccagcaaacacaaggaagccttttgaatgcagatgcttggccaatgagaacccaaatccagagtcacagcctgtgaccaggacagctttgctgccaaccggctccgccgcactggcataagtccgacggccaatcgggataaaggaagtagaaccaagcaatagtgggcgtcttgctccattttctctatcacaggcacttagggtttttcctgggagccgtgacaggggtctggagaggcgggtggccagcatggtagcaacgggtgttagaatggcccagttcctcccggtggttccaaaaccaaatgggcagggggctccgctgcagagggctcgccgaggctctcgccttcacccggcgccgcgcaggtgcccgctctcctgcggggagagccgagggggggcgctgccgcagggtctttctggaagcccctccaccagcactcctgcggcctgcggcctccgccacccggacgcttctacacgcgaagcgcgatccaaaatctccgaccgtaccagcc

SEQ ID NO: 439340 - DNA, 839 bp, Homo Sapiens
tgagatgccggcattgttaacgaggccccacatgcctttctcagggtccttcaggctcgagcggacaatctccacccactttctccacctcttcgctgctgcagacattgagctggacggttctcaatcggtcactgtttaggctgtccagctccttgaccccatcatggcctttgtccttcatcaagcagccagcaaacacaaggaagccttttgaatgcagatgcttggccaatgagaacccaaatccagagtcacagcctgtgaccaggacagctttgctgccaaccggctccgccgcactggcataagtccgacggccaatcgggataaaggaagtagaaccaagcaatagtgggcgtcttgctccattttctctatcacaggcacttagggtttttcctgggagccgtgacaggggtctggagaggcgggtggccagcatggtagcaacgggtgttagaatggcccagttcctcccggtggttcaggacatttgcagcgtcacaaaagatcctgtcagcgcgaggcctgcaggcggccctccatagtgaaatatgtgcttctgcaacccctcaaagtaggaactgcagggtgactctgcatcagctgactacaggcagatttccaggctgactggccaaaaccaaatgggcagggggctccgctgcagagggctcgccgaggctctcgccttcacccggcgccgcgcaggtgcccgctctcctgcggggagagccgagggggggcgctgccgcagggtctttctggaagcccctccaccagcactcctgcggcctgcggcctccgccacccgacgcttctacacgcgaagcgcg

SEQ ID NO: 439341 - DNA, 791 bp, Homo Sapiens
  misc_feature (402)..(402): n is a, c, g, or t
  misc_feature (567)..(567): n is a, c, g, or t
  misc_feature (581)..(581): n is a, c, g, or t
  misc_feature (583)..(583): n is a, c, g, or t
  misc_feature (728)..(736): n is a, c, g, or t
cacgtttaatgtaaaaatgatctcgtgacatttacatactaagtattaggcattacataatattaattttgatggctatgttacatcatctaaaaataatatgacaattggtggcatagtatgtgtttttcaaaactgctgtaaaacagaaatagtgtgaactcaaatacatattgctgaagggatgaggatcgctcttaaatgcctggatggcatgaactttacatattagcatggtaagaaattactaaatcttttcttttcctgtattaaaataatgaggatctaagacacattaaatcaaaatatttacaaaaatttaataatgttttagaccaaagaaaaaaaggacaaattaaagaaatcattcttattctaaatttaatttttttaatgttagtnctcagttttcttagcttttttttctgttggttctttgaaacaagcattgtaaagactttttaataatacaatagcttttaaactcttagtgaaaatgaaaaggttgctttttgtagtagcctctgccactcgttcaaattaggctgggtaacaaagcaacccgtnatcctagttatcgntncatgacaatatcttcctgttagtttcacagaaatattttgtaccattcaacatggatgaaacttgggtaattatctcaagaaaatgttgcctcatctgaaatctgaacttcaaaatagtttatctaagatatctttgggacactnnnnnnnnngacattttatgaaaattataccaatcttcaagtagatgctttaaaaggggctttt

SEQ ID NO: 439342 - DNA, 410 bp, Homo Sapiens
tgtgcgcgcgctccccttctcccccaatttgtaatgtaaaaaatctccatatcattagaatattctgttaacaaaaagtgactgggcaaacaataaaataaaaaatgtaatctttattagttttgcacattttaaatgttggttagcattatttagcataatagtagcattttccagcatgcagttcacgaatacagtttatctaagtagttttaaggaaaagaggagcctatggtttgcttctgtaagaaacacaaaatgtcctgatgtaattgactatataagttgactactctgtttttgtgggaaaaaaattatgaagcccacattctatttagaacaatctagagcagcattactccaaagaaatggaaaacataaaccgaaggtcaggaaaaaaaggaacaaaa

SEQ ID NO: 439343 - DNA, 1716 bp, Homo Sapiens
  misc_feature (495)..(521): n is a, c, g, or t
  misc_feature (1106)..(1120): n is a, c, g, or t
  misc_feature (1184)..(1225): n is a, c, g, or t
cgaggccttcatttaatcacctgaatggaacatgcagtgcttttaataaaagctgtacagagttattactgattgtatctcctgagcttctttgcaatctgagaggtttttgacacatcacaccaggactaaacttccctgaaaggatttctaacctgaaagagacagacaggggtttcaaagaagaaacaaacacatatgctacatctcggctgcattttaaaattactctcccagaacagcatcctccctcccttttagtaaacacaggcttgtatacattaaaataaagagggtatataaattaacaagtcaatgctcttctgtatcaaaaaacagtctcccaacccatgacaggctctccatttccccaaacacatttggggtagaggcattggaaaaaagcgaaaatgtgaaccaaaggaaagaaatattgtaacctaggagaatgttctttgctaggcattcacagttaaggtagcagggtgtgcgtgnnnnnnnnnnnnnnnnnnnnnnnnnnnccgatgccacttttgttccagtgcgagatagcttcacgggtgccggtgcatggtgacatacaatggatatcaaaaccgtacagtcagtcttagcaaattaggtaaattagagatcatttgatggtattctattgttgctattgtaatcaccgtaattttccctggtaatggtgcttcgtgatgaagtgctgttctcataggataattgtgaaagataccgaaagattcagggatgcagcatctggttttaaaagctcttcagattcaaattggcattttactttatcttgaaaatttatgagagattcagatcatgccggcttaaatgggaaaggtgaaagcagggtaatttcaatctatgaattattcaatctcagcctggtgaaattgccatccatgaactgatgctctgacagtcccttcgcagagcctccattacgcttgtcatttttatttctttatctacgatctcttcctcagttaccgagcttgtcccttagggctcagcttcacaaaccaagtatttcaaattggcaataacctaaatgtgccgctgtttcgaatcgctgtctccacaggctgtcnnnnnnnnnnnnnnnccaaattattaaaaatcacatccatgatgatatttgttgggctcttcgattagatgaattaaannnnnnnnnnnnnnnnnnnnnnnnnnnnnnnnnnnnnnnnnnagggcatcactgcgaagaagagttatgttccgctaacatcacaagagaagagaaagtgatgctttctgcttccttctttgttgtcagcatgacccatcctagctgcatagcatcacgcagaaaggagccagggctaaaggcggcttgcctggcaccctgatttccagccagagttgatgaggactgcatggcaggcaggctaatccagacaactgtatacttagcgagcacgattatttaggaaaataaggaaaagccgttggatgaccgaaattagactgtcattctcacgggctccacctgcacacagactgcagtcgcaacgattcttcacttgatggctggttgtgtcactgctagtcgacagctgtcccgcatccagagaggactgggagtgatttaggtcagggagtctggtttctcctttaaccgtgcgctactgaggagtggggatctgcgcagccccgtgacagccttaaagtgagctgggg

SEQ ID NO: 439344 - DNA, 987 bp, Homo Sapiens
  misc_feature (8)..(8): n is a, c, g, or t
  misc_feature (15)..(15): n is a, c, g, or t
  misc_feature (24)..(24): n is a, c, g, or t
  misc_feature (26)..(26): n is a, c, g, or t
  misc_feature (43)..(43): n is a, c, g, or t
  misc_feature (51)..(51): n is a, c, g, or t
  misc_feature (65)..(65): n is a, c, g, or t
  misc_feature (71)..(71): n is a, c, g, or t
  misc_feature (74)..(99): n is a, c, g, or t
ccaaattntaaaatnacacccatnanatatttttgggctctcnattagatnaataaaacatatanacacanagnnnnnnnnnnnnnnnnnnnnnnnnnnagggcatcactgcgaagaagagttatgttccgctaacatcacaagagaagagaaagtgatgctttctgcttcccttctttgttgtcagcatgacccatcctagctgcatagcatcacgcagaaaggagccagggctaaaggcggcttgcctggcaccctgatttccagccagagttgatgaggactgcatggcaggcaggctaatccagacaactgtatacttagcgagcacgattatttaggaaaataaggaaaagccgttggatgaccgaaattagactgtcattctcacgggctccacctgcacacagactgcagtcgcaacgattctccacttgatggctggttgtgtcactgctagtcgacagctgtcccgcatccagagaggactgggagtgatttaggtcagggagtctggtttctcctttaaaccgtgcgctaactgaggagtggggatctgcgccagccccgtgaccagccttaaatgtgagctggggagtcacacagcatcagtgcggtgagtcgctcgcacaggccccagccagacaaaccatagcaagcatcctctcctttgtcctagcctttattcctgcaggtagagcagcgtggcataagaagcccccaaactattcacacacatggtgggagaccagccgtgctccatcagaggcggtttggttacaagtctccgagcagtacctgctcagctgaaaattcacgctgccaagttagaagccatcgtgtacattcaggatgcatctctgctcctggctaaacaaaggtaaatactcctcatgtaagacatgctaagtagtagcaggagaagaaaactttaaaactctgttgctttgtgcctagttgtctgcttctgctttgctgcattgcgac

SEQ ID NO: 439345 - DNA, 692 bp, Homo Sapiens
ggaaaggacaaattaacaggagggtaaagggggaacgcacagaggattttaataatggataggtaccgtttgaaaaaaagagcgacattgaaaaggaatgggaccaaaaatttgaaagggcaaaacgaaagagtcagaattcaaagcaagaaatgagacacaaaaagcagggaggaagggccctaagataaagaagagggcactgtattcacatggtgatcgaggaacagatggaaaagcaaccagagatagtaggaatgtagacaagaagtcagataaacctaaaagtgaagtctatgagaagggcaaagacctatagataagtaagctcagagaaggagaaaaggacagggataggtaccccaaagatagggaccacactgacagaactaaaagcaaaaggtaaaatttgcaggctgcttcaggattacatttaaataactgttaaactcttgtatcttgtaacaaaagaaaaaatgcctgctaggattgtgccatctttaaaatttttactattggtcatttgcagaacagtaaattctgtgtgttggtacagagtgctctgtaccagtgctcatcatcccttcttcataccaacggtccccagttataggaatttaatatttttaaaagttttacattgctgtatattcaaagatttgttttattaatatgcaatgaaggcttagaaa

SEQ ID NO: 439346 - DNA, 1631 bp, Homo Sapiens
  misc_feature (959)..(1088): n is a, c, g, or t
  misc_feature (1107)..(1107): n is a, c, g, or t
  misc_feature (1143)..(1216): n is a, c, g, or t
  misc_feature (1221)..(1234): n is a, c, g, or t
  misc_feature (1270)..(1270): n is a, c, g, or t
  misc_feature (1301)..(1301): n is a, c, g, or t
  misc_feature (1348)..(1348): n is a, c, g, or t
  misc_feature (1362)..(1362): n is a, c, g, or t
  misc_feature (1372)..(1372): n is a, c, g, or t
  misc_feature (1401)..(1401): n is a, c, g, or t
  misc_feature (1548)..(1548): n is a, c, g, or t
  misc_feature (1571)..(1571): n is a, c, g, or t
aaatttaggtcatagaaaaaagagaaaatattttgtttcattttcaccctttttgaaagtcaggcttccggttctggggttctggggagggacgtggagagccttaccaaccagcagggaccaggaccggatgcctggagccctcttcagatggaggcgggagctggtgcgggtctccacctgcaggtacatcccgagagggcagcaccactctctacaggaggaggggtctgggaacagacagaggcagctgagcccttgggcctgcacacaggcaggcgcccacgccatcaggcccagtctggaggccaagagcaggtcccccaactaagtcacctgcagccccagacaccatcagccagtctcacctggtctctgtggttgggcacgttactggatcccccagagaccccgttttctgtgtaaggaaggccctttttcgttcacagcgacaccgactgcgcgggggcttgtttcccgctcatactgacgagctacagttgtcttaccacctgtcccgtgctgtctggtaaccttatgttctgaggccgctagcccccagcagcctttaagcttctagcatctgtgggcaccccctctcccctgtgctggcctccaccaagaaaggaactgaaagtcccatcatggcttccggccgtactggctctcgcactggcatggaccaacgatctcagctctctctctgccctcctccacctgctgaaagttcagactgcacagtagagggtcccaaagcggccagaaccgacgagtcaccaaaggggctaatcttccacagcggagttccgcacgggcgcagcagccctgccacttcaccgtacgctcccaacactggccccagggaccccgttctggtagtttctcagggctttccctgtgaagtcaaatcaaatttctgacattaagtagggggttcaggctgggcgcggtggctcagnnnnnnnnnnnnnnnnnnnnnnnnnnnnnnnnnnnnnnnnnnnnnnnnnnnnnnnnnnnnnnnnnnnnnnnnnnnnnnnnnnnnnnnnnnnnnnnnnnnnnnnnnnnnnnnnnnnnnnnnnnnnnnnnnntgtacgcctgtggtcctanttattcaggaggctgagctgggaggatcacctgagnnnnnnnnnnnnnnnnnnnnnnnnnnnnnnnnnnnnnnnnnnnnnnnnnnnnnnnnnnnnnnnnnnnnnnnnnntctcnnnnnnnnnnnnnntagtgggttcaaatcacacaaaccaatcctagatgntggtatatgactgggctccctcccgggcctnagttgcctcattgctcccgaaacacccggcattccacatccaaatgnacacacacacgcanactcgcgganacaagcacacgcgcgctggcaaagccgcnccgcgccgctagtcgcaccgagcgctcgtttttttgtccggatcgggggcgctcccgccgccggggccaacctgcagcggaacaggcgcgaggccgcccgcgacgggcacggcgggacacggaacagccggcaggcgggcccaggangcagacccctcccggagtgggcntaagggtgccgggacgcgcggcacggagcgggaaggaagtgcggagcccacccagcccag

SEQ ID NO: 439347 - DNA, 2068 bp, Homo Sapiens
  misc_feature (431)..(431): n is a, c, g, or t
  misc_feature (458)..(557): n is a, c, g, or t
ttttttgacacgtgaagggttatttatggttatgatgaccctgtcctgcaacgagggactggcagccactactgaggaggagggtcccatctctctcctgtcggctttcaccgaggtcacagccagacgtggggcaaaggtgttccctgtcctacccagccattcctgggcctgccgcctaggggctcacagggcccaggagtccccagctcacaggccagggcatcaggccaggcgcgctcggtgcacaccgcacctgggaggacctgggtacactcaggagaccaagagcactggcgggtcaggatggttggcgttcagctcctacggggtggggagaagtctgtagccgagagcccagccccctcctgccaggtcttcccaggttcgagagaggctggaactcaatttctgcagaaaatctcccagtnttttcctgtttggttagtttttttacnnnnnnnnnnnnnnnnnnnnnnnnnnnnnnnnnnnnnnnnnnnnnnnnnnnnnnnnnnnnnnnnnnnnnnnnnnnnnnnnnnnnnnnnnnnnnnnnnnnntgaaccagtgcgcccggctggagctcccggtttttaagcactgcacgatactagaagagctgaccttttttctggcctcacagcttatgctgaagctgagtgtgaggaacagagagacctttctgtgacgaccgctggggcaagagtggtctatgcgccgagatcctggcatcagcaagggaggcgggtcctcggggaggggcagcttccacagtgtggctgcagcgtgcacagccaggtaggccctggatgttcacccctcactgcccttggggaagcacctgaccgctggggatgtccaccagggagaggacgctgtgtcggggacaacatgcagcatcagcacccacaagggcccggcctggccccgcctctccactcgcccgaggtcttgctgtggcccaaagcaggagtccagggctggcgagacctccggctgcagaaaggcaggcccaggcctcacgatggagaaagtctggatgtcctggtctggcctgctgtttcatgcagtgtgcaagcagcagcatgagcaggcaataggccaactcggctggaggcaccaactgaagccaaggccacgggtcctgtgggcggtgcacgggctcaggcacaccgggaatgtgccacgggtcctgtgggcggtgcacgggctcaggcacaccgggaatgtgccacgggtcctgtgggcggtgcacgggctcaggcacaccgggaatgtgccacgggtcctgtgggcggtgcacgggctcaggcacaccgggaatgtgccatgggtcctgtgggcggtgcacgggctcaggcacagtggggctgtcagctctggcttgcagggtcaccggcctcactgtcgctgctctgagacagctctgtggggctctcaaggcagtgcagctccaggaagctggtgatgagcttggcgatggcttccacatcactgcggtggcccatgactgcactctgcgtgagggggtgggagaagcccgtcgcaagccggagcaccaccatgtagcctttcccgaagtaccggaccttctcctcctccacgctcacatcacggacatcatggagcaggaccaccacctggtcgtggccagctctgaaaagagtcagcagcttcttgtagaggctgaacgtcttcaaaacaaccttccctgtgctcttgtcgaagatggcttcctcccagtcctccaagttctgcacagccacaaacaggcagcctgtgacgtagaagagcttccagcccaggctatctccgctgtagtaggcagcagccaggccaatcgacaagattccaaccagcagggaccaggaccggatgcctggagccctcttcagatggaggcgggagctggtgcgggtctccacctgcaggtacatcccgagagggcagcaccactctctacaggaggaggggtcgagagcacagcggtccccgcgccgcagcagagagacgcgaaccggcgggggcggggccgcgcgcacttccgggattggagcggagccgagccgac

SEQ ID NO: 439348 - DNA, 1107 bp, Homo Sapiens
tgcacacctggtccatccacaggttttgcacgcctataacgccatactccgcttgtggagccccccacttgatccaaggcccacggggtcctgtggggcgggttcaacgggctcaagggaactacccgggaatggtgccaccgggttccttgtgggccgtcgcaccggtgctcaatgccacatcccgggaatgtgccacgggtcttgtgggcggtgcacgggctcaggtacaccgggaatgtgccacgggtcctgtggccggtgcacgggctcaggcacaccgggaatgtgccatgggtcctgtgggcggtgcacgggctcaggcacagtggggctgtcagctctggcttgcagggtcaccggcctcactgtcgctgctctgagacagctctgtggggctctcaaggcagtgcagctccaggaagctggtgatgagcttggcgatggcttccacatcactgcggtggcccatgactgcactctgcgtgagggggtgggagaagcccgtcgcaagccggagcaccaccatgtagcctttcccgaagtaccggaccttctcctcctccacgctcacatcacggacatcatggagcaggaccaccacctggtcgtggccagctctgaaaagagtcagcagcttcttgtagaggctgaacgtcttcaaaacaaccttccctgtgctcttgtcgaagatggcttcctcccagtcctccaagttctgcacagccacaaacaggcagcctgtgacgtagaagagcttccagcccaggctatctccgctgtagtaggcagcagccaggccaatcgacaagattccaaccagcagggaccaggaccggatgcctggagccctcttcagatggaggcgggagctggtgcgggtctccacctgcaggtacatcccgagagggcagcaccactctctacaggaggaggggtctggtctctgtggttgggcacgtcactggatcccccagagaccccgtttcctgtgtaaggaaggcccttttccgttcacagcgacaccgactgcgcgggggctgtttcccgctcagactcacgagctacagctgcatcaccacctcgtgccgaattcgccacccaggc

SEQ ID NO: 439349 - DNA, 606 bp, Homo Sapiens
gcgcgtgtgggtcctgagtgggcgggcagggtcagcagcgcaggaagctgcccagggggtccttgcaagcgtgggctctggccagcgtctgggggaggctgtgctaggcggggcctcccgtgggcatgtccctggagctcacaggctggcgccctatgcccatctccagatagcctgggctggaagctcttctacgtcacaggctgcctgtttgtggctgtgcagaacttggaggactgggaggtaaggccggctcgggtgtgggacagagtccagggctgttcagctcctgggttttttgcaatgggaatgaaaggaggaggaagggccctgggtggcctagcgcctccccgtcctgaagcgttggtgcctgcttggaggtctccgttcatcaggacatggcccctgcactcatctgggaccgttcttggccaaggaattccccgaaggcatttttctcttagaagctctccatgactatcttcaccaaagtgctttcttcccagagttgccacaatgggatgcgagtcagctttccccgtggccggccctcccacctcggagcccctcatgagtcctttcagcctggcccagtgctgccaactg

SEQ ID NO: 439350 - DNA, 398 bp, Homo Sapiens
cacgctgcaactgtttattccagaatcagaggttggaaacccaactgtatatagactgaaagcaaaacaaatacacaactgaacacaatatatgcagttatccagcaagacaggcaacgcaacacaatatatgcagttattgacaagacaggtgcacaggcacagcacacagagtgagatgaaggcagcctagcgagcagaggctctgcagcacggagggctgggaaggccatcgctcgagttaatccaatcccagtgcttcaggacaccttgggccaacgttgacatctctcttttcctgggaggagccctagggtacagctgcatggttccatggagtttcaggcgtctgccagctctgtttcactgtttgtggttaaactgctttctcctttttt

SEQ ID NO: 439351 - DNA, 1685 bp, Homo Sapiens
ggaattcccgggattgcgcgggcgtcagggcggcgctgagttgaggacgctggcggctccgcgacgagctttgttttttcggttgggcatgctgcttaccgcaggatgatggaagcgacggcccgtacaaagacagaagcgttggtttcactgagtcagtgctgattctctcaaatagagcttgaaggataaatcttcatttttgtttcaacaaaacttcgaaacaaaatggaagaaaataatctacagtgcagtagtgtggttgacggtaattttgaagaagttcccagggagacggcaattcagtttaaacctccactatacagacagcggtaccagttcgttaaaaatttagtggatcaacatgagcctaagaaggttgcagacctgggatgtggtgatacttcactcttaaggctgctaaaagtcaatccatgcattgaattgcttgttggagtagatattaatgaggataaattacgatggagaggggattcgttagctcctttcctgggggattttctgaaacctcgggatctgaatttgaccatcacattgtatcatggctccgttgtggagagagactctcgtttgcttggatttgacttgataacgtgtattgaattaatagaacatttggattcaggtgatctggccagatttcctgaagtggtatttgggtacctgtctccatccatgattgtcatcagcacaccaaactctgaattcaatcccctgtttccatcagtgaccttaagagattcagatcataaatttgagtggaccagaatggagtttcagacctgggctttatatgtggcaaatcgctatgattactctgtggagtttactggtgtcggggaaccaccagctggagctgagaatgttggatactgtacccagataggaatcttccggaaaaatggaggaaaggcaacagaatcatgtctttcagagcagcatgatcagcatgtttataaagctgtttttaccacctcatacccaagcttacagcaggaaaggttctttaaacttgtgttggttaatgaggtgtcccaacaagtggaaagcttaagagtgagccacctgccaaggcggaaagaacaggctggggaacggggtgataagcccaaagacattggtggctcaaaggcccctgtcccatgctttggaccagtcttcacagaggttgagaaggccaagatagagaactctcccacacccttctgtgttggagataaatttttcgtacctctgcagagactccttgcgtatcccaagttgaaccgcttatgtgctaatgaagagatgatgagatcagtcattgctgactcaattcctctgagcagtgatggttctgcagtggtggctgacctgcgtaattattttgatgaacagtttgagttttgaaccatgtttatttcctgaaatttcagggtctcagcgatagttgtgctcacttagaatttagttttttttgtgtaatcctaattcaagtaatgtttttaaagtttcactgcaaaagtctatgttccaagccattggacagacctgcttgagatatggccagactgcagtgagccctgagaaagatatgagggtttaaaacgggtgctttcctttgattttggacttttttgttttctcaagaataaagaagttggatgtggtaatatgttaaaaaa

SEQ ID NO: 439352 - DNA, 1219 bp, Homo Sapiens
  misc_feature (60)..(60): n is a, c, g, or t
ccccctcccctttttgtgtcacgtgcgtgtggggcggttccgagtctgattaaagagtgngtttgccgcacccccgttggtctgttggcgggttccggcgtcgctttgtttttcctccccatcaccggcccaaggtgtgttggggaaatgaaaccctctttttccctagaaggaggaaaaaagcgcttgggggttatatgaacgggcgggttaaaaaaagaccccaggtcgtttaataaagacccacttggctggttcaccaggggcgtgggtttgggggaaaaaggccccaggattttgcttgtttcgccccttttcccttcccaatttttttccgggaaaggaattcccttatctgggggttcccagttatcccaaccattgcttcaggctcccagctgggtggtttccccggacccccagtaaacttccacagaggtaatcatagcgatttgcccacatataaagcccagggtctgaaactccattctggtccactcaaatttatgatctgaatctcttaaggtcactgatggaaacaggggattgaattcagagtttgggtgtgctgatgacaatcatggatggagacaggtacccaaataccacttcaggaaatctggccagatcacctgaatccaaatgttctattaattcaatacacgttatcaagtcaaatccaagcaaacgagagtctctctccacaacggagccatgatacaatgtgatggtcaaattcagatcccgaggtttcagaaaatcccccaggaaaggagctaacgaatcccctctccatcgtaatttatcctcattaatatctactccaacaagcaattcaatgcatggattgacttttagcagccttaagagtgaagtatcaccacatcccaggtctgcaaccttcttaggctcatgttgatccactaaatttttaacgaactggtaccgctgtctgtatagtggaggtttaaactgaattgccgtctccctgggaacttcttcaaaattaccgtcaaccacactactgcactgtagattattttcttccattttgtttcgaagttttgttgaaacaaaaatgaagatttatccttcaagctctatttgagagaatcagcactgactcagctcgtgcgctctcacggtcggccttgggccccgggagccatcccgagaattccggaccggtaccagccatttgggtcggggtggggcgggt

SEQ ID NO: 439353 - DNA, 2379 bp, Homo Sapiens
ttttttttcaaagttaaaacacagttttatttactcatttataaatactgttgtgtttacaggcatcatatagaagtgaatattattattcccaaactttcaaacacagaatactcaaaactatataacaacaaccagtaaaacaaaaccattcatcttagggttgaaaggccactcaaaattgcataaaaatacattcagttcacaaagcaagtctggctgcttctccctaaacaaccccaaccccaccccatcccaggtgtatttacagtggactgaagttaatccatacaactcagctgaaaaacagttacatctggtgtgtgaaccttggtggaactagggtgaagggtggagtaaagacacaaaatgctaccactaaaatgggagaggcatggaaacctcagggtggttcttttcacccctgttgatcaaggtcagggcaaagacaagggggaaggaaaaccataaagccaaagtctgagtgtgaaccactcaactgagcacaggctgtagcttctccaagaagggtgcaagggtgaaacattctttccttccttctgcagggaaatcattgccctggtgtgccagccagtggtaggcacaacctttcaaaagttcaagggatgctggctagaaaaggaggtattctggattgctgcctcctctcagaaccctctcctaccccacagcctgcctcctggtgtcttttttcctccaaactctctttacctaacctctcttcatcagaaggcaagcgggaatctgttccgggtttcagtagagtgggagaaaggacaggcaaaggcacagatatttaggcgagagtcaagctacttctggcccttgcatgtcccttattcaggaatagtgggccccgacgactggcactccgactctcaactctggttttgggagaacattagaggctcttaagaggctccccaccatcagtgtgcctttcctgaatccttgctctttgaatgggctgagctgttgccaccagatgcactgatacactgattgattaggtttgtgctgggaagacacacttctgttttaagctataaacaaacagtctcaggataaagagtaaaccagacatggctactcatggtctccttggccaggctatggaggagtcatacgggcctaaaagtcaaacctcatctctgaggggacattagcatagccgaggagctttgaaactggaatagggggcggtggtggtggtggttggtatacccaacttctacaggaatcttggctgattcatggaaaaccacctctctaaagcaccctcggctccaagtgagaaaagcaaggaattaagaatgcagagggagatgaaagggagaggagtgaagtgtatgcttattctggaaggacataagagcatcctgatgtcaccttaaggggccacccaagtaaatctttattggaaacatcagggaaaaatttggaggagaaataacagaaaatatcactctggcagattcatggtccaaaataagcagatgaattggggaacagctcaaataggtcctttgggggattagaagggagggggaaaaacaaaagatatgatttaataaataaaattggtttctgagttttcatttgtaatcaagtatatgccagacctcattttaaaagctctgggctagcaaatgtgcatgtgaacgcacataagctagatccaagagttatccccaaattgctaaacctttttaggtaaggccagaacattcattaatggtattgtctttagacacacccacctcttacttacagttctcccgaaggagggcttccgggacactgggttgtaagccaaacctgggttctatgtttgccctcaaccccaactctcaaaggagaagtgaatgcatctttcaccatgcagctgctggctgctggccaagattctgtgttttttctcagccctcagaaatcacctcattcctagtagctgtgaccaacagttcctggactacaatgaagttgatctattttccaatctaatcagaacacaaaagatcaatagctgtccctgacagggtctactgcttcctgagcagtgtcaatacccattaaggaagctgattaaaatctctgctcagctggagcctgagggatgaagtcaccagtgagacagaactcatttctgtgtgacaaagctttgtttctgtgaaactctcttccttcccagtacttgcagcttccaccctgctctatgtccaaagcccctgggaaggaagagagtctccgtcgaacttcccgcagacttcagtgattctaggatctctggttctaaagattttactggctctatgctctcttctttgagtgactttaagaactcaaagaagagagtct

SEQ ID NO: 439354 - DNA, 2014 bp, Homo Sapiens
  misc_feature (20)..(20): n is a, c, g, or t
  misc_feature (34)..(34): n is a, c, g, or t
  misc_feature (417)..(417): n is a, c, g, or t
  misc_feature (420)..(420): n is a, c, g, or t
  misc_feature (422)..(423): n is a, c, g, or t
  misc_feature (559)..(559): n is a, c, g, or t
  misc_feature (564)..(564): n is a, c, g, or t
gcatttcatgcagctctgangtccactgcaaagngagacttgcacagtttttaatgcatttaaaaaataaaagggaggtgggcagcaaacacacaaagtcctagtttcctgggtccctgggagaaaagagtgtggcaatgaatccacccactctccacagggaataaatctgtctcttaaatgcaaagaatgtttccatggcctctggatgcaaatacacagagctctggggtcagagcaagggatggggagaggaccacgagtgaaaaagcagctacacacattcacctaattccatctgagggcagaacaacgtggcaagtcttgggggtagcagctgttcccagagtcaagaaataccgtacacccctggggagatttgctcctaaaaagaagtggcagtaacaaacaaaaaanaangnnaaacaaagggagaaatatttcttcaaccacactcttcaagaaaatgccataaatatgttatttaatattttaatttcatagcattggacacacactcaacatattgaaatattgattccttagagaaaaaaatggnaaaanagggaacaaaaaatattgcatctttctgctggagaatctcggcccccaggcatggggtgtagtgcaccagtgtcctagcctgcaggaggcgctgaggtcggccgggtcctctggggaggaaggctgtgcccattgcctggggctgtatggcaaaaattgtgttgggtgtccttggccttgccagctcaggccctcagtcgccggtcacctggggggcctgcccgtcggagggctggttggctgactggatgaacatgggctgggcgaggtcctggcccgcaggcatggtgacttgctggatctggtagagctgctgtccatctgtgaactggctgaactgctgctgtccttgctggacctctgtctgtgtaatctgttgagcattggtggcaagtgtctggatctgtccctgcacaacttgagtgcctgatacaggctgggctaagcggatatactgcagctggccggcattcagctgcaccgggatctgctggatctctcctgtgttagtgatgatctgctgcatcacctgcatggtctgtccagtgccactctgggcctgttgggcttgaccctgtggctgagcctggacaatctgcacctgctgaccttctccaacctgcattgtcacaggtgtggtctggccctgctgaggctgtgcgatgatgatctgcccaggctggatggtggtcgtggagctggtggtctgctggccttgctgctggccctggacttggacagcggtgggttgctgagccagcgtgaaatagtactggactggctcggcaggagttacagactggcgcacctcctcctgacgctttggaggtttcagttcatctcttggaacaatatcgatgagaaaatcaaactgatcaaattttgtaattgccatggcgatatcatttctctgtagagtccggcgcttgttatcttctgtgtgaatccaggctcgaagagtcaactctgtgataaaaatctgggctgccttggcaaagagtacaggcgcttctgcactgatcatcttcacatcttcatccagtttcataatcttcttaatacgagccagtgggagttcctgcactcggaagtctttcactgttaaattccggatttcttccatgacccgaggccagaacgactgtagactttgctgggcatcactgctgctagtaccaccaaatcctccttctgtggacatctcgacaactctgctcaggagtccaggaagagcaggagccgcccccgcgctcctacggagtcgggcaatgcagaggcccaggcgcggcggaggggagggggaagtgtgcgtcacggagaacggagcgcgcgcgaagcgggggcacaagcaagatggcggccacgccgtttgcaccgtttccccttttgccttccccctcccttggcgcctggactcccagtatcgtgcggtgcgcagaagctgtgctcc

SEQ ID NO: 439355 - DNA, 896 bp, Homo Sapiens
ggctaagcggatatactgcagctggccggcattcagctgcaccgggatctgctggatctctcctgtgttagtgatgatctgctgcatcacctgcatggtctgtccagtgccactctgggcctgttgggcttgaccctgtggctgagcctggacaatctgcacctgctgaccttctccaacctgcattgtcacaggtgtggtctggccctgctgaggctgtgcgatgatgatctgcccaggctggatggtggtcgtggagctggtggtctgctggccttgctgctggccctggacttggacagcggtgggttgctgagccagcgtgaaatagtactggactggctcggcaggagttacagactggcgcacctcctcctgacgctttggaggtttcagttcatctcttggaacaatatcgatgagaaaatcaaactgatcaaattttgtaattgccatggcgatatcatttctctgtagagtccggcgcttgttatcttctgtgtgaatccaggctcgaagagtcaactctgtgataaaaatctgggctgccttggcaaagagtacaggcgcttctgcactgatcatcttcacatcttcatccagtttcataatcttcttaatacgagccagtgggagttcctgcactcggaagtctttcactgttaaattccggatttcttccatgacccgaggccagaacgactgtagactttgctgggcatcactgctgctagtaccaccaaatcctccttctgtggacatctcgacaacttttattgcatgggtccctggacaggcctcatcttggcacaatctgccatgcaaactgctaaggtcaaaggagaaagatgcacaattgccaggacgatatctctgtacacttgctaatggatggg

SEQ ID NO: 439356 - DNA, 968 bp, Homo Sapiens
tttttcaatagtgtgtcctgaggcaggggttagctgaaagacaaagaaaaatggcgaatagtttgttggggggtgggaggacagctgttcgggttttcagtggagtggacattccagactcatgtttctgcatctcctgctgccttttgtttcctccgtcctttggggggtagggataggagtgacttaaattctcccagtcggtggaggtataaataactacatgtaaaattaatgcagttcccgttgtcgagatgtccacagaaggaggatttggtggtactagcagcagtgatgcccagcaaagtctacagtcgttctggcctcgggtcatggaagaaatccggaatttaacagtgaaagacttccgagtgcaggaactcccactggctcgtattaagaagattatgaaactggatgaagatgtgaagatgatcagtgcagaagcgcctgtactctttgccaaggcagcccagatttttatcacagagttgactcttcgagcctggattcacacagaagataacaagcgccggactctacagagaaatgatatcgccatggcaattacaaaatttgatcagtttgattttctcatcgatattgttccaagagatgacctggaaatctccaaagcgctcaggaggaggtgcgccagtctgtaactcctgccgagccagtccagtactatttcacgctggctcagcaaccaccgctgtccaagtccagggccagcagcaaggccagcagaccaccagctccacgacaccatccagcctgggcagatcatcatcgcacagcctccagcaggccagaacacacctgttgacatgccggttggagaaggtccaccagttgcaattggtccaaggtcagccccagggtcaagcccaaaaggcccaagtggcctgggaagacctgccggtgatccgccgaacatccttaaaccagggaaatccccaaaccgc

SEQ ID NO: 439357 - DNA, 549 bp, Homo Sapiens
  misc_feature (433)..(446): n is a, c, g, or t
tttttttatctaaaatgagatttattgcatttcatgcagcttgaagtccatgcaaaggagactagcacagtttttaatgcatttaaaaaataaaagggaggtgggcagcaaacacacaaagtcctagtttcctgggtccctgggagaaaagagtgtggcaatgaatccacccactctccacagggaataaatctgtctcttaaatgcaaagaatgtttccatggcctctggatgcaaatacacagagctctggggtcagagcaagggatggggagaggaccacgagtgaaaaagcagctacacacattcacctaattccatctgagggcagaacaacgtggcaagtcttgggggtagcagctgttcccagagtcaagaaataccgtacacccctggggagatttgctcctaaaaagaagtggcagtaacaacnnnnnnnnnnnnnncaaaggagaaatatttcttcaaccacactcttcaagaaaatgccataaatatgttatttaatattttaatttcatagcattgacacaccactcaacatattga

SEQ ID NO: 439358 - DNA, 1471 bp, Homo Sapiens
tagcggtccattagcgcgtctgcgtggtgttcatatggttcatgaatcgaatattgttttttagccttttggtacaatgtgggcatcggaaagatgtggcgaccttagggaaatttgtgagctgggctactttgccaccatcccgtccatagtagaagtcatctacaagcataatgagtttggtctggacggcatcgcccacgttctcatttggttctggtacttttggtagggcggtgacagagcaggaatagggtgtagaagaggggtgtgggaagcaacaggagctgttttctcaggggatgggggctttgctgctgatgggacactgggttctgaatccagggactttcctttcttctggtattcaaccatttctgggcaacagtactttcattgaagactcaggtccgctggttctttgagagccatgagcagagctgttgttggacaccaccactggcccaggactctggcccagggaagggatggtgttaagggtattcaccaatttggccacttcattgctattttcgcctgtaacaccaggtcgcttcacagtgacaaagctggcaatgctcactgcaggtggagaggggaaggagggagctagcttgggattcgtggtctggtttgactggcctggagactgaacagctagttgccccagtgaggttggctgtgtggcagtgggagtggtagaagtgctgggagtggacttggtctgctgggactgggactgtgggacggtgcttcgaatggtaagagtggccgggatgacggtggtgaaggtgttggtggtgggcctcacaggcattgtggagcctggcctcacaggggtcatctgggagaacacttgtggaactccaactgtcggcttaacaaactgggtacctggggctggaactagtgtaattggtctaaccgtttggccttgctgtacgttcagcacaatcccaacctgattcattgcattttgtacaggccggacattccttacaggaaatccctgcgtagtgataaatattggttgtgaggccacaggggaactagtcacatgattggcattctgcatgacctgaacaggcctcaatactggttgagtaaccattgtgcccagacctggggctggattctgggtcaggatgagtggctgtccaccttgctggaccaaaggattgccagcattgttgttggcaattagtgtgacaagagtcttctttgtactgtcgctgttctgtgccccgctgctactaacggtggtggatgtagagaggtgcccagcaacagaagcatgggcagcgatgggcactggagccgagactggctgctggctcacagaaactgtggtagttttatccactgaattataatcttcaactacagagtcctcaatgacatcactgattttctgccatggctccaactcctcctcctcacattccatgaacaggtcggtgtccgccatgct

SEQ ID NO: 439359 - DNA, 970 bp, Homo Sapiens
gaggtgtgagccactataccttgcggtttttatttttaaatggttgaaataaaagaataaaacttttcgacacatgaaaattttatgaaacttaaatttcagagtccataaatagtttttagtggagcacagccatgctcattcgtttatgtatctgtggctgcttccccaccacaacagcacagttaatagctgcaacagaggctatatattgtgcacaaagcctacaactttactactaggccctttacagaaaacatttgccgacccctgctctagaccactgaaaaccctcatgctcatcattctcaacctgaagatctctctaccaaatcctaactttaaaaccttgctcagaaatccatctcttccatgaagttatctttcattatctcacccatctttaatcaatcaatttcactaatctccaaagcacaattacacacataatttcttggagctgattcagttacactttttgtaagtggctttctccttactaaagtttctgtaagaacaaactacagcagctgtattttattttatttttctatttctgagtataaagctctgatacaacaaacactttattaatgtttttgaatgactggctgctcagagtctttcaggttattgtacctttcattgaagactcaggtccgctggttctttgagagccatgagcagagctgttgttggacaccaccactggcccaggactctggcccagggaagggatggtgttaagggtattcaccaatttggccacttcattgctattttcgcctgtaacaccaggtcgcttcacagtgacaaagctggcaatgctcactgcaggtggagaggggaaggagggagctagcttgggattcgtggtctggtttgactggcctggagactgaacagctagttgccccagtgaggttggctgtgggcagtggagggtagaagtgctggagtgacttgtctg

SEQ ID NO: 439360 - DNA, 927 bp, Homo Sapiens
  misc_feature (84)..(84): n is a, c, g, or t
  misc_feature (572)..(580): n is a, c, g, or t
gcagatataaagatttattgagggttaagattttcagcagggccaaaaatggcaataacagatctttaattggggttaatcctnaacgtgttgattaattgtgctgaataagaatggatttttcctgtgctgactttatttccatggaattacttggtaaagttggattagcaagatgactggtagttacttcaagaacttcttgagtttccaaagattgatgaatactttctgaatttgaagttgtcaaagtaatagttgtagaatttagattctcaaaacatgtgtgaaaacaccctctacctgtatcttggttaactgatgtttccaaggtagattctggtttcccagtatgttgtttaactagattaagagttaacatgttattttgtatacttcctgttttgggagctggtggctttaccaaggaagatgaatgaagtaattctggatgttgatggggcacatctgtgttaactatatttttctttgtctcatttaatacaaatgattcttctgacttggcttttgggcatacttctttctcatcttccaagtttttcttctgggannnnnnnnnagaagggtcttttcctgggaacccatgaatctcgcttcatattctttaaccacttttccagtctttctttgtcatgtagaggaaatggataaaaactcagcttccggtctttattgtttcgtccccggcggttcttacaacaaatcgctgcgcaatagcggggcatgactcgggtgaggcacctggagaccggggccggcgacggatgcagggcggccctcctcactgaggatgcgccacaggtccaggcctctcgagcccctgcgcctgcgctagcattctgccgggaaagccgcctcgtctgtcgactcacttccgcctcctccggtttaagcaccgccttttcg

SEQ ID NO: 439361 - DNA, 657 bp, Homo Sapiens
  misc_feature (572)..(581): n is a, c, g, or t
aaatttttttttaattagaaaccaagtttacatacggttaaatggttactaaaagctcagttgtaaccactcctaacaccactagcagaacctcaagggagccaagagctcttcccttttcccctgttaatttccagtataatgtagcagcacaattatttcatgtcacatttaagaagaacaagaaccaatttatataaagtacaattgtatatccttaaacattccacataaacacactgtcaaaactcactggatatgctggaattggaggacttaaatttctacatattatttattgcacccagagtactggttaaaatgcactttctgtgaagatcaaatgcaataacgtatgagggtatttttaacactgtgaagtacacacataatattataaaatgccatttaattggaaggagttttctatcattgcaagtcataaatgtaacttttaaaagaatactagcagcttttacctaggctcctaaatgcttgtaaatctgagactgactggacccacccagacccagggcaaagatacatgttaccatatcatctttataaagaannnnnnnnnngtcgtcagtttggcctttcctactgcagccaggtgagagcttaagatgtcagtccccaatatcttcacagagtgcc

SEQ ID NO: 439362 - DNA, 3554 bp, Homo Sapiens
ttcatgttgatagacactttattgtggcttgtttgtagtaaaacattcaacccctcaacatgggtatctgttttggtggtgtttttctgttggagactacagcgtggtgttcaaaggcttttagcctcatctcatatcagtctagtcagtggttgcctataatttgatagttcaatgagttagaggaaaatgtcaggaaaatctggtcttatcccaaattaagggctgcaagatttgtgacccattagtataaagtgcttatgttcagtgcaaaaaaggcagactcagaagggcaagcagacgccagagaaggacatttcctgggagatggatatgttctatgactcaaggaaggaaaagccaaactttagcccaaatgggtctagtagtttcattacagtctttctcctctctaacaggaccaaaacttctcatctgacagatgtccatgagttgtttattttactactaaaaatcttggttcagagggaaatccacagggtttctaagcaccagagacactgacttcagcttccagtttctgtttgtctcagcgtcatggatgggaccaatagtgctgagctctggccagtgagaggttcagagctgcagagctttgctttagggccccacatttgcaaattgaagtcactgagtatgacacaccttttctcaaacattgtcacatcttgcgtgggaagacaagacagtgcatattaaagaagcacttcacctagttttccaccaaccagatgtgacctattcattattccctcattctgactctgtccagaggcccaattccaaggccaacccttgactcccttttctaagacagagaaaagaagcgcactcccttcccaatgaccccacatgtctgcatatccatcctgtggtcctgaagagactgaagggaagcaggagggaaaaggaagcagcttcctaaccaattcaaggagcgcaaacaggactgcagctcaaataggtaaaatcgagtcattcagtcctaggatcctggccaccttttctctccccagactctcaaagaggaagtcccattctctcacccaccaactttgcagcagggacattcacaacaggcagctctgtgcttgtgagcacccgctccccccaccaccccccaccgcctcccctgtatccctgtttggatggttagcctttctttccctcttgcccgtgttagcctcacagacctgatcatttatacacatacccacagctttcagatgcctgcacctgaaaacccttctattcagactaccttccaaagactccaggacttcttgtgcttgggagaagagacacctggaaaacaggtttattccacaggtagcacttgccccaaagccatctctgaattttggaatgggaaggaaggaaaagaggcaatccttttggtgttgctctaattctctgtaaaagccctctaggtaagaggagctactaaagcacgtccacagaggggggactatacaaacaggacaacccgggtcaagaaccaaaacgcagggaaggttttcagagtggcaagtccaaagtaaagtgcctcttttaaatggagaagagtttcatttgttcagaaatgcttgggcgtaaacatcagcgcacaggaacatgcacacgtgtgtgcacacatactcactcactcactctgaggtagaaagaactggccatctccagacaaacacacatagattccaccattttagagaaacatggcacttgcgtgaaaggtcctatccttgcccgggaaggcaagtagggtccaatccaactctttccaccctagggcagagccagagaagtcccactccactggaggaaagaggtggagggcatcgccatcactgctgttgcccagctctcaggccacgtgttcctggccccactgcccaaggtcacttcctggagcctgggccatgggcaccccgggggtggcttgtcagaagccactgggcacagatgtcttgcactactgcatccccgctgctcttggcggcctgctgcacctgctggacaagggctgtggcccgtgagtgttcttgcttcacagcaatcaagtaggcagaacgcagtttgcaacatatcaggtaggcccgaaccttgttgtcatcattgtgtattgcttggatcaggccctccagctcctgggtcggaattctcttgaacgcttccaggcagttgaggaggatggtgtcccgttcacttttggctgccatgcctgactcactgacacatttgagcagttgctggatctcactgtacttctctttctccaccaactggcgggcagctctgcagtaggtcatggcagcatccagctggaagtcctgcagaacacggaaagcaattccaaaaaccatcttctacatttttccctcccagcatgaccttgcaggcaacatccattttcatgtggttatttccaaacagggttggcagaggcaaagtggtgatttgagaggtcccagcactttcgcaccgatgcaagaacctggtcacttccatctgcagctgaagtgtgttcatgtgccttgacacatcagctgcagtcatcttctttctgaagaatgtggttttcttccttccagagctgcgggatgtttcttggaggtagatcttcaggtggtccttggccttaagtagccatgagagcttctctcccagttctgtatatgactttgctttgtgactgaagaaccgaatacaggtcatggcggcccgaacttggtccttcataaactgctgcagctcatacagaatgtggtagtagttcttcttctgtaaatgttggcaggcagcaatcaagtactttccccagctctccaaggttggatcaatggattctagcaagttctccaaagtgtgtagcttcccacttttatagcttggttggaaaatgccttctataaaaacttctggaggactctccttgttgagaaggtgcagaagagcttcccgcaggcagctgtgcctcacgtagaagctgatgatggccaggttggtgctatagttgtgcaggtagaagaggcattcctggtagtaggtgttgttcatgattttcccttcaggaatcactgccagagaaaggctctgcgtccgaagggtagcttccagttccctcagggtggcaaagtaatcgtcatcttgcaaggatacaaagggcctcactgtggactctaggtactcaaccacatcctgcaccagccttgagccatgattcagctgattgaggtcaaatgggggcttcagacagcgactgaacttctcccgtgcagcagtgaggttcccggctttgaggcaggccatgccccaagcatgccacgccccggtggtatcaagcccagtctttgtggagacctcaacgcccagttggtagtactcggcttccaaaagctggttccttagcctggttactgcagctggctgcaagatctgatccaaagatggcacgtggcgataggcagcagcaactaaaatattcagcacatctaccttgctgatgtagctgtcacaaagagccaagtcttggc

SEQ ID NO: 439363 - DNA, 1598 bp, Homo Sapiens
  misc_feature (9)..(9): n is a, c, g, or t
  misc_feature (11)..(11): n is a, c, g, or t
  misc_feature (13)..(14): n is a, c, g, or t
ggctgtgcntngnntcttagggccagctaccaaaggggtctccacattgtcagttttaaccaggagcaaacggtttttaaaacaccacctttacctttttataatggggagatgaagagaagaaaattgtgcgtcaaatgttttcgaatactcatatccatatgtggaaatagaaattaaaatatcatcgtaagaagttataaaaagcatttgtgcagaaccacaatattttgatactattcaaacaataatatctatcttaaggtttgaaagaaagtataacattaggcatcaggtttttttactttctagtttatgattgagaattaaaccacaatataaaaccaaaaatattttcaaagagaatttagaagttatgttgatttatgcaagaagtaatgttatcatattattaatacattaattaatacagctacatttaaaaccctgtagacatgggtgtacataccaatattttttctctttattaacaaatagagggaaattatatgctactgttaatctaatttcctgcttcacaaccctcttttaatttctgacatatgtttatgtctgaaacagaagagcaaagcacttgcaaacacccctgagttaagcctaacacttcgggaactcttgaggatttgagcgactggtgtggagagactgtcagtatgcagtgccctctgctggccaaattattaaacatcgcgataaacaaaattcccaagtgttaatattacaatgtgggggaataaaactaagattattttggaattagccctataattccggagagtcaccattcactaccataattccttagtgaacagagatttacttttatggaacaaaacaagcgcaaagctacctggtacaaagaaacatcccctgccaagaatggaatagagagtgagacttcttatgcctgcccaggtctcaggtccaaagtcaccccaactgttacctctttctcaatcttaccgcccctcctccatgtcccacagcctctccgtgctttcacttcccagttctgctgcaatctttcagcttgtatcttctcattggaactgtgagctcatccagcagagatatgtgtcactcctcctggaagcctcggacattacaaaaattcagtaactgtctgtccagtttgggtttcttcaaaagctgtagaattaatcatagggccagaatcagcaatgttgcaatgcagttcccggtgatgaatttaggaagttgtcctggaccccagaagtgagacttttaatcatgaagagtggtgaacacaatgtgtgtggcataataaacctctggctgtgtattcattaattttaaagaagaaaacgagtacaacattgctgctaagacttagacgggcttctgtgtagaatttccatttggcttccaggacagattcttgggttcagaggccaccttaagaaggggggaaggaagagagagaaggcaaacttctgggccaagtttcaggggaggtggaggcaaacctctgagacagagagagaaaggcaggcctctgagacaaagagaaatcattctgggctcctttgtagggttcaaactgattcggttttatc

SEQ ID NO: 439364 - DNA, 1806 bp, Homo Sapiens
  misc_feature (1531)..(1531): n is a, c, g, or t
  misc_feature (1573)..(1573): n is a, c, g, or t
  misc_feature (1629)..(1629): n is a, c, g, or t
  misc_feature (1673)..(1673): n is a, c, g, or t
ccttttctacacctttatttatgaaatgcttattgaacggatacaaagttagtgtctgtcagcaggctggtggagggagttaatgtgccctccttccttcccctggtgggggctgaagccagaagtggctttatccttccctccaccttggcagcaatgggctgggagggccctgggacagggagggggttcaagggcaggaagaggaagggaacaatgggtagtagggcctggggcagagcccccttctcctggaataagaggcttgaccctgctcaccctggcaggagctgtgcttctcctttgcagcatggagaagtggtttgcactgggcagcaggggggatgagctctgggactctctcctcctccccagcccagggttgggagtgcccttttcagctatttctcacgtaagggtcctctgtaacacctctagttcccttcaggaatgcctgcctccccagatctcaaagggcactgccctcagtccttggggttaaggggcagggagccagacgtggtggggcacagcagctggtgacctctccctgacgggggcctcaactatgtccacacttctagggggatcatgccctccttgctacccagcgggggcagcaaagactcatcctctaggaacttgagggggaagtggaccaggtggccctggacctgggtgagctcagaccgagccaaggggggactgaccgtggccaagggctccacggccacgtactcccggagagtccgcagggaacgcgtggcattggatggcaggcagcggaagatctgctcatagatattggcgttgctctcagccatgtcttgccacaactggaagaagtcatcacagatggggtctcggagatccaagtctggccgggtatttgctccaaagaatccacaccgaaggcagtgcttccgcagactcaaggcaaaacctgcccgccctgatactctgccccattcatgagggatggttccgtctctgtgtcctcgatcagcacggccagctcactgtcccgcttccccagcaagctccggtcattgatgtttgcagaaccaatgatgactgtccggtcatctgcgatgagcaccttgctgtggatgtagatgagctccgagacggggtgcccgcccagctctccgtgtgtacgaagcccgcagatggaaatatagtcccgccatgctgtccccatggctgctttaaggcgatgcaggattgaatactccccacgacacagggtcctgtaagtaaagtgcagaatggcctggatggagttgccaccgcccgtggagatgtcaccctcgaagccagggagtaagggcaaaagcacgtagactcggtaacaccacccctgtttgtgggccttcaggattctgtccacaatctcatcgcccaccttgttcagaaccgtccgcccatctgagcagctaatgaagaactgattctggggcaagaatcagagacagacatcagcagcctggcccctggccctgtcctcggcctccagccttggtcccaggcnccaggcgtctgcttctgctccaccagccctcaatgactgacnccactcattccccaggtctctctcctgggacaccccttccatgctctcccccaccncctcccagtcagacctcaatgtagaggaagtgctggctctcccngatggtgtgcaggtaggcattgaggatggagttctccagagtccctgctgaccagcggtccactgatcgcaagacctagggaatggtgaatgcgatgtgcttcatttcttttcttttttaagacagaatcccg

SEQ ID NO: 439365 - DNA, 651 bp, Homo Sapiens
gattcaacaaggacaagttcaagtattctttattcaaagttgaaaaatgtaccatactgcattattgcaaaaattcactggtacaaaacactttgcagctggtgagaaggcaataaaaagttgatttttaaactcattactataaattattcttacagtactttgcaaattcagaatttcaaactgcatgttctttttctaaattgcccacagtactcgaggttcctgaagctaaggcagctgtttcagaggagggggaggaggtagcagatgtcaagggatttccatttctctttcgatgccgacatacttcagggcatcagcctggctgtatctgtaatcaaaaaacagctcttcgccagtctggatggctctcttggcaaaaatacctatcctgtgatcaccgttaaccatcataacttttgcatagcagtttggatttaccgaatgatttgcaaaacgaattttgttacccttgcgggttgcatccaccacaaaatcattgttccagttgaacagaaagctgcacatgtatttatcatacactttccctcttctgtcagcttcatcttgagaaataatctcttcacagtattctgagatgaattcatttttctgcacaagatctttgttaaaattccccacctgcca

SEQ ID NO: 439366 - DNA, 1098 bp, Homo Sapiens
  misc_feature (974)..(974): n is a, c, g, or t
  misc_feature (982)..(982): n is a, c, g, or t
  misc_feature (1018)..(1018): n is a, c, g, or t
  misc_feature (1025)..(1025): n is a, c, g, or t
  misc_feature (1073)..(1074): n is a, c, g, or t
  misc_feature (1085)..(1085): n is a, c, g, or t
  misc_feature (1087)..(1087): n is a, c, g, or t
  misc_feature (1090)..(1090): n is a, c, g, or t
ttttttttagagcaaatcaacttttatctccaccgaaaagacccattccactggaggggcccgtgagctagacggacttgccgtccagccctccaagccccctgcggggcggccaggaggatccctgagtccagcttgtaaacaccagagccagccctggagcctcaggcctctggagtcacggcagcccctccagacccttggattggggacatctgaggcttcacgagcccgggcagagctgcaccctgggctgtccactcggtcaccccagtaccagggaccacctcgaagcccccctctggtcggcccacagagacctgctcaggcttcagcaatcgtgagtcatgattcgtgtcttctggaggaagcaggcggaggctccagcggcccagcccaccccgcatcacaccaagactgacggcctcacttgtcctcacggtgtcctgattaaagcagagacgaggaggagcccagagccagttcagagcctgggccacttggcggttgccggtgctacgtgggcccttggaaaatgccacagacccagcaaggtgcctctgcccacccgaagtccccacaccagcagccatccaccctaggcaggggtccagataggcagagggtgggcttcggtgttgaacacgtaggcgtccaggctgagcaggtttgggtcatcggagaagagcaagaacagatacttgagcgtctcccccaggaagaagctctccatcttgtccctaggctcgggcttctgaggatcctggacattgttgatggaagaatagccacccgaggggacccgtgtgaatcggctgaagctctgcagaatctcccagccccagtcctggtatttgcggtcccctgtgacgcggtacaggtagaacaggctctccacggtctctggccgcagcaggttgtgcctgtctgctggcttgacctccacgtcccgacggcccggctgggggtaaagntgaagtgncgatctcgggactcagcccgtctccatctgccggtnatctggnacaagtctcatgagctcctgggcagctccatgtggtggcgggaggcgnngtagacgccanancancgtcctgg

SEQ ID NO: 439367 - DNA, 2163 bp, Homo Sapiens
cctccaagtgtcttttttgtgtccccccaccccggaaagcttcagtggggatgggggaatcccaggggccccccaaggttgccggtgtggcccaccccgagggttggcgggaaagcccggccccttccggggatccaggttcacagccaaccacccaggaggggagccaagcttgagcccccacagccccaagccgtgcctggtggcccgggtggccgtggccaccgcggggggaggacaggtgctcacccgtgtgaatcggctgaagctctgcagaatctcccagccccagtcctggtatttgcggtcccctgtgacgcggtacaggtagaacaggctctccacggtctctggccgcagcaggttgtgcctgtctgctggcttgacctccacgtcccgacggcccggctgggggtaaaggttgaagtgcacgatctcgggactcagccccgtctccatctgccggttcatctggtaacaagtctccatgagctcctgggccagctccatgtggctggcgggcaggccgtggtagacgcccagagccagcgtccctggcaggaagcacaccaggtggtccatcttggcactgaagcggccgtgggcaagctcccccacaaaggtgagcttactgggctcggagtgccgcagcaggtgcgttctgacaccctcgatggcttccacgtagtcttccagcagctgtgtctcctgcttcccgccctggatccactgcttcagcaggtactcatagtagctgtcggccctggcgcccagcgtgaatacgcccaggtgggtgaagaggccactgtgggtattgatgaacatgggcaccagcccatccttcttcccagacaggccgtggatgtgctgtgtcaccttctccactgcctcctgaaacttcttatcccctgtgagacgggagagctcccggaactccagctgaatgctggtcacctcggccacagtgctgtcggaggtccaccgtggcgggtgggcaactccagtaccgatgttcacatccgagtaaggaatcttggatggtgttctgaaggcaggcattagccgatttccaaaatcctcagctttcctcaggaagaggctgtccccagacaggtggtaggcactcaggagcccccccaggatgcggatcgtgctctcaaacaggttgacgtccacgtccttttcaaagtgtaacttcttcgacacccacttcctggcttcctcaaattctttcctcagacccaagatccacatggtgtccagcgcgtcgatcagtgtgagaccgaggccaaaccactcactgaaggacctggacacaggcttcagctcgtcatggccccatgcaaacttgcggtatcctttccatgcatgcaggaagacgtcaatcacgcccttctggcgatagttcagatgcactggtgtgccctgtgtcctggccggtggcaggggaggcttggtgggcacttctgctcttcttgaagggagctcggtgccctgctcaggctcgatcaccgctcccctccagctgatgactgtcctctgcggatctccttccgggcggggatccacaggggcttcttgcctttttgtggcctcctcctgggtcccatccttcaggtcttggcttgggggtctaatctgcaggtgaggtggtccccgctggatgtgtctttgtgtcttctgtgacgaaatctcaggtaagttctcagggtcggtgtccgccttctgaggagctggtaagacgggtggatttgctggttttaacccagcaatttctggcctcatcttctgctcttcctctagcctgaaagccagagctttccaatggtcagccaagttgatgtagaagaggagtccacagaaaagcagaaaggcaaggaggaagagaatcatattccgctgcaatctcgacagttgcttccatttcctccagcacgagcgccgccgccaactcttgctgttgtcatagctctcgccaaagctcagcgtcaccgagatgaagtcccgatgaggcggcggcggcggcggtgggtacatgactacagtggtggcgacggccacaaggggccccgcccactggcggcgtcaggaagtccgactgagaggaaccgagagctccgcttctcctgccctcgcaggcagccatcgcagcgccgtcaacag

SEQ ID NO: 439368 - DNA, 978 bp, Homo Sapiens
gttctctgaagatattcaatcttagtattttgagcactaattgtactttatttagggtatccctatgtttcatgtggaggccccttattttagcagcaagacatactggcaggttaaaactgctttattattatttttttaacatagaagaagcttggtagtggacatgtggccatttgatgtttttatgactaagagagttcaggctcaatctcttacagaatgtaaatgtacccctatgcatgcatatgtaattcttatcaaaattaagcttaatcactaaaagaagattcgctatctgaactttcttctacagttttctcactttcgccatcaggcactggagcatctggcctctcaagaagatctgggtctagtccttctgatatcattttgtttcttattgccatcactggtacacccacttgaaccattttgagatatctggcatatcttggatccttggctacagttaagatattttctgctgatacttcactttcctgtagtccagagtcttgtgtactgttctgctgtggttgctctgaagtggcttcaggatgtgctccatttgtgacactggtgacatttaaaggagatacttcaactgtgacatcatctaggcctgggatagatgacaactttgcatctaaaatattgagagttgtttcaatttgttggatacgaagtgaaaggtctgccagtttctcctcacaaactgtagaaaagcggttgaggaactgtacagtgtgcaccacaaattggtttagaaaagccaccgttcttttctgttgaatagctggcaccttggtcaggtctatgcctgaccccatgagaggaagcccgtcctcatccatctcctcagcgggcggtggaccccgagttcacccacaaacccctcccagatggggcccgcccaacccggtaatcacgtctcaactttccccccaagtgcccgcctccggggcccttcccccc

SEQ ID NO: 439369 - DNA, 999 bp, Homo Sapiens
  misc_feature (4)..(4): n is a, c, g, or t
tgcnacaggtcgatcagcataactgctttcagcactcctccttggttccatagtcacagaattcttgcacttgggcccgacctcgagagcgaaatttttcaacaatggatttgttccttggctgttgtagtatttaatagctctaggatctcctgactgaccttcttgctctgttgttccttagtggactgttggttcagaaggctctctatctccagatcaacatctgaggcagcatgtttccttgatttcttggctggctcctttgctggttccgatgctgaagagttcagaccagagactaacgaactggcaaaggcagctactgtagtcgagtcctgttctgcacgccgcttctgccctgtgacagtccctgctacctccccagggcccttcttttctgccacagcacccatcatggcagagagcttggaatggtcagcataggttacaagagtaggatgtgcatcatcttgtaggagacctcgctttacctcaatcaactcctgagctgcaaacttctgcaggaggctttctaccccatcttgagtggcaggagcatctggcgtggagatggcaagacagatggacacagcatcagtgggcaatgttaaggccagatcagagaggtggtgtagcaacttcttctctaactcaggatctgtagctaattcaggaactgctgaagctgtgctgggcttagggccaccagaggtgggtgcagtaggcactgggctgtcactacggaaggttggagacaatgctgcctctggattccgtagatccaagtgccccgagtcctgcttccgcctccgctgcagcctctcccgcagagagtccagctgcttcttgtgggcctggatagagctccacgtgtccgacatcctagtctcccagccctgacacctctcgaataaggcgcggcggactagcacctcccagcactcgctccaggatatagccaattctcacgcggacaccccgaaggcaaaccccgct

SEQ ID NO: 439370 - DNA, 1782 bp, Homo Sapiens
  misc_feature (1681)..(1681): n is a, c, g, or t
cctaagcccagcacagcttcagcagttcctgaattagctacagatcctgagttagagaagaagttgctacaccacctctctgatctggccttaacattgcccactgatgctgtgtccatctgtcttgccatctccacgccagatgctcctgccactcaagatggggtagaaagcctcctgcagaagtttgcagctcaggagttgattgagcatcggaaccagcaaaggagccagccaagaaatcaaggaaacatgctgcctcagatgttgatctggagatagagagccttctgaaccaacagtccactaaggaacaacagagcaagaaggtcagtcaggagatcctagagctattaaatactacaacagccaaggaacaatccattgttgaaaaatttcgctttcgaggtcgggcccaagtgcaagaattctgtgactatggaaccaaggaggagtgcatgaaagccagtgatgctgatcgaccctgtcgcaagctgcacttcagacgaattatcaataaacacactgatgagtctttaggtgactgctctttccttaatacatgtttccacatggatacctgcaagtatgttcactatgaaattgatgcttgcatggattctgaggcccctggcagcaaagaccacacgccaagccaggagcttgctcttacacagagtgtcggaggtgattccagtgcagaccgactcttcccacctcagtggatctgttgtgatatccgctacctggacgtcagtatcttgggcaagtttgcagttgtgatggctgacccaccctgggatattcacatggaactgccctatgggaccctgacagatgatgagatgcgcaggctcaacatacccgtactacaggatgatggctttctcttcctctgggtcacaggcagggccatggagttggggagagaatgtctaaacctctgggggtatgaacgggtagatgaaattatttgggtgaagacaaatcaactgcaacgcatcattcggacaggccgtacaggtcactggttgaaccatgggaaggaacactgcttggttggtgtcaaaggaaatccccaaggcttcaaccagggtctggattgtgatgtgatcgtagctgaggttcgttccaccagtcataaaccagatgaaatctatggcatgattgaaagactatctcctggcactcgcaagattgagttatttggacgaccacacaatgtgcaacccaactggatcacccttggaaaccaactggatgggatccacctactagacccagatgtggttgcacggttcaagcaaaggtacccagatggtatcatctctaaacctaagaatttatagaagcacttccttacagagctaagaatccatagccatggctctgtaagctaaacctgaagagtgatatttgtacaatagctttcttctttatttaaataaacatttgtattgtagttgggattctgaagtccattctggctctgctacttaacagtgtataatcttgtgcaactcatctctcagtattatatgtgaaatgggagtattacctcattgggttgctgtgaaggttcaaactaaatgagtgcatgggaaacattaaaatgatcattataggctaggcacagtggctcacacctgtaactccgagcactttgggaagccgatggtanggagggtaactgtagcccaggagttcaagactagactgggcaacatagtgagaccccatctctactgctaccctccaaaaccattaaaaaaacctgaatgc

SEQ ID NO: 439371 - DNA, 2189 bp, Homo Sapiens
acaatacaaatgtttatttaaataaagaagaaagctattgtacaaatatcactcttcaggtttagcttacagagccatggctatggattcttagctctgtaaggaagtgcttctataaattcttaggtttagagatgataccatctgggtacctttgcttgaaccgtgcaaccacatctgggtctagtaggtggatcccatccagttggtttccaagggtgatccagttgggttgcacattgtgtggtcgtccaaataactcaatcttgcgagtgccaggagatagtctttcaatcatgccatagatttcatctggtttatgactggtggaacgaacctaggaaataaaaactagctgctttttaagttacacaagattgcaattctagcccttttctattatgtttatgatctaaatgagaaaaatctgggatgagaatacacccaacatgaataactgataccaacaaaaatgtggaagctttggaggcctgggaagcacatacctcagctacgatcacatcacaatccagaccctggttgaagccttgggcgatttcctttgacaccaacctgctcaccacagataacagattaccttatgaaaccacacctttgaactttttctcagtaagaaatcaaatgattcttctttgtgctccacctattgaattgggccccactgctgctcaccaagcagtgttccttcccatggttcaaccagtgacctgtacggcctgtccgaatgatgcgttgcagttgatttgtcttcacccaaataatttcatctacccgttcatacccccagagatttagacattctctccccaactccatggccctgcctgtgacccagaggaagagaaagccatcatcctgtagtacgggtatgttgagcctgcgcatctcatcatctgtcagggtcccatagggcagttccatgtgaatatcccagggtgggtcagccatcacaactgcaaacttgcgcaagatactgacgtccaggtagcggatatcacaacagatccactgaggtgggaagagtcggtctgcactggaatcacctccgacactctgtgtaagagcaagctcctggcttggcgtgtggtctttgctgccaggggcctcagaatccatgcaagcatcaatttcatagtgaacatacttgcaggtatccatgtggaaacatgtattaaggaaagagcagtcacctaaagactcatcagtgtgtttattgataattcgtcttaagtgcagcttgcgacagggtcgatcagcatcactggctttcatgcactcctccttggttccatagtcacagaattcttgcacttgggcccgactttcttgctctggttgttccttagtggactgttgtttcagaaggctctctatctccagatcaacatctgaggcagcatgtttccttgatttctttggctggctcctttgctggttccgatgctgaagagttcagaccagagactaacgaactggcaaaggcagctactgtagtcgagtcctgttctgcacgccgcttctgccctgtgacagtccctgctacctccccagggcccttcttttctgccacagcacccatcatggcagagagcttggaatggtcagcataggttacaagagtaggatgtgcatcatcttgtaggagacctcgctttacctcaatcaactcctgagctgcaaacttctgcaggaggctttctaccccatcttgagtggcaggagcatctggcgtggagatggcaagacagatggacacagcatcagtgggcaatgttaaggccagatcagagaggtggtgtagcaacttcttctctaactcaggatctgtagctaattcaggaactgctgaagctgtgctgggcttagggccaccagaggtgggtgcagtaggcactgggctgtcactacggaaggttggagacaatgctgcctctggattccgtagatccaagtgccccgagtcctgcttccgcctccgctgcagcctctcccgcagagagtccagctgcttcttgtgggcctggatagagctccacgtgtccgacatcctagtctcccagccctgacacctctcgaataaggcgcggcggactagcacctcccagcactcgctccaggatatagccaattctcacgcggacaccccgaatcccgggaattccggaccg

SEQ ID NO: 439372 - DNA, 281 bp, Homo Sapiens
gcaacccaactggatttctggtttgcccctccttttacactgtttcaggatcacccttggaaaccaactggatgggatccacctactagacccagatgtggttgcacggttcaagcaaaggtacccagatggtatcatctcctaaacctaagaatttatagaagcacttccttacagagctaagaatccatagccatggctctgtaagctaaacctgaagagtgatatttgtacaatagctttcttctttatttaacataaacatttgtattgtagttggg

SEQ ID NO: 439373 - DNA, 1014 bp, Homo Sapiens
aacctgttttaaaggaaagaagccttccctaaaaggattatccaggggggttattgataattcgtccgaaagtgcaggcttgggacagggtcgatcagcatccactggcttgcatgcactcttcctggggtcccatagtcacagaatcttgccacttgggcccgaccttcgagagcgaaattgtttcagcaatggattgttcctttggctgttgtagtattttaatagctctaaggatctcctggctgaccttcttgctctgttgttcccttagtggactgttggtttcagaaggctctctatctccagatcaacatctgaggcagcatgtttccttgatttcttggctggctcctttgctggttccgatgctgaagagttcagaccagagactaacgaactggcaaaggcagctactgtagtcgagtcctgttctgcacgccgcttctgccctgtgacagtccctgctacctccccagggcccttcttttctgccacagcacccatcatggcagagagcttggaatggtcagcataggttacaagagtaggatgtgcatcatcttgtaggagacctcgctttacctcaatcaactcctgagctgcaaacttctgcaggaggctttctaccccatcttgagtggcaggagcatctggcgtggagatggcaagacagatggacacagcatcagtgggcaatgttaaggccagatcagagaggtggtgtagcaacttcttctctaactcaggatctgtagctaattcaggaactgctgaagctgtgctgggcttagggccaccagaggtgggtgcagtaggcactgggctgtcactacggaaggttggagacaatgctgcctctggattccgtagatccaagtgccccgagtcctgcttccgcctccgctgcagcctctcccgcagagagtccagctgcttcttgtgggcctggatagagctccacgtgtccgacatcctagtctcccagcctgacacctctcgaataaggcgcgc

SEQ ID NO: 439374 - DNA, 1014 bp, Homo Sapiens
  misc_feature (79)..(79): n is a, c, g, or t
  misc_feature (820)..(820): n is a, c, g, or t
tgaccagggttcgatcaggcatcaactggcttttcatgcaatcctccttgggttcccatagtcacagaaattcttgcantgggggccggaccttcgagagcgaaatttttcaaccaatggattgtttcttgggctgttgtagtatttaataggctttaggattttcctgcgtgaccttccttgctcctgtggttccttagtggactggttggttcagaaggctctctatctcccagatcaccatctgaggcagcatgttttccttgatttcttggctggctcctttgctggttccgatgctgaagagttcagaccagagactaacgacctggcaaaggcagctactgtagtcgagtcctgttctgcacgccgcttctgccctgtgacagtccctgctacctccccagggcccttcttttctgccacagcacccatcatggcagagagcttggaatggtcagcataggttacaagagtaggatgtgcatcatcttgtaggagacctcgctttacctcaatcaactcctgagctgcaaacttctgcaggaggctttctaccccatcttgagtggcaggagcatctggcgtggagatggcaagacagatggacacagcatcagtgggcaatgttaaggccagatcagagaggtggtgtagcaacttcttctctaactcaggatctgtagctaattcaggaactgctgaagctgtgctgggcttagggccaccagaggtgggtgcagtaggcactgggctgtcactacggaaggttggagacaatgctgcctctggattccgtagatccaagtgccccgagtcnctgcttccgcctccgctgcagcctctcccgcagagagtccagctgcttcttgtgggcctggatagagctccacgtgtccgacatcctagtctcccagccctgacacctctcgaataaggcgcggcggactagcacctcccagcactcgctccaggatatagccattctcacgcgatcccgggaattccggaccg

SEQ ID NO: 439375 - DNA, 763 bp, Homo Sapiens
ttttttcttgtgtaacttaaaaagcagctagtttttatttcctaggttcgttccaccagtcataaaccagatgaaatctatggcatgattgaaagactatctcctggcactcgcaagattgagttatttggacgaccacacaatgtgcaacccaactggtaaggtgaccagagaacaggctagtcctcaaggggctattatttatgattaaggacagaacttagtagagcttcacattgttttacactagtccataaatgagcttcacaggattcataagccacttaagcttgtatttaaactgttttatgagattctacaaatattcattagaaactcaacaggttctaggacccaaaagcactgctccctagggtttctactctctttcacaacccaagggatcttcctcagccattctgtgatgtattgaatctgccccctggtggttacgaagttatctatttaatctgtcaataattacatctttcaccccttaacagagcttaaaacacatgctgctagcattttgcttatccaaagaatactccctggtagcaactctgtgaagccagggcctggctaagcattagttactaaccctcagataatacagatccagtctattttaacaccagaatctatgccaattctgaactagtaattctaccatatactattctaatgttaagctctttttagaattggcatatttgatatgatgataggcagtcttcatttggtatgcattttttaacaatac

SEQ ID NO: 439376 - DNA, 811 bp, Homo Sapiens
  misc_feature (355)..(418): n is a, c, g, or t
ggacttgagccttttttaaccttaaagcgtttcccagagagcaaacagaaatatttcctatggcattttacctaattaagtcttcagctcaacactgaaagacttttcaatttaaaaatcatacaccacatttatgtgaaaattttatttttctttttattgcaaatttctggtaaaggaaagaacatggaagctgattctcatttgagctttggtgagaagagaactgcactgtggctcgacagctcaccacctcggctgcacacccaaacacgcggaggcctcgggcacgcactgatgcctgcgacccacctcccagaggttctgacttaatcggtctgggaggcacagcggnnnnnnnnnnnnnnnnnnnnnnnnnnnnnnnnnnnnnnnnnnnnnnnnnnnnnnnnnnnnnnnncggtggctcatctcaaggggctggcaatgtcagaagcacctgagaagctcagctgacagccaagtgtcacctgcttacatcactccttggccagagtccagctggtgttccccgcctccctcttcccaggtgtcgatgttctgattccttctcctcaaagaccccacaagacagagatgctggagggggtgtggcttcctgtgctgtggtttgtgcttaaacgtggagaaccacatgaaccacgtgtacgctaccacaaaagaaattcactttctgattgcaaaacagcattcgccctttttttatttgttaagtgggaatttgtggcaaaataagaaaatatgtgttggataatatagtcccctatataaccctctcatgtcccaaatttgg

SEQ ID NO: 439377 - DNA, 266 bp, Homo Sapiens
  misc_feature (19)..(19): n is a, c, g, or t
atgtgaaaattttattttnctttttattgcaaatttctggtaaaggaaagaacatggaagctgattctcatttgagctttggtgagaagagaactgcactgtggctcgacagctcaccacctcggctgcacacccaaacacgcggaggcctcgggcacgcactgatgcctgcgacccacctcccagaggttctgacttaatcggtctgggaggcacagcggggcatcagtagatttcccaactcctctgggatgatttcaacatgt

SEQ ID NO: 439378 - DNA, 480 bp, Homo Sapiens
  misc_feature (197)..(260): n is a, c, g, or t
attgcaaatttctggtaaaggaaagaacatggaagctgattctcatttgagctttggtgagaagagaactgcactgtggctcgacagctcaccacctcggctgcacacccaaacacgcggaggcctcgggcacgcactgatgcctgcgacccacctcccagaggttctgacttaatcggtctgggaggcacagcggnnnnnnnnnnnnnnnnnnnnnnnnnnnnnnnnnnnnnnnnnnnnnnnnnnnnnnnnnnnnnnnncggtggctcatctcaaggggctggcaatgtcagaagcacctgagaagctcagctgacagccaagtgtcacctgcttacatcactccttggccagagtccagctagtgttccccgcctccctcttcccaggtgttcgatgttctgattccttctcctcaaagaccccacaagacagagatgctggaggggggtgtggcttcctgtgctgtggtttgtgctt

SEQ ID NO: 439379 - DNA, 1384 bp, Homo Sapiens
cagattttataatagtttatatttgcacacaaattctgccacattgttcagtaccaccaaagtaaaattcttgaatctttcattgaaaatgaaaaacccatctgtcacctgttcccagtaaaaaactgattgttctatgaaatcggctgttttagtcagataggaactgaagtttgaaagacagcctttccaagttgccaggtcatcaaataatgaccattctaggaacatggtaggaccaaagacaatgacaaggccaagcagaaggattagcaaaaataacttataaaagctccagggaatcttgctaatgaatgtgccagtgtcttgaggcaaagaaagtttatccacatcgactagttttatgtcttcccactgactggtatcaaagttcttcattaaagggcttgcaggcaaattagagggaggtaaaggagtttccttgattactttgattttctctctaaactcctgcatctgttgcagaaatacaatgggttctgacacatctttgaaagcctcagcaatgttaaaggccatccgttgctcctgcaagatggtgttgagtttgttgatctctgggtcatatgcttgcataacagcaagtttcatggtctcaaagtcagacagaatttcattcttcttttgatccagtgtgtgttgtaacttctcaaaaaattccttcactttatctgaatctttagtcagtaactgtagggatttcctcttactagtttccaaggtatccaagcgagaaagagcatctccccgacgccaggtctcaaagctctggaagagggactcaaaggcatccctttcctgagcataggcatcttcaatagaacagaagacatgtttggtgtgctccccacgagtagcacagatcccacaaatcagctgcatatcagtcaggcagaaaatgttgagaggctgccccaagtgtcctttgcatactggcattttgggagagatcttgatcttgttatacttttccacaatacccttcagggagtaattaacctgcaggctattaattccagtagctgaagtttccttacggcatgtaggacacttgaatggagctggtctccacaaggaattccgcacactcccttctaagataccttctaagcattttttgcagaagttgtgggagcaaggcaaaacccgtggatcatcaaacagactacaacaaatagggcatgtgagatcttcttcaagcagctccatcacatcctctgtctcctacaagctgatgtatttggcagggttactatttcccagggcaaagcaggtcttttttttcacgttttgactaacgaactagaggctactccggctagtgggaaaggccgcgcgaccgcccgtcctccaactacccgct

SEQ ID NO: 439380 - DNA, 733 bp, Homo Sapiens
agcgggggagagggaagggggcggagctagccggagccgcgagtccattttggggctgtgcttggcgcgtaccgtgcggtccctgtagttggaggacgggcggtcgcgcggcctttcccactagccggaggtcggagataagtacccgccgcccggcttcctctcgggaaagcggggtggtcctcgaaccttcagcgagggtggggagttgcccaggtcagcagggatctgcgtgggttgggggggctggcgaaggccgtctgagctccagtccggcagcgcggcagaaaccagcggggcactgtcatgggcctggggaggagcggcctgcggagggcgccggggcagtgtgtctgtggtccagaaaacctgctccgtccggagccttcctggccccgctaccagcgtctccacatcccctagaaaagaaaagacgggtgtgggccttaggttacagcgcgccgccagcgtttggttgcatggcgccgggggagggcgccctaaccgagaagctgcttaatacaaagagctccaggctcctggcggttcaccaggtctaaacagccgggctttatttgtgggggcgattgaaaaaattgagggtcaagattggggtgctgtgcaaataaatgcgttaatactgttctttttcttctttctttgcagtagcctctagttcgttagtcaaaacgtgaaacaaaagacctgctttgccctgggaaatagtaaccct

SEQ ID NO: 439381 - DNA, 887 bp, Homo Sapiens
ttttttaacaaattaatattttttgctgcctaggcaaatggcttttgtgaaaacacttgtatgaaaagcaatacaccatttgtttttacttaccaatcactatcattaggttttgatgcaaatgggaatttacaataaaatgaaacaaataggatcagggattatatacaatactgtgatcaagtgatttgtgattcaggcaatgtactacttgaaacacatatctggatttctcattccaattgctgcagatgctatttgaggaagcaaagaatacagaaagaaaaataattaggttcattaggctaagactaataccagtaatataaacaacaaatttataacatattgcattgcaaataagcaatgtttttagtataaaaattgcatttccacaaagaagctaataacaaatacgattaaaccacttcagaaacacgtcaaagttgtacgagtcacacatatacagtgtcacagtctacataaagctttactgagaataagccaattgaagggcatgtcccggtctgaagcgatcaaagggcttttcaactgaagttgttacttccagaaagctcgacaaaaagctgtcccatcaggttcaacaggcttgatgattccaaatttggctttttaagacaagcttaaaatctcttcagagatataatatgttgggactgagggttaagagattttaaacaagaaggaacttgttttgttggcataggaagatttgatgaaatcttttttgaaatgttggactcatttgataggaagggtgcacaccccattattcttaatactgacaagaaaataaccttggtccccccaagttatgggggccaccagattaacctttttgtttattaatgcaacaggaccaagcc

SEQ ID NO: 439382 - DNA, 1213 bp, Homo Sapiens
  misc_feature (359)..(359): n is a, c, g, or t
gtgtttgtttttaaatatcagattatagatttccaaatccccaatgtggaaagggcatcaggtatctggaccccccatcaccccagactgaaaggaagcttgaattccccaaagccagttctcacccctgaagaacttcaaccaagagctcccctccccttgactgagtctcctctacaacaccgctttctcctgttcctggagtttcttggtagaacaaggggcctcccttcccggcagggccccaaggcctcaacgccttctgaaaagggtgtggttcctccgcaagtttcctgacttaatgcccatctctccagccccacaaggacagtgaacccggtggggtgagcaggttggcncaagaggtctgaacacctggacagagttgggagaggttcctgcccaggctgacccctgctgcctcccacccctgccggggaaccccatgctgcagtcaggatggagatctggtttgcggtgcagtttcccatgcaccccccgctggctcacatcaggccttggagcataaggggtgtctgaacagaaggcttccagcggcggaatcttagagccaaggatgggctcctgtgctcagacgttgcgcagaagagacagagggtccgcggtgaaggcagccacactccggcgcatttcattttcactacctcgaagggggatcagtgacacactacccggcgggacctcaggcactgcccgggacacgcgtgagggctctgagggccacaccaggccgtcaatgctgcacaaacagaaaggtagcgaaccactcccggagctccatctgtgtgtcacagcagaggtaccactgctgcttctcatgtttctctgtctcatgcaccactgtgaagccccagcaggtgggtggcctgagtttcttcttcactcccaggtagactttgagactcttaataggccactccttctcaggccggtgactggtctcaggggccccgctccacggcctctggctccggacctccttgtagagccgcaagcagctgctgttgaggatgaagtagcgatcgtggaagccacctgagggcaggcccaggcccaggaggctgcggtcctcacggaacttcatcatgccatgcttggtgtcaccgacacggctggccaggtacagcagcatggcctccatggcctggtgcttcttcaccaccaggtggctgtccgtgcccagcccgtgcag

SEQ ID NO: 439383 - DNA, 2784 bp, Homo Sapiens
  misc_feature (1984)..(1985): n is a, c, g, or t
tttagggtaaaatatacagatatatttatattatcaaaaagtccccaaattggggaaggggcatcaggtagtctggaccccccactcagcccagactggaaggaaggctgaagtccccaaagcgcagctctcagccctgtagaagctcagccaagagctccctccccgtgagctgagtgctcctctacagcacccgctttctgctgttctggagtttgttgggaggagcagggggctcccttccggcagggccccagggcctcacgcctctgaaagggtggtggtcctcccaagttcctgacttatgcccatctctccagccccacaaggacagtgaacccggtggggtgagcaggttgggccaagaggtctgaacacctggacagagttgggagaggttcctgcccaggctgacccctgctgcctcccacccctgccggggaaccccatgctgcagtcaggatggaggatgtggggttgtggggtgcagtttcccatgcaccccccgctggctcacatcaggccttggagcataaggggtgtctgaacagaaggcttccagcggcggaatcctagagccaaggatgggctcctgtgctcagacgttgcgcagaagagacagagggtccgcggtgaaggcagccacactccggcgcatttcattttcactacctcgaagggggatcagtgacacactacccagccggacctcaaggcactgcccgggacacgcgtgagggctctgagggccacaccaggccgtcatgctgcacaaacagaaaggtagcgaaccactcccggagctccatctgtgtgtcacagcagaggtaccactgctgcttctcatgtttctctgtctcatgcaccactgtgaagccccagcaggtgggtggcctgagtttcttcttcactcccaggtagactttgagactcttaataggccactccttctcaggccggtgactccggacctccttgtagagccgcaagcagctgctgttgaggatgaagtagcgatcgtggaagccacctgagggcaggcccaggcccaggaggctgcggtcctcacggaacttcatcatgccatgcttggtgtcaccgacacggctggccaggtacagcagcatggcctccatggcctggtgcttcttcaccaccaggtggctgtccgtgcccagcccgtgcaggatgggcagcaccttctccgcaaagtgcagggggcgctctgcctcctccctctcgttgacctcaaagcaggtccaatagtccttctccctgatgcccacgttccggcgatccaggatctccagggtgagctcctcagcagtcatggatgctgggaccttgatatgctgctcagtctctgccttcttctcttccagatacactgtgcagatgaagtcaccggcatgctgggtcccactggcagtgccagccacgcgcatcttcacaatggcagtgatctcctcccgctgcttcctgagctcttcctcatccacactaaacaccacacatagtggttaatgaggtcttccaccacacggccagccttgtagtcctgcccatctgtctggaagagcgtgggcccaaacacaattgccaggttgtgcacgttcatctggttcgtgtctgagaagcactgaacacagtacaggtggctgataagggccttcactgtggcccggttgacagggggcagccgcaccagcagctctcggtacctggagaccttctcctcctcgtcctcaatctctgggtgggaaagataaatcaagtcagaaaccccctgtaactatcttccccccaccccgcctgggctgctgtgcctctcatggtgggtgacagcagtccctgtgccctccaagtcaatgcaggccaggcattcaaccagggtaaggaactctcggtcttccagggcccctggctctagtatggaatggcgatgggaatgagaagcagaggcaggcaactggagcctgtgggnnagggtaagcctagtgcaagtgccacaagggaagggcgcaggagtccggagggatgggtggaggaggaggaggctgggcacgggctgcagggcccacctgaggcctccagccaggttaggcgctcggcgcgagtgaagagcccatcaggcaggtcgcgcaggaagcgcttgagcgccgaggaaacctcatcccccgtgctgctcgccctccttgaggtgcacagagcgcgcatcttgccgcaggctttccagcagccgctgtgtcttcgatgtctgcccacacttgcggtagatgccctcgagggtcagggccgcactgcgtgatgtagtccacacagcggtacacgatcaccgggatatccgagtccccaagctgcgtgctccgacagcgtgtccccccatgctggcggctgcttttctggatggcccccagccaacccatgaagtgccagccgccgctcgccctgtatgtacagttgtcctccttcgcgtccaccagcaccagcacctggttcgtcactgtccccctggatggaaagctcctgcagtttccgtagttgcagcggactcttcgcagggcccctccgggaagacagcacggagctccgagccactgagagagaaccagccctcctgggcccgctgtaggctcaggccagctttgtagggtaggcgtcccagccgctcaaaatcccgggccagcagatcctcggctaggggaggcacgaatgccttagcaaaccctcgtgccgaattcaccaccaggcctcgatcctagccgttgttttgtttagttgttg

SEQ ID NO: 439384 - DNA, 598 bp, Homo Sapiens
tttaacaatacaaattttattaaaaaataaacatcaaaactgttcagcaaatctgtattcaatgtaaccaaaataaacaaacaagaaattaaaaaaaatatacatctatatatatatgagcaagaaacaagtgcattttttggtcccaatattttttgaatatattatctttatccagaggaattacattaatggctaagaaggtattatgtattagatgtatagaaatgtaactttaaaacttgttttaagttctgtaagaagagttttgccaattctttatgtctttgaaatcagaatccctaagctaatgttaatgataggcccaagacagagcatgtaataatgtctaatggtctggacaagtatgaaattaagaagctaccaataagtagctacacgaaatctgtagacaattctaagaaatgtcttggagtttgtaataagaacaaaacaaacacaaagagaagagttcaaaagtagacataaaatggacatcagcaaatttcatgaatctgggacaaagaagtgatggaaaaataaaatagagtaaaataaatttaagaacaatataaaacctagctaccaaaataaaatt

SEQ ID NO: 439385 - DNA, 733 bp, Homo Sapiens
  misc_feature (260)..(268): n is a, c, g, or t
  misc_feature (700)..(700): n is a, c, g, or t
  misc_feature (720)..(720): n is a, c, g, or t
tacattttttaaatagatatgaaatacgtaccaagtttatttgcctttaaatgatacaaacagaaaagacatgttagtcaaaatattaaattttcttgcattttacagaagaaaaataaactgaagtaaaactgtaggaactgctgaacgtcagataaatgtttcttcagaacaagagatattagttcctaaaagattcttctaaagtttttttaaaagagattaagaaaaacagtaagccactgggttattacattctnnnnnnnnngtacatgtttcttaatggacatatgtttacatttacagatagtaaagttagtttcctgtctcataaaactcagaagacgccagtgatgtctaaactatggaaaagaataaaagcctctttttcatatgaaaaaacattcaaactaaatctaccttaacattattttctatgaaaacttaataaagaatggctgttctgaaaacaaaatgctatacaaatcagtttcaaaaaagaaatacattatgagattaggcttatagctagtggtatcaagtaaaaccccaaacgatgacacaagaattcacagtattagccggtcctccccaccctcctgaattacctgaccaatggaagtttggctttgttgtttcagaaagcactgtttcttacattccattaattgttccaaatcacgccacatttttgcttgtntcatatttggaccatgactntctcgtataactt

SEQ ID NO: 439386 - DNA, 1709 bp, Homo Sapiens
  misc_feature (22)..(24): n is a, c, g, or t
  misc_feature (48)..(48): n is a, c, g, or t
  misc_feature (579)..(579): n is a, c, g, or t
  misc_feature (585)..(585): n is a, c, g, or t
  misc_feature (591)..(591): n is a, c, g, or t
  misc_feature (615)..(615): n is a, c, g, or t
  misc_feature (641)..(641): n is a, c, g, or t
  misc_feature (645)..(646): n is a, c, g, or t
  misc_feature (654)..(654): n is a, c, g, or t
  misc_feature (657)..(657): n is a, c, g, or t
  misc_feature (662)..(663): n is a, c, g, or t
  misc_feature (677)..(677): n is a, c, g, or t
  misc_feature (696)..(696): n is a, c, g, or t
  misc_feature (730)..(732): n is a, c, g, or t
  misc_feature (740)..(740): n is a, c, g, or t
  misc_feature (788)..(788): n is a, c, g, or t
  misc_feature (1475)..(1475): n is a, c, g, or t
  misc_feature (1561)..(1561): n is a, c, g, or t
atttattctcttacatagcttnnnacaattaccaaaatcaaatgcgtngctttcctcctctctgacagtttgggctgtcaggtccatttcactgggcctgctttacctcctcaccagcctctgtcctcttgagttaccgttttcttgcttcccatttcctgatggcagagcctatttgtccatgtcctgctgcagacagggtgttcattcattccgcaaatgtttactgagtattcaccaggtgctgggtggagaaagaagccttaaagattccctagacatctcctctcccctagactcaggaccatggcacttattttctattcaatattctggtctccagcatgttaggatgattaatgatggtgtcaagcttgtctccctctactttttcccatccccatggatataaatagaggtgaccttttaatccccctctcaatcaggtggagaggattggggatgcttacatggtggtatctggcctcccaggccgaaatggtcaacgccatgcaccagaaattgctcgtatggccctagcattactaaatgcagtttcttcctttcgcatcgcggcancgaggncatgancagctgaggctacgcataggggtncatactggtaaggctgactctcactncagnnctagtctncanctttnncacactctcccaanctgtttcttctcaaagggncaatctgtgctgggggttgttgggctgaagatgnnncgttattnctttttggagacacagtgaacactgcttctcgaatggagtctaatggncaaggtaagacattagccctcaaccccactgttggcctcaatttatcttgcccttttcttcttttcataatccctccaatttcttaatctgagagaccacagttccttagtgtcgcatcctcgggcatattttggttctaatagatatgcattgggaggttgggcatattttggtcctaatagatatgaattgggagcttcccagggatggttggtcgggcacggtgctatacagtatcaccaattatttgattgccttttctttgattcctcattccaccatcctccccattccacccaccccagcgctgaagatccatgtctcctctaccaccaaggatgccctagatgagctaggatgcttccagctagagcttcggggggatgtggaaatgaaggtgatggcaggccatggggaggggggcatggaaagggagggtgaaagtgattatgggaatcatagggaaagagagggagacaaagggactaacatcgaagcatctgaatcatgtccactctcccacttccagggaaaaggaaagatgcgaacatactggctcttaggagagcggaaaggacctcctggactcctgtaaacccccattctttccaagtcagatagtcttctgctgctggtacctgggtgggcaatggccaccatgtctgcacacaccagaaatggacatnttcatatgcaaatggaaacagccacaaaaaaacctaccttattggaagttgtagcccctctgcagctcagcccctgtacatataanttggtccttctcttggcttggggccccttccttccctactttttctgaaaatatctgggattctaaaccagaaatattttggggcaattttttaaaacattattaaaaaaagtttctggagtcataagggggggataaggggcaatcc

SEQ ID NO: 439387 - DNA, 646 bp, Homo Sapiens
  misc_feature (480)..(480): n is a, c, g, or t
  misc_feature (624)..(624): n is a, c, g, or t
tttattattgttttatatttgaccaaaatattctggtttagatacagatatttacagaaagtagggaggaaggggaccaagccagagagggacaggtatatgtacagggctgagctgcagagggctacaacttccatataaggtaggtttttttgtggctgttttccattgcatatgaaaatgtccatttctggtgtgtgcagacatggtggccattgcccacccaggtaccagcagcagaagactatctgacttggaaagaatgggggtttacaggagtccaggaggtcctttccgctctcctaagagccagtatgttcgcatctttccttttcccttcatttccacatccccccgaagctctagctggaagcatcctagctcatctagggcatccttggtggtagaggagacatggatcttcagcgcttgaccattagactccattcgagaagcagtgttcactgtgtctccaaaaanacaataacggggcatcttcaggccaacaaccccagcacagactggcccagtatggacccctatgcgtagcctcagctggtcatggggtcggtggcggatgcgaaaggaagaaactgcatctagtaatgctagggccatacgagnaatttctggtgcatggcgttga

SEQ ID NO: 439388 - DNA, 1688 bp, Homo Sapiens
aaagcaaggcaaaaactttattgcacttaacaatatacaaaatagaataaatatacaaaataaaaaatccattatccgactgtagatacaaaatagttatttgcatgtaataaacattaatatttcaataaaaaatattttaaataaaatagaatagtattaccagactgtattaggacagtatagtatcacaaaaccttataggaaatagtaacaatctgcgaataacagaattttttctattacatactaaatacaagttttatctccatttatgcaaatcattaaagaaaatgttaaagaattcttattctaattttttgtacttttattctagaactacgtattgcaatttccaagaaataacctacagattcccagaaggatttttttaatactggcagtcttcctgttcaatacacaaaatatcaatcttttcttctgtcagaaaactcaaaattaaaaactacaccaggctctttgttcagtgttttctcctcttcttggatgcagtgaactctgttccactcaaactttcattctcttcttcttctgtaattacaggcatactcagacttaaaggtttatcttccttgtgtatattctgcacattgcctttgtttctgagagacatcttccttcctgctggtttcaatctttctttcttctcttttttcctagttgctttgacttgcccttgaccagatgcagaatcagagtcagaagagtcgagtttgacttgacgatgccttcttgatttggatgcctgtatgacaactgaaaaggcctttgattttattttcgctaatgattctgccctttcacatctctccgtttcttgtgaatttccttccattttttcttctccatcattagtttttgactttaaggatggattctttctgtctttgtgccactgctgatgctccaaaactatgttcttaatattgtcaaaaaaatcatcctttatcaagctgagggctttatctggcttggacttatcaactgaaattacatgtttcatgttctgataatgatcatgaacattcagcatttcctctaatacatcagaagtgataagtttcatcacacgatcacttgggtccttaaattcttctgtaacttcagctcggtgaatttttttcttcatcctatatgacagcaatttgggcattgctgtaaagtgaaatgctctgtctagtcgtagcttcctaaaaatataagctgcatcaaaatgctgtgcatttactaaatcttgctgaaattttaaaacttcatcccaatccttcagggcaactctgatcttttgttttggttgacacagttgggtattatataatccatatagcagatacaaagcaccaactctgatctggaaggtgtatggaggtaaaaaatatcgccaagccaaagctaaagcttcttttgtaaacatgttcttttctaaatttctcattctgccacagaagatagtcccgaacttcatgtttctccagagctccgtgaagtcctcgaagcgtacactgtccgtctcctggaagcggctgagcagcgcctcgcagtcggtctgcaggccgggaggagtccccatggcacccgaagcccgcacgcctccgaagcccgcacgcctccgaagcccgcacgcctctaacggactagccagcggtggtcgctcaggaaaccccgct

SEQ ID NO: 439389 - DNA, 556 bp, Homo Sapiens
  misc_feature (4)..(4): n is a, c, g, or t
  misc_feature (7)..(7): n is a, c, g, or t
  misc_feature (19)..(19): n is a, c, g, or t
  misc_feature (524)..(524): n is a, c, g, or t
  misc_feature (527)..(527): n is a, c, g, or t
  misc_feature (536)..(536): n is a, c, g, or t
  misc_feature (554)..(554): n is a, c, g, or t
aatnggnatcagttaagtntggatccagctgctcaaatgatatataatcatggactcagtttctctaaggtttccactctgcccttcacagtgttcctatccttctcaggctccatatgctgtcctccccaccattgctatccccacagagccaagttctctccatgtgatggagaaaagcaaccctacagatgttgacttcacatcacgggggcacaatatccagcagaaaagcatctcttcttggggatccattcactttctcattagccttactgggtcatgtgcccatctctgggccaatcacggtggggaatgggctatgctgggtgtcttcgggccaatcacagggcatctctgtaatgagtccattccaagtctaccagtgagaaagtaggcggtagggaatgatgctggagaggcacccccaattgactgctaccctttgcccttcattaactctaatccttaatgacattgacacctgcaggcagactttggcaaaaggcgtttattggtgtggnggnctcaacacnccccatgaattgggacanat

SEQ ID NO: 439390 - DNA, 1091 bp, Homo Sapiens
  misc_feature (19)..(20): n is a, c, g, or t
  misc_feature (22)..(22): n is a, c, g, or t
  misc_feature (31)..(31): n is a, c, g, or t
  misc_feature (38)..(38): n is a, c, g, or t
  misc_feature (43)..(52): n is a, c, g, or t
  misc_feature (54)..(54): n is a, c, g, or t
  misc_feature (61)..(61): n is a, c, g, or t
  misc_feature (69)..(69): n is a, c, g, or t
  misc_feature (71)..(71): n is a, c, g, or t
  misc_feature (78)..(78): n is a, c, g, or t
  misc_feature (82)..(82): n is a, c, g, or t
  misc_feature (107)..(107): n is a, c, g, or t
  misc_feature (114)..(114): n is a, c, g, or t
  misc_feature (130)..(131): n is a, c, g, or t
  misc_feature (135)..(135): n is a, c, g, or t
  misc_feature (137)..(137): n is a, c, g, or t
  misc_feature (142)..(142): n is a, c, g, or t
  misc_feature (152)..(152): n is a, c, g, or t
cccctttccaagcatgcanncncgcaagtgnccaactntgggnnnnnnnnnnanatttcanataatttnantttgcantcanttttcattttgactcaaattcttanccttcangatcaaaatgcagagnngatntntcctnttagccaagnagcagtagagcatggaattaagaaatatggatgggagtgaaatccaaatctaattacagctgtgtgactctgagccgaatattaagctctatataacttagtttttaaaaaatggagtgtggcacatcatctattcatgttgctgtaaggattaaataaatgaatcatatgtaaaatggccggcaggtagcaattgttgagtacctcttatgattgcccataagaagctgttaagactgactcccagcaagaataaaaagcagtttattaggaccatttcatcaagtagaaactctgttgattcttctgcaagttctgaatgaccaggagcaaaaagacaagtggtggggctgaaccagagaaatgtgtgaggcaggggggaatgcacttctgacttacccctaacagcccaaagcgttcggacaggctccagccacacagaaagtcaatttcaaacttgtggttgagaaccacgatggcattttccttcccatacttgaggtaggcgcgcgggtccgtgaagatggtgcattccgtgcccgaccaccactccagcagcatcaccagctggcttgagatgcaataggacagtctgcagttgatcttccggaagagctgcttgttaatgggccagaggaggagagtgaagagctgaatggtgttgatgattagccctgaggcaataaagacgtagcagaagaccaggtggcacaggaactgagacttcagcagtcccgcgaggtccatgatgcgtggacgctcttattcagaaataaataactacccacagtcaaagatttccagaaggaagaaagatccaggactcaggaaggcgtctccttcctggcagcctttggcacatggacttagaaaccagaagctgagatggagccggctgggttcagaaattgccactagtttataagagctgtaagtcag

SEQ ID NO: 439391 - DNA, 857 bp, Homo Sapiens
cacatacatccgtgagttatacacagccctatggtcacacacagcctggatcgcacagaccacacagtcacgtgtcctgtggaagtcacatgggggtcccacggatcacagtcctggaggagcccttgggacacagctgctctggtgcctacataccttatacttctcggggtagtcccggaggtgctgcaaactggttgcaaccgtcttgcgatcctgctcccacttgcgcgaacagaagaccatctcggtgaagtaccacatccagccgataattgggacataggccagctctttcttggccaggaccttggagccccctaacagcccaaagcgttcggacaggctccagccacacagaaagtcaatttcaaacttgtggttgagaaccacgatggcattttccttcccatacttgaggtaggcgcgcgggtccgtgaagatggtgcattccgtgcccgaccaccactccagcagcatcaccagctggcttgagatgcaataggacagtctgcagttgatcttccggaagagctgcttgttaatgggccagaggaggagagtgaagagctgaatggtgttgatgattagccctgaggcaataaagacgtagcagaagaccaggtggcacaggaactgagacttcagcagtcccgcgaggtccatgatgcgtggacgctcttattcagaaataaataactacccacagtcaagatttccagaaggaagaaagatccaggactcaggaaggcgtctccttcctggcagcctttggcacatggacttagaaaccagaagctgagatggagccggctgggttcagaaagtgccactagtttataagagctgtaagtcag

SEQ ID NO: 439392 - DNA, 1142 bp, Homo Sapiens
ctcccggaagtaattcctccgaaaaggcctccttttcctggaaagaagcttgggcagcccaggccggaaccactggtcatggttttccagggaagttcttccagtgggatccctcctagcatacaaatgtggcagggtattcttttccgttttaggactccccagcagtgttggattttcattattttcggaaattgagtgtacagtcatatacagcttgaaattacattctccaagctcctcacggtgatggggaagcctttggttcgtggcaacaggtgatgcttgaggcgaggcagccccttgggcccgggccccctgcatgctgttctcatgcttcttctcccgtgaaccgtgtgccctcacagtgaatcaggaaaaaatacttctcggggtagtcccggaggtgctgcaaactggtggcaaccgtcttgcgatcctgctcccacttgcgcgaacagaagaccatctcggtgaagtaccacatccagccgataattgggacataggccagctctttcttggccaggaccttggagccccctaacagcccaaagcgttcggacaggctccagccacacagaaagtcaatttcaaacttgtggttgagaaccacgatggcattttccttcccatacttgaggtaggcgcgcgggtccgtgaagatggtgcattccgtgcccgaccaccactccagcagcatcaccagctggcttgagatgcaataggacagtctgcagttgatcttccggaagagctgcttgttaatgggccagaggaggagagtgaagagctgaatggtgttgatgattagccctgaggcaataaagacgtagcagaagaccaggtggcacaggaactgagacttcagcagtcccgcgaggtccatgatgcgtggacgctcttattcagaaataaataactacccacagtcaaagatttccagaaggaagaaagatccaggactcaggaaggcgtctccttcctggcagcctttggcacatggacttagaaaccagaagctgagatggagccggctgggttcagaaattgccactagtttataagagctgtaagtcagccaacactggaaagaaaaagcccgctctcgacgaattcgagctcggccgatttggcctgat

SEQ ID NO: 439393 - DNA, 1828 bp, Homo Sapiens
cttggaggcataatttagtcatctcacctaaagcacttttcactttatctctggcaaccaagggttacagaaaactcagcaccaaaggatgaaaggggaacttgtccccttcggtccccagccctgccctcccctgcagcctaaaataccctttctatgatcacagaacaaagttcacactcaccacacagccattctcacacacactcgcacaaaaagaaaaccaaagcccactaaagcacatggggaaaaaaagattacaaaacatcttcctccccatccggccttgagaccagactccctggctggagaggtcgtgacttccgccgtgcccagcaggggctcacccagcctttgtcaccgtgtcccactaaggaggatatgcagaggccaccagttccccaaggttcccttcggatggtgacacctccctgagttagttatttagtttctgcttgctgttagagttgccgtgggcagagcccttgttaatttccgttacaccaattatccatcgaactcccacggaggccacaaagaagaggaggatgaagctggccagcgttagggaagacccgctcctgatcatgctgaccaggaactggaagaaagggtagagcaccagcgaggcccaaaacagccagttcacgagggttcagggccgccgggggggcaccatgggcgtttctgggaaggtgcccgtcctgtagtactcctcctgaaaggcatccttcttctggtagagcttgtgcagccaggccgagcactcgtcatcgtcttcagggatgtcttccagtgggatcctcctaacatacaaatctggcatggtatttcttttccgtttaggactcccagcagtgttggattttcattatttctgaaattgagtgtacagtcatatacagctgaaactacatttctcaagctcctcacggtgaatggcgaagccccttggttcggtggcaacaggtgatgcttgaggcgaggcagccccttggcccgggccacctggcatgctgatctcatgcttctttctccgtgaaccgtgtgccctcacaggtgaatcaggaaaaaaatacttctcggggtagtcccggaggtgctgcaaactggtggcaaccgtcttgcgatcctgctcccacttgcgcgaacagaagaccatctcggtgaagtaccacatccagccgataattgggacataggccagctctttcttggccaggaccttggagcctacctgagtaccgcagatgactctgattcagctatgtgacacaggctcaaccgctacacgctgcagtgtgttgaagacgacaaaagtcaactgaagagacccagttccaaaggcatgcaagctacgtgcaagaggtcaaaccctaacagccccaagcgttcggacaggctccagccacacagaaagtcaatttcaaacttgtggttgagaaccacgatggcattttccttcccatacttgaggtaggcgcgcgggtccgtgaagatggtgcattccgtgcccgaccaccactccagcagcatcaccagctggcttgagatgcaataggacagtctgcagttgatcttccggaagagctgcttgttaatgggccagaggaggagagtgaagagctgaatggtgttgatgattagccctgaggcaataaagacgtagcagaagaccaggtggcacaggaactgagacttcagcagtcccgcgaggtccatgatgcgtggacgctcttattcagaaataaataactacccacagtcaagatttccagaaggaagaaagatccaggactcaggaaggcgtctccttcctgcagccttg

SEQ ID NO: 439394 - DNA, 1251 bp, Homo Sapiens
  misc_feature (567)..(567): n is a, c, g, or t
  misc_feature (731)..(739): n is a, c, g, or t
tagtggcaatttctgaacccagccggctccatctcagcttctggtttctaagtccatgtgccaaaggctgccaggaaggagacgccttcctgagtcctggatctttcttccttctggaaatctttgactgtgggtagttatttatttctgaataagagcgtccacgcatcatggacctcgcgggactgctgaagtctcagttcctgtgccacctggtcttctgctacgtctttattgcctcagggctaatcatcaacaccattcagctcttcactctcctcctctggcccattaacaagcagctcttccggaagatcaactgcagactgtcctattgcatctcaagccagctggtgatgctgctggagtggtggtcgggcacggaatgcaccatcttcacggacccgcgcgcctacctcaagtatgggaaggaaaatgccatcgtggttctcaaccacaagtttgaaattgactttctgtgtggctggagcctgtccgaacgctttgggctgttagggggctccaaggtcctggccaagaaagagctggcctatgtccccattatcnggctggatgtggtacttcacccgagatgggtcttctgtttcgcgccggtggggagcccggatcgccagacggttgcccaccagttttgcagcaccttccgggactacccccgagaaataatttttttcctggattcactgcgtggggcacaagggttcctgggnnnnnnnnncctggataatcagttttgcacgtcggttccgggctcccagggggctgtcctctccctcagcgcctccaactgggtggcccccgaaacccaaggagctttaccccttccccccgtgagggaactctgtcacaaacagaaccctttctccccctcttattttgcactgggcccacctcaaatttccgctaaaaatcgtgtgcacaaccccctaacccgtgcttggggacaaccccaattaatggtcaatataacctaacccttatgccgaaatttcttaccggctcacgccacggcgttcccctctctgcgacaacaactatcttctcgtttaacaacctattacgcacaccgagcgcctctcactgctccctttaatgctacacaagtacctccattcacctagggcaccataagggccccgccctcccccaccggtcaagcaacacccgcctatatccgtgccaaggctcacaacactttcttctgccggagctggagaggcctcccagacg

SEQ ID NO: 439395 - DNA, 1062 bp, Homo Sapiens
cgcgctcccacggtgtgccccctgcgagggggaaagcgaatccggcggcggggtagggggaccagaagggctcactggaagcggatacggcgggggcaactggcctgttttatgggcgggaaaaggtttggggaggctttttcagcccctgaggcgtctttatccaagggccccctataaggagggcaggcttccttccaggggaggaggggatcttgacaggggcatttgggtcaccaggggggtgacctggaggtgaccagggccttcaggatcacacagcagagctggccatcagggagaccacagaggaccacaggtgactgcaggagggtggcatcagctccaaagaggagcccgaagagggcgtcctccagcgtgaagcccccggagcccccgaggaggtcgtgcgggaccctggagcctgatggtgacacagagcacagcactggaaggaagtggggggctgcaggctttcctgggaccccggctgggggcgtgtaggaggacagctccacctcaccgatctggcctcctggccgggggtcctccccaggacagggctgctcaaacagctgcatcttccatcgggcagggccctgcaccagggtgaccagcacactgtccagcaaggtgaacgcgcacagcgcagcatcgggaaggatgcaggcatcggggtccacagggatcacgggggaaggctggtcaccgtcctcgctgtccctgtcatcctggctcgtagacctgctcctgcccgggtggtccagcgacaggcagtagaggcccctccgggcgcacagcgcgtacagcaacctgcgcggcgccagcagctccaggtgccacacctggtcggggaaccggaacgccgcggtcagcagcccgccctcctggtcgtacacgtagacgagctcgctcccggtggacaggaagacctctgcctcatggcacagcacgcggggcttgcccgccgccaggcccccgagagggcagcagaagcccgccaggtagcggacccgcggcgcggcgccggccatcgtgcgcgatcccgggaattccggactc

SEQ ID NO: 439396 - DNA, 1023 bp, Homo Sapiens
  misc_feature (947)..(955): n is a, c, g, or t
ggtaccggtccggaattcccgggatcttctcactctgacgggcccgcgcgcacgatggccggcgccgcgccgcgggtccgctacctggcgggcttctgctgccctctcgggggcctggcggcgggcaagccccgcgtgctgtgccatgaggcagaggtcttcctgtccaccgggagcgagctcgtctacgtgtacgaccaggagggcgggctgctgaccgcggcgttccggttccccgaccaggtgtggcacctggagctgctggcgccgcgcaggttgctgtacgcgctgtgcgcccggaggggcctctactgcctgtcgctggaccacccgggcaggagcaggtgagggcgggcccgcggcctccctcccgcacactcctgctgcccccggactgcttcagagcgagcagccccacctcatcgcgcttggggacccgggctgccgccagctctgaagcctcggccgccatccctgcccgattatctggagcccctgcccccagcactctttctgtctacgagccaggatgacagggacagcgaggacggtgaccagccttcccccgtgatccctgtggaccccgatgcctgcatccttcccgatgctgcgctgtgcgcgttcaccttgctggacagtgtgctggtcaccctggtgcagggccctgcccgatggaagatgcagctgtttgagcagccctgtcctggggaggacccccggccaggaaggcagatcggtgaggtggagctgtcctcctacacgcccccagccgggggtcccaggaaaagcctgcagccccccacttccttccagtgctggggcttctgggtcaccatcagggctccagggttcccgcacgaaccttctcggggggctcccggggggcttccaccccttggagggaagcccctccttagggggctccccctttttggcgagcttagtgnnnnnnnnntttcttgtgccagttcaccctggggaagacccctcctgtggggggggcacacccgcggaaatggcaca

SEQ ID NO: 439397 - DNA, 1065 bp, Homo Sapiens
  misc_feature (7)..(8): n is a, c, g, or t
  misc_feature (16)..(16): n is a, c, g, or t
  misc_feature (19)..(19): n is a, c, g, or t
  misc_feature (30)..(30): n is a, c, g, or t
  misc_feature (34)..(34): n is a, c, g, or t
  misc_feature (38)..(39): n is a, c, g, or t
  misc_feature (45)..(46): n is a, c, g, or t
  misc_feature (52)..(52): n is a, c, g, or t
  misc_feature (58)..(58): n is a, c, g, or t
  misc_feature (60)..(60): n is a, c, g, or t
  misc_feature (64)..(64): n is a, c, g, or t
  misc_feature (66)..(66): n is a, c, g, or t
  misc_feature (71)..(71): n is a, c, g, or t
  misc_feature (81)..(81): n is a, c, g, or t
  misc_feature (84)..(84): n is a, c, g, or t
  misc_feature (102)..(102): n is a, c, g, or t
  misc_feature (121)..(121): n is a, c, g, or t
ctccccnnccaaaagnccnatttccccacnccanaaannatatgnnctcaantgcttnanatantntcacnggcagcagtncantacctgataagggcccgngctacaggaccctgacatnggatgtataggagagttggaattcaggaacagttgtaccgaatcttgaagtgaagaagaaagtagtttgttgtacatatgaatgaaatccaacttttattgcattcaatatagtattgtcaagcaccgtgctttaacttgaatgtctcttgtgtttgccaaggtaatatgtaagtatgtaaataatttatttgtcagtggcactttaccattctcagatcttctttcttgggaacatctgatttattctcaagtgctatttttcactgaaactgttctctatttgagatattatcaagtttcagaatcacagcaattctcagagatgagcccaaaagttttacaaatatttcaccatagttaaaaatttttaaagatctgtcctttcatttgttttcctaaatttacactataagtaacatactttttatatttgagattttgatttctcttcagtgtttattttacttaatttgaaccaagactcaacttttccacagaagaaatctaaaaggtttctctgctgctgtttctgatcaattgtttctcataaatcctactggcaaactcttctgtccctctaggccctcaaatactcttttcgggtcctcctggtgctccccaaagccattccaggtccttagaaatgtcttagtctagattaatttcctggttctcagtccagatacacaacctcatgggaagaaacaaaaactgccacttttatccattccaggtgccggcgaggctcccgggaccaaacgccgcccgacagccacgcagaacagacgtggcagtgcgacgcctcccccactggggacacgagacagcgacagccacgcggtgagccggtacaaggccctctaggcttcagcgggtctggatactcggtggcattaacccttccctaccgccggggaagacagcagtttctctggcgaggaa

SEQ ID NO: 439398 - DNA, 1351 bp, Homo Sapiens
  misc_feature (114)..(129): n is a, c, g, or t
  misc_feature (420)..(420): n is a, c, g, or t
tttgttctggaattttcaccatagaagagagagtaactcccgtgtgcaaattgagatgtataacaggcgcctgcctcaaaaggcataagttttacttaaaggcctatctagagnnnnnnnnnnnnnnnnccccatgtgggtgtaattcaacaatgggtgcatgataacaacaatttatgggtgtctatttgccccctaaggagttatctttctgtgcccttcaaaaaaaactttgttttttgtcaaactggaattaaagctgaatgggactacattttttactttccaggacatttggtctctacttccagactgaagtcagctgtttggaaagcaaacttcttcatggaacgcagtgagttctctctccattttggcataaatgcttgtagggcagagatacttatttttcacaaaagnacaaagaggccccagaaaatctgatttataaatgcactcccaaaccaagatcccagaaaggtttttgctcccacaggctcagcactccaatatttctcagaaaaggagctattgttagcacagtgagatcttcttaagcctgctggattctaaaaagagtgcaaggaatattcagggatttctagacatcgctgaaacgggttcgaaatcctcaaacaattattttgagaaggaatgtttgttatttctgtaggtctttgtatcatctttaacaaagggatttggatttcatagatgctagtgtctaagttggaataagaatggaacggatttagtgactccagggacctcaatctgcacccatggcaaccaaatttcagcagggtctcaccacttgagtttcaaggacgcctttgccagctgggatttaattaatgagaaatcaacagacaggtgacaatcattctattcttccaccttatcaccagggctagaatttgtgacaaaagttttaattaaactttaactttctcttgcctaattaactttaagatggaacacacgtatacacacatgtgtatttgcgtgaataaatttatttgttaaattttttcaattccttgttttacatcagagcatctgacagggaaatggacagtatttaatccaaattaatccaatgtgaatttcaccttcttcagttgtctttcttaaatgttaaaatacttaaaagagtgcctgacccatgtcaatgcacagtaagtattagttaaccataacaatttcacttctttcatctgccttccctggttcagaatctttctctgattttttgcattttccccaagagctctaaccaaatactacactaactataaaaaatagtaggactgatcctttcagtgatggagaattagtggggggggttttc

SEQ ID NO: 439399 - DNA, 1118 bp, Homo Sapiens
  misc_feature (34)..(34): n is a, c, g, or t
  misc_feature (80)..(80): n is a, c, g, or t
  misc_feature (109)..(109): n is a, c, g, or t
  misc_feature (800)..(818): n is a, c, g, or t
  misc_feature (898)..(944): n is a, c, g, or t
gccaaatccggggaaattaaaaccggatccgttnacgtggaactgcggtttggtctgtaccgcgtttggggaatgcgtgngattgcttcccctttcccgaacatgcgcnatcttcacactgcccaaaacaaaactcctactcagaattcagtgttaacatacggtcgggattggggttcagtgcctaaaatgcagcaggaggaagatcttgggagtcctgctttctgtcgcgccgggactctggcatcactggatggcaaaccggctccatgggcgaatagtcagcaaaatgccgcagctgcttctgggtgttcgccctttcccccactccccgtttcctcctttccattccggtgataaaccatgagagaagcagcatctgcgagccagaagatagggttaaatatgatccgaatccctctttcctggctcctgggacagtctaggaataacgggcacctgcgacccgctgtaaggttgcgaggtcactccaggcttgcccgagcctctgctcaggtttcaactacgcgagttgggataagcagcgccctcccctcccgcccccatgctctcctgaacgtgggttttctctcccctttcgctcgcccttcccctgatggaaggaggtgggggaggcttcctggccctcatctttcctaggcctccttgtctcccagacaggacctgccctgccctttggaacagggcgacaaggcctatccagttccaaacccctgccgtccctgcatcgtgcttgaacgcagcacgagaaagacgggaaaagctcaccaaaccccatnnnnnnnnnnnnnnnnnnngaaagccgcggctgtaaataaaggcaaatccgccaccctctgaggggccgtttgtcctcccctccttggccccgtccttnnnnnnnnnnnnnnnnnnnnnnnnnnnnnnnnnnnnnnnnnnnnnnnagctcctccatttaatcggatttgggagaaggggaggataaatcacggcagcagctttacggtcccggaggagaggcgagccgcagacaggcacaccccggccggcgataaaaaccgccgctgaaagcccacggagcaatttcccgggaccccgagcgacgccatcccgggaat

SEQ ID NO: 439400 - DNA, 1815 bp, Homo Sapiens
ttttttttgtacctaggtgttctttaatgacagttcaaggggccaattaaacagcaaacagcttggcaaggccctggggtgtggtgtgggcacgagtgccttgtgccagtctggccccagcacagcccctttctccagtgactcctggtatggtcaacagcttctggcccaggcctgggccccgagaaggctggagtcctctgctgggtgtacagctgccctgcaggctctgtgaagcgtctatgagcccagcccaggcctggctctaaaagaagtccgaagctttgcgccgggcagggagctgcagcaggttgtccgtgatggaggccgggtcctgtgtgagaggggtgcgtgtggcagagccaggcgccggtgtgcttgtgggggtctgcagcccactggccggggtcttgaggtgggtggagcgtgctggggatggtgtgtagctggcccgcagggcccggtctgtgtacttgctggccgtcctgctcacaaggcgctgtagggctggcgacatggctgggctcaggcctttgggggtgaggctggccagattctccgtcactctccgcaaggcttcctgcttcttggcccggttcttggcagcggcctcgttggccatcttcagacccagccgctccctgcggcctggctccaggatcttaaaagctgggccgggtgtcctgtccacgtagggcgtttccgacccttcaactctcaagggtgtgttctcaacctccccccaggtcatcatcggggactcgttcacaccttgccctgtttgtgctggaacaagcagagaggctggcatcagggggaccgcagcccacgctcgacagctggccggtgggcaaacacgtgggaacatgctggaaacacttcctctcctcagggcaaggctggggctctggggttggcagccttcttggagaaagagagggagggcccctgggcattgagggcggctgcctgctggagctggcacctgctcagggcttggctgaaggggtccctaaggaagcgcgtgttcttatgtaccacctgccggggcttcttaaacagctgctcctcgtcagggacaccctctggatagtacatgagggaattcttggccttgtacttccaggtctccacactggcctggctgctctcgatggcctggtgctctgctgacgggagttcgagattatctttctgcctcttctcaaactcttcctcagcctggtagagccaagcgtggcgtgcccggcttctctccttggccacctccatgatctcctggaaggaggcattgtcctcactcgtgtagcggctcaggaagacatctaggctgggcagcggctccttctcctcctcctctccagcctctccatcctccaggcctcggccgcggggcctgggcttgttgcccaccactccagtgcctgcatgcacctcaggggtttcaaatgtggctggagtcacatagggtggcgggggctcccgggacatcttgcccaaggcagagccaaacttgatggcaatctggcgcatccgttccaagtctccattctcctcggcttccaggtactccttctgtgcctggagcttctccacatcaggaaagaaatccctttggatgaccgtctggaggccctcgatatactcttcctcgtccaggacccgctgcttgctcgtcgcagccccagcctctcccgcctcgcgcttcctcgggggcctggacgcggcgggaagcaacaaggacgacgctgatgcgcccggcgtctccatcgctatcccaggaaaaagctcgggcccagcaggcgcgatcccggg

SEQ ID NO: 439401 - DNA, 1090 bp, Homo Sapiens
tgggccgggtgtcctgtccatgtagggcgtttccgacccttcaactctcaagggtgtgttctcaacctccccccaggtcatcatcggggactcgttcacaccaggggcaggggaaggagtggcaacaaatccaaatccacccactcgaggggactcctgggggatcagctccttgccatcggggccccaccttgccctgtttgtgctgggcattgagggcggctgcctgctggagctggcacctgctcagggcttggctgaaggggtccctaaggaagcgcgtgttcttatgtaccacctgccggggcttcttaaacagctgctcctcgtcagggacaccctctggatagtacatgagggaattcttggccttgtacttccaggtctccacactggcctggctgctctcgatggcctggtgctctgctgacgggagttcgagattatctttctgcctcttctcaaactcttcctcagcctggtagagccaagcgtggcgtgcccggcttctctccttggccacctccatgatctcctggaaggaggcattgtcctcactcgtgtagcggctcaggaagacatctaggctgggcagcggctccttctcctcctcctctccagcctctccatcctccaggcctcggccgcggggcctgggcttgttgcccaccactccagtgcctgcatgcacctcaggggtttcaaatgtggctggagtcacatagggtggcgggggctcccgggacatcttgcccaaggcagagccaaacttgatggcaatctggcgcatccgttccaagtctccattctcctcggcttccaggtactccttctgtgcctggagcttctccacatcaggaaagaaatccctttggatgaccgtctggaggccctcgatatactcttcctcgtccaggacccgctgcttgctcgtcgcagccccagcctctcccgcctcgcgcttcctcgggggcctggacgcggcgggaagcaacaaggacgacgctgatgcgcccggcgtctccatcgctatcccaggaaaaagctcgggcccagcaggcgcgatcccgagaattccggaccggtccac

SEQ ID NO: 439402 - DNA, 923 bp, Homo Sapiens
  misc_feature (242)..(242): n is a, c, g, or t
gggggcccgcgccgccattttggattgtgtgagtttccgggacgttcggagggtggcctctctcccaccgggttccgcataccccaggcaccggcccgcatccaagtgtcaggttggagccgggaagcggccctggtggtagcggcggcgggggcaggatgagcgcggaggcggcggaccgggaggcggccacctccagccggccctgcaccccgccgcagacctgctggtttgagtttctnctggaggagtcactgttggagaaacatctgcgcaagccctgcccggatcctgcaccagttcaacttatagttcagtttttggaacaggcttccaaaccttcagttaatgaacaaaaccaagttcaacctgcgcctgataacaagagaaatcttattttaaaactacttgctcttaaagttgctgcacatttgaagtgggacttagacatattatagaaaagtttgtctgttccagtattgaatatgctactaaatgaactactctgcatcagtaaagttcctcctgggacaaagcatgtagacatggatctggccactttacctccgaccactgccatggctgtacttctctataatagatgggcaattaggacaattgttcaaagtagttttccagtcaaacaggcaaaacccggaccccctcagttaagtgttatgaatcaaatgcaacaggaaaaagagctaacagaaaacattttgaaagtgctcaaagaacaagctgctgattctattttggtactagaagcagccctaaaattaaacaaggatctttatgtccatacgatgagaactctagatttattggccatggaaccaggcatggtaaatggagaaactgagagttctactgctggattgaaagtcaaaaccgaagaaatgcagtgccaggtgtgctatgat

SEQ ID NO: 439403 - DNA, 1147 bp, Homo Sapiens
  misc_feature (67)..(103): n is a, c, g, or t
  misc_feature (230)..(414): n is a, c, g, or t
  misc_feature (428)..(443): n is a, c, g, or t
  misc_feature (480)..(546): n is a, c, g, or t
  misc_feature (1127)..(1128): n is a, c, g, or t
  misc_feature (1136)..(1136): n is a, c, g, or t
  misc_feature (1138)..(1138): n is a, c, g, or t
  misc_feature (1142)..(1142): n is a, c, g, or t
  misc_feature (1145)..(1145): n is a, c, g, or t
ttggctttgtttgttttaggcactatttactgtgcctttttgccctgaaatacctacaacagagacnnnnnnnnnnnnnnnnnnnnnnnnnnnnnnnnnnnnngcttaagttacaggtgatatggtttaacattttttcaacatagatggtggtgaggatgcatactatacaccctgtatcaaccactgaaaatataaaacaaagatgtgaagctagtaaatcaagaacnnnnnnnnnnnnnnnnnnnnnnnnnnnnnnnnnnnnnnnnnnnnnnnnnnnnnnnnnnnnnnnnnnnnnnnnnnnnnnnnnnnnnnnnnnnnnnnnnnnnnnnnnnnnnnnnnnnnnnnnnnnnnnnnnnnnnnnnnnnnnnnnnnnnnnnnnnnnnnnnnnnnnnnnnnnnnnnnnnnnnnnnngagactccatttcnnnnnnnnnnnnnnnngagataaaatggaatcacaaaaatacttcatgttttnnnnnnnnnnnnnnnnnnnnnnnnnnnnnnnnnnnnnnnnnnnnnnnnnnnnnnnnnnnnnnnnnnnttaacataagcatatcaataattacatcaaatgtaaatgatacacctagtctaaaaggcagattgtcaaactggacaaaaaagtaagatccggccacatgctatgtataagaaacatagtttaaatataaatacacagattaaaaagataaagaaaatacatacaccatacaggcactaagctggagtggtgtcaatatcaacaaagtagactttggaacaaggaatattaggagggatattacaaaatgattagtgattggcaaaacaaacagaccccccccacccaaatcaccaaggactactgaccaacttgacttcacagatacttatacaatatttcacccagtaacagcagaatatacattattttcaagtgtacttaaaacattcaccaacatggatcatattctagaccaccaaaaacacacaacctccatccctcaatttaaaaagactgaaataatacaaagcatattctctaactacaggagaattaaactagaaattaatagaagaaaaaacacttctaaataactcatgggtcaaaggaaataataagggaaattagaaaatattttnncttgaatngnccangcnca

SEQ ID NO: 439404 - DNA, 1128 bp, Homo Sapiens
taattaggggggaagatgcccctttttttgggggggtttcttggagggggtgggaaacaattccttgtaaggggataatttctgtctttcccgtacccccacaggttccccccttgaagggatttaggaggtttgctgggacccgggtacgggggtccaattcccccgtttttgaccggtaccggcagggcagcacgttcagagtccgttcatgcagattcatgatggggtagttcttccctttgtagtgattgacctcctggtcaaagtgtaagcccgccgatgatgtagggcctctctgccagcctgtgcaccttctccaggaagtccacatgcccgatgtggaacaggtcgaaggcaccagccacatagatgactgtctcccctggctggggctccttcccagaagcaaactggatgatcttctgagatgtctgcaggaactgggataccccggtccaggggttccgcccaccagggcacttgccaaaactgtctgcatactcccggtactcagaggacatctcctggctgctgtgatgggctttggttaccagcagcatgcggcccacgaggtctgtggtggacaccccttgcgtgcgcttgcattctctgtacctcccagcctgctttacttcctcataggtgtcccggccatctacagtcagggtgatgtcattgccgtgaacacagaagtcacagttgtatttgtccagggtctctagtgtagtgacgtagggagccgctggcaccacctcgtccacccatttgatggcctgcaccatcttgtatctctcctcctgagtgaacaccgggggccccttgtgcttggcgatctcctcatcggtgtgcacgcctacgatgaggtagtcacccatggcccgtgcctggcgcagctggttggagtggccgtaatgcaccatgtcatagcagccatcgcaccacaccctcacggcgcgcctgccccccgggcccggctgctctgcgccgcctgcagccccgcgcccgttccggatcatggccccgcagcggcggcgcggacagcctggcagctcccggcgactccgagcgccgccgcccgccccgccaggcgcacgctcagcggccgtcacgcgggcctcacccgct

SEQ ID NO: 439405 - DNA, 2105 bp, Homo Sapiens
tccgctgcactcccggctgctgggtgcatggtgggggcagggccaagagggtctccttgctgagtggttccctggtccttcccagcagggctgggagccccgcgcagcactgccaccaggctttattcggttgtaccaaagagatttccgtcagccatgtacaaacagaacagagtccataaggagagtggcgaagctgccgggaaggaaggcaagcgtgttttcctggagccaggcgctgggtggcaggacaccgtgttggggggtgcccagtgggaggtggtgtggtctacacccagagaactaaaggggtgaccgcagtcactgctccctaaagccctctgctctgcacctcccgccacagctgggtgggcagtcagtgtggcctctgtccaggtggtgggggcatccggggaccaggtgggggcgcacgcaggagcggtgcgtttcaggctgcaggtgccgtctgcccgtctcacttccggcctctccactgtgctggacaccctctctgagcagctttgctggaaagagcggagagcctgctgcaaaccaggcaccttgtaggcaggcaaggaggcagagtcctcaccagcccttccagagccaggccagttagagagggcggccctgcagagtcctatgtccaaacgcagaaggcgcagaagcagagcagggggagggccggccagggcctctgccaggttagaagtcaccatcgcgctcccccaggggctgtgccgcctgctgcctggcagcctccaggaaggccagctccttggcttccttcttctggtttcgcgcctcgatactccaacctgttggtgatgatccgcgtggacgatgaggtactgtggtgaggttgctgccacctgttaatctgacggaaagaagccccttcttcttgggctccctggtatgggtcggagccatcccctgtcagggataatttctgtcttgccgtgacacaacaggtccaccttgaagtgacttaggagctctgctgtgaccgcgtacggggctccaatcaccacttctgacacgtaccggcaggccagcacgctcagagtccgttcatgcagattcatgatggggtagttcttccccttgtagtgattgacctcctggtcaaagtgtaagcccgcgatgatgtagggcctctctgccagcctgtgcaccttctccaggaagtccacatgcccgatgtggaacaggtcgaaggcaccagccacatagatgactgtctcccctggctggggctccttcccagaagcaaactggatgatcttctgagatgtctgcaggaactgggataccccggtccagggggttccgcccaccagggcacttgccaaaactgtctgcatactcccggtactcagaggacatctcctggctgctgtgatgggctttggttaccagcagcatgcggcccacgaggtctgtggtggacaccccttgcgtgcgcttgcattctctgtacctcccagcctgctttacttcctcataggtgtcccggccatctacagtcagggtgatgtcattgccgtgaacacagaagtcacagttgtatttgtccagggtctctagtgtagtgacgtagggagccgctggcaccacctcgtccacccatttgatggcctgcaccatcttgtatctctcctcctgagtgaacaccgggggccccttgtgcttggcgatctcctcatcggtgtgcacgcctacgatgaggtagtcacccatggcccgtgcctggcgcagctggttggagtggccgtaatgcaccatgtcatagctacagggacgctcgcccggaggccaggggaacccctggaccggagccgggcaagctggttgctggtggttacggagaagcagggaggccgtggctccagatctcagcgcggtggctgcaccggagaggtcggcgtgaccgggcggggcctccgccagaggtagacggggtcgcccacggcagggcgcggagcctctgcagcccgaccctcccggcaggcgagccccgcagcctgccagccccggcccatgccggacgaggacgccacccagaacgcgggcccgatcccgggaattccggaccggtccac

SEQ ID NO: 439406 - DNA, 1517 bp, Homo Sapiens
  misc_feature (40)..(41): n is a, c, g, or t
  misc_feature (66)..(108): n is a, c, g, or t
  misc_feature (243)..(243): n is a, c, g, or t
  misc_feature (249)..(249): n is a, c, g, or t
  misc_feature (302)..(361): n is a, c, g, or t
  misc_feature (377)..(377): n is a, c, g, or t
  misc_feature (453)..(469): n is a, c, g, or t
  misc_feature (472)..(496): n is a, c, g, or t
  misc_feature (546)..(558): n is a, c, g, or t
  misc_feature (608)..(686): n is a, c, g, or t
  misc_feature (812)..(820): n is a, c, g, or t
ccacgccacacacgccactaaaggtgcggcccctacaatnnaagacctcctccgtccataaaaacnnnnnnnnnnnnnnnnnnnnnnnnnnnnnnnnnnnnnnnnnnnaaataatttcggttgaagatgatccccccgcgccacccacaataccgggaaggcggtggtaaagcgggccccctctgttcttttttggataatgggcgggatgacgcccttatccttttctacggactcaccttnttttcncctccccccgggggggtgaaaaagtattctcggctgtctaaggggcgcgcccnnnnnnnnnnnnnnnnnnnnnnnnnnnnnnnnnnnnnnnnnnnnnnnnnnnnnnnnnnnnacccccgcccacaatngcccctccgccgccccggaggggagaagggggggatgaagtttgtggtttttctcccccccccctctggtggtccnnnnnnnnnnnnnnnnncgnnnnnnnnnnnnnnnnnnnnnnnnnggggagaaaggagggcccccagaaaaatttcgggggaggaagaggggggnnnnnnnnnnnnncttattgggaaagaggaaattgggttttcggccccccaaggggaaaaatnnnnnnnnnnnnnnnnnnnnnnnnnnnnnnnnnnnnnnnnnnnnnnnnnnnnnnnnnnnnnnnnnnnnnnnnnnnnnnntccttggccccaaaaacctggtttgtgccaatacctcccccgggttacctccaggaagggccatttttccgtgccacaaggaagggtccaggagccaggggcttgagggggccttgcccctccccnnnnnnnnnccacccccaggacccggctgggggatggggaggcagtgggcaggaggaccctgagagggtcagggaggtgcccctcttttcccctggagacctcgacccaggggcctcggggattccgccgccgactcacctggctgctgtgatgggctttggttaccagcagcatgcggcccacgaggtctgtggtggacaccccttgcgtgcgcttgcattctctgtacctcccagcctgcttttacgttcctcataggtgtcccggccatctacaagtcagggtgatgtcatttgccgtgaacacagaagtcacagttgtatttgtccagggtctctagtgtaagtgacgtagggagccgctggcaccacctcgtccacccatttgatggcctgcaccatcttgtatctctcctcctgagtgaacaccgggggccccttgtgcttggcgatctcctcatcggtgtgcacgcctacgatgaggtagtcacaccatggcccgtgcctggcgcagctggttggagtggccgtaatgcaccatgtcatagcagccatcgcaccacaccctcacggcgcgcctgccccccgggcccggctgctctgcgccgctctgcagccccgcgcccgttccggatcatggccccgcagcggcggcgcggacagcctggcagctatcccgggaattccggaccggtaccagcctggt

SEQ ID NO: 439407 - DNA, 1108 bp, Homo Sapiens
atgggggagggagaaagggattcatccgcgccggggtgtctcgagtatttggggtgggatcgagggagacttctgtgcgctaggggacatgcggggagggagcatctgcaaagtgagcgatgttggggggtggggtattggagaaggcccaacaactgtttaggaaatcccggttgcaagccagattccatgaaggggggtagttttcttccccctgggtagggaatgggcccttcctggtcaaaaagggtaaagcccgcggatggttttagggccctttttgccaagccttgggccccttttccaggaaagtcccccatgccccgatgtggaaccagttcgaagcgcaccagccaccatagaatgactttctccccctggctggggctctttcccagaagcaaactggatgatcttctgagatgtctgcaggaactgggataccccggtccaggggttccgcccaccagggcacttgccaaaactgtctgcatactcccggtactcagaggacatctcctggctgctgtgatgggctttggttaccagcagcatgcggcccacgaggtctgtggtggacaccccttgcgtgcgcttgcattctctgtacctcccagcctgctttacttcctcataggtgtcccggccatctacagtcagggtgatgtcattgccgtgaacacagaagtcacagttgtatttgtccagggtctctagtgtagtgacgtagggagccgctggcaccacctcgtccacccatttgatggcctgcaccatcttgtatctctcctcctgagtgaacaccgggggccccttgtgcttggcgatctcctcatcggtgtgcacgcctacgatgaggtagtcacccatggcccgtgcctggcgcagctggttggagtggccgtaatgcaccatgtcatagcagccatcgcaccacaccctcacggcgcgcctgccccccgggcccggctgctctgcgccgcctgcagccccgcgcccgttccggatcatggccccgcagcggcggcgcggacagcactggcagctcccggcgactccgagcgccgccgcccgccccgccaggcgcaatcccgggaattccggaccg

SEQ ID NO: 439408 - DNA, 926 bp, Homo Sapiens
  misc_feature (380)..(380): n is a, c, g, or t
  misc_feature (414)..(445): n is a, c, g, or t
gtccggaattcccgggatggcaatatggaggcgatgtaagttctgagcgttagtcccaaggtcccagggtctcagggagcggcgcgagtggccagggaaggtatctgtcccgggagaccctatccttcgggaaatcgtggccagaggtcccctccatgcccttcagagagccccatgggactgagtcttgggcgagatcaatcagactaaggatcccgaagagaaagaagaaacagctctaagtgtattttgtccccctttgtttcatctatttctttctcccttgactctatacgacgacctgccactttttctagtggtcatcttggagatttttagatcagtatttaggcaaataaaggaagcttatgatatatatnttttaaagtcctcgaaattggaaacttcaatttnnnnnnnnnnnnnnnnnnnnnnnnnnnnnnnncctcgcttgcccagtctcttcacaacgactgcagatgtgtgagtcttttggaagaatagtgcaggctagtgggaaagttatggttgttaattactataacatgtgtttgtttagtgctttttcaaatcctctgtttcattcgagctgcacatcgactttgtgaaatcgtcaggataacccacattttacaggcgaggaggctgaggctccgggagatggagaaatttgcctatccccgtagagtctgagaagatgctggcacccagcgtcccttgccctgggaccacttccctagccctatgacctgtgttggaccagctttctaccccatcatctctcatctcttccatgcactctctggaatagtttcatgtgttgagtggagactttttcagagctctgaggcaggagctgtctgtacagtcccctgaggtcagaggcattaatgagtcaggacagggctgcaagaccatcccgtggc

SEQ ID NO: 439409 - DNA, 1990 bp, Homo Sapiens
  misc_feature (580)..(637): n is a, c, g, or t
  misc_feature (815)..(815): n is a, c, g, or t
  misc_feature (817)..(817): n is a, c, g, or t
  misc_feature (1976)..(1976): n is a, c, g, or t
caaatgcgatttattgtacataaaataaattaattacagtttaagccaaagcatgagtggctttttaaagtgcatctgtggaggggatgtggcaggtagcccctgttcacttgctgtaagataagtgttttagtatttcagccacccttaggcacaactcagccaggcctaggaagcaacccaacgtcattgccatgaaccatttacacaagtcacaccaaaatcaactgacacatttttttcctgatggaacagttaaaaaaacataaaactatacagtcaaagtctggggttgaagagcgtgaagttcacaggtcctccacacacgcccaactgagcatgctcatcctgtgagggggaaccagagccttcctgtaaaccatgagagcttaccaatgtctggtatacagaatattctggcccataaactcaacctgtttttgaggggtaggggattttccatcttgtacataaagaaagaaatctgggtatccttcaggttagaaaggcattctgtaagaatagtgttccagagttacaaatcatactggtaagagaaaagcaattcttgctgcttggnnnnnnnnnnnnnnnnnnnnnnnnnnnnnnnnnnnnnnnnnnnnnnnnnnnnnnnnnngcctatcaatgcttaatctgttctttcattcccactgtaaatcacatcaatacatttggtgaactgcaacggaccaccatttacaaggtagttgaatgcagaaaccgaaacgattatgccccctccccactctaaaggaaaagacacagagtacatttcacatattcagagagtgggntngtggggctctttcaagcctcatcaatcctgtccccctgctcagaacaacacttccttttctgtagcagttccacaggccctcttggcccttctgctccagccctttctggaaccaggaatcattgccaatattcaacgttcctgcactaggagaacctcaggccctcttcctgggaagaccaaacccccttgagtgctcctcctgcttcagacggaggtgacagtcctcactttggcagagagggcttgcttaaacctcctcttcaggtcctgcatgttgggtgacttgggcctgggaatgagggaggttcttcgcttctcgggtgtactgctaggctgctgtttgtgactgacctctttacagaggacgtggaaggcgctgtagacatcattataattttcactgacagacacttcatagaatgagcagcctagcatgctggctagctgcagtccaagctgagggtcaacctgtttgatgtgcaacaggtcagctttgttggccacgaccaccacaggcagccgggtgcccaggtgtagctgctgcacgtgctggtggagctggctgatgagttcatagctcttgtagtcagtgatggagaaaacgatcaccacagcatctgcccagcgaatgcacctattcagctgttcactgcagctcaggctgttctcatggacctgaatacctggagtgtcttgaacctgaagagccagggtttcaccttctatctgaacttgtctagtatagagattacctgcatttctttcatagtcaccgatgaatcgtttggtgaggaaccggaccaccagtgcggtcttgcccacgccgctggcgcccaccacggcgatcttgaccaggcggcggccggcggcgcccacacagcagtcggaggccgcggcgttgcccggcgcggggtactcggcgatggtgcacatgttctgaatgaggcgcatcgcctcggctgcggcgcaccgcgcgggaagggactgagggactggagaatgctagcgctgcgcgggagcgggcgggaggacccgactgcggggctccgcggtaagaaataacaacaataaataagtgcaggtacgggcggggtggggccgagcgccgaggttccgcagggctcaggctccatcccgggaattccggaccggtacncagcctgctttttt

SEQ ID NO: 439410 - DNA, 1723 bp, Homo Sapiens
  misc_feature (652)..(652): n is a, c, g, or t
ggaacaattaatattgcattctcctcctaattccacccagggcactgtgaggatagaccttccatagccattggggaatgtgagaatgtaatgttcatcatagtctagacatgagacacagccctgccctatgttgtgcacccccaattgacatccccaggaattttgatttggtcccagatatgagcattgaattgtatcttcttgttaaaacactcagcataaaaggctgaaatgggtggatgatgggaaacctgctcagccacaaatgttacactgtttttggaaacccagggaactggtccttctgaaactagttctgtgttctcttcagtatcatttggtaatgtccaatgacactgaaaaatctcgcccaaaatgggattgtatggctttttggcaactgatcctttccttcccgcatgaaaggctgagaggtaccatttcacaacctgaaccattcgatccttgggatccttctggtcactaatgctcacaaacaggtccggatgtgcaaaaaagtctgcatacatttctaaaagagatcttctttcaagaataaacgttggaagaactaccttagtaagatccattccaagtctaacctgcgacaagagatgcatgataacgctcttgtgctcctccacagacncctgcctccgcatcatcatctctgtcatcatgtgaatcaaacaggtcagcatcacttgttccattggacaaggaagaattaagtgattctgtggtatctgggcgttttagactatttcccgagctgctgtgtgtcaggactgaggcagatccagaagaatctattaagcgctttggggatgagccactttgatggaattcatcagcatcataaaattcatcttcactgctggagtaagagaactctgggactgtatttggagacaagttcacgtggcttggagaagtgagactgctactcggtggtgaatggccactgcctgtactatttggtgtaggagtctgatgatgtcccaaggtagccaacacaggtccaactggtagggaagatggacgctgctctgacttacacaactgaacaggttctggaggtaacacagtctgggaaggcattgtgctgatcacaggttccaaaggactaggttgatatattgcatctacgggattaatagtacttttggcaatctgcagcaacaccatgcacgtgtttaattgattctaccatgctatttgttgtctctttgagagtttcaattttctttctctgttcatcttctttgcagttttgaagcttgtcatccaaaagctttaattgttcaatcaagatttgtaggtaagcatcagcttctgtaagtttcttatcaaaatcttggacactaggaacaaatcctgaatccaaaccttgaagctggagagtatgtcgaagaattgtttcttctaaggcatggatccacttctctcgctcatcagcatcacgggcctggaaatggaaggttttctgatcaacagttacttgtgaaggtcgctgtcgtcctcatcgtctataccactcacagctcctctgagtctaacacatcctctgcgagagcctctcatcattttgtccttggacgtgtagtaggagagcagtcctgcattgtagtccagcacgaaccaacggtactgccagcccttcatcacgttagtccatttgctcagcggcccttccatgatgacgccatcttgggagccg

SEQ ID NO: 439411 - DNA, 663 bp, Homo Sapiens
cgggattaatagtacttatcattccatctgcgtgcttctccgcattactctggtcttttgccaatcttgcagcaacacactgcagtgtttaattgattctaccatgctctgtaatcccaccgctctggtaggccaaaggaaggaggatcgcttgaggctaggagacccagcccaggcaacatacgcagaatcccatctatttgttgtctctttgagacgtttcaattttctttctctgttcatcttctttgcagttttgaagcttgtcatcaaaaagctttaattgttccatcaagatttgtaggtaagcatcagcttctgtaagtttcttatccaaatcttggacactaggaacaaatcctgaatccaaacccccagggggcggcgggaaggaggcagggtgagcacgacattcgcgctccggcctggcggccgggaccccggggactcaggggtaggggccggcccctctcccagaccctcggggtctactcactccgcaagtggccagcaagaaagccattcgccaaggcccccgccctctgtgcctccaggggaggtagccgggggctgctcccgagcacccctttttcttctcccctcgacccgatccccggactgcggtgcaggcggtcctgactgaggttcagcccgtcccccccc

SEQ ID NO: 439412 - DNA, 1579 bp, Homo Sapiens
ttttttatatcaacatccatgttccaagggaagaccgggagggagatcattagcccttttaaactcttgttcctctcctcaaggtggcagattttcacaggaaagggggtggctgattggcaagaatgggagcaataggaaagcagccaaaacacaactcagaaacccggctcttcctcccagtgccagctcccttcctcgtgctgcttacatttctgaacactgtcaccaagaggcacccaatctgaagggaagcaaagtgtcacataaacttcaaaacaagttttatttgggaagtttctcattttgttaaagctgcaagcaagtttctttcacaattacacttccagagatctagtagttttacggatctcagtgttcaaaagtgtatttcaaaatgaacaaaaccaaacccacaccaaaaggaaatagcgtttagattggtttggaatgtatagccattgatttcaggtgttctcagaaacaggttaccatttccttggaaaacaggtgggatacagtcaatgcccacagaaggaaatgtcttttaaataagttagttactcggacaatattattcactccttagaaaatatagtaggataacaagtcacagctggcagggtatgcagtacagcaccgatttcacagggggcttatgcaatcctggagtcagcggttgttggcttatggtacacaaaataagagcagtcactggaagtggggagaaaatggtgaaaggcaggcagtctcccgcagtcctacccagccttttaacttgctaaaaggagaggctgtgtttttagcatctttgggagaacatttgagacagttcaaaaacaaaaacaaaacccccagtattattcccagaaagtccttgacagaaaagagggacctggtcagggttcccatgggggactgcgcctcccatccacttctgtctccacgtgatacaagacgtcagccagggtgtgctctaccacggcgccccagcccatgtcactcatagggcggtaagtgagatccttcggaggatacttgaagcatggtccaaagttaatggaaacctggagcgaattcaattcaagcagacatggaaaaaatggacaaaaaatattggaaaagttaatttgacacaggaaattttcactttaaatgtggctacaatactcgggggataaatggaacaaataagatatatattaaatattactaaaagtggtcaacatcctgatgtccatcaagaattaggtaactaaaagagatctgtgttgatttctgttgtcaaagaaaaataaaaattcaggatcccaatttgctctgtcaaaaggaaaaaattaagctgaaagctgagtcatgcaagaaactgcctttccttttgttgctaagcagacacctacagataaaacgttaaatatccccacaggcagctactttatgttcaccttaccttatgtgaagtgccgatttaccgggcatgagatgaatacataattgactttcccctatctgctccttttctcttgcaacatgtggatgaccataccctcctactttcccctccagcccgcatttcccc

SEQ ID NO: 439413 - DNA, 1228 bp, Homo Sapiens
  misc_feature (15)..(15): n is a, c, g, or t
  misc_feature (42)..(42): n is a, c, g, or t
  misc_feature (57)..(57): n is a, c, g, or t
  misc_feature (86)..(86): n is a, c, g, or t
  misc_feature (337)..(337): n is a, c, g, or t
  misc_feature (1116)..(1116): n is a, c, g, or t
caactgcggccgatncatccaggaaaaaacccatgatgcccnaaagacagccaacanggctccccgaggtgacccaatgcaaatcnagggtcttttggggaaaaagctcctggtggcttggcaaacatccttgcctcaagtgaaaatcctaaggatcccccagctttttccaggtcaagattggtgctttttccataagttggagtttgctggaaatttctgttctgttggccaagaccagcagtagacactgaggcctcacctcagactgggcaaggagcagggagcatacctgggccccagcatcagcatcagcctgctcctccccacacagcanctcggccaggccctctcccctgtccttcttaaactccgcacagctggaggtcttattttgctccaggcagatgccctgagtcaatttcacttctctgatgcctgaacatttgatttctgccttgatgtcacttaggataggagaagatgatgtatagggtttagtgggagatgttgcaaggctagtgctagtggttgaaaggtctgaaacatttccaggtgacaggctaggcttcaaggttgtctctggagttgaaacgttggtctggggtggtgaacactgtgctgattacagaggtctgtgactggacagaagagtttgtgtttccataaactgaggttatcacagaggtagatgtgaatttgactgtcgtttctgtgatgtttgtttgtggcctcattgccatgttgagacacagggtgcaggctggtacttccaagggtactaggtgttgtagtttcttggtaggatacatttgtagaaacatttgaaaatgttccctgggtaggtaactctggggtagcagtatccgttgttgtcaagatctcatgaacccagaaggcagcaaatctcagcatagcaaagcgcggtccagccccgcggcatcctgggccctgcgcgctgcgcccctgcggaccagcatccttcgcgcgcggctcctagagagacgcacacgagtggaagacactactcggcttggccaggacgcgctcttcccgccccctccgcccgggagaggggtgggggattcttgcttttttcctctcttctcccctccntttttagtcttggcaaggcagcgcctctccttggctgctactaacttgagctcccctggttggtcccaaaggcggagggcgttaggagggaggctgggttgccgccgtcgag

SEQ ID NO: 439414 - DNA, 1047 bp, Homo Sapiens
  misc_feature (229)..(338): n is a, c, g, or t
aacaaacttgttcatttccttttctttccattgagcacctctgaacaatgtgattcttttttttaagtctttcacacttcaggaaaatactacattcacccacgttgtgattcatatcggacagtttcttactcaaagataacacaaataccaattcttattcatactttgaaactatattttaccctagactgccttggttcaaaggcctagtttcgacattactgtnnnnnnnnnnnnnnnnnnnnnnnnnnnnnnnnnnnnnnnnnnnnnnnnnnnnnnnnnnnnnnnnnnnnnnnnnnnnnnnnnnnnnnnnnnnnnnnnnnnnnnnnnnnnnngatagctttcttctctcctcttgccccaagaagtattttcagtgtcatttctgagtgggatggagaatctctgcagaagaaactcatgacttggtcatttgttcagttatcctcttacaaaaccatgttttaaaacctcaccctcctggaagctaggagacttagtagaggccatcaacattcctgcctacctagaggaaaattatgatgaggccaacgtgaagaacatgtcctcatattcagacccttatttctacgttagaattttctttggaatatagtaatggtaaaactttaaaaaattaactgtactgctaaccttttccaattccggattttggaagtttctaagaatcatatgaactatctgtaatttgttccacatgtaatgatttatgatagcattctactttttaacaggtcatttttgtctctttttcatacctgggtgttttgttgttgtcagatattgaaaagcaaaatatgacaccaccaattatgcacagtgaggctcctgcccatccaataaacagagcggctcctaattcatacctgtgagaaagcattacacaagtattacagctcacttatttggagagtaaacagtatttaacagctgatagtcaacatttactaaatgcttattatgtttttttgctattgaaaattgtaaaggaaataataacaccttgtgtctgtaaaatgctgt

SEQ ID NO: 439415 - DNA, 1088 bp, Homo Sapiens
  misc_feature (996)..(1032): n is a, c, g, or t
ttgttttgttttttgtaaataaactgtttattttttatagaaagccacaacagaaaatgattagtatataactaactatgtaagaacacttacatccatacaatcaacagatgcttcaaatgcatattttaaaaatagttttgagtgttaattatgggagggccttgatgggatcattttgtgaacagttcgcttttataacaaactcaagaggcagcttgccagcgagctcttttagacataagcatttttatcaaactgttttgaagggtttgttgttttaaaatcttctccaccatgatactttgtccgagaagacatgacagatgtggccccgttgtatgtgtatctgggtgttttgttgttgtcagatattgaaaagcaaaatatgacaccaccaattatgcacagtgaggctcctgcccatccaataaacagagcggctcctaattcatacttttgctcaacaaagagaggatcaaagaattccgttgtgattttgtttgcatatagggaacatccagtcattgagcacagccctgacagtatgaatacaatcccagccaaacaagcaattttagctttggctttatcggagcctccgactttggtacacttcattccaaagagcgcaaatatggaaccaaagaagcccaggctgacagcagcgatcataagtcctctacatgcctgtatataaccgtccagcgccagcatggaggggaagtccttgcagttggagacgcccgtggagtcggtaacgcacgccttccacaggttggcccaataggtggcggttgtgatgaccgtgccgtcgatggtagacaccttccagtagtcggtgggcagcgtggaggacaccagtacccagcctgagatggagaccatgaaggcgatgatctccgaagccgtgctagccatgccgccggctgcagccgcgctcgctctccggctcccgctctcgacgaattcgagctcggccgatttggcctgatnnnnnnnnnnnnnnnnnnnnnnnnnnnnnnnnnnnnncggccgccaccgcggttaactccaggtcgccctatagtgagtcgtatacagttccc

SEQ ID NO: 439416 - DNA, 990 bp, Homo Sapiens
  misc_feature (636)..(636): n is a, c, g, or t
  misc_feature (645)..(645): n is a, c, g, or t
  misc_feature (648)..(648): n is a, c, g, or t
  misc_feature (652)..(653): n is a, c, g, or t
  misc_feature (672)..(672): n is a, c, g, or t
  misc_feature (700)..(700): n is a, c, g, or t
  misc_feature (705)..(705): n is a, c, g, or t
  misc_feature (740)..(740): n is a, c, g, or t
  misc_feature (764)..(764): n is a, c, g, or t
  misc_feature (773)..(773): n is a, c, g, or t
  misc_feature (799)..(799): n is a, c, g, or t
  misc_feature (809)..(809): n is a, c, g, or t
  misc_feature (811)..(811): n is a, c, g, or t
  misc_feature (814)..(814): n is a, c, g, or t
  misc_feature (841)..(842): n is a, c, g, or t
  misc_feature (852)..(852): n is a, c, g, or t
  misc_feature (866)..(866): n is a, c, g, or t
  misc_feature (869)..(870): n is a, c, g, or t
  misc_feature (877)..(877): n is a, c, g, or t
  misc_feature (881)..(881): n is a, c, g, or t
  misc_feature (907)..(907): n is a, c, g, or t
  misc_feature (920)..(920): n is a, c, g, or t
  misc_feature (941)..(941): n is a, c, g, or t
  misc_feature (955)..(955): n is a, c, g, or t
  misc_feature (959)..(959): n is a, c, g, or t
  misc_feature (976)..(976): n is a, c, g, or t
gcattaacagtaaccccaagaaaggcatcagggttctggagtggttgtttgagtgacacagcacaaggccttgatttcatcatgcttttgctgtggatgtagtgtagcttgctgaacaggtatggaagctgtctttgctgttaagtacttctcccgtttgtttatcaacctgcagctaacaggatgtctgcttttttacaggtttatttcacagagcagtgtacattcttgtcttccaggggaacttcaacatggagttacttttgatccctcagttttaattcagtgtctaaaggtttacaagttcaacttactctattttattcagctctttcacttactctgccatcacttcctacttgaatctgagttttagctactgtagaggtctcagacctttcctttttagtactattagccaggtaaaactttggttcttgtgagtggtagggatgagtttttaggacagtattcaaagcctttttaaaggaaccaactactcaaatgctctacaatgccaaaaatacaatactcctgcaggttttcccaagcatggccaaaacaatcaaaatctgacagaaaaacacagctgttcagctctggaatctgatgataggctactttttaatgtcaggntatccttcngangttnnacttagagtgtcacatgtnagcgtgagggctggctcgttggtgtgcnattgntttgtttttaggaagagagttatgattgcgatggncaatctcagtacatgttgtgtgtnatgattttnttcacgctaaaggaatgggtattatnattatgtgcntnttntatagaattgagtttcgtgtgtggagnnagcgtaaatntagattcttcagantannataaaanatgntttttgagagttaaataggaagatgncttttttaggagngtagcatatgtagtgtatgtntcagatgttgcgtngtgntcaatgtatatagagangttagtacagtgct

SEQ ID NO: 439417 - DNA, 1073 bp, Homo Sapiens
ggggttaggagggctacctaaggccaggggcaggctttcgggggtggagaatggaaccttcacaggacttcccagggtttgcgaatccaaaaattatggcctaaagggccccctggagccctgttctatgaatatctttcgggcctttttcagcctttgatccgtgggtcagtcctgatacatccaactttgccttttgtagggaatcaaatatatcatttctcttgggtaggtctgggaaaagggcctctagtttctccacatatttgctgtcctttggggttgcctttccaattttaaggtccatgttgacacagtccaggatgatggttccatgcagaagggctgcagtttgcctgtccaagatctctggtgccccctgcaggattctctcggtcaccagggtagcacaggaccccaccagctcaactgaaacatggcagggagggcagtgtttcggctcgatgggtcgatggtctagcacctctgctactgcctcctctagggctgtgtcacttttggataagatatgatggtcgacaaggatgagggtgagttggccagcctggtataatgcatggaggtcaatctcatcccgaaaaatcaagatactctctggaatatgaaccttctgaagaaagaagacaatgtcacctcgcagaggtagttcagaacgttttatatttaaaactggcacaaagacttcctcagcctcagttgtctttgctaggtaaaaagccagggcaagagcagacactgtggagtccaaatcacaggcttcatttcccagcacaacatgtagaggtcgggactcctgcagagcagctcgacaaccctgcaggtagtcctccatgatgaagcccaaagtacgccgtcgcccctggtcgagtagaggtgcccctggtcgaggagaggtttccccgacgaatgcagcccgcccgggactcagggactagaggccagagtcaggaggcgggactcgaacccgccacacggcgaatcggcctccgaccccgggaggaactgcgtaagcgggcgctccggagtccggcgtcgatcccgggaattccgga

SEQ ID NO: 439418 - DNA, 1029 bp, Homo Sapiens
  misc_feature (444)..(444): n is a, c, g, or t
  misc_feature (779)..(798): n is a, c, g, or t
  misc_feature (800)..(801): n is a, c, g, or t
  misc_feature (803)..(803): n is a, c, g, or t
  misc_feature (807)..(807): n is a, c, g, or t
  misc_feature (813)..(813): n is a, c, g, or t
  misc_feature (830)..(830): n is a, c, g, or t
  misc_feature (838)..(838): n is a, c, g, or t
  misc_feature (859)..(859): n is a, c, g, or t
  misc_feature (862)..(862): n is a, c, g, or t
  misc_feature (867)..(867): n is a, c, g, or t
  misc_feature (869)..(869): n is a, c, g, or t
  misc_feature (874)..(874): n is a, c, g, or t
  misc_feature (883)..(883): n is a, c, g, or t
  misc_feature (899)..(899): n is a, c, g, or t
  misc_feature (901)..(901): n is a, c, g, or t
  misc_feature (905)..(906): n is a, c, g, or t
  misc_feature (910)..(910): n is a, c, g, or t
  misc_feature (914)..(915): n is a, c, g, or t
  misc_feature (919)..(920): n is a, c, g, or t
  misc_feature (925)..(925): n is a, c, g, or t
  misc_feature (939)..(939): n is a, c, g, or t
  misc_feature (941)..(942): n is a, c, g, or t
  misc_feature (947)..(947): n is a, c, g, or t
  misc_feature (951)..(951): n is a, c, g, or t
  misc_feature (956)..(956): n is a, c, g, or t
  misc_feature (958)..(958): n is a, c, g, or t
  misc_feature (963)..(964): n is a, c, g, or t
  misc_feature (968)..(969): n is a, c, g, or t
  misc_feature (971)..(971): n is a, c, g, or t
  misc_feature (974)..(974): n is a, c, g, or t
  misc_feature (977)..(977): n is a, c, g, or t
  misc_feature (981)..(983): n is a, c, g, or t
  misc_feature (987)..(987): n is a, c, g, or t
  misc_feature (989)..(989): n is a, c, g, or t
  misc_feature (994)..(994): n is a, c, g, or t
  misc_feature (1015)..(1016): n is a, c, g, or t
  misc_feature (1021)..(1021): n is a, c, g, or t
cagttagatcaagttttttattttcttacacaaggtgttatagaaaatccaatctttcagaaagacaaaaacaaagttaatcacaatgacataccagtggaaaatttataatcctaataacctgtcctaggctctaaatccatgtaaaatttgccttgcttttgtttaagggattggtccaaacaaatggagtttatgaagcaatggatacttgtaaaaggtagttcccactgttgcactgattccagtcttggtttttaatatatacatattttttttccagagagtttagtgaatttcatatgccctatcgtctcctctccacttagaatgctttatagaacagcccatcatgtcctgtggcctcagtttaacccaggatttgttaaaacaaactgcatagaatggcctgttagccatgaatatttggggggagtcactgcnccccatctccaccccgatttccgcaaccttgctctagaacctcttcataaaataacatcctgatgtggcctatagatcggggactttatattttctatctgggtccactgaagtctgggcttaaaatccagagctgattctgggcaaacaggggaagagtaccctgttgtgtcccagatgaatttttctcactgaattgggaatgtgataagcgctggtcaaaccataaaattctgatatttactgtcatatattttgcttgccaaatagtctaacaaagttctatagcttcggctcttagatctaagaggataaaatgttaggtacaagaatcnnnnnnnnnnnnnnnnnnnnanntncgtnattatnaactctgggaaacaganctgggaancagaagcttaaaaacaaaagnaanggggngnaaaangattggggntagggatcaataaatncnaggnncgcntcanngggnnaatantttctacccatttngnnttgtntaanatgtncngtacnnaaanntnttnaantgtnnngagntnggatnttttagaaaataagaaatccnngaaancttaaaaa

SEQ ID NO: 439419 - DNA, 904 bp, Homo Sapiens
  misc_feature (70)..(70): n is a, c, g, or t
ttttatccagcctacttctgttgttaacgacggtgcctggtctccaaaaatcatcctatatattgcagcntgcaaatgagaacagggtggagattgggcccttcatatcagcactttggcccctctgattgtgaatactgctaaccctggaatcaagttcacaaccattctctttgccaaacaaacagattgccttctggtaggagacagtgatggacaggtttctgtgtatgaactgagaaatatgcctactgttttggaaactggccagggagatataatggatactttgcttggatccaagtcaaaccaatcagcataattcatcattcctaatatttttcttgtagttgttttaaaaaaggaattaacatccaatattctgtattacatactgtacaccagattttgatttcagaaaacaatatttgatgtataacttccacttaatttaaatttaataaacttttatttcagagatatttgattagtttacaatctaagagttattcttaagagtttcagtggaattttcttaatttttctaaagatattcctactctcttgatcatattctaagtacatatgagtacatgtacattcttatacaatgtctaaatgggttagaaaattattatacctatagaagcgaaacttggaaattaatagaatcacttaaaccaaaatctttataagacacaattctattgattttaaagcttctgctttccaggctctgttttccagagtttataattacgtagtttttagtagatgaaaataatggattcttgtacctaacattttatcctcttagatctaagagccgaagctatagaactttgttagactatttggcaagcaaaatatatacagtaattcagaatttaggttgaccagcgct

SEQ ID NO: 439420 - DNA, 986 bp, Homo Sapiens
  misc_feature (825)..(825): n is a, c, g, or t
  misc_feature (842)..(842): n is a, c, g, or t
  misc_feature (865)..(865): n is a, c, g, or t
  misc_feature (947)..(947): n is a, c, g, or t
  misc_feature (970)..(970): n is a, c, g, or t
  misc_feature (972)..(972): n is a, c, g, or t
  misc_feature (978)..(978): n is a, c, g, or t
gaggcgcttccggtggcggcggcagcagcggctgtggtggttccgggtgtctttgtccccccggtgtcgctgccctggcccgcagccttttccccacgactctgaaagaggacagcgttcccaatgtcccagtttaagcgccagcggatcaacccgcttccagggggacgcaacttctcaggcacagcttcaacatctcttctgggccctcctcctggtttgctcactcctcctgtggccacagaactgtcccagaatgccaggcaccttcagggtggggagaaacagcgggtcttcactggtattgttaccagcttgcatgactactttggggttgtggatgaagaggtcttttttcagctaagtgtggtgaagggccgtctgccccagctgggtgagaaggtgctggtgaaggctgcatacaacccaggccaggcagtgccctggaatgctgtcaaggtgcaaacgctctccaaccagcccctactgaagtccccagcacctcctcttctgcatgtagcagccctgggccagaagcaagggatcctgggagctcagcctcagttgatcttccagcctcaccggattcccccactctttcctcagaagcctctgagtctcttccaaacatcccacacacttcacctgagccacctgaacagatttcctgcccggggccctcatggacggttggatcagggccgaagtgatgactatgactccaagaaacgcacaccagctgggctggtggagagccctggaggtgctaagaagcccaaggcatgacctgcctccttaccgggtccactcactcttacactgtgncagcccatctgtgactnctagaactcagcgcgttaccgcncctcctggtccctcagatttctgtcgtgcatctgagtggctatcagcttcccctgagccagccttttcctccatatcaagcnggtcaggtttttttaaaggagancncagagntggtgtga

SEQ ID NO: 439421 - DNA, 1493 bp, Homo Sapiens
aaaaaattcgtgtgttatcaaccaaaagggcggggtagggccatttccggaacataaagggcaacacaaagtatacaccgaatccctgggcgcgattgggggaacacctccggtggcgtccaatgcatggtacaaatttacaataaagggcaaataaagataaacactcttcagttatgaacaatcaaaggtccagccgaatggatatacatggtcgctgtcccctgagtaggtacagcagctaatcttgtatcacaggtgtcccccctaggccactcgcggcaactccacctaattgtgaaaacaccagctgtgcctatttgctagatcaggaagacactgagggattttggggggtctgccgcatggcagcgatttcatcataaccaagtggcgctctcccacacccacgtgcagcagtccctggtcgcggctggtcctcaacggctcctcgccctctgcccaccctgggagacctgtccaggcggcaggtagggaaaggagtggaactgcggtcctttctcctcagccctaaagaagaccgcccttctctcgacgcaccaaagggctcacgtgttctctttgactagggaagcaggcacttactagtgaaccacaatacgaggcaaggcagagggcagggacgtccttcgaaggtgcgctggagggtcgcctgctgcagccgcacccgccgcgcgtgccccacgtttctttgaacggaatgaaacgcagagaaacataagatcccgggagaacgcgagggagacgagtgaccccaacccagtcgcggggtgccgggcagttaggccagggtgccagataaggtctgaggcagttggcggcggcaccccggccgttgcttgccacccgcagcccccagccctgcaccagccgccgatccccgagcgctcagataagagggtagcggccctcgccgccgtcgggctccgcggcgaccccgcctcgagggcggccaagcaccgacaactggcagcacgacctccccggggctgagctgctgcagccgcatggactcctcgtaggtgggcagatacttgacctcctcgtagctgggcagctgcaggaagaccggcgacactacacgcatctcgtgctctgaggcgcaggaggggtccgagcgcccgccgcctccccggccccggccgccgccgccactgtccagcagtgagtcctgagagccggctgccgcctcgtcgcgcagcagagagggcgagtcgtcgtcgtcgtcgggcggccccgcgccccccagcggtccggcgccccccggaggcccgggccgctgtcccgggcgcgcctggccgcgcgggtacctgcgtggactggggcagatgatgcgctgcaggaaatagccgatggcgaagagcaccagcaggatgagcagcccggagagcttgcggacgaaccagcccacgttgtccaggaaggcgtgcagcggcagcttgcagcagcgcaccgccgtggcgttggtcgcg

SEQ ID NO: 439422 - DNA, 2232 bp, Homo Sapiens
  misc_feature (804)..(804): n is a, c, g, or t
  misc_feature (1524)..(1524): n is a, c, g, or t
  misc_feature (2169)..(2169): n is a, c, g, or t
aggaaaataacttaatttgctaaattcatcacacgcacaaacatcacacacacaaagaagctactctccttataaacagcttgtaaaggacttctcagacataactacagataagaataatacactttttaaaaaactataatagtgaagtgctagtgttgctgatctcacaacaaaagaacctttcaagaacaaacatcttaatatataaaatatgtttagaaacagggagaagtgggaaatttgttatacaagtgcaatataattagagcagaaagaaagaccacagtataatctcaacaaacacgtaaaaagttagacataattattccacaggaaaaagtgtaaacacttgactataaataaattggcacagagtatccaaagtaaaagtatcaccactctgaaaaataaatgtcttgaaaaaaatacctctactccttctaacataaataaaaataggttgtctttttctaactgcacctatgggtccacatgtttaaggtcccaaatagatgtttttgaatattaaaggggcccttcgcttgcaaaagtaatcagatataaggtttcgcatttaattatggattttcctgtctcccttggtgtcatatcttggggataaaataccaccaagctcagatcctcccacagtgtgtctacttgttctcaatttgtctttttaaacttactaaatattcagggtttatttggattctaatataatctttattttcacaacagaaaggaaagtttccagtcgcacctttctgtgccttccatctctatgggagagatccctcnctctctcctccttcccagtgtttggtgatttgtccattagaaaaattccagatagcttaaagttatgagcctgcatactctgaacttctgccctcattctttcaacacattaagatttgtggcggatgaatgtaggagaactcaaagtctccagtgggttaaaaccacaacccttggggagccccagaagtggctcatctcgggtgtctccacgaggttctcctggcctggaaaatcccccctgcgagcccccgggctcgccagacaaccccacctgcctgcgtcggaaaccttccctcgtcgccctgctgaccagagagaacaggtagcgagcttcttccccggccgtctctcgaggcggccgtctcgctgggccaccgcagcctccgccacccgagcgacggcgcccgtccggatccgtagcgtttcgcggacgccgggacaggcggccccccgcggcgcaccccgccctacacgtccaggacgtggttgagataggagatgtagcagatggccaggcgcaggatctcgatcttggagagcttcttgtccgggggcagcgtgggcagcaatttgcggagctcggcgaaggccaagttgaaggcttccacgcggatgcgctcgcgggtggcgtgggccgagcggtacttggccgtgggcgcccggcggcggcgcttctcctcgcggctcagctgctgcgggtgcgggtagagcgcggcntcgctgccgcccttgccgtcgccctcggcctcctccaccggctccaggtccgacacgctgccgagcaccttggtgtccgtgccgcccagggactccggatccgagtgcgccgagctgggatggtccgaatctgctgcttggtccggactcagcatcattttggaggctgaggaggggtcggaaaattaatcagtaaaaggaatcagggtattttgctggaaggatggctgccgaggcctaccacgccggtcctcccagcggacgcgcggcccgggccccctccccacagcaggccggcgcgcgacgcgggagggcgccgataggatctggcccgagggcgcgagccctgcgcctcgccctggcgcgggagccggcggggacgcggttgacccaggccgcatactagactggacacctcgacttgcagacggccacagcgggcctgtggccctgggcctggggaacaaccgcaggcctgtggggtcgcgactgggtttttgtgcctcttccggccaaatgccaaccgcgctattcctcctccctcccttcgtccccttcccggacaaacgagcgatttcgaacaacgaatacatctgggttttcacgggggcggggagacgcggggtgcacttctcgccccgaggntccggcgaagcaacccggcagccgcggcgcccgagggcctggcgctggtctggggatcccggg

SEQ ID NO: 439423 - DNA, 1336 bp, Homo Sapiens
  misc_feature (201)..(264): n is a, c, g, or t
cttgtattttcattctgtttctctgggtcattctttctgtaccgatcatttcctcgtggacatctccaaccatcatttgcccatcttcccttccaccggggagagtaactatctctgtcaattctaccaaatgatgaactcttactttttgttctacatcttgagggggacctagaatgagatctggacctagaccacttnnnnnnnnnnnnnnnnnnnnnnnnnnnnnnnnnnnnnnnnnnnnnnnnnnnnnnnnnnnnnnnngacctggatttttctcctgggggaagaatctttcactcttggctgagatcttttgttctctctagaagtttctcttcttggggacagtgattcagatcttctgctttccctagtagtatccctttttggagaccgagactgagattgcctcctttctcttgcaatatccttttttggggactgagaacgggattttttccggcctctggctgactcattcttaggagatggtgattgagacttcctgctttctttcccagtttctcttctgggagatggagactggggccgcttcttttcttgtggagtgtctttgttgggtgaccaagttgtagatggagaatgaaatctagatcttcgagtacgaggctttttggttttatctatggtatcttttgggctttcagatggttgagaaacagtttcaaccttttcatccgcaagatcagaagacggcatattattttcagaacagtgtgtcacagaattttcattcatattgtttaagatcagcatttacagatggttcaacttcagattcattttggtcactgcaaaatgaatcacactccataggtatcatttcattgttgtcctcactaaaatgcttctgaatctgttcaatgtgtgttttaggcaactctgtagatctaggatgttcggtcagcgattcattcttttcttctaaagatttttccaatttggtgttcagaagattattttttagtaagttattttcagagtcttgaatattattgaaatcttcactcccaaaagtatcacatgttgcaattatttctacatcttcagtttcaacatgcccaagcaattgaacctctgggctcttaacagattgtctgtccactgtctgtataatttcaccctcagaagattctaacttggggctctctataagctcctctgtttttagtgtaaaatctttatgttcagtaatttctactagggaactctctgttattttttcttcattaaccactgactctacattctcagataagtcacttaggggacaagatacaggttgtacacgcataaaggtcctggtagtcac

SEQ ID NO: 439424 - DNA, 1333 bp, Homo Sapiens
  misc_feature (824)..(874): n is a, c, g, or t
atcaacttgctggtttgtttggtcttttaggctagaatcctgtccagatgtttcctcctcctgtttcatccatccagactgtggacctgaagaatttctgcctcgtcgtgagtagtagttttgtacatctgctggcaaagtctttctcacggcccagctggatgcagatgtccatccagatctatctgctggtgtatcaaatgagaactcctgttcactttttcgcttataggattgctgttccacaaacttgaaagattcactccctgaactgtttgaattccctgagaggggttttcgattttgccaccgattttcattctgatctttataggcaaaactacttctgtaagtgcctctaacacggttacctctgcctctaccacggttaaatacccaaccagaaccaaagtttttattccaagaatttcctgaattttcatttctattttcttcccaaatgagactctttcactttttctggattttctggttcttgggatcaggcccagagtttattttttctgttatccaatggggacagtcatttctatgtttgtcagcagaatttggatcatcagcatctagatggatgtcatttttttcttttcttgtattttcattctgtttctctgggtcattctttctgtaccgatcatttcctcgtggacatctccaaccatcatttgcccatcttcccttccaccggggagagtaactatctctgtcaattctaccaaatgatgaactcttactttttgttctacatcttgagggggacctagaatgagatctggacctagaccactttctggttctccttnnnnnnnnnnnnnnnnnnnnnnnnnnnnnnnnnnnnnnnnnnnnnnnnnnngacctggatttttctcctggggaagaatctttcactcttggctgagatcttttgttctctctagaagtttctcttcttggggacagtgattcagatcttctgctttccctagtagtatccctttttggagaccgagactgagattgcctcctttctcttgcaatatccttttttggggactgagaacgggattttttccggcctctggctgactcattcttaggagatggtgattgagacttcctgctttctttcccagtttctcttctgggagatggagactggggccgcttcttttcttgtggagtgtctttgttgggtgaccaagttgtagatggagaatgaaatctagatcttcgagtacgaggctttttggttttatctatggtatcttttgggctttcagatggttgagaaacagtttcaaccttttcatccgcaagatcagaagacggcacc

SEQ ID NO: 439425 - DNA, 1493 bp, Homo Sapiens
  misc_feature (7)..(7): n is a, c, g, or t
  misc_feature (44)..(44): n is a, c, g, or t
  misc_feature (69)..(69): n is a, c, g, or t
  misc_feature (108)..(108): n is a, c, g, or t
  misc_feature (117)..(117): n is a, c, g, or t
  misc_feature (131)..(131): n is a, c, g, or t
  misc_feature (151)..(151): n is a, c, g, or t
  misc_feature (202)..(202): n is a, c, g, or t
  misc_feature (204)..(204): n is a, c, g, or t
  misc_feature (445)..(445): n is a, c, g, or t
  misc_feature (463)..(463): n is a, c, g, or t
  misc_feature (542)..(542): n is a, c, g, or t
  misc_feature (555)..(555): n is a, c, g, or t
  misc_feature (580)..(580): n is a, c, g, or t
  misc_feature (1482)..(1482): n is a, c, g, or t
ttttgtnctcaacaaaattattgggaaataataaccctaggggngcccctttgccacggttcctaggtngcggggtcacagcagccccaaagggggaggaacctggcnatccgaggngtcccggccctggnggtcacttgcccagcaggangccggcgcgcagacgcggggcacgcggcggatggtcagcgagacccgggtncngcgcaccaggcaggctgcccggccgcgccgacgggcaggctgccgcattgggcggcgaggaggcggcgtccagcgcgtctacgcgggcggcggcgatgccgtggagaagacgcgtgtaggcggggccgcggagcaccagcaggctgcgcggttccagcagtagcgaggtggtgggccggggcggaggccgaggctgttctgtagggtcatcgtcctctggccgccgcggctcgtagaagtncagcacggtgtgggagcncaggctgatggtgcatgatgccctccccaggcagatactggttcacgaggacatggttagctgggaggcctccaaagangctgaggtttganactttgtccacgtagcgctggagcnatgggggcagccgctcaggaaccatccctcggggatgaggaagcccacccccagttctgttactttctcccagagagctgggtccactttggctttggggcattaaaaacctgctccactctgaacggttccagggctgggactctggcgtcctgctcctccatcaacaccaactccttgcacccaatcctcagccctcttctgaaacgcacttggtctctaaaatctgagtcttcagcatcttacaagccacacagagagcccctacgttccatgcccggacacaatgagccccaagaataatcccccattactctgtccactaagggcccatccaactacacatatgccttctcaatcctcccacagagaacattctctggccccacacacagggagcctttctcaaaagctctacacatagcccccagggctgcactccagagcccctttaaacaccttgagaccccgcttcagacctgcaactgtgagcccggctatcaacactcagcgacccccgccccccaccgaatcccattctgtgcactcctgtgaccccaatctgagcctcctcagacatgtccaccctcagcctcctcggatccccccatttggacgcccctcggatttcccctcctgagcgccccttcactccagcaccctgagatctttagctctgaggctgactcccaaatcttcttccctccctgaaccattcagatccccgactccgagccttttaggactccaagctctgagcctcctcggactcctactctgggctcccccggatccccactttcagccctattgacatccatctctacccccagcactccccaaaactgaccgtccaccagcgtcccctccaatttccaaattcaacatccccatccccctcncagccatatcc

SEQ ID NO: 439426 - DNA, 1084 bp, Homo Sapiens
  misc_feature (758)..(795): n is a, c, g, or t
  misc_feature (1000)..(1036): n is a, c, g, or t
gtttgaaagatttttttgtttatttggtatggggtcttctgtagctcacacaaaattattgggaaaataaataacccaggggagccccctttgcccacggttcctaggtcgcggagtcacagcagccccaaaggggcaggaacctgggaatccgaggggtcccggccctggcggtcacttgcccagcaggaggccggcgcgcagcacgcggggcacgcggcggatggtcagcgagacccgggtgccgcgcaccaggcaggctcccggccgcgccgacgggcaggctgccgcattgggcggcgaggaggcggcgtccagcgcgtctacgcgggcggcggcgatgccgtggagaagacgcgtgtaggcggggccgcggagcaccagcaggctgcgcggttccagcagtagcgaggtggtgggccggggcggaggccgaggctgttctgtagggtcatcgtcctctggccgccgcggctcgtagaagtccagcacggtgtgggagcccaggctgatggtgctgacagtcgggtagtacagtggtccgtcctcgtggggcatgatgccctccccaggcagatactggttcacgaggacatggttagctgggaggcctccaaagaggctgaggtttgacactttgtccacgtagcgctggagccatgggggcagccgctcaggaaccatccctcggggatgaggaagcccaccccagttctgtaactttctcccagagagctgggtccactttggctttgggnnnnnnnnnnnnnnnnnnnnnnnnnnnnnnnnnnnnnntttggagatgaagtcagggacatagtagattacaggtggtgcctgctccactctgaacggttccagggctgggactctggcgtcctgctcctccatcaacaccaactccttgcacccaatccgtccaccagcgtcccctccaatttccaaattcaacatcccctccgctctcgacgaattcgagctcggccgatttggcctgatnnnnnnnnnnnnnnnnnnnnnnnnnnnnnnnnnnnnncgccgccaccgcgtgagctccagtcgcctatagtggtgtatatttccc

SEQ ID NO: 439427 - DNA, 2748 bp, Homo Sapiens
  misc_feature (2698)..(2698): n is a, c, g, or t
gggatcaacagcaagaaggcccctcagttcccctcaagcctggcaccagccgcagggcccggtgtaactttgcagggataggggactgcttttgaagacggaattttctcttaaatctctaagtgttttgaggtttgcaaaatctgttttcgggattgttctttcctcagttaaaataacaaaataacccagtgtgttcctgtagaggatccagggttttagaaccggacttgcgagtctcacctgcctggcccctctcccccagccccaggccatctgcaatctgttttaccagcacaggcctcccttcctctccctctgccttggcctctcccacacccaagggcccattcctgtctattctcccagggtggtgagtgagcctctgcaccacacttgccaagggtgctcacagagcaggcatgaggcccgcttactggaggaagcgagtctggactcgggctcaggcctgtggcgagccttcatgggggctgccctgcacctgtcctcagctggggcctgcggcaccatagaactttctctgtccaaaaggaaagcagacatctctccccttcgatgtgtcatcccccgcggcccccgagcgtcccacatgaacctgcagcacatgcccggaggcactgcatacagtggctgcaccccaggccatccaaagaacagcagcacctggaaggcagcagcacctgccagccctggaaaggcacaccaggaagctggcggggacagggtgtgctggcctgttccaggaactcggagctcatgtggccagggccaggtgcagcctggctcccttacaggggccaggagtggcacgggagaagtaggtcgtcggctcccgtcttgccagggcctggacactactgctttttcctgtgcccccatttttggtccaggcatccctttgtgttgggattgcactctgtagcactggaatgatgtgggctgcaagtccaggtttgtctgagtgaggacaacacagtgcttcccaggggctcagatctagggttgacccaggcttggggtgctaagggggagcccagccagctcctgcccctgtgtcggcctcctccctctccactgcctttgtgctccccctgcgcctgcttcaggagggaagccacagccggcctgcagggtggttgtggggtgtccagctggcaggtagagaaaggagggaccccaaggagtggaggagggccaagccacgctggcgggagctgtcctcctgggtcctgggcactgctagaggccacagccttctctctgctctccctgggccgccttcctgggtcctgggcactgctggaggccacagccttctctctgctctccctggggagctgctgtgctggttgggtgtcctcagattctccttgtgttcacttgaaagacacaaaggcatagatgaccagaaggcagggatggcggggaaggagcgcgagggctgtgagggcctgggagatctgggggccaccctggcctgggagatctgtgggcctttattctatttgtggaagagaaggacccactgaagcactgggagcagcaactctttttgtctttcttttggaaggacgtcacccagtgacagccagcagtgcccaccctggaagagcaggtgaagaggctccttgggtgggcacccctggcgtcctcccatgagggcagcctcacaggggtgtctgcctgtgagttttgttacagggcctcaccaagagagggcctatggaggccgaggaccagggggagcttttcctgcacctccggtcagtggcacgtgccccccagaccttatctatgcaccgactccagagaaagctgaaggaggcagccagaaaaatcatcagcctccgcctggagaaagagcagctcatcgagatggggaacaggctccgtgcagagctgggccgacccgaaaggtggctttgcaccacgccctccctcctgcccctgaggcccggaagccaggcgaggagcccaggaggcctttggatcgcagcccacctttgggacaggtgcagccccattttacatctcaggacgccaagagtgccgaggatgaggctccttccagacacttgggaaagcaccagccccgctcagcacaggtgggcagcagacttgacgccctgcaaggcccgaagacacaacacagcatccacacggtgacctgtaaatcacctcggcagaaagaagacaggtccccaaagccaccccaggctccccagcaccctgaggagcatggtcgccaatcccacagctcctcctcctttgccagtggcaccctccaggacatgtggaggttgctagacctgggatccagcccttctggtgtcacctcccagggtgactcaactccagagctcccagctcctccagcagccgacaggaggcccgtcaagatgcaggcaggcattgccaccccagggatgaagacagcagcccaggcaaaggccaagaccacaggagcctcccggtctcatcctgcaaaagctaaaggctgccagaggccccccaagatccgtaactacaacattatggactgacttcctccccccaccccgccccactaaggggtgctcggggcctccgcatggtgcctgtgctttcacctacgtgttgtgggggggtgtgggcacagcgtgcagggtggaggcagggagctgcagggcaggctacnaaatgctgctgaggcgaccctgctgactgaaggcctccctgagcacaggg

SEQ ID NO: 439428 - DNA, 524 bp, Homo Sapiens; identical to SEQ ID NO: 130638

SEQ ID NO: 439429 - DNA, 1966 bp, Homo Sapiens
  misc_feature (1880)..(1916): n is a, c, g, or t
ttttacgaggcctttaatattctaaaatggcctttctgtctatatatagagaaaatataatagtgacagtatgcaagcgtgatactcacaatgtttaacaactggtatagcatagcctcccaccaatcagcatggatttcagccataaactgccagtaccactctcctcttgagaacagctcaggctgaatatcagcccatgtaggatgcattgcttcccaaaggttttgcccaaggagctctatttttatgtgctatctcacagagctggtgagaaatgctctggccattgctggggcctcatctttctaggggtggggtcagggcttatgattctggccactggggttcaggagaacggtagccctggcagtgactcctggtagcaccggctgatagacttgaccatagctgtagtggaaacagatttcaaaagacagatgttcctctgtcccagctgttccggggactttgtccctggtgggtgagcaggtgcctgtccaggtgatgttttcggccaaagctcttctcacagcgagggcactgttagggcttttccccagtgtgggtcagccagtgttttacaaggtggtgtccttcggtcaaagctttttccacatttagtgcacacgtgacactttggcactggtggggcacgctgccgtttccttgtgccagggctctctccaacctcttggcctttgcaggatttgccttctgcatgcactctctggtggctggccagatgggagttgcatcggaaattcttaccacactcagagcacctgctggtcttgtcatgtaggtgggttttctggtgcctgatgaggtgatgtcttcgcccaaaggtcttctcacacttgaggcagctgtagggtctctccccagtgtgtgtttgttgatgcctggcaaggtgggaaccccatacaaactgtttcccacactgggggcatgtgtggggtcttaacagggaatccatctctgtgctacacagcaggtttgagaaactatcttcctgaagacaagggggccccaggagcattcctctggagctgctgggcatggaatcccagctctcatcatgctccgggttccagagaaccagtatctttcagacacgctggataaacattctgggaggttctgcttctagttcaggggtatccccctcatgttcacttccatctcctgtatatgtgaccctcagaatgtccctctcctctaagtcctgggggtcagggacccattgttcttctcctccttctagttgagaaagcatgtccagtttgggaattggaaatctcagagagactactatcccacagttttcctgcatgacatattctccataaaagtctgtctgagaggggtccaggctccgccactcctcctgagagaagcacagtgacacatccttgatggttaccaggccctgtgatccagccgcaagaagtgcagctgccatctcccagtctccagtgttcccctcctggggaattgcaggaacccagggagcagactgagccttctcctgaagggactgtggctcctcttcaaggtcacagcacaggtgctccagaggtcctggtactgttctccatggccgctcttcctggcttcccctttccacctggggctctgctccatccagctgtacattcattgattcccatcttgtccccagcgctgctgtctgttctgaaagcatttctgctgcagacccaaattgtgacccccggtaggcttggcccgcggcccggtgcctccctcccgggcgccgcctgcccctcccctccgccctccgcttgcgtctgggagccggcgaccggcggagccagcccgctctcgacgaattcgagctcggccgatttggcctgatnnnnnnnnnnnnnnnnnnnnnnnnnnnnnnnnnnnnncgccgccaccgcgtagagctccagttcgccctatagtagtcgtatacatc

SEQ ID NO: 439430 - DNA, 1540 bp, Homo Sapiens
  misc_feature (204)..(266): n is a, c, g, or t
  misc_feature (1432)..(1432): n is a, c, g, or t
  misc_feature (1438)..(1438): n is a, c, g, or t
  misc_feature (1453)..(1453): n is a, c, g, or t
  misc_feature (1478)..(1478): n is a, c, g, or t
  misc_feature (1482)..(1482): n is a, c, g, or t
  misc_feature (1487)..(1487): n is a, c, g, or t
  misc_feature (1499)..(1499): n is a, c, g, or t
  misc_feature (1505)..(1505): n is a, c, g, or t
  misc_feature (1515)..(1515): n is a, c, g, or t
  misc_feature (1522)..(1523): n is a, c, g, or t
  misc_feature (1531)..(1531): n is a, c, g, or t
cgtgactatgctctacgtgggcccgagcacccgggcagtggcggagctccggagccgcagggctggatccactttatctgagacgaggcgcctgcggccgacggcggaaaacaccaaaggcacccgggggcggggcgacccgatgtggcggggaggagtaggagagaccaggattggcgggagcggtccaagggagtcaagccnnnnnnnnnnnnnnnnnnnnnnnnnnnnnnnnnnnnnnnnnnnnnnnnnnnnnnnnnnnnnnnagtgagcggaaccaaagaagctccgggagatccgggtgttaaaagctggttggatgtgagtggaaggaactcagaatataggaggaaggagacccgaaacggcaccggagggattataaaaaaaggaaaagaatggggatgatggtggccttcccttcagtgagtgggctctgggagaaagggaggaggtccatcaggcctaggcggttgaagaaggttaagaaccttttggagatggaggaggtatgatgtgaagtagcccacccagtcgaaggcatttacattggctggcgcattccctcttcttaccggccttttccacctcagatccccctgtcctacccatcctagctttaactcagccataattgccttgcttaatcccaggaacctggccactgctccttggtccttggcattatgacgggattcccttgtcacctctgacagttcctggctgcggtgtccgcggactggctggggagtgatgacaggtagctatcagagctccagcctccaggcagctttagggattaaaacggaggccaaagcaactccagacctgtttttatagccaaatactgagcctcaggggttgtacactcaggggcttccaggaaaatgccagccttacttttctggggtgccttttaataacctccaagcactttgtggactgtttgtcgagggacggtgaatcagaagaatcactattctgatttcctttgtctccgaagaggaagtccctgactagctatataactttgggcgagttacctctcacttctttgtgccccagtgttctccttgggaaactggatttaggttagatgaccttttaaggctccttgtatgatattttgtgatctgtacatggcagagtatagattaggagccaaattttccaacctagtgctatggttcagaatacatagcaccccaagcgtctggctggagccgaggatgggtcctccagtttttggcacagatgttccggagcccaggaagcatcccataaccaaccttcagccccaccgccacccccagcgtattccagagccgcttccaaaccacagcctatcctctgctccatttcactcttgccctcacagactttcagcctccatgctctgagacactgtggaacggatggaaaccctattttntttctncaagaccatggttgnctgcttcctcactcgggctcttganagtntctanagagagaagagnaaagangagttctgangtacaannacaaggtntccagcgta

SEQ ID NO: 439431 - DNA, 1098 bp, Homo Sapiens
ctacttctgccatttactagctgtgcgatcttgaacaaatttctgagcttctctgagcctgtttcctcatctctaaaacagagataatgacaatgttctacttccagggttgttttgggcatgcatgcaaacaaaacagattttatgatcgagtcatagttctggaaaggaagaaaaacccagatttgcgcacacaagtgttaagtaaatgtgagccctcactattgttcatacaacatggcagtgacacacatacattagacaagagattattacacactgagcctccacccagtctccctattatcctcccatgggctcctaattgatgactaaacagtgcattgctgggtggcttccagtagtttctttcttcactttgctgcaactttgaactgaaggtgatccacatggtacatgacattcttcctgttttcttcacaagacaaggatgatgtttaaatgggcatttgtttgcggaatgacttggagagttcctctctttcagccatcttttctcaaagactaaggctgggagatccttgttcatttgtaacatcaggaactgcttcttttcctccttctctcttctagaagactgtcaaggagcccgagtgagggaagcagaccaaccatggtcttggagaaaagaaaatagggtttccatcccttccacagttgtctcagagcatggaggctgaaagtctgtgagggcaagagtgaaatggagcagaggataggctgtggtttggaagcggctctggaatacgctgggggtggcggtggggctgaaggttggttatgggatgcttcctgggctccggaacatctgtgccaaaaactggaggacccatcctcggctccagccagacgcttggggtgctatgtattctgtcatcactccccagccagtccgcggacaccgcagccaggaactgtcagaggtgacaagggaatcccgtcataatgccaaggaccaaggagcagtggccaggttcctttggtgttttccgccgtcggccgcaggcgcctcgtctcagataaagtggatccagccctgcggctccggagctccgccactgcccgggcgctcccgct

SEQ ID NO: 439432 - DNA, 1215 bp, Homo Sapiens
  misc_feature (604)..(666): n is a, c, g, or t
  misc_feature (941)..(991): n is a, c, g, or t
  misc_feature (1008)..(1008): n is a, c, g, or t
  misc_feature (1056)..(1056): n is a, c, g, or t
cttttcatatttcaactttatttaaaatatgaggttttatgtccagaagggagggcagttgccatcggaaggtgaagtgaggcacaatactattgggttgcgggccaagtacacagggttgcactgtgaaggaactgaggaggttctgggagggcctggtgacaacaatggatttggggagatccacaaaggaaattttcatttcctccccaggttagctattcagtgggtggattattcagtctttttagcaaggtcactgctccttagcaacatcaacaaaagtgccaaagctgaggacacagagaatacccagcaatgtaaatgccttcgactgggtgggctacttcacatcatacctcctccatctccaaaaggttcttaaccttcttcaaccgcctaggcctgatggacctcctccctttctcccagagcccactcactgaagggaaggccaccatcatccccattcttttcctttttttataattcctccggtgccgtttcgggtctccttcctcctatattctgagttccttccactcacatccaacgcagcttttaacacccggatctcccggagcttctttggttccgctcactnnnnnnnnnnnnnnnnnnnnnnnnnnnnnnnnnnnnnnnnnnnnnnnnnnnnnnnnnnnnnnnggcttgactcccttggaccgctcccgccaatcctggtctctcctactcctccccgccacatcgggtcgccccgcccccgggtgcctttggtgttttccgccgtcggccgcaggcgcctcgtctcagataaagtggatccagcctgcggctccggagctccgccactgcccgggtgctcgggcccacgtagagcatagtcacggccgccgttgttgtcccagaactcgtgacctgtcacacggtagcgcaaggcgaagagcagggcgcccccaatnnnnnnnnnnnnnnnnnnnnnnnnnnnnnnnnnnnnnnnnnnnnnnnnnnnggccggaccggcgtagngcgctggcgcctcgcgttgctccgccagccgtcggcgctccagcgcanctcacgcgcttctcgtaggccaggtccaccacgcgcgcgctcccggccacgcccagcgggcccgcctcggcgcgttccaggcagatgcgctgcgtcagcaagcgggcggcgaagccgggctcgctggccggctccagggcggcgcgcgcctcctggagg

SEQ ID NO: 439433 - DNA, 176 bp, Homo Sapiens
cacactggtacatgacattcttcgtggtatcttcacacgacaaggatgatgtttaaatgggcatttgtttgcggaatgacttggagagttcctctctttcagccatcttttctcaaagactaaggctgtggacaggatgggcatggtaacaagccaacaagcctcatactctattc

SEQ ID NO: 439434 - DNA, 452 bp, Homo Sapiens
  misc_feature (349)..(349): n is a, c, g, or t
cttttcatatttcaactttatttaaaatatgaggttttatgtccagaagggagggcagttgccatcggaaggtgaagtgaggcacaatactattgggttgcgggccaagtacacagggttgcactgtgaaggaactgaggaggttctgggagggcctgggtgacaacaatggatttggggagatccacaaaggaaattttcatttcctccccagggttagctattcagtgggtggattattcagtctttttaagcaaggtcactgctccttagcaacatcaacaaaagtgccaaagctgagggacacagagaataccatcattgtcttttgtttctctttatgcctggnttggggaaagggatgggaaactaatagccggaaatgaaacattttctgatgttatcccttgccatgaagaatcacgggcttgtgtagagacctctttcctttc

SEQ ID NO: 439435 - DNA, 1047 bp, Homo Sapiens
  misc_feature (16)..(16): n is a, c, g, or t
  misc_feature (26)..(26): n is a, c, g, or t
  misc_feature (28)..(28): n is a, c, g, or t
  misc_feature (34)..(34): n is a, c, g, or t
  misc_feature (37)..(37): n is a, c, g, or t
  misc_feature (59)..(59): n is a, c, g, or t
  misc_feature (128)..(128): n is a, c, g, or t
ttttctgcagtgatcncaggatgtgncntctcancanttcacactggagggttctcttnatttcttttaagaatctccaagaacaacctcacacattttgcgaatctctttgccattgtcaccccagnatctggaagagtccatccaggatctccggcaggtaatccagcaggttaatgtctggcaccgactccagaaccaggatcccaggagatggatgaactgcccgggcatactggttgttggagtaaaatcctctctcgcaacaagggggatgaagctcaccaggtcaaacttgttgctctcagtcacaatgtcctttaaaaggcggtctaggagctcagatccgcttttcacattggggtctgggtcggctgccagcttgctcagcccgtcaaagagcacgttgaagtggggcagcacagcgccccgggccaccttgacgatgttgtagagggcctcgcaggcatagtagcgcagcctgctgtctgcatcattgaagcaggtcagcactggctcgatcagctccttcaggtagagccctgagtccttgcccagtgcgatggagcaggcggccaggccgatgaggccccctttccggctgtgggggtgctgagacagggcaaactcctgggacagggtctggatcacatgcttgatttgcacggtattgttctgggccacgaactcccggaccagcttctcgatctccagcgctgccaccttccgcttttcgtacagcttgtcattgagggcgcgcacgatgttaggcgtgagcggcgcgaaatccttctcggggttcatggtggcagctgggggaacctcgcgactccttagcccgcggctgccggggccgcgccggggccaggggagtctgcggctccgctctgcccccggcgccggcgcatggaccacgccgctctaggcttgcctgccacgctccgccgcctcgccctggaacccgggcccggaccccgctccagcacacctgaccctggccgcttaacaactcccgcccggcacgagagggactcacgagacagcggc

SEQ ID NO: 439436 - DNA, 2057 bp, Homo Sapiens
  misc_feature (1630)..(1630): n is a, c, g, or t
  misc_feature (1911)..(1911): n is a, c, g, or t
  misc_feature (1969)..(1969): n is a, c, g, or t
  misc_feature (2016)..(2016): n is a, c, g, or t
ggggaaatgggggtttctaaggggggttcccggttattttctgggggtgaggaaaggcagagggggaacccccgtgggtgaacctggggttggggccacccagggagcgggtacagggcagccagaaacaggttcggggctcttccaaggttcttacaggtcctttcagctggtttccttagcggaaagagctctgtggaggtcagcagatgggtgttgagggcgtggacccatggtcgaggcgaactgaggttctccctcccgcagcaggatgtctgccattgagtggaagatgttctccgcattcagcaggaggcacagctgcctgatgatgaaagggcctctgacctccaggagcttccgttcgctgctgaatctcttgagaaggttgatcatgaacttataaaagtaagaattcatggtgggagttgaaggagaacattctaagcctttggtaccagaggtgttcagtaggccggctctgccaggggttggcacctggagctctgagtggctggcctggaggtcagggccatcgagggggcctgggtcatccgtctggcctgcgggggaggaagcgatttctgccagcacctccaggtccttcaggatcacctcatccgattcatccgataacgtctgcagtaggatgggaaagaggctgtccgtgtgccggaacatcttccgaggagttttgatgtagaggtggtagagccacttgagaactgcaatcctggtcatcatcccaatggccgtgtcactgaggtggcagtttaggacctgcacgatcccgtcgaggtgaagggtcactggggctctttcagtgctggctgcagtgaagacactgatgccgctactgaagctggagtcacaggaaccatctggacctccactggctgtgccctcctgctttggcagggcatcgtcaggggtgggctctgcctgcctctgcccaggtctcagctcatccagctcgtcgtcctcgggggtgaccagcttcatcaggctctggttgcacacgttggccacttctttgatgcttttcttgcggtcatcgtaggccaagcagggcaagacagcagtcaggatcccggaggagtaaggcagcatgacgcggcccgccagctggatgaactcccgcatccagcacatggctgtcagctggatgaggtcatctgttgtctggcagtggatcaccaggatgttggccatctcagcaaacttcacactggaggggttcttcttaatttcttttaagaattctccaagaacaacctcacacattttgcgaatctctttgccattgtcacccaggatctggaagagtccatccaggatctccggcaggtaatccagcaggttaatgtctggcaccgactccagaaccaggatccaggagatgatgaactgccgggcatactggttgttggagtaaatcctctctcgcaacaaggggatgaagctcaccaggtcaaacttgttgctctcagtcacaatgtcctttaaaaggcggtctaggagctcagatccgcttttcacattggggtctgggtcggctgccagcttgctcagcccgtcaaagagcacgttgaagtggggcagcacagcgccccgggccaccttgacgatnttgtagagggcctcgcaggcatagtagcgcagcctgctgtctgcatcattgaagcaggtcagcactggctcgatcagctccttcaggtagagccctgagtcttctcgatctccagcgctgccaccttccgcttttcgtacagcttgtcattgagggcgcgcacgatgttaggcgtgagcggcgcgaaatccttctcggggttcatggtggcagctgggggaacctcgcgactccttagcccgcggctgccggggccgcgccggggccaggggagtctgcgntccgctctgcccccggcgccggcgcatggaccacgccgctctaggcttgcctgccacntccgccgcctcgccctggaacccgggcccggaccccgctccagcacncctgaccctggccgcttaacaactcccgcccggcactagcg

SEQ ID NO: 439437 - DNA, 1636 bp, Homo Sapiens
  misc_feature (85)..(107): n is a, c, g, or t
gagggttttctgttatttctttattggggtgggggtggggtgcatcattcagatctttgtgctggtgcctacgtgcatacaagtnnnnnnnnnnnnnnnnnnnnnnnggcatgtgttcacgtatgtatacatatacacacaaggccagagctctagtgtgctggaggaggggcaagctctttttccaagagggtattagaaagaggttgattccagaggatgagtggtctctgaggctatagccccccactgggtgggcagccagctctgtgagaatgccagggtgcagctgacagcgctggaggcctggggactggactctgagaggagcttgggcagacacagcagcctccggccccaacactgccctgggttggcaggcccagccctggtcctgacaggcaggtccttgagctcctcgggagggcgtgacgacccttagtgtttcatgggaccactcggtgggccctcctccgtgccaggcctgtcagaggacaaccctccggtccaggtggtccccacgcccgctccgctggtgccgcacttccaggtgcttgttctggaccttctcaaagtgctgcagcagctctgcgtagtcgatgctaggggagtcagctttctgggacttgggggctgcctttagactgtcttcggtctgcagcagctcagggttgggcacgcactggagccggtgcgagagcagctggaaggcgctgctctgcggcaggagcatgagcaggccgtagagggccttgatcaggtaggggttgttcttcacgtccagcagctgcaggcgcagatatgtgaagatggggcactcaatcagctgcaccagcttgtccacctctgcgaggaagtccacggtgacctccaggtccccaaacttctggatgaggtcataggcgtgccggtagttctgggtgaggaagcagagggacaccgtggtgactgggttgtggccaccaggagcggtacaggcagcagaacaggttctggctctccaggtcttcaggtccttcagcttggttccttagctggaagagctctcgtggaggtcagcaggatggatgtctgagggcagtggaccatggatcgaggcgaactatgaggtgcctcctccgcgcagcaggatgtcatgccatgtgagtggaagatgttctccgcattcagcaggaggcacagctgcctgatgatgaaagggcctctgacctccaggagcttccgttcgctgctgaatctcttgagaaggttgatcatgaacttataaaagtaagaattcatggtgggagttgaaggagaacattctaagcctttggtaccagaggtgtatcagtaggaccggctctagccaggggtgggcacctggagctctgagtggctggcctggaggtcagggccatcgagggggcctgggtcgatccagatctggcctgcgggggaggaagcgattatgctcgcaacagcacctccaggtcgttcaggatcacctcatccgattcatccagataacgtctgcagtaggatgggaaagagggctgtccgtgtgccggaacatcttccgaggagttttgatgtagatggtgcctcgtgccgaattcgccacccggcctcgcaccttagcctatgtttggcccgg

SEQ ID NO: 439438 - DNA, 476 bp, Homo Sapiens
  misc_feature (93)..(113): n is a, c, g, or t
ttttttttgagggttttctgttatttctttattggggtgggggtggggtgcatcattcagatctttgtgctggtgcctacgtgcatacaagtnnnnnnnnnnnnnnnnnnnnnggcatgtgttcacgtatgtatacatatacacacaaggccagagctctagtgtgctggaggaggggcaagctctttttccaagagggtattagaaagaggttgattccagaggatgagtggtctctgaggctatagccccccactgggtgggcagccagctctgtgagaatgccagggtgcagctgacagcgctggaggcctggggactggactctgagaggagcttgggcagacacagcagcctccggccccaacactgccctgggttggcaggcccagccctggtcctgacaggcaggtccttgagctcctcgggagggcgtgacgacccttagtgtttcatgggaccactcggtgggccct

SEQ ID NO: 439439 - DNA, 506 bp, Homo Sapiens
  misc_feature (87)..(107): n is a, c, g, or t
ttgagggttttctgttatttctttattggggtgggggtggggtgcatcattcagatctttgtgctggtgcctacgtgcatacaagtnnnnnnnnnnnnnnnnnnnnnggcatgtgttcacgtatgtatacatatacacacaaggccagagctctagtgtgctggaggaggggcaagctctttttccaagagggtattagaaagaggttgattccagaggatgagtggtctctgaggctatagccccccactgggtgggcagccagctctgtgagaatgccagggtgcagcttgtcattgagggcgcgcacgatgttaggcgtgagcggcgcgaaatccttctcggggttcatggtggcagctgggggaacctcgcgactccttagcccgcggctgccggggccgcgccggggccaggggagtctgcggctccgctctgcccccggcgccggcgcatggaccacgccgctctaggcttgcctgccacgctccgccgcctcgccctgg

SEQ ID NO: 439440 - DNA, 1102 bp, Homo Sapiens; identical to SEQ ID NO: 151750
  misc_feature (208)..(208): n is a, c, g, or t

SEQ ID NO: 439441 - DNA, 2154 bp, Homo Sapiens
cgctccatcatgtcctggatccagacgaagccgtagaggaagtagaagcggccgccagtattgggcccaggccgccagtaggcgcggcggatctcgttggttttctcggtgaagctggagttctggcggatcttgtagtgcacgtgaggcgggagcgagccgtcccttccgggtctggaagatcacactggcaaaaacagtgacgttgtcctggtaggcctggttgagggtgtagttgacaatgctctcctcgtcggggaagcccttgaagatgtccacgctcaccttggacatgaactggatccagccgcaggccgcgttgtcaatggtatccagctgctgcaggagggccatgccactgggcagcgagaagttgtcctgtctcagggccggcggcagctcatccagtgacaggttcagtgcctcggggtgcagccgcagctctgctacatactgctgcagccagcgcaggtgttgctgcagcctgccctgctccaggaagctgcggatctccgccgagatgttgagccagacctgggcatagtgagtcacgttgcccacaaaagcaaaagtctcgttggccttgaggatgacgcggtcgacctcagagcccgcaggcgcgtacaggattttggggttgctggtcatgaggtgctcgaggaggcccaggttccgctgctccttgctcgtgaagcccagggagctcatgttgtcccgccgcagcgcctcgggttcaatggtgcggttgttgccacacaagatgggctgcaggccggcccagagctgtacgaaggctgagcactggccctgcagcgtgtccggggtggccagtgctgcagcagagggtgcgccctcctcagcggtggcgttggggcccatgactgcccctgccccagtgccattggccgccccacccgcaccactggctgggggtccgggggtccggccagtgcaggcaccctggggcagtagcagggccagggccgacaggacatccacatcctgcagaaccttctgggcatccagcaggtcccccagaagcgcctgcagcctccgtgggggtggcgcctgtggcgaggagtccgagccgttgggggcatccaggcccagctgctgggagacctttggccacggtccagctggttccggagctcagcagacagcccagagaagcgcctggcacgcgcagcagcctgcccactgcagacagcattcccggtagccctgcagggctcccttttgactctcaggcacagtgaggatccggcccagctcccccgagcccggcgtgcaggtgagctgctccaggagggcaggagccagcagcagctcctccatccggaacaggggattgccccctaggcggctccagggctcctgacccttgtggaggccagactgtgaatccagggcagatgagggaccaaagagcaggtggtagacctcgggcgggtccacacgggcggccaagagtgcttgggccgtgctattgggcagcgacaagttttgcgtcaggaaacgccagagctcctgcgggtttctggccaccgagtccagagagaaggaagacactgtggatctgtccaggtggctccccgaggtgcccgggcccgcactgagggcctccagatgctggcgtagggcctcgagctctgagcccaggctgggccgcgctgggtcaaacaggttgccttcctccaccacgcggtccaggcgctcaagcagctgcgtgaccgtggagttggcgtactgcaggaagccgaactcgtctcgctggccgtccgggcacagcgattgcatgacaggcaggatgccggcagacgtcaggggcgccgctgtgtagaaggagacttccttcacggagatggtgggcttcttctgtcgcagccccagcaggataaagaacagcaccagggggatgaagatctcgaaggccaggacccacgggctccggcgtttgagcgtcacgttcttccagagcagcagctgcagctggtgcaggaagcccatggcggggccacgctccgccgcctcagcgccgcggcccgctcctctgcgcgccccgccgggccccgcagcccgccgcgccgctgatccggagaattccggcccgtccctcccgctactcgggagggccgggaagagggaaggaaa

SEQ ID NO: 439442 - DNA, 937 bp, Homo Sapiens
  misc_feature (897)..(897): n is a, c, g, or t
  misc_feature (905)..(905): n is a, c, g, or t
  misc_feature (911)..(911): n is a, c, g, or t
cgcgccgcaacgcggtcacgtgcgcggccctcctctcgcgccggcctcccccgcgccgcgctctccattcataaattctccgcctgctccgcggccaccgggcgccggagccagccgcgagcgccacgcagccgcccgccgccagcccggcgcccatgggccgctcgtcccggcgctgagggccctcctccccagttcagaatgcagcccacagccaccatggccacagccgcacacgacacagcatcatgccacagtagccctgacgacgtcgtgggacaatgccactggacgccccacggcagagccagaccccatcctggacaactacgtgctgctggtggtggtgatgtcgctgttcgtggggggcacgctggtggtgttgtctggcgtcctgctcctctgcaagcgctgctgggacgtccaccagcgcctcaacagggccatggaggaagcggagaagaccaccaccacctacctggacaacggcacccatccagcccaagaccccgacttccggggagaggaccccgagtgccaggatgcggagaccgaacgcttcctgtccatccagctccacgggccgccgggtctccttcaatgaggcggcgctgtttgagcagagccgcaagacgcaggacaagggtcgccggtacacactgacggaggggggcttccagcagctgaagaatgcccggttcacgcacctgcaccttgccgccccttcaagattgtcaccatccaccgagtgtgactcaggcgaggccagctcagccaccacgccccacccgggcagctctcccaagggcacctctggccatcttccagcccccggggaaggccctcaccggccgctctgtgggccccagctccgccctgccaggtgacccctacaantcagccgngggggncactgacttcgcagagatcagcccct

SEQ ID NO: 439443 - DNA, 1511 bp, Homo Sapiens
  misc_feature (815)..(823): n is a, c, g, or t
tctttcatcatcttttagtactgcctcttgatgatattcagtcattcgttcaacattttagaggctcggtgcccataattctgcccttgaagagttaacaagccagtgagggagatgcagagaccccacagctgcgcacactctctttggcccatgcaaccgtaattccgagtacttactactctacgcaagttctgtgcagggtgccgggatgcggaagtgatttgaaaacactctttgccctctgggagctcgcagtctaatgagggatagaaataggcaggggcatggggaagtagtgaaagcagcctgccccacctttggaaagccagactgggaggctctgggcagagtagcccttaatcatgcccccagagacgacactctctctaacactaagcacagggcctgggacagagatcctcaaatatgtgccaaaggaattagaaaaccaatggctaaaagggtatggaaattctggtggcgtcagatggtggggtcagtgagagggaagaatgatttactgaaagggtgagttatccggcttaatggaattagggatgaggggatgtcataggaggagggaggcagcagaatcagcggttggaggtgagaaaagggtgttgaagatgagttagcgacagacaaacctgggcttgaattccagctctgacgcttaatagctttgggcacgccatggtatgtgagcctcagtttcctcccctgagaaaggggtaataatccctactaatagaactgccatacagattaaacgaggtgatttttctaggtgagggcaagggctctgtaaagannnnnnnnnctgtagtttagaggtcagcagaatgcgttaagcattagcgattctcttcccagtacccacagtcaaagttggaagtggcagggtctagcgggattgaggccgggggatcgggtgggcgggggggatggcagaaacgcatgaaagggcagcgggaccgtgcagtgtggtcgagagggtaagagagggccgaacttgggtgcggcccgacaggcactgggcttatccgcacgccagattcatggacctagctgaagtgatcgtggtcatcggcggttgcgaccgcaaaggtctcctgaagctgcccttcgccgatgcctaccatccagagagccagcggtggaccccactgcccagcctgcccggctacactcgctcagaattcgccgcctgtgctctccgcaatgacgtctacgtctccggtgagggcggagccgcaacgggagctcacacgggattgactagtagcctccgcactccaccccctttgcttttccctccaatcgggagagaggggcgggatgttttctgataacctacagttattggctgaagtgagcagggctaactacgcgtgtgacccgccctttattcaggaatgttaacttcaatacatatgattactttttgttctgaaccggcttcctaaggaagtcaattcgtattagtattaataatcacttcaactagc

SEQ ID NO: 439444 - DNA, 2284 bp, Homo Sapiens
  misc_feature (1852)..(1852): n is a, c, g, or t
  misc_feature (1881)..(1881): n is a, c, g, or t
  misc_feature (1893)..(1893): n is a, c, g, or t
  misc_feature (1899)..(1899): n is a, c, g, or t
  misc_feature (1929)..(1929): n is a, c, g, or t
tgctgggctcgcttctcctgctccagctgcagcttgagccgctccaccagctgctgcttctgccggagcatgcgcgtcagcgcctcgatctgcttgtctttctcctgcagcatctggtccttgtcgcgcccctctagctccgcccgccccccagggctcaggcaacaggacccggcccgggggccctcctccttcacgaggatctgcagtggcgaggcctgcagggtcagctgcgtcagaggtgatgtcaccatctcaccaaaggtgtccccgggggtggagttttcatcgcccgtgctgagcagtgagcgctccgagggggtgggagacacggggggcgtggagcccgtgctgccaaacttcaccaccccactgctggccaccgtggccaccaccacctcagctggagccaggcctgctgccaccagggctggccccgtgctcagccgggccgctgggaaggctaccaccacctcgccagccttgtgcaggatagaggtggcggcaggggccttgggggctcctggcacagggctgatttggtctttataggctcgaaggcgctcaaatcagctcagttttggtgcccgagacaggcagtgatcgcaacttcagctcctgcttcagctctgccaccttcatgtcgtccaggttggccggcagggctcccggcttgccagtcagtgaggtgctgttctgacgtgccagcccacagggcccaggggcgcccgagctggagctgctattggtagtggagaggctgcgtactgggggggtcccgctgcttcccagggcctcgcctgctgactttggcggggcaggcaggatggcctggtagttgtggtgctgctgctgctgctggttgaggatctgcagctggaggaagagctgctgctgctgcaggatcttggcgtaggatgagtccatggggggtgcccccctgtcctgcttctggtccggggggatgtactggtggtacttgagcttcttcacctttggcttcagctccttggccttcttgctgcgctgtgacttctcactggcagacttgggttggctttgcttaatgagtgtgggggtggacttggcagtggggatagtggttccattggtgaggctgggaggcagcagaggtgggggaggcagaggaggctgctctgccaggaaaagcatttctctggaatcccggcccatcggaagttgagacacaacctgggtgggggatgcagaggtggcactgagcagtggttcgctgactcgggcctccaggggtgacggcacagaaccctgggactcatggctggcaggctgctcgggggataaggcatcgctgctgtcctcatcgaaggaagagctgtctgctactttgggatagttcacctggcccacaatgatggcttccttcaggctggactcaacaggaaggatgttcttctccaccagctccatggggccaggcctctgtgcaatcttctcattgaggtcatcggctagtctggctctcttcagcttcagctgcttggcctggagggatggctcagccgaggtctcttccaaaatgtgcatcctgaccagctccgatctctccggccgggaacgaatcttccgtttgagatagtcctctgtcctggcccgctccaagctccttctctgctcatgaaatgcggctggacttttcaaaggcggcatgatcccttggctcaccagttcttcccgggtccggcgctgctggagtttcaactgtagcacattcttccgctcactaagtggaggcaaattgggattcctgccagggtggaggcctagggtcagctcgggctgcaaggagagctacctgcagttcattggcaanagcttaactctaggggactgggtgcacgnagataaggacangagcantggttcatcatcattttcgccggcccctcntccgtccagcccattcacagcaatgacggaagggggcaggcacaccacactggagaaatccactttggctttcgtgatggcaatcttgcttacaattcccacagacagatgaaattcaattccatgccaaccataccctccgatcacgcctcgcgcggctcccggccgggttccgcggctcgccccactccggctctagccgcccgcgtctcctctcgaggctcactgtccagcccgggcgcacggagctgagaagtcgccgccagcggagggcgtgtggccagcggcaaccaagagggtgggaaagatgggaccgtcgctctcgccgccgcggccaccacagacactgccgccg

SEQ ID NO: 439445 - DNA, 1126 bp, Homo Sapiens
  misc_feature (9)..(9): n is a, c, g, or t
  misc_feature (26)..(26): n is a, c, g, or t
  misc_feature (68)..(68): n is a, c, g, or t
aaaaatagntatcggactgacgaaanatttaaaatttgttggtatatcgaatagtacagcactaagtngtaagaaagttaccatctgaaaaagctgatttctttaagaggtgattataaagtttctaaatttatcagtacctaagtaagatgtagcgctttgaatatgaattcataggtggagacatgggtggacttacttgcataccaagttgatacttgaataaccatctgaaagtggtacttgatcatttttaccattatttttaggatgtgtatttcatttatttatggcccaccagtctcccccaaattagtacagaaatatccatgacaaaattacttacgtatgtttgtacttggttttacagctcctttgaaaactctgtgtttggaatatctctaaaaacatagaaaacactacagtggtttagaaattactaattttacttctaagtcattcataaaccttgtctatgaaatgacttcttaaatatttagttgatagactgctacaggtaatagggacttagcaagctcttttatatgctaaaggagcatctatcagattaagttagaacatttgctgtcagccacatactgagatgacactaggtgcaatagcagggatagattttgttggtgagtagtctcatgccttgagatctgtggtggtcttcaaaatggtggccagccagatcaaggatgtagtatctcatagttcccaggtgatatttttcttattagaaaaatattataactcatttgttgtttgacacttatagattgaaatttcctaatttattctaaattttaagtggttctttggttccagtgctttatgttgttgttgtttttggatggtgttacatattatatgttctagaaacatgtaatcctaaatttaccctcttgaatataatccctggatgatattttttatcataaatgcagaataatcaaatacattttaagcaagttaagtgtcctccatcaattctgtattccagacttgggaggatgtacagttgctgttgtgtgatcaaacatgtctctgtgtagttccagcaaatcaagctgagctttgaaaaagtttgtcttagttttgtgaaggtgatttattctta

SEQ ID NO: 439446 - DNA, 964 bp, Homo Sapiens
  misc_feature (15)..(15): n is a, c, g, or t
  misc_feature (20)..(20): n is a, c, g, or t
  misc_feature (80)..(80): n is a, c, g, or t
  misc_feature (297)..(297): n is a, c, g, or t
  misc_feature (300)..(300): n is a, c, g, or t
  misc_feature (303)..(303): n is a, c, g, or t
  misc_feature (312)..(313): n is a, c, g, or t
  misc_feature (320)..(320): n is a, c, g, or t
  misc_feature (322)..(322): n is a, c, g, or t
  misc_feature (346)..(346): n is a, c, g, or t
  misc_feature (363)..(364): n is a, c, g, or t
  misc_feature (370)..(370): n is a, c, g, or t
  misc_feature (399)..(399): n is a, c, g, or t
  misc_feature (438)..(439): n is a, c, g, or t
  misc_feature (441)..(442): n is a, c, g, or t
  misc_feature (449)..(450): n is a, c, g, or t
  misc_feature (466)..(466): n is a, c, g, or t
  misc_feature (473)..(475): n is a, c, g, or t
  misc_feature (484)..(485): n is a, c, g, or t
  misc_feature (518)..(518): n is a, c, g, or t
  misc_feature (542)..(542): n is a, c, g, or t
  misc_feature (582)..(582): n is a, c, g, or t
  misc_feature (592)..(592): n is a, c, g, or t
  misc_feature (597)..(597): n is a, c, g, or t
  misc_feature (601)..(601): n is a, c, g, or t
  misc_feature (614)..(614): n is a, c, g, or t
  misc_feature (619)..(619): n is a, c, g, or t
  misc_feature (622)..(622): n is a, c, g, or t
  misc_feature (635)..(635): n is a, c, g, or t
  misc_feature (639)..(639): n is a, c, g, or t
  misc_feature (656)..(708): n is a, c, g, or t
  misc_feature (712)..(712): n is a, c, g, or t
  misc_feature (714)..(714): n is a, c, g, or t
  misc_feature (716)..(717): n is a, c, g, or t
  misc_feature (721)..(721): n is a, c, g, or t
  misc_feature (727)..(727): n is a, c, g, or t
  misc_feature (741)..(752): n is a, c, g, or t
  misc_feature (754)..(754): n is a, c, g, or t
  misc_feature (764)..(764): n is a, c, g, or t
  misc_feature (766)..(766): n is a, c, g, or t
  misc_feature (772)..(772): n is a, c, g, or t
  misc_feature (779)..(782): n is a, c, g, or t
  misc_feature (793)..(793): n is a, c, g, or t
  misc_feature (798)..(799): n is a, c, g, or t
  misc_feature (812)..(813): n is a, c, g, or t
  misc_feature (825)..(825): n is a, c, g, or t
  misc_feature (841)..(841): n is a, c, g, or t
  misc_feature (845)..(845): n is a, c, g, or t
  misc_feature (874)..(874): n is a, c, g, or t
  misc_feature (878)..(878): n is a, c, g, or t
  misc_feature (898)..(898): n is a, c, g, or t
  misc_feature (927)..(927): n is a, c, g, or t
tcttctttgacttcngcttnactgtattaagacagaaattaagccctctaaaaacaccacaaagagagatgattgtaatnatagaaatagaggtacagagctatgcaaaggaaacaggaagtgaaatattcctagtcccagggatctggtaatcgctcctggcttccagatgtcaaaggactgatcctttggtaagctcactagaaacttctagctctacaagagtttgggatattaatgttattcagtaagtcccaagtttttcagagaatagattactaacaatgaggaaataanaanccngggaaaaannagagagncnaagaagcagagaacagaaagaaanaacacagacccaacttnnagggcnaaagcagccaacaggaagaagaagcaaanaaatagggactgaaagatagaacaaagaaaagccagccnngnngcagaanntttaaaaggggggganaaaacannnaattttgtnnaaaaagcaacagaagacaattagacaaggcatnacaaaaagcccaaaacccctctcntggggacactatggcacaccaaagaagccacaaagtgggngcagggaatnaacanttgnattattttctttnaaacnagntactttaaatcantttnatataagaaactgtagnnnnnnnnnnnnnnnnnnnnnnnnnnnnnnnnnnnnnnnnnnnnnnnnnnnnnaaanananngccnagggangcaacttaagtgcnnnnnnnnnnnncngcaggataantnaaagtntataaannnnaaccgaactgnaacanngaacatatcagtnncgcatgccaccngccacaacagagcatnaaanaccatagggagcctgaaaacaaaaacaanaatntactcaggaattcaactaanccgaaggctctaccccccagcagtatggncgcgtacagctcgacccatcaatcaacgccagagcaa

SEQ ID NO: 439447 - DNA, 1743 bp, Homo Sapiens
agacatccaacagctgatccttccatagatataagcagggaatggagaagtcttcctgccaaatgctgagccatctaaaatggtctgctcaggagttactaactccatggcaaagtacctcagtatcaattgcaaagttctgttttcttctacttcaggaaacaacctcatttgatttgtggaccctatgaactgtccaaacacactgatgaatatcagcaacttctctcatttgaatttctcatgtccttaaagtaaatagaatttccagagacaactaaagagcaatgcaatatgaagaaaattaaaatttggctaagaaaaataagtaatcaactaaaaattgccataacactcagacttaaacagaaaataagtttgttgtcttttataagatgacaaaacttcaatctaacatcacaagttcttatactagatgaatttactagtatatgaatcaatatactagatttctttcttctaccccaactgcaaatatactaaacaattatttcttcaatagtttctttttcccctagtcgtggcatttaaaactgagtaacagtatttagcactaagtaaatttagaaaatataaaaaggttttacgaaatagcaatagttgattcatttttcatataccatctgatcaagtgaagtctccatttgaggatactggtgaacagaaagattttttcttgtctaagccactgctttctggtctcatcacacagataattctcaaattttatgtaggcccagattttcttggcaaaactctcaagataccagcacataacacagctacttcatctgttctctttttgcaatgagcactatgcctctcttttatgttcccggatgggtacatgaaagataaatttctaaagccaaagaatttcttggcatttcataactgtttcccacccagcatcccctccccaatttgccagatccaaatcaaagagtgaaaagaagtcttgaaaattctctctcttcaaaagaagtctgaacacagcctagttccttccctaatgagcctcagtttgaaaagatcctgatgaggagctgaagaacaaaacaggatgacaggtttttatgaaggaggtatgtaatcttatcaccgaggggtgtaatttatccggacattatatgcactctgccaaggactgatttacacatagatcaaaggaagctggctttctgtagtcccctgaagcataaataatgttcgtgaccatgagttttccccacatatagcaggggcagatgctgtggtgtcatcctggggaccgatgatttcagctgaactctcctacactgggttcaggtctccaacaggttcttcatccccgtccccttggttggcagttgatgacttgggtgctttggaattcattttataaacaggacgtaaaaggccattacaacacaagcaattgccacagcagcatgcagcctggttccaatcacagcggctttgtaaaacacaccccaaacacccttcttctctgatagcagccaggttttgagacgaggtactttcttgaagtaggcacaggtgcaaacaaagagcaaaccaaacaccagaatcccatccaaggagtacacgttcgtcatggcggctggccctggacctgggtagggggtccgggttcagtggtaatagcggcggagatgggggagcgcccgcttgacacttcccgatccgggccgaggtgactggaagaagccgtagtccgct

SEQ ID NO: 439448 - DNA, 401 bp, Homo Sapiens
aagtaatcaactaaaaattgccataacactcagacttaaacagaaaataagtttgttgtcttttataagatgacaaaacttcaatctaacatcacaagttcttatactagatgaatttactagtatatgaatcaatatactagatttctttcttctaccccaactgcaaatatactaaacaattatttcttcaatagtttctttttcccctagtcgtggcatttaaaactgagtaacagtatttagcactaagtaaatttagaaaatataaaaaggttttacgaaatagcaataggttgattcatttttcatataccatctgatcaaagtgaagtctaagccactgctttctggtctcatcacacagataattctcaaattttatgtaggcccagattttc

SEQ ID NO: 439449 - DNA, 1665 bp, Homo Sapiens
  misc_feature (34)..(34): n is a, c, g, or t
  misc_feature (46)..(46): n is a, c, g, or t
cctcgcatgctctcaaactcaatgtaggcctggnctgaagtctttnagagccctttcttggagatgaactggggaggtaactccaacctcaaaatgtcccaaacacggggggaatggtcggtggtgacgatgtcatcagtgcacccataagaattgcagatgatgtgagtttcagggtaggatttccacagaatccggtcacaccatgagggcacattggtccggaccccagttggcttctgcttgtgccaggcatatgtgtcccgggaaccccgctcatagcggtaggtgggtgggaaggagatctcctcctcactgaatcgaaggaagaccttgtgcttctcccgctccaggttgagctggtccaccctgaggaggggctcaaactctttcctgctgatgtagttcaggatctcctggatatccatgtccaggcggtagttgaggtccccaaaccagaagaggtgtgtgaaacgcagagagatgtcaaaggcattgagctgccggtcgcccagcgagagcagccgcaggatgtccaagtagttttggttcctccgagccgtcttctcatttcccgaggtgaggtgacaattcacaaagccaaatgaggtgccattaaacatgaaggagacgcccacagcccccttgttccccagggtgttggcgatgccagtcttcacactggacgtactgacatggctgatacggttctcgtgctctggcttgaccagcactgccaccttgatattccacagtgattgcatggcaatcgggcggtaatccagatccgtaagctccttgaggcccccgcgcagtaggtccagccactcgcggtcgcccactgagttctcctgggtcccaaagacatagatgtcatggggtatggtcactgtgacctcgttccagggtcttccccagacccttcgatgtgaaccaggatggtcacgtttgtttggaggtggtacacttcccatgttccaggtgcctatgaagactgagatcatgtcgggctcgtcctgcttggagtgcttgttcttcatgagctgcaacagctggcagaaggcctcccgcttccgggcactgacaaagatgaagtccttgcgctgagtccggtccttctccttctcaaacacaacacccagcttgttctggacacgctgggacttaatgagctggcggatgcggtcgtgcgtgaaggtggtccagtcctcctgggagtcccgctgtctccgcagcagcaccagccgcccaccctccacatccacgctcagcgtgaacttctgtgacttcccaatcttggtcaggtcacccagggtcacatctagcttcacctcaaaggcctgcacggggatggtcttggccttacgtgtggatggctgcggagctgggggtgctgtggagctcatgtcctgtagggccttcagggccttcttctggatgcctgacaggaagtcctttagcactgacagcttcagcaccaggctctctagttcctgctcccctgtctgtggcaggttctgctgctgcaaaaggcgggtcaccatgggcgagctctgccgcgcaggccgcctcgttcaccgcgcagccgccgctgcctgcagcgccggcctcaactcccgggctgctccggcgcccccttccccggacagcggccctgggctccag

SEQ ID NO: 439450 - DNA, 946 bp, Homo Sapiens
  misc_feature (665)..(679): n is a, c, g, or t
  misc_feature (732)..(732): n is a, c, g, or t
  misc_feature (746)..(747): n is a, c, g, or t
  misc_feature (765)..(766): n is a, c, g, or t
  misc_feature (775)..(775): n is a, c, g, or t
  misc_feature (790)..(790): n is a, c, g, or t
  misc_feature (793)..(793): n is a, c, g, or t
  misc_feature (795)..(795): n is a, c, g, or t
  misc_feature (807)..(807): n is a, c, g, or t
  misc_feature (859)..(860): n is a, c, g, or t
  misc_feature (879)..(880): n is a, c, g, or t
  misc_feature (884)..(884): n is a, c, g, or t
  misc_feature (886)..(886): n is a, c, g, or t
  misc_feature (890)..(890): n is a, c, g, or t
  misc_feature (892)..(892): n is a, c, g, or t
  misc_feature (897)..(897): n is a, c, g, or t
  misc_feature (899)..(899): n is a, c, g, or t
  misc_feature (906)..(906): n is a, c, g, or t
  misc_feature (913)..(913): n is a, c, g, or t
  misc_feature (916)..(916): n is a, c, g, or t
  misc_feature (921)..(921): n is a, c, g, or t
  misc_feature (928)..(929): n is a, c, g, or t
  misc_feature (931)..(931): n is a, c, g, or t
  misc_feature (933)..(933): n is a, c, g, or t
  misc_feature (935)..(935): n is a, c, g, or t
  misc_feature (938)..(938): n is a, c, g, or t
  misc_feature (940)..(940): n is a, c, g, or t
  misc_feature (943)..(943): n is a, c, g, or t
aaaatgaggaaccggtttattgaacagcttaaggagagcaaaaatagtggctttagctacattttttacacactgagcaggaaagtctaaaccatcccgttcccctgtaccccaaagagaacagggcttgctggaggccagtgccaagggcggagtcgtgctcgcagcagacttgaattaaccccatgtaggccggcgagcagttgcccgcgtgaaaacaccaccctcttctcctggctgagaagatcaaagctctttttttaccctcttttcagcaaaggacctatttgttttcaggcaggaggatgttaaacttgcagcctctgacacacggtggaacctgcagtgcttggagaaacggcacgcacacgtgaaaacatcatgcctactccaaagccttcttgttgctggcaggagggaagcttgagactttcccacgcatagtcgtgacccgcgtggccgtttctgctctcagcaacattctctagtgttccggcttcaagcagcgcttgtcaggtttgaagctagccactattctgagaacgtcagaaaagcatggaccatctcttgcttggtgttgccgttgtggcagtagcagctactacgtacctgcacgagttccagggcagaagtggcaatgtcccatgaaggcgtggccccccacnnnnnnnnnnnnnnngtgccagggcgtccacttctgcagcagaaggcatgtgctaaagcacaagcttntaaaaaaatacttnnacacaatatcctctacannactaccccntaacaccccatatcnacntnctaaaaaatttntataaatactctgtatacaagcatggagtcactcctgtacaaacccctaatnnctccccctatccaaaaatnntctnanaatncnaaaananaaattantttaaantancaaanaaaaaannantntnctntnttnaaa

SEQ ID NO: 439451 - DNA, 1487 bp, Homo Sapiens
  misc_feature (1450)..(1450): n is a, c, g, or t
ctctgtccaaccatgagcatgaggggcttcttggtgtcatttccactccccttgccaatatttatttggaaacatttcaaactacagaaaagttatgcaaattacatcaggaacacacacatcccctgtgcggagatctgtgctttatgtctttgaaagtaagttgtcgagatcacagcactccacccctccacaccgaagcccgcagcttctcaggaaagggcagtcttgtgtgatcagtgcatatcatcacacacaggatgtctgacactggcaccacgctgccatctcagagtccatttcaatgctgggggtcatcggttttcagcaggttcttccctgggttcaacgcgtcttcccgccagagggatggaatcttgggtgagtgttgaaatgcgtcagaaacaaaaacgcaaagtggaactggagcacgtcacagaccttggaccagaagtggcctgtgaggcactggaagagacgccaccgtgcgagctgatggtcacacagcttgaggaccacaaagcccaggcaagagagcacccccaaagctaagtaggtagccgaggtggtgctgccatagtgcctgtgggtgcgcagcgcctgccccacagcggccaccacgtgagcacccagtgcgacctcgaagccctggggatgcagcagagcgaggccataactggccagggagacgcactcaagagagaggaacagccagggccgccagccgcggtctaggtagaggcaccaagccacgggccatgcaaagatgggcagtgtgagccactggtccagcaccgcggcacggcgccactgcgtccacaggcgcagccactgcacggggccatagagcagggccatggctgcgaacacgtccttcaggtagcggggaccagccccatcgcgccgcccctgtgcagccacgacagccccagcagcgtgtaggccatgttcacgagtgagttgaacggcatggccaggaaggcagggaggccggccacgggcgcctcggcgtagtgctcatagcccacttgcacggaaacactgtcgaaaatgcccgtgaacacagccacggcacagaggccaccggccacggccacgtgcacgaaggcctgcccccactctggattcatctggaaccggcggcgtgacctggggcagggagcttcagagagcagccttcaatacgcagcctctgcagaacactctgggcctcccggctgagccagcagaaagaagccccgtgatttcgtgatttccgaggcagatgctgcgaccttgccccgaaggaaggcaggagtcctgctgatttgctggcgccagcggaggaacgttctgcctttttcagtattggcgcgaaaaggccagctatcaccatacgggtatttcgcctcactcgcctcgctgggggaaattcaaatctccgaaaagggaggatccgagcagcgccggntggcctgcgcgcagggcgggactcgaaatcccgggaa

SEQ ID NO: 439452 - DNA, 915 bp, Homo Sapiens
ccttttcggagatttgaatttcccccagcgaggcgagtgaggcgaaatacccgtatggtgatagctggccttttcgcgccaatactgaaaaaggcagaacgttcctccgctggcgccagccaatcagcaggactcctgccttccttcggggcaaggtcgcagcatctgcctcggaaatcacgaaatcacggggcttctttctgctggctcagccgggaggcccagagtgttctgcagaggctgcgtattgaaggctgctctctgaagctccctgccccaggtcacgccgccggttccagatgaatccagagtgggggcaggccttcgtgcacgtggccgtggccggtggcctctgtgccgtggctgtgttcacgggcattttcgacagtgtttccgtgcaagtgggctatgagcactacgccgaggcgcccgtggccggcctccctgccttcctggccatgccgttcaactcactcgtgaacatggcctacacgctgctggggctgtcgtggctgcacaggggcggcgcgatggggctgggtccccgctacctgaaggacgtgttcgcagccatggccctgctctatggccccgtgcagtggctgcgcctgtggacgcagtggcgccgtgccgcggtgctggaccagtggctcacactgcccatctttgcatgggcccgtggcctggtgcctctacctagaccgcggctggcgggccctggctgttcctcttctctttgagtggcgtctcccctggcgcatttatgggccctcgctctgctgcatccccaggggcttcgagggtcgcactggggggctcccgtggtgggccccgggggggccaagcacctgcacacccccagggaaatatggaggcaccaccttgggctaccctacttaactttggggggggccc

SEQ ID NO: 439453 - DNA, 463 bp, Homo Sapiens
  misc_feature (220)..(220): n is a, c, g, or t
  misc_feature (425)..(425): n is a, c, g, or t
  misc_feature (435)..(435): n is a, c, g, or t
  misc_feature (443)..(443): n is a, c, g, or t
ccttttcggagatttgaatttcccccagcgaggcgaagtgaggcgaaatacccgtatggtgatagctggccttttcgcgccaatactgaaaaaggcagaacgttcctccgctggcgccacaattcaagcaggactcctgccttccttcggggcaaggtcgcagcatctgcctcggaaatcacgaaatcacggggcttctttctgctggctcagccggganggccaggagtgttctgcagaggctgcgtattgaaggctgctctctgaagctccctgccccagggtcacgccgccggttccagatgaatccagagtgggggcaggccttcgtgcacgtgggccgtggccggtggcttcttgttgccgtggcttgtgtttcacggggcatttttcgaacagtgttttccgtgcaagtggggctattnagcattaagnccgagggncccgtgggccgggccttccc

SEQ ID NO: 439454 - DNA, 782 bp, Homo Sapiens
  misc_feature (622)..(666): n is a, c, g, or t
ggcgcgtgcgcgagcggtgccgcaccggccggggcgcagggagtattatgggctgtgggtgccgctgagcaagatggagctgtctgcagtgggcgagcgggtcttcgcggccgaatccatcatcaaacggcggatccgaaagggacgcatcgagtacctggtgaaatggaaggggtgggcgatcaagtacagcacttgggagcccgaggagaacatcctggactcgcggctcattgcagccttcgaacaaaaggagagggagcgtgagctgtatgggcccaagaagaggggacccaaacccaaaactttcctcctgaaggcgcgggcccaggccgaggccctccgcatcagtgatgtgcatttctctgtcaagccgagcgccagtgcctcctcgcccaagctgcactccagcgcagccgtgcaccggctcaagaaggacatccgccgctgccaccgtatgtcccgccgtcccctgccccgcccggacccgcaggggggcagccccggactgcgcccgcccatttcgcccttctcggagacggtgcgcatcatcaaccgcaaggtgaagccgcgggagcccaagcggaaccgcatcatcctgaacctgaaggtgatcgacaannnnnnnnnnnnnnnnnnnnnnnnnnnnnnnnnnnnnnnnnnnnnccgcccccaaagtcccctcgcggaaccgcgtataggcaaagagcaagaagttcagcgaaagcgtcctgcgtacacagatccgcacatgaagttcggcgcctttgcgctgtacaagg

SEQ ID NO: 439455 - DNA, 922 bp, Homo Sapiens
  misc_feature (42)..(43): n is a, c, g, or t
  misc_feature (745)..(745): n is a, c, g, or t
  misc_feature (803)..(803): n is a, c, g, or t
gttggagaaataagttgtgacatgcacacccatgtgactctnnccctctccctgcacctttaacttctgattcatcccatgcatgcagcttcacctgcacatgcccagggcgtgttctggtgtcttccctcatgccgaaatcaattcagtccagagaggaggtgactgggagccaccatggggcatatcactggtctttaactggctgttgggtccagaggcaggacaatcagagacccttctcagggcttttgctttgtctttagaggtagaaggcagcttgtgccccaactccctcaccccctacaaaccacactccaggcaagggtggccagcagtagtctgtgggtcgtctcttccttgtgagcacatcctgccacagcactgcttcacaggagagagccatgtggacaagccccatccttctattctactctgtactcatccagcaattgcctgagagccaccccatggtggctctgcaagtggctaaggatacagggcttattaagacacctttttttgtagccagcctccaagatgtatccttgggatccttgcttctggcattcacacacttctcggccccctctcacgttgaatcagggctggctttgatcactggattacagtagaagtctcagcagatgttttccaaggtgagaggcttgtagtttccaccttgctctcctgaatggctcgttccggggtaagccagccaccagaccatgaggacactcgggcngctccataaacaggaccccaggggaagatactgagcccctggacaattgctggcattntttttccagccatgtgagtgacctaccctagatgttgaccccctgctcctttcaagccttttgatgacacatgactgcaactacatgggagttttcaaacaagggctgcccagccctga

SEQ ID NO: 439456 - DNA, 605 bp, Homo Sapiens
  misc_feature (127)..(163): n is a, c, g, or t
  misc_feature (531)..(531): n is a, c, g, or t
  misc_feature (578)..(578): n is a, c, g, or t
ttatttcttctttacctgtggagccagaggcaaggaagatgaccaagaattcagacataggagagatctggataaacttaggaacctgtctaatagtttagaccctggaagatactgtagaggaaannnnnnnnnnnnnnnnnnnnnnnnnnnnnnnnnnnnnagtgctgaagtaactttctctggagacacatcatgagcactgtaaagaacgttgttcttccccaaatgcctttcttcctggatccagctacttttctttgagttggagaactcatacttgaaaatctctgattgacaacagcacactgatgagtagatattattggatgggaagctgatgatcatgccagccttcactgtattgactaatgaaaaacctggatcttgctgtaagagccattccagtcctgatatccttttcctcggcatcttcggacaacctcaggcagagccctgcttgttggaatgctgcgcagattttcatgctggagagttccatctgtctggcagaagctgaagtggtgttgngggcaggttatctggtgaagtaggaatgtacaggaaccccgccctcnaggcacagtacacaaccccagcaaccc

SEQ ID NO: 439457 - DNA, 1925 bp, Homo Sapiens
  misc_feature (1820)..(1820): n is a, c, g, or t
tgatgctgctgcatttcatcacctttgcgagcgcagcatccatccctccgctctcccggcgcctgggcctacccagcttcgggctcccaggccagcgatgcgctcgcggctgagctagatcctgccgagccgcgctctctgaggcgtcggcggggcgccccctcccgccgtccccggtccgggccaaggagacctgcagagccgcggccatggaggccatctggctgtaccagttccggctcattgtcatcggggattccacagtgggcaagtcctgcctgatccgccgcttcaccgagggtcgctttgcccaggtttctgaccccaccgtgggggtggattttttctcccgcttggtggagatcgagccaggaaaacgcatcaagctccagatctgggataccgcgggtcaagagaggttcagatccatcactcgcgcctactacaggaactcagtaggtggtcttctcttatttgacattaccaaccgcaggtccttccagaatgtccatgagtggttagaagagaccaaagtacacgttcagccctaccaaattgtatttgttctggtgggtcacaagtgtgacctggatacacagaggcaagtgactcgccacgaggccgagaaactggctgctgcatacggcatgaagtacattgaaacgtcagcccgagatgccattaatgtggagaaagccttcacagacctgacaagagacatatatgagctggttaaaaggggggagattacaatccaggagggctgttaattttttaatagtggatttgtaccaaatgtggttcactcttcagaagaggttgtcaaatcagagaggagatgtttgtgctagtcagttcttttatttccaaaacatgctctcctacttgaactgaaaagtaagagaaataaatagaatctttgtgtaactgatgagaactcaacctccatttggataccaagtgagcctccctctcagggggactctgacagactcgtgtgcgggtggatgggggtgcctgagtgctgtgaccaagggactgaattgctgacatgggccaggccaggcactgttttgtggcccatgctaggcagtggctgctccatgagccctttgtggaccacatgttaaaggcctggggtttaggaagctaagtcccaggaaaacatacctacagacaggacaactgttccttggtatttgagctcacttataggccatgaacataaagaaatacataaaggggaaaaaagtttcacaatggggacaattagcataactaaacaaagattatgagctctacttattccgtgagaataccctgcaccaaaggtgtttgctgggtttggttaaaaggtaccaattagcttttaacagctttctgtaaaatgaggaacacagaccaaaaggtctggtgttcaagtaaaaatgatgtgactatggaaaggaaggcaatcgacacagttattagcacatttcagaaaatgaacacccttgtgatagaattaccagctgtatgaaacaaattgtcccatgcaaattaccctataactaggaaagagacactataacccaaatgccataccccctttttcctttgaccatgcctggggtttcaatgccttggcacctgcaatctggaagtaaacagtctgcttgcttcttcaggtacgtgacagtgacaacacagtgactgcctctgaaaagagccctgaggcaaacactctctcctgctggaacaggggggcactgtaacccttacaaacagcttacagttacttggggctacttatttgatcatcataacagggcctacggggntttttggcccttttttacaggataggttaaactagggggcctggaaaattcacttgggccggggttcaggggcttcgtggattcctaggttcttttttcactggc

SEQ ID NO: 439458 - DNA, 936 bp, Homo Sapiens
aattgtgaaaagtatggcttttgcctagctgaactggctacaatccaaaaagtaatttaaagcatcacctctcttcaagaacataatggaaacttcaagccagccattccaatttgctgatgcagttagctgtttgttcacctgagaattaagggctgactctcttgggtagacaggaactcagtgtacgtatatggcagacaggtggccaaggtcattttggggtgggtattttatccctatcccactccgcattgctgtacgtggttcctttcaataaaaatccactgtgtctcagtgataagaacacttatagcccacacagttctaatgtctttttagttgtgcaattattcacttgtttaaagccctcttgtcaataatgcctgaatgggctttacctttgattccttcccatgttccctcaggattatagctgagttgtaatcaataaggaaaacatatcctaacatgtagagaacatttatttatagtcatatctcttcccaagtaaacaaattcataatcatttattcatctgacagcagtatgatgcagtgaaaagagctaggagtcacgagtccttgaccctggccaagtgattttcatggctcttagtttactattctgtaaaatggggcaaaaacctcgtaggcctgttatgatgatcaaataagtagcccaagtaactgtaagctgtttgtaagggttacagtgcctcctgttcagcaggagagagtgtttgcctcagggctcttttcagaggcagtcactgtgttgtcactgtcacgtgcctgaagaagcaagcagactgtttacttccagattgcaggtgccaaggcattgaaaccccaggcatggtcaaaggaaaaagggggtatggcatttgggttatagtgtctctgtgcccattattaggtatttgcttgggacatt

SEQ ID NO: 439459 - DNA, 1104 bp, Homo Sapiens
  misc_feature (162)..(224): n is a, c, g, or t
  misc_feature (988)..(988): n is a, c, g, or t
  misc_feature (996)..(996): n is a, c, g, or t
cggtccggaatatccgggatctgggctgagccggcgaagtgcccgggaaggcagcgagacgtgggcgccggcccagccccctcccgcgtccttcagccccaagccccgagcccctctgacccttccgcagccctccctccagccgcgcccggcctccggcannnnnnnnnnnnnnnnnnnnnnnnnnnnnnnnnnnnnnnnnnnnnnnnnnnnnnnnnnnnnnntcggcagctcttcccactctgccacgcgtccttttcctgcaccttcgccccgcgtacctactcctgccccgccctgccattcctctcccctcccttctctctgcgacccctccctgttaggccccagcctcttctcccctcacaggtcttctctgtcctggcctcaccgccttatcctattcctctcccttgccctgtgtcttgtctcagagccccctcggggtgggagtaggttgtggagcagcacaactgggctcaccccaaagcagaacttctcaatccatgaggacaatggggaggcctttaggccagcccacatgtgacaatggagggctgcggcttccttgcggagagcacaagtgagctcactgccctggactccagggaatcagagttctggccgcggggtgacccagctcctctgctaccatgaatagggcccctctgaaagcggtccaggatcctgcacatggcgctgaccggggcctcagacccctctgcagaggcagaggccaaacggggagaggccctttctgctgcgggcattgcagatcgcgctggtggtctccctctactgggtcacctccatctccatggtgttccttaataagtacctgctggacggcccctccctgggggttggacacccccatcttcgtcaccttctaccagtgcctggtgaccacgctgctgtgcaaaggcctcagcgctctggccgcctgctgccctggtgccgtggacttccccagcttgcgcctagaccncagggaanaccgcagcgtcctgcccctgtcggtggtcttcatcggcatgatcaccttcaataacctctgcctcaagtacgtcggtgtggccttctacaatgtgggccgctcactca

SEQ ID NO: 439460 - DNA, 1846 bp, Homo Sapiens
ctgcctgcaagtgtttattctatttagaagtctacaaatttgagcttttaagaaagattcacaaaatattcattcaaaaccacatttttggcttatcaaatttcaaatatattttactgtgctgaacaatatattctaatgctgtctaaaacacagctaaattatttttctttatttgtttatacacattcggtaatttctgaaaagcaagatttaaaaatatttattaacaaaactacccaattacaatgactgttctcccatacacgcaactattttctgtagctgtatcttcttacctcattccactttaactctgtataccgtattgatttgtgatgagatgatttattatgagaactcttagggagttctcatcttccatttctcatcaattcaaacagcaacacctttcacaagataacattaattcccttggcagggcagaagcttaagtttgttaaaagcactcactgaaaaacatttttaaatttataggtcatataaaataatttacaaagagacagatgacttcaaatattatttggcagtcaccttactatgtagaaacataaatgaagcaatctgtcacacgagacaccagtcacttttggtcttttgaaggaagtgtgtgtggtgagtgttgtttctgcaggcccatccagcatccgctgattctggcagccctgagcccatgtgtcacatggagacctctcctcctcccccacatgaagcctcctggttcaggagcaggaggagccgaggtctccaggccctcagtgttgaaatcaaaggttccaagaaaataaagcaaggatatacacagagacgccaaaggagggtgtgacaggaaggaacgtgaaacagaaatcacaggaaagctcctacatcagaactcagaatttctcaaaagaaatattaaaaatcagaaacatatacccatatgaaaaagtagcaaaacaatctgcaaaactatctggacttcactgccgcctgaagatgtggttacttgttcatttaaagaggaatttctcccaggaaatacacatcatgacttcagtattaagaaccgtagcgatcctgaattgaagtcacgactcctttagcaaagacggagagttttccagcaaccgatctcactccctgcttgaactgcgccatgtcgggggcgttgggcagcacactggacaggctgtagttccctgctggctgcttcctcggctcctcgaacagatcagccgagcttatggaggaacttgccgacagcctctctaggcgggccctggtctcataatcagcctgggattgtcttccaaaatacatatctgatgaaatggccttgacattgccaaacttcttctgggcctcatctgtattttcaactggctcataatctggcttgcggcgagcagtaggtctgtctgaatagcctgtggttttcagaactgtttcagtatctttgctggtctcttttttccaataggaatctgaactgtcatcccagctagagaaagaactgctccttaactccactggctcgtcaaagtaacttgagctggaagtaaaatatgaatcgtcactgtcatcattatacttttttcttggttttgccataatgggtgattcctgctctatggtctgcatatctgaagtcactgaatgtgaaataacacttctgcaatttccaaatcccatgccgagtctgtctgagtcaacattttttttgccactaatgttcatcttttcgtctttcttcatttgaatttcaagatccttataggctaatcgtaatgatgaaacaattgatcttctttagataccacttggccagtacttcctgtgcttc

SEQ ID NO: 439461 - DNA, 892 bp, Homo Sapiens
  misc_feature (12)..(12): n is a, c, g, or t
  misc_feature (475)..(505): n is a, c, g, or t
cttccactcctncctcctcattctcagtgttgttcccttgctcatcagaagaaccactgctgccagtctcatggtcagagccatattcttcagagttcacttcttccttagaagactggctggatctgcttgcacgtctatccacttcaagcccaattctctcagaaccatctggcgtaggagatttggcccctctttcaggatcccttttccggacacaggttttttcaggttgattcttataaggttctctggaggcactacttgatagacgaattttccgatcagcatctagacgcttgtttctttcagatctttgatattcctcatttttatactctgtggctgactttccttttgtactaactattcttttgttattgctaacagatgagctcagtggcttagaaaccagttgtcttgaatggacagaaggcttttgtcgtttggtatcagtagattccattcgatcacnnnnnnnnnnnnnnnnnnnnnnnnnnnnnnnatcttgttcactctctggattatacagttcatcatcttgttctggtacttcagttaaaatatcatccagaacattaagttctccatctttctcctcccgactgtcagccgccatggcttcccttcggtttccgccgctgccaccgccgccgccgcttagacgcgactcgcgcgggcgccgcagccgcggcagaagcacgggcccgtccgtcagtccgtctgcccggatacgcgcgtcgcacttggcctcttaacactcagccttctcgactcttcccgctttttccctttctcccttcctttcactccagcatccagcggcctaggcccagccttctcgttagggctcagactcgggctaggtatgggggagggaagggaaacagat

SEQ ID NO: 439462 - DNA, 1122 bp, Homo Sapiens
  misc_feature (915)..(915): n is a, c, g, or t
actgggggcccaagagaaagtttcggtttggggacccccgccccccatgtttcaaggttcagaggcccccaggacatccattgggcccatttgcccggggatccctaaaggaggccccccacagggcaaatccttttttaccatctttcccccccagggagggaggggcccagcccaaggggaggttggccccatggggtggtcacaatgcaagtttccaccaatttttttagagggtgaggtaaagggtgtatttcattcaaagaattctcttctggctggtgtaggggataaagggcttggcggggtccagcccccaaaccagcacttagcaagtccttgtacacgaccagagttgctccagctttgggggaaggataggaccctgaagccaaaggtcggatccactctttgctgtttaggtcaagtctccagaggtcattgaaagcagcattgcagctgctctgggtacagcctccaaacacatacatagactgattagcatcataatagcatgcactgtgcgagaagcgctgagtgattggggttccaggataaggataggtacggctctcccactgaatgtttccttcctggacagccttcatgaaaccatgataacactgatgggctacacctttgataagtcgataccactgtttgcagacaagggccgcagttttgtgttcctgatacggtgagagaaaggacaggatatactccaaaacctcttctggcagctccgacatggacctattatgtctagtctcctcagcctccaatactgggtggggctcctcatcttgatccattgtcccttccagcacagtttcttcctggtccacagccatgaaactgtcatcttcactgtccgaggagctggccatgacattccactcaacagctggcccagcnccgctccacgctctcgggttcgctccgctggcgacggtaatgagggagccagggacagggccagagcagaggcgctctgcctcaggccgcgacagccgtgctcggggctcctcacagctggcgggaccccgagccgcccggagccgccatcttcctccactcaaacaccgccgccgccgcagctgcgatccggagaattccggaccg

SEQ ID NO: 439463 - DNA, 1052 bp, Homo Sapiens
  misc_feature (229)..(268): n is a, c, g, or t
  misc_feature (816)..(883): n is a, c, g, or t
  misc_feature (980)..(980): n is a, c, g, or t
  misc_feature (987)..(987): n is a, c, g, or t
  misc_feature (1003)..(1003): n is a, c, g, or t
  misc_feature (1019)..(1019): n is a, c, g, or t
  misc_feature (1028)..(1028): n is a, c, g, or t
  misc_feature (1047)..(1047): n is a, c, g, or t
  misc_feature (1049)..(1049): n is a, c, g, or t
gccgccccacacccgtcactcctcccgggtttctgctctccgcccgtgtggagtggtgggggcctgggtgggaatgggcgtgtgccagcgcacgcgcgctccctggaaggagaagtctcagctagaacgagcggccctaggttttcggaagggaggatcagggatgtttgcgagcggctggaaccagacggtgccgatagaggaagcgggctccatggctgccctcctnnnnnnnnnnnnnnnnnnnnnnnnnnnnnnnnnnnnnnnnaagctacacctctggccgcagttgcgctggcttccggcggacttggcctttgcggtgcgagctctgtgctgcaaaagggctcttcgagctcgcgccctggccgcggctgccgccgacccggaaggtcccgaggggggctgcagcctggcctggcgcctcgcggaactggcccagcagcgcgccgcgcacacctttctcattcacggctcgcggcgctttagctactcagaggcggagcgcgagagtaacagggctgcacgcgccttcctacgtgcgctaggctgggactggggacccgacggcggcgacagcggcgaggggagcgctggagaaggcgagcgggcagcgccgggagccggagatgcagcggccggaagcggcgcggagtttgccggaggggacggtgccgccaggaggtggaggagccgccgcccctctgtcacctggagcacctgtggcgctgctcctccccggtggcccagagtttctgtggctctggttcggggctggccagggccggcctgcgcactgcttttgtgcccaccgcnnnnnnnnnnnnnnnnnnnnnnnnnnnnnnnnnnnnnnnnnnnnnnnnnnnnnnnnnnnnnnnnnnnnagtttctggagtccctggagccggacctgcccgccctgagagccatggggctccacctgtgggctgcaggccaaggaacccaccctgctggaattancgatttnctggctgaagtgtccngctgaagtggatgggncagtgccangatacctctcttcccccanancat

SEQ ID NO: 439464 - DNA, 2137 bp, Homo Sapiens
  misc_feature (741)..(749): n is a, c, g, or t
  misc_feature (1311)..(1311): n is a, c, g, or t
  misc_feature (1982)..(1982): n is a, c, g, or t
atgagtatggaacctccatgggctcagaaaaaagatgctaatatatttatctcattgtttacataagcttttacagtttcagacctcagcagctgtaaggccagtccagggaaccctcccctgctgctggaaacccttctgagttggccctggagtggctcacgggcagagaagggtagccctggggctgggggagggattggaagcctccctggagtcacctgagccctcgtccccattcccagggcccctccaagcccagctggcaccaaagagcttgggcccgtgctgaccagcccccaaggccctctggccggaccatgctggtcctgaccagctagcctacgcggggatggccgtcagttctggccacaggacccgagtctgggcttgggtccccctgctgctctgcccgtgacccttggggatgggttgatgcgagggtcccactcaagccaaaaagccgggacctttgcgcagctctgtcgactctggtgggtccccactcctggggccccctaaccccaccccaggcagcggaaggggctgactgggtctggtccttaccaacatagacggtgcaaacactcttaacagtgttgtttttgtatcaatatgtttgtgcagtgatgaatgtatttatttctcagacttggggcgagtgagcgggtggcaggccgggctccgccactgcatgctcccgccggaccgagccccagcaagggctcctccaggattgcnnnnnnnnnggaagagaaaagatgaacctttaagcaaataagaatctcagagactcgcagcatagccatacacctcagcctgtgaaatgaacgatccggaccctcaccaactttccccacctcaggcagccctgtgtgtttaccgttcatcaccactcgggggcaccgggccgcccacccactcccaaaatccgtcagtattcactggacctcaggccctgtgcaggagtgcgatccgggctgggccgctgggcaggctgaccccctgccctctgcggccatcctgagttggggtgaggcctgggcagccggagggcagggctcagggagcaggaggctgcatccgtccacccccaggcgtgggggacaaaagccaaaggtgccaggccttagagcagacaagggctctcagccctggcatgccccctaaagggaccaaggtcctcctatttcccagaaccccgttggggcagatgttactgaacctgtgaatcagacgccaggagtgagggctggggagggacctaactggagcctcagtctgacattccacgccggggtgggggtgggnatgagcggtgggaactgaggctgcccaggacccccttcctaggatgccccggcttcagtcaccccactttaactttctaccaggaccccctccccctacctcaccttgctatttattgctgtaatttattgacctcaaaaatgctgcataacagacctcactggggcagggaggatccccagggctcccaccctccacttggcgggccccgtggggccaggtgctgaggggagcctctctaccccacccatcactagcttccctctgccctctcccaccccgggggggacccaggttgggcactggctcaatttctcgcaaaatccctcgaaggggaggggggagggatggggttatagctgttttgtttaattggaactggaagagggatcatgttttgttttatgcccttcccagaaggggggagggacaccggggatccgcactcctgtactggccaccgccgctgtcacttgtcacattgagttcatgtccccttgagagtttgtataaaattcaggtcagagcttgagctacacagctggccagtgtcatagaaaagcaattccccaacgactgatctctccatttcgagaagtgtgcagtcttaaatgtacagcggataagaaactgttattttatgacctcttccattaaaagcttgactaatncccacaacacccaccacacaatcccccttggtgggccgcccccggccctccagaaatctttctaaaaccttctgttttggcccggcgggcccccgcaggcaagatggaacctggggcataagcctggtttcctaaggggaaccctgggcaatgac

SEQ ID NO: 439465 - DNA, 1441 bp, Homo Sapiens
  misc_feature (48)..(48): n is a, c, g, or t
  misc_feature (536)..(662): n is a, c, g, or t
  misc_feature (831)..(831): n is a, c, g, or t
  misc_feature (833)..(833): n is a, c, g, or t
  misc_feature (937)..(937): n is a, c, g, or t
  misc_feature (1022)..(1022): n is a, c, g, or t
  misc_feature (1106)..(1107): n is a, c, g, or t
  misc_feature (1292)..(1300): n is a, c, g, or t
  misc_feature (1434)..(1434): n is a, c, g, or t
tatattttaatatgtgtccctgtttaagaaatagagtctccctcttcnccgacccctaaataacattgtataagtatccagtctctaacaccttctctatggtgtaggaaacattcagattgtgtgtggaaatgcatgtgacctaaaagtatatatgaacacttgtaggaacaaaatgacacaaagaagctacagagttagaaaatcatattaaaagggagactttttttaaaaaacgtgaaggatggaaaagggttttaactgtttgcttctattagacctttctccagagaaaaccgtcaaaagcaaagctatcaaagagattctccagtagctctcagacagaacaacagtccaaagggctcttcaagagaaaatctaatgttgggaggctccttcttatagtgagggcacagaggagggctccttcttaagagaaggtcaactactctgcaagtgcctgaatttggtcgtcagctcaatagcaagaatctcgagggacatttttctgtcttgtttagcatttcagtagctcnnnnnnnnnnnnnnnnnnnnnnnnnnnnnnnnnnnnnnnnnnnnnnnnnnnnnnnnnnnnnnnnnnnnnnnnnnnnnnnnnnnnnnnnnnnnnnnnnnnnnnnnnnnnnnnnnnnnnnnnnnnnnnncagtatatttttgtcataatgaaaactctcaacatataggttttgatgtgaagttcagaacagggtagaccagcatagtcagtggaaatcttcaaatcatttaccagtaatttctgagcatttggccactggcagacatttttgctaggtactagggatgcaaagatananatgtaataagctctgacttcacagtttaatgagaactcaaagtcttatgggtgagagacactgactctactacaagtgaccaaagtggagggagtttgggatgngatcaatgagggttgaaaactgtataacattttgcctgcatggaaggggtgcaagaatagaaaaggtgagtgaggatattaaccnacatgtgcagggaagcaatgaggaataatactgataactgaagtggggcatgaacaggttcacaaatgtgtgaatgttattctnncaagtcataatccaagagagggaaagtaatacattgcttccactgaaataccctcttcattacacttgcagaggaggagcagaagtggtgacattgtcatgggacctgagatctcttggaggagaaatggatatctacaggtagaaagaattccatctttgatggtttcatgcatacaatacagnnnnnnnnntggcatgcatacaattcataaccttttatttttcaaactctcaggtgccatgaaagaagacaggagaactagctagtgacagattttagttctataagaatctcacaaataattcttgagtgttggagactgantggaagc

SEQ ID NO: 439466 - DNA, 2167 bp, Homo Sapiens
cccccctcttgttgtactatgatttgggtaagcaatctgtgtatcattcgctactgtgttgtttggttgccattggagggaaaaaaaacaagaaaggtttatttaaatcagagagcctctgaaggcacctggtttctgtcaaatatatttttaaaaaaggcagtaacgtggcaactgtacagggtgcatgatgggtaagaactgggcatggggagttgggagggggacatggagagaacacagaggaggaggcgcaggggagaatggagtatatcaggtcaaaccatacaacggtcagacccagctcctagccaccccaggacaggcagacagtctgacagacacggacgcagacacacagacatatacacagagacacacgtgttctccaagcccaagagcctccactggcctgcacaagcagggatcagtcagagccaagagtggagaaactcaagcaaatgccgaggctacaccccgtccctcgactctgagccccaaacccacaatgtccccactgtccgtccagaggctccctccccagggcctggagatccgggcccagcacacgccgtggaaagcagaagtcagttagaagaaaaaaccgccagaccactcaggatcacccctggcagaaggaaggggcaggaggcagacagggagggaggcaggcagtccttctgtccatcctttgtcacacaattgcccggaacaggaaggagaaaacagcccccagtgccagacccagacacaggaagaaggccatgatggctcctgcggtctctgcctcagctggcttcactttcttgggcccgaagcacatgcagaggctggcgaggtagccgttggagaaggcaaaggcagccatgaagaagatgaaccaggcatcgtgctcgaagaccacagtcaggtagcggcggggcttaatgttgcacagcagcagcagtggcacaaacaccagccgggccagcaccaggcttggcagccagcggctgtccttcccaggccacatgaatacagctgtgaggctccggcccaaccagtcaaagatattgaaagtcaagaaacaggacacaggaatgaagtaacgttcccaggtgctgctgcctgcgatgctggacttgacctcaacagtcacggctggaaacatcccaatggtgatagtgaagatgaagcagacagagaaagccaggactgagatatttttcaggatggctttgatagagtggctttcattggtgggctgagagttggagactgaaactccagattcctctttgcctgctcttggctcctctcctttgctaatgaggtccaacttggtctcctgctccccgggtccttcaagcttgagctgctggtagtagcggtagaattccaggcggggcaggcccaggtaacagatgatggtcaaaatgataacagcacaggctgtgataaagtagccgaaggcactttctgatagctccgagccactggcaatagcgcagatcatggccacggaggcaaagaagcctgctaggccctggccactcatgatgggggccgtgtagctggcaggcagaaggccagccagaccaaacaggctgccctgcaggatggcaccaaatgaattaatgagcacgatcttgatcatggtgatgacaaagaagggcagagcatccagctgcaccttcaccaggatggcagtgatcagaaacaccagcaggatggccaccaggctgcccaggatccgtacggactgggggatcctctgatgcaggaaggagttgaggtaggtgaataacagcaggggcagcatggcacatagggtcatgacattgttgaagatggcactgagagagttccgctcaggcaagggtgctgcaggggcggctgacgcctgggcgtccttgctcagttcagcagtgaccaaggacacattctgggacatgtccaggcggtttgtgaaatactgagtggccgtcatgaaaaaattccacgggagcagcgttcccagacccagcatgaagaagataagccagacagctttgtatctgtcctgaggctggtgactggttgtcatggtgatggtgttctcggttttccctggctgacagctccctccctcaggggcctgccgcagaagcactgctcccgcgctgagatccgccgcgctctcgctgca

SEQ ID NO: 439467 - DNA, 815 bp, Homo Sapiens
  misc_feature (655)..(716): n is a, c, g, or t
  misc_feature (782)..(782): n is a, c, g, or t
caggctgtacggtccggagttccgggatatcgtcgaccacgcgtccgctggctgccaagcctggtgctggcccggctggtgttggtgccactgctgctgctgtgcaacattaagccccgccgctacctgactgtggtcttcgagcacgatgcctggttcatcttcttcatggctgcctttgccttctccaacggctacctcgccagcctctgcatgtgtttcgggcccaagaaagtgaagccagctgaggcagagaccgcaggagccatcatggccttcttcctgtgtctgggtctggcactgggggctgttttctccttcctgttccgggcaattgtgtgacaaaggatggacagaaggactgcctgcctccctccctgtctgcctcctgccccttccttctgccaggggtgatcctgagtggtctggcggttttttcttctaactgacttctgctttccacggcgtgtgctgggcccggatctccaggccctggggagggagcctctggacggacagtggggacattgtgggtttggggctcagagtcgagggacggggtgtagcctcggcatttgcttgagtttctccactcttggctctgactgatccctgcttgtgcaggccagtggaggctcttgggcttggagaacannnnnnnnnnnnnnnnnnnnnnnnnnnnnnnnnnnnnnnnnnnnnnnnnnnnnnnnnnnnnnctgggggtggtaggagctgggtctgaccgttgtatggtttgacctgatatactccattctcccctnggctcctcctctgtgttctctccatgtcccccc

SEQ ID NO: 439468 - DNA, 1247 bp, Homo Sapiens
taatgaggtccaattgtttctgctcccgggtctttcaagcttgactgctggttatatcggtagattccagccgggcaggcccaggtaacagatgatggtctaaatggataacagcacaggctgtgataaagtagccgaaggcactttctgatagctccgagcccactgggcaattagcgcagatcatggccaacggaggcaaagaagcctgctaggccctggccactcatgatggggccgttgtagctggcaggcagaaggccagccagaccaaacagtctgccctgcaggatggcaccaaatgctggggaaacagggcgggcatgagcaggggagctagggctggtgcttgggggtgcccaagaagacagatccctgtcattcctactttactcttggtgagccttgaggctgagctgcccttctctctgccccctcccagccctggtccaggcccattcaggccttctgaatcccagctgttcacagcatccattccttccagggcggaggctgggcttctctctggctaacgctgggtctgaaaaaagagtgggggtagttgggcatgcctcctcccataggccccctcctggcccagcttacaattaatgagcacgatcttgatcatggtgatgacaaagaagggcagagcatccagctgcaccttcaccaggatggcagtgatcagaaacaccagcaggatggccaccaggctgcccaggatccgtacggactgggggatcctctgatgcaggaaggagttgaggtaggtgaataacagcaggggcagcatggcacatagggtcatgacattgttgaagatggcactgagagagttccgctcaggcaagggtgctgcaggggcggctgacgcctgggcgtccttgctcagttcagcagtgaccaaggacacattctgggacatgtccaggcggtttgtgaaatactgagtggccgtcatgaaaaaattccacgggagcagcgttcccagacccagcatgaagaagataagccagacagctttgtatctgtcctgaggctggtgactggttgtcatggtgatggtgttctcggttttccctggctgacagctccctccctcaggggcctgctgagactttggagtgagcatccggacttggtgggggacggaaattcccaggcctgcgggcccctagttctctccctcctcatctcggggctggggccatagccacagctggagagcgcagcccgcgccgggc

SEQ ID NO: 439469 - DNA, 943 bp, Homo Sapiens
gcctcttccggttcctcgccctcacgctggtttacacttctctgggccccgatgcacatgccagaggcttggtgagttaaccctttggacgaaaggccaaatggcagcccatgaaagaagattgaacacagggcatcggtgcctcggtaggcccacccattcaaggtaagcggcgggggcttaattgttggcacaagcaggcagcagttggcccaaacacccagccgggtccagcaccaggcttggcacccagcagcctgtccttccccaggccacatgaatacagctgtgaggctccggcccaaccagtcaaagatattgaaagtcaagaaacaggacacaggaatgaagtaacgttcccaggtgctgctgcctgcgatgctggacttgacctcaacagtcacggctggaaacatcccaatggtgatagtgaagatgaagcagacagagaaagccaggactgagatatttttcaggatggctttgatagagtggctttcattggtgggctgagagttggagactgaaactccagattcctctttgcctgctcttggctcctctcctttgctaatgaggtccaacttggtctcctgctccccgggtccttcaagcttgagctgctggtagtagcggtagaattccaggcggggcaggcccaggtaacagatgatggtcaaaatgataacagcacaggctgtgataaagtagccgaaggcactttctgatagctccgagccactggcaatagcgcagatcatggccacggaggcaaagaagcctgctaggccctggccactcatgatgggggccgtgtagctggcaggcagaaggccagccagaccaaacaggctgccctgcaggatggcaccaaatgtttactcttggtgagccttgaggctgagctgcccttctctctgccccctcccagcctggtccaggc

SEQ ID NO: 439470 - DNA, 994 bp, Homo Sapiens
  misc_feature (131)..(131): n is a, c, g, or t
  misc_feature (984)..(984): n is a, c, g, or t
cttttttggccctgttcttggggctccctttccctttggctaaaggagggtcccaacttgggtctccctgcttcccccgggtcccttcaagcttggagcctgctggtaggtagccggtagaattcccaggncggggccaggccccaggtaacagatgatggtccaaaatgataacagccccaggctgtgataaagtagccgaaggcactttctgatagctccgaggccactggcaatagcgcaagatcatggcccacggagggcaaagaaggccctgctaggtccctggccactcatgatgggggccgtgtagctggcaggcagaaggccagccagaccctacaggctgccctgcaggatggcaccaaatgaattaatgagcacgatcttgatcatggtgatgaccaagaagggcagagcatccagctgcaccttcaccaggatggcagtgatcagaaacaccagcaggatggccaccaggctgcccaggatccgtacggactgggggatcctctgatgcaggaaggagttgaggtaggtgaataacagcaggggcagcatggcacatagggtcatgacattgttgaagatggcactgagagagttccgctcaggcaagggtgctgcaggggcggctgacgcctgggcgtccttgctcagttcagcagtgaccaaggacacattctgggacatgtccaggcggtttgtgaaatactgagtggccgtcatgaaaaaattccacgggagcagcgttcccagacccagcatgaagaagataagccagacagctttgtatctgtcctgaggctggtgactggttgtcatggtgatggtgttctcggttttccctggctgacagctccctccctcaggggcctgccgcagaagcactgctcccgcgctgagatccgcgcgctctcgctgcagctccctccctcgtgccgaattcaacacccaggcctcgctacctagccgtaagttgtnctgcccagcc

SEQ ID NO: 439471 - DNA, 1221 bp, Homo Sapiens
  misc_feature (65)..(101): n is a, c, g, or t
  misc_feature (1053)..(1053): n is a, c, g, or t
ccccccctcctcccccgcgactgaatagtctattgggcgactggattcaccgcggtggcggccgnnnnnnnnnnnnnnnnnnnnnnnnnnnnnnnnnnnnnatcaggccaaatcggccgagctcgaattcgtcgagagcggagggagcctgaggaccctgcggggaccgggacccaagctgggcggggcggcctggctcccgggcctaaaacaggctgcggtcacgttgacctccgcaaggggcaggcgagtggacgggtgatccccatcgatctggagcccgtggacaaggcccactgcctgagcctgaactaggagcacctcctagggactgcccaggcttgctctgctctgacccttctgctggccagtctgggcacctggcccctgagggagggagctgtcagccagggaaaaccgagaacaccatcaccatgacaaccagtcaccagcctcaggacagatacaaagctgtctggcttatcttcttcatgctgggtctgggaacgctgctcccgtggaattttttcatgacggccactcagtatttcacaaaccgcctggacatgtcccagaatgtgtccttggtcactgctgaactgagcaaggacgcccaggcgtcagccgcccctgcagcacacttgcctgagcggaactctctcagtgccatcttcaacaatgtcatgaccctatgtgccatgctgcccctgctgttattcacctacctcatctccttcctgcatcagaggatcccccagtccgtacggatcctgggcagcctggtggccatcctgctggtgtttctgatcactgccatcctggtgaaggtgcagctggatgctctgcccttctttgtcatcaccatgatcaagatcgtgctcattaattcatttggtgccatcctgcagggcagcctgtttggtctggctggccttctgcctgccagctacacggcccccatcatgagtggccagcgcctagcaggcttctttgcctccttggccctgatctgcgttattgccagtggctcgaagctatcagaaagtgccttcngctactttatcacagccctgtgctgttatcattttgaccatcatctgttaccctgggcctgcccccgcctggaatttctaccggctactaccaagcagcttcaaggcttgaaagggacccgggggagcaaggagacccaagtttggaccctcctttagccaaaggaat

SEQ ID NO: 439472 - DNA, 1552 bp, Homo Sapiens
  misc_feature (281)..(290): n is a, c, g, or t
ttgaaccttcaagtggcttttattggtagagcctagaaaaagtgtcatagccatttctgagcaaaaatctgtatcccagtaaggtattcagtgttatgtttaacacactactgaaccagaaagtttaagttcctgacacagacgcaaccaggtcactaagaggctccaaaatcaacaagttaagccctgctgctctgttaagatctgaaaggcaagacacagtgctggatgtgtgcccttgttacggggtgactaaaaaggcaggcaacagtatcaaggannnnnnnnnnaggtggactcctgtgcactcccacattgcaaggatgtgcttcagcagcaacactcaagtctcctcttcattctgtatctgcctaagcaatctgcttaggacacgtgtggtcggtcataaaacatgatcatcaggatggtagagttcactcatcaggcggtagatgtaggaaggtgcattcccaccaatgttggagataaagagggtaatgagctctgggggaacgtagtcaaacacagggcaatgcacgctgaccttctccagaatgtccccttctgtgaatggcaggacttcttcaggagccacaaacttatgaaatgagtcttcttcattggggaactgtggagaaagtttgaacataggtgcacagacgatgagtggggtggaatggtgttttgctgccagtgccagagtgtgagttcctgtcacagctctcagggccccattggccaggatggtcttcgtgccaatgatcaccttgttgactcttgacataacggcaaaaatggcagcatcagtcatgacagttgtctcaatacctgctttggacaaattcacagccatttcatgaccctggcagaaaggagcacactctgctacaatgacatggaatttcctctttcgggcagcctctttgaggaaggcctctactgttcgggagaagccaatggtcatgatcacctcattggagtgaatgtgctccagagcctgggctgcaatgttctccattgtcccttccagctccactagcagctcattaatcgcctcaatgatgttggactggagttgggcataatggaagctgaaatcctcgtttaggcctccggatgtcaacagtttgtgcagggactcctgctgatcactctcgtcgctgcgtccatggagtctgccatactcctcccggataatcttgagcactctccgcaccatgttgcccacggtggtctcggagggctgagcggccgtcatcctcctgccctctctgcggatcagctccatcagctcccccgcgttgctccagcggtggtccgtgatgatctggcgcagcaaccctagggtctcccgagccatttcctcggagctgcgcggcccaccaccccgcttcagggtctccacgaagctctcgatcctctctgacaactccgagcccttcgctgcggatcccggcatctttaaggtagctgccttcagccttcaccggcggaatccacacctgccagaccacacagtttgcacatccggagaattccggaccggaccagc

SEQ ID NO: 439473 - DNA, 502 bp, Homo Sapiens
  misc_feature (280)..(289): n is a, c, g, or t
  misc_feature (489)..(489): n is a, c, g, or t
gaaccttcaagtggcttttattggtagagcctagaaaaagtgtcatagccatttctgagcaaaaatctgtatcccagtaaggtattcagtgttatgtttaacacactactgaaccagaaagtttaagttcctgacacagacgcaaccaggtcactaagaggctccaaaatcaacaagttaagccctgctgctctgttaagatctgaaaggcaagacacagtgctgggatgtgtgcccttgttacggggtgactaaaaaggcaggcaacagtatcaaggannnnnnnnnnaggtgggactcctgtgcactcccacattgcaaggatgtgcttcagcaggcaacacttcaagtctcctctttcattctgtatctggcctaaggcaatctgctttaggggcacgtgtgggtcggtcattaaaacatggtccatcaggggtggggaggggtttcactccttcagggcggtaggtttagggggagggtgcattncccccccattttt

SEQ ID NO: 439474 - DNA, 736 bp, Homo Sapiens
tggcataatggaagctgaaatcctcgtttagccctccggatgtcaacagtttgtgcaggactcctgctgatcactctcgtcgctgcgtccatggagtctatagaggcacaagacccaagagagagtggggaggagtggtcaggcaggtaacaagggctgttcagctccaataaagtctccgagcaggtagaggggcccgtgcaaaaagtgtcactggatccaaccaggagcccaggacgtgagcctgacctgccatactcctcccggataatcttgagcactctccgcaccatgttgcccacggtggtctcggagggctgagcggccgtcatcctcctgccctctctgcggatcagctccatcagctcccctacagtccaaaagagagaggataagaggagccaacgcgaagtgaggcctgggaaattttcagcctgggatcgggaacagacaggggccaggttcgccggcggaggcaggccggcctcacccgcgttgctccagcggtggtccgtgatgatctggcgcagcaaccctagggtctcccgagccatttcctcggagctgcgcggcccaccaccccgcttcagggtctccacgaagctcatcgatcctctctgacaactccgagcaccttcgctgcggatcccggcatctttaaggtagctgccttcagccttcaccggcggaatccacacctgccagaccacacagtttgcacttccgggcgggcgag

SEQ ID NO: 439475 - DNA, 2106 bp, Homo Sapiens
  misc_feature (237)..(267): n is a, c, g, or t
  misc_feature (1204)..(1204): n is a, c, g, or t
  misc_feature (1595)..(1595): n is a, c, g, or t
  misc_feature (1598)..(1598): n is a, c, g, or t
  misc_feature (1601)..(1601): n is a, c, g, or t
  misc_feature (1651)..(1651): n is a, c, g, or t
  misc_feature (1671)..(1671): n is a, c, g, or t
  misc_feature (1674)..(1674): n is a, c, g, or t
  misc_feature (1691)..(1691): n is a, c, g, or t
  misc_feature (1694)..(1694): n is a, c, g, or t
  misc_feature (1702)..(1702): n is a, c, g, or t
  misc_feature (1841)..(1841): n is a, c, g, or t
  misc_feature (1847)..(1847): n is a, c, g, or t
  misc_feature (1915)..(1915): n is a, c, g, or t
  misc_feature (1949)..(1949): n is a, c, g, or t
  misc_feature (2006)..(2022): n is a, c, g, or t
  misc_feature (2026)..(2026): n is a, c, g, or t
  misc_feature (2057)..(2057): n is a, c, g, or t
  misc_feature (2074)..(2074): n is a, c, g, or t
  misc_feature (2099)..(2099): n is a, c, g, or t
cagatcttacaaatagaaaacacaaattatgtttttaaaataaagcaataggtttggtaaacattttgttaataccttttgaagggtttatgagtaaacatctttctctttatcaaaaagtaaagcacaccctcacctctcttccacactgactcactacttctgccgaaaacgtggacttctttcttctattacatacagcatgttccttgcatccattgcttgaatctgtacaannnnnnnnnnnnnnnnnnnnnnnnnnnnnnnaacctggctcctctcaggcagtggcccaggccccacagtattgcagccagcccaggctgccctgatattttgaggccagggcagtggctggagcaagacagcacagtggttccgatcccagttgcccaatgcataggaaaaattaccaaaacctcatttttaggagatattcccaaagcccatgagtacaggcaaacagcaggctagataggaaagatcagcttgagttggtttaaagggaatccctttaagtttagaatatctgataaagattatcgctcaaagcaggtgaggagaggggttggtggtgcaaatactgtccccagcagaggtgagataagcttttaattctaacaggctcaattcccatttcaaggggcacctttccttctaccccttccctcttatctctcagaagcacctttggattttcagagtagaatgaatcaagattagttttcagcaaaggttagagtaagttgacggggattaccctgccttggaataaaacaagcacttgggctgatggctgagattcccaatgcaacatcaagataaaggcatcagaggtgactgtgacacacagaagtccctggggaagtacttctgtaaaaaagaaccttcccattcccaactcaagctaccagagttcccaaatatgtgctttcacaaatatactcagaaggtagcccccagcatgatcacacctaggtaggtagccctcctgagtcggtatctctgtcatggccacaacaaagtcttttgtcaagtttattatggttggtttgctcagctcttaggaaagagggtttggggacagacccgttaggccaggaaaatttaggcccacaagtcccggtggagctgttctgatggagttgttctaatggtgcttcctctcctgcagaacttgagcaatcagtccgattacccaggnagatgaccccggcagagcagcttgccacttattagaactgggcttcatgagaggctcttaggacactggaaatttcaagttaatatcctgaataggctttcttcctgtgaaaattttgcaggcattgtccacgatggatggaggaaaagagggaaggcaagagaccaagctaggattgactccaatattctctgccaccctgtcccaacaccaactcccataacctaaaagggggtggaggtgggaatcaaatttgcatttggtgataggtgcaattttctccaactaaatcatccaagctcttacgtgggttctaggaggaataggccatccatgccacaaatagtcccactgattccctccaaaaacatctctagcgaagccctttgtnctngcngtgagagctgtgctgaaggaaaaggtggggtgttcgtgttccctgagttntcaccaccttcctctcaganatnatcctctgacacagcantgngcactttnctggtgttgctctcctcctcctcctcttggagtttcataggtgatgacaagcagcacaaagttgagatttttgaagagccgggcgatggaacctaagtatgaggcatcaggagaggtcaaggcatagctcagggattgngccctnctggggggatatttaggtttctccttgaacacaatgatgacaaggatgaggaggagagtaccacaccncaatattatatagaacatgatgctgatgtggtangcaagctcgtcccggtcttcaatgttgggtaccaaaacaggagggaccaagaacccnnnnnnnnnnnnnnnnntganccagcttctgtgtccctcttttccggagctngcagggctgtgcaatcnaaagcgcctcctgaactgaaaatanttgtgtt

SEQ ID NO: 439476 - DNA, 2166 bp, Homo Sapiens
  misc_feature (4)..(4): n is a, c, g, or t
  misc_feature (728)..(728): n is a, c, g, or t
  misc_feature (1626)..(1626): n is a, c, g, or t
  misc_feature (1771)..(1805): n is a, c, g, or t
  misc_feature (1822)..(1822): n is a, c, g, or t
  misc_feature (1824)..(1824): n is a, c, g, or t
  misc_feature (1849)..(1849): n is a, c, g, or t
  misc_feature (1993)..(1993): n is a, c, g, or t
  misc_feature (2004)..(2004): n is a, c, g, or t
  misc_feature (2040)..(2040): n is a, c, g, or t
  misc_feature (2047)..(2071): n is a, c, g, or t
  misc_feature (2083)..(2083): n is a, c, g, or t
  misc_feature (2086)..(2086): n is a, c, g, or t
tgtngcctccaactcctcagctcaagcaatcttccctcatcagactcctaagtagctataggcatgcgccatcacacccagctaatctttaaatttttgtagagatgggggtcttggtatgttgcccaagcttgtctcaaattcctggcctcaagcaatcctcccgcctgggcttctcaaagcattgggattacaggtatgagccactgcacctggcctgacacttggttctcaaaaccccctttctggtttttgaggtcaggccaaggttcctcccaagcaacagtgccaaggagcatgcagtagaagaagcaagagctcccctccccctgcatacattcccccacctgtgggaacgcacacaccctatgagcagatgagcctgtacacttgggcacaaacaggttgagtgtggcctgactgaggcagaaggcagaaatgtctgctaggtatgtaggcgggctcacctggcatgcaaaggagtgaacagactgcttgtggatgtatgtaccagcttgggccactctggggccaggacctggctcctgtgttctgctcaagaagagcttgttgtgcgtatgtacaccctgcatgtgcagaatggcctgtgtgtttgtgcctcgtgggggctacttggaccctgtgggtatctcactcctaggagagcttatctgggtgttgcacaggtgcctgtgtcctgctcccagggagagcagcagcccctgtgngctgcccattcaggccacagagacctggccagccattcctttccctctaggatttctttccagcatggagctatccttacacccataaacagggccagaactgccaagcacctgcaaatacctcttctgtgctgacaagaccaacaaaggcttgagggacttcgtcaggcatctgagtgtgtctgagaatctcagtctgctgcccctcgtccccttctctcgtagtgccctcagagcagcgaagtctcctgctcgggggtgtggggggagaaggaatctaaaggtgttagccagacctgcttccagaaacggccctcagaccatgcatacatacatacataggagggcaagaatggacgttcatggacgtgcaaacgtgggccagtgtgggtgggagtgggcagcacgctaagagacagagtgtgtgtgtaagagggagtgtgtgcacaagggtggcagtctactccagggtatctgggtacgcaagggaccccatgagcaggggtgagcaggccagggcagggtggccccgagtgtgttgtgatcagggagtattgttgagttgatgtccatgctgtgatccgcgatggctggtttgagtgcgtagctgtgcctgggtgtgtacgcaaggctcccacccagtaccctgggtgacaggtggccgtgtgtatgagtctaatggaatgaccaacagccattgtgtgtgtgcggtagacctgtggcctcactcgaggaaatgaggcgcccgtgcgtgaacgcggtgttgtgtgatcgcgcccccggagtgtgtgccacactggttgtgtgacggcgagtgtgctcagtagtgcgagtggagccagtggagcgttgagctcgctccggggaagatgaatcaacgcgggaggacgccctcccncccagtggcgggaagcaccccctcccgcgcggccatgccgaacaaagccagcgggcggcggcaaggccgggcgcggggccgaccccacagccaggtcagccatgcccgccgggcccctctgatgttcggcccagggctgcgggannnnnnnnnnnnnnnnnnnnnnnnnnnnnnnnnnngcgaggagcctggaaananacacccaccgcccccagccgcgcgnacacacccgggctcatgccgcgcgaggtgtccgagccccgccgccggggggcttcgaggaccctggacagcggctccggggcggcagcgagcggatgaagggctgccgccgcccgcccggaaagacagcgggtgtgggcgcggngcttaccaggnagtgccgctgctccggctcctgggcgagatgcgctncggctcnnnnnnnnnnnnnnnnnnnnnnnnnagcggcctcggnctnctccggccgggctggcgggaggacccgcagactggcgccgccgtccccagcgccggtccgcgctcccgccccgcatcccg

SEQ ID NO: 439477 - DNA, 849 bp, Homo Sapiens
gcgctgagccgggccgcacccgcacttcggggaaggcgggcggcgcggcggcttgatgtgtcatgggcccagtggccacggagcgcgtctcggcggcgcccagcgacacctgcaggcccgcatctcggcgcgagggcgggctgggcgcgcgcggcgccgcctggaagctgaaggccgagcccccagcgccgtcctgcggagacatggggctcacggccactgagacgcaggcctgcgcgcccgcctgagtgcccgcgtcctcgcgcggcggcggcggggcgctcgcctcccacgacggcgccttggtgaagcttgtcgcgattccgcggccccggcgggggcgctgcggcctctgggcaggggcttctctcggccccagcggcttccaggtctttctggccgagactggaggcctcggtgctggacacgggctcggcgttcggctccacgcggccttcactgcccctggcaccctcgggagaccgggctgagccgagggctttgcggtctaactgcctggaggaggaggacggcttggtcttctccagactcagggggaccaccttccccaaggatggggactccgtttttctggaaggtgcagagtcggctttccccagggacacaggctctcccttccctgaggcaaggggctctgcttttctgcaggatccaggatccaccttctctgaggcctgtggtgtctcctttttcaaacacacagcccctgcttctcctggtgctgcagcgccctcttgcccagggagctttgtttctgctttgccaccagcctcgtgccgaattcgccacccaggcctcgctaccttatacgctagggttactgccgtc

SEQ ID NO: 439478 - DNA, 2173 bp, Homo Sapiens
cgatgattcttagaggggcctctttaggcgcggggggggtctcgtatgtgtggtggacggacaagaggcaggactgatcgttttccaaaggggccgctggagaaagacgcttgatgggtggaaacaggaatttacccctcttctagaggcacgaggacccccctttatcccctagggaaaagctttggcctttcccaggggccacgggaacccaccttccccggagggcccccgggactgtttttccgggaaggtgagaccactttacctaatggacacagagtccccttgtccagaggggccaggggtctgctttcccttgctcacagggtcctccttggcccacgcgagggggctcggccttccctgaggctgtgggagccgcctttccagaggccaccagacctgctttctccgaggacaggggatctcctttcccccccgtcgctggctcagcctttactgcagatgggggacctgctgtccccaaggacctgggatcgcctggacctgaagacacagggtttgtctttcctgaagactcaggattcactttttcagatgatgtctttctacttccagcagatatggggtcctcccttctggaggacacggggtcctcttttcctggggatacagttcctgcctttcccacagacacacgctctgcctgtccaggagacaagagctctggctttcctgagcacatggggtccatctttcccagagaaactggatccaccttgcctgaagacatgggatccacatttttcaaagatgtgagatctgtctttgctgaagccgtagtatccgtgtggccagacacaggacgcccctctcctgaggaggcagggtccatctttcccaggaaccgggagtcctcttttgtggcaggcacagtttctacatttcccacagatgcgggatctgccatccccaagcatgtgggatccagccttcccaaggacccaggagccccggtcccagaggatacaggcccattcttgcctgatgagcctggaatcagcttgcccaggagccccggctctgtctttcctgtggacgcagaatccatgctttccaagggcacgggatctgcctttcccgagggcccaggatctctctttcccgacaatacaagatctaccttttctgcagatgtaggagcgaccttttctgaggacacaggatgctcttttcctgaatacctgggctcctcctttcttgggaatacagggtccactttgtctgaggacacaggatccacctttcttggtgacactgtatacgtcttgctggagcacaaaggatctacttttcccagggatccaagatcttcctttcttacagtcatgggatccatccttccaggagccacaggatccccctttccccaagatttcaggctctgccctttcctgtaaacatgggatctgccttccgtgaggacccaggatcctcctttcctatggaagtggaatcggcctgctttgaggacttgaaatccatcttctctaagaacatgggatttctgtcatctgaggatttgggctcagttttcacggaggacacaggctctggcttcccagacgtggtggcttctggtgtccctgagatggaggctccatgtgcctccaatgtctccttggagggtgactcctggggagagaagcaggttggggaggggcaggccaggctccctctggggccgtcagagcaggaggccccttccccagccccactggggcttctgtgtctagactccatgcctgggctttggtcaggggtgtgcctggggggtgcagggcttgccttttgctgggaggggcagtaatccctcatagccgagctgccagcccccaggctcccatcctgtgggcagaagaaggctgtgggtcggggtcctggggggctggaatccttttgaagcagctggagccaggccgggtcttcagcagtgtccatctgccctcatgaccacgcctgcacccaaggctgctgtctggttcaggcagtgccgctgctccggctcctgggcgagatgcgcatccggctccacgccagccgccgccgaccagccgccacagagcggccatcggctgcctccggccagggcatggcagggagacccagcaacatcggcagcacgccgtcacaccagcgccggctccat

SEQ ID NO: 439479 - DNA, 910 bp, Homo Sapiens
agggttttcacagcgtgttttgctcgcccgcacacctgggaggccccttgcggtgctggacccgcgggtttgggtcttttgggttcccaggggggcctttcaattgccccctgggccccccttggggagacccggggttggagccggagggggttttgcggttttaactgcctggaagggaggagggagggcttggttcttctcccagattcaggggggaccccccttcccccaaggatggggacttccgtttttctggaaggtgcagagtcggttttccccagggacacaggctctcctttccctgaggcaaggggctctgcttttttgcaggatccaggatccaccttctctgaggcctgtggtgtctcctttttcaaacacacagcccctgcttctcctggtgctgcagcgccctcttgcccagggagctttgtttctgctttgccaccagactgcggctgtgctttccccgaggccctgggatccgcctttgtggtggtaacaggactccccttctctagaggcagagaacccacttttccctctgggatagcttctgcttttcccagggacacgggatccaccttccccgagggcaccgggactgtttttcctggagttgagaccactttacctatagacacagagtccccttgtccagaggggccagcgtctgcctttcccttgctcacagggtcctccttgcccaccgcgaggggctcggccttccctgaggctgtgggagccgcctttccagaggccaccagacctgccttctccgaggacaggggatctccttttccccccgtcgctggctcagcctttactgcagatgggggacctgctgtccccaaggacctgggatcgcctggaccctcgtgccgaattcgccacccaggcctcgctc

SEQ ID NO: 439480 - DNA, 1165 bp, Homo Sapiens
acgaagcgaggcctgggtggcgaattcggcacgaggatcccgcatctggtgggaaatgtagaaactgtgcctgccacaaaagaggactcccggttcctgggaaagatggaccctgcctcctcaggagaggggcgtcctgtgtctggccacacggatactacggcttcagcaaagacagatctcacatctttgaaaaatgtggatcccatgtcttcaggcaaggtggatccagtttctctgggaaagatggaccccatgtgctcaggaaagccagagctcttgtctcctggacaggcagagcgtgtgtctgtgggaaaggcaggaactgtatccccaggaaaagaggacccggtgtcctccagaagggaggaccccatatctgctggaagtagaaagacatcatctgaaaaagtgaatcctgagtcttcaggaaagacaaaccctgtgtcttcaggtccaggcgatcccaggtccttggggacagcaggtcccccatctgcagtaaaggctgagccagcgacggggggaaaaggagatcccctgtcctcggagaaggcaggtctggtggcctctggaaaggcggctcccacagcctcagggaaggccgagcccctcgcggtgggcaaggaggaccctgtgagcaagggaaaggcagacgctggcccctctggaccaggggactctgtgtctataggtaaagtggtctccactccaggaaaaacagtcccggttgccctccgggaaaggggggatcccgtgtcccttgggaaaaaccagaaagctatccccggaggggaaaagtggggttcctcctggcctcctagaaaaagggggagtccctggttaccccccccaaaaggcgggatccccccggggccttccgggggaaacacccacggcccccaggtctgggggggcaaaagacccaaaaacaaaagcttcccctgtgggcaagaaaggggcccttgccacaccccccgggacaaaaacacggcgggcctccggcggctttcgaagacgggggagacaccccgccgcgggggtcccgacaaaaagagcgggaatccccccgggcaacctcgcggacacaacggccgcctgaaccgtcttggcacgtacgggcgccagaggcggccggccgccgtgggcgcgtcctgtcgcgcac

SEQ ID NO: 439481 - DNA, 818 bp, Homo Sapiens
taggacgcgaggcctgggtggcgaattcggcacgagggtccaggcgatcccaggtccttggggacagcaggtcccccatctgcagtaaaggctgagccagcgacggggggaaaaggagatcccctgtcctcggagaaggcaggtctggtggcctctggaaaggcggctcccacagcctcagggaaggccgagcccctcgcggtgggcaaggaggaccctgtgagcaagggaaaggcagacgctggcccctctggacaaggggactctgtgtctataggtaaagtggtctcaactccaggaaaaacagtcccggtgccctcggggaaggtggatcccgtgtccctgggaaaagcagaagctatcccagagggaaaagtgggttctctgcctctagagaaggggagtcctgttaccaccacaaaggcggatcccagggcctcggggaaagcacagccgcagtctggtggcaaagcagaaacaaagctccctgggcaagagggcgctgcagcaccaggagaagcaggggctgtgtgtttgaaaaaggagacaccacaggcctcagagaaggtggatcctggatcctgcagaaaagcagagccccttgcctcagggaagggagagcctgtgtccctggggaaagccgactctgcaccttccagaaaaacggagtccccatccttggggaaggtggtccccctgagtctggagaagaccaagccgtcctcctcctccaggcagttagaccgcaaagccctcggctcagcccggtctcccgagggtgccaggggcagtgaaggccgcgtggagccgaaggccga

SEQ ID NO: 439482 - DNA, 1197 bp, Homo Sapiens
gggttgaacccgagggctttggcggtttaacctgccttggaggaagaaggaccggcctggtcttttttcaggatcaggggggggccaccttcccccaaggatggaggactccggtttttcttgaagggtgcagagtcgggctttccccagggaccacaggctctccctttccctgaggcaaggggctctgcttttctgcaggatccaggatccacctttctcggagggccggtggtgtctcctttttcaaacacacagcccgtgcttctcctggtgctgcagcgccctcttgcccagggagctttgtttctgctttgccaccagactgcggctgtgctttccccgaggccctgggatccgcctttgtgggtggtaacaggacctccccttctctagaggccagagaacccatttttccctctgggatagcttctgcttttcccagggacacgggatccaccttcccccgagggcaccgggactgtttttcctggagttgagaccactttacctatagacacagagtccccttgtccagaggggccagcgtctgcctttcccttgctcacagggtcctccttgcccaccgcgaggggctcggccttccctgaggctgtgggagccgcctttccagaggccaccagacctgccttctccgaggacaggggatctccttttccccccgtcgctggctcagcctttactgcagatgggggacctgctgtccccaaggacctgggatcgcctggacctgaagacacagggtttgtctttcctgaagactcaggattcactttttcagatgatgtctttctacttccagcagatatggggtcctcccttctggaggacaccgggtcctcttttcctggggatacagttcctgcctttcccacagacacacgctctgcctgtccaggagacaagagctctggctttcctgagcacatggggtccatctttcccagagaaactggatccaccttgcctgaagacatgggatccacatttttcaaagatgtgagatctgtctttgctgaagccgtagtatccgtgtggccagacacaggacgcccctctcctgaggaggcagggtccatctttcccaggaaccgggagtcctcttttgtggcaggcacagtttctacatttcccacagatgcgggatcctcgtgccgaattcgccacccaggcctc

SEQ ID NO: 439483 - DNA, 1231 bp, Homo Sapiens
cacaggacttccgctctcacccacccctggtcctctggttgcacctgaatccacatgatcccatctgagtttgggactggcccctccagcctccagtctcccagactcttgagtgctagagataggctggtcccacttgagggaatccacttcttttgctccctagctgctcaacttggggctcctccttgcttggttcggaagcagccccagaaaccctcaatgcccccgagtccttagtcttgggatgccccacatcttccatggtttctggggcactatcccagtcacttcctgaattctccgaggagctgtccacccgtctgggttctgggtaaggcgggtcaggcctcattggtttccggcggccccaagggcgaggtagccagccaccaagccgtcgcaggaacatggctggggtgtgtaatgggcccccaaattctgaggctgcttcctggcactactcagactctcaggatctcctcagaagccagagtctttctggctcagaacaggtatttgcctggtgatgcagtcctactctgaattcagaagtggctcctcccttctctgaatagtcatgcagcctcaagtgtggcaagtagtttgcttcctcttcagttctggggtaaaggggggcatacccaaattcattcaccatccacacccccacaatctgagattccaagaatctcagatctgacaaggcctgggtcaccaccagagagtcctctctgcgtttccggatttccttcccagcaggcagcaccccaagtttcactcaccaaggccacaccccaaggtgtcccagaaactggggaggcagtgctccatccaataaagcgggcaggaaggtggccccaggtcctaggtgctcctggatcgtgtagtctttaactgctgccccaagggacctcaaggaataggaattctctttgttaggaggtggaatgaaagtgtccagcaaactccagccagcagcgttcgtcccttgatttagagggctatgatttctacaaagtggcccgactggcccgcgaacacgcagcagagacgcggcctccacaaggtcagaactaagatgtcctcagagatccccagttacgaagcaaagcgcgggcctacttcgggacctacgcgtccgggcgctgtgcgcggggaccgctcccgggcccagcgtcggggccgcggccttggggatcccgggaattccggaccggtaccagcctgc

SEQ ID NO: 439484 - DNA, 624 bp, Homo Sapiens
  misc_feature (39)..(39): n is a, c, g, or t
  misc_feature (154)..(154): n is a, c, g, or t
cggggtcgtggaggggaagtccaaatgtccattgatganacatccatttgtcaatgtattcgatacggagctactgtttttcatattgattcctgcaacgacagggggtctgcattgctgacacagtatatatttctatttcttttggtccaanagaaccactctcctgctgtttggtgtcttcaaccattggattgttgttgcagctaacaggaaactgtccactcccacctgttacaacagcaaactccctatcaacgtgcattttgtcagcatcgtcttctgtgtcgccattcgtgagtggcacggcagaatccaagctttgagcttcagttctagctttctttactccaaagtcttctgagtcttccaagcatctctttcgatttgttcccacactaatatgattaggaaatacattctgatgacccccatttaagatgccattgttatagaaatggttcagatgacaattctggaggttcaagagaaactgggcacactcttggaaaccctggggtttgtgcaatgtctgctgctgtcaggccactggcattttcttcaggctgtacaacacaaaaacactgaattacaccccatccgcgtgctaaccgggtctctggt

SEQ ID NO: 439485 - DNA, 193 bp, Homo Sapiens
caggcacagtggcagattttctttaatagatatatttcaaacagatacaacaaattaaaaaatctaattcacggcaggtaaacatgggtgctcaaaaagttccacatagacatttacacttgggccatcagtatttccctcacattcccttctgtcgtcttctcgcagccgtatagtagtagtaggcggccgc

SEQ ID NO: 439486 - DNA, 977 bp, Homo Sapiens
  misc_feature (303)..(354): n is a, c, g, or t
gaactagagaagtttgtgttctgttggaaccctctgtagaacactttacactcagttctgatggaccttttcaggggcgattttttaaaaaccgctctcgaaagtagtcttaaaatgagagcactttattgatggcttttcaggactgtgttggtatttttcatgcagtgtatttgtcagcttacatttttcagttgagctacctgatgctactgacacacatatgattttcctatcttaccaggcaaatactactgttaacgttttaatagtaagtctacttatgcacattgattttacttnnnnnnnnnnnnnnnnnnnnnnnnnnnnnnnnnnnnnnnnnnnnnnnnnnnnttgtaatggcagtgaagcattttatagtttctcctccctcattggttctgaattttggtgacaggtgtatttcttaatgcagatatgaaaaacagtagctccgtatcgaatacattgacaaatggatgtgtcatcaatggacatttggacttcccctccacgaccccgctcagtgggatggaaagcaggaatggccagtgcttgacaggaactaacggaattagcagtggattagccccaggacagccgtttccgagtagccaggattctctctgcattagtgggactgaggagccagagaagaccctgagagctaaccctgagttgtgcggttctctgcacctgaacgggagtccaagtagctgcatagccagtaggccttcctgggtggaagacattggggataacctgtactatggacactaccacgggtatggggacactgctgaaagcatcccagaactgaacagtgtggtcgagcattccaagtccgtgaaggtgcaggagcggtacgaacagtgccgtgctggggcaaccaatgcacctgcaccaaggttcctaaaagacactgacctgagctctcggaaacgcagggagtccctactggatagccagctcacaac

SEQ ID NO: 439487 - DNA, 1808 bp, Homo Sapiens
atggccaaaagaggtttaaaattttccccaggccacccttgattttacccacccccaaatttaatccttgatcaatataatccttttaacaaaaaggaaaaaatggcaaatatctgggtgacagtataaaaaaagacaatgttgagattggcatcagaagaactccaaaagtgcaccttataaaaaggacacctcactgtagaaacatctatgcacttagtaagccctactcatgcacaaacaagcagttgctgggaacttgtcgaagtttactttttcagaaagttgaagtatataaaaaacgtacaagttgtgacattcgttcaagttgctgctacatgggtattctgagctggctaccaggaaggactcctgcgtttccgagagccaggtcagcgtctctaggagccgtggtgcaggtgcatggtgcccagcacggcactgtcgtaccgctcctgcaccttcacggacttggaatgctcgaccacactgttcagttctgggatgctttcagcagtgtccccaaacccgtggtagtgtccatagtacaggttatccccaatgtcttccacccaggaaggcctactggctatgcagctacttggactcccgttcaggtgcagagaaccgcacaactcagggttagctctcagggtcttctctggctcctcagtcccactaatgcagagagaaccctggctactcggaaacggctgtcctggggctaatccactgctaattccgttagttcctgtcaagcactggccattcctgctttccatcccactgagcggggtcgtggaggggaagtccaaatgtccattgatgacacatccatttgtcaatgtattcgatacggagctactgtttttcatatctgttacaacagcaaactccctatcaacgtgcattttgtcagcatcgtcttctgtgtcgccattcgtgagtggcacggcagaatccaagctttgagcttcagttctagctttctttactccgaagtcttctgagtcttccaagcatctctttcgatttgttccccacactaatatgaattaggaaatacatttctgatgaccccccatttaagatgccattgttatagaaatggttcagatgacaattctggaggttcaagagaaactgggcacactcttggaaaccctgggtttgtgcaatgtctgctgctgtcaggccactggcatttctcaggtcgacgtgagccccattcgccacaagggcactgatgcattctaggctcccagagcgagctgccttgtgaatgggagtttcaccctcacaatccggtttgttaatgttggctcctgcttgaatcagccagaccaggcactgaggatgtcccccaaaggctgcaatgtgggctggcgtctgcgcgtaccgtgtggtggagacgttgagtgtggctcccgctctcaccaactgcactaagcactccaacttgccgaaatgcgcggcccagtgcacgggcgtccagccatagaaggagtcctcagaggccaggtgggcgtggggtgtctgctgcagcagcgagcagagcgtggtcaggtccccgtcgcggcaggcgccgtgcagcgggaaacggagcgagagcagctcctcgctggagaagcccgcctctacgcccgcgcccgctcccgccgccgacatggtccgtcaccggagagcgcggggctcgctggcctagaggacgcgtcggggaggactcgagaagccgccgccgcagcacaaaggaacgagactagcgccgcggtcgcgtcccacaggctgccgagcggagcccgcccgct

SEQ ID NO: 439488 - DNA, 878 bp, Homo Sapiens
tgctattttcacggggcagattttctttaatagatatatttcaaacagatacaacaaattaaaaaatctaattcacggcaggtaaacatgggtgctcaaaaagttccacatagacatttacacttgggccatcagtatttccctcacattcccttttgttaagtgtcccatcttcgcagtggcagtacaggagaaatctccaccgtcaccgcacaatccaccaggcgcattaccacctgaagtgaaggtctcatctcgaaggtgcgctcagccataaaaagaaaacatattacagaaaggaaaaataagtgtgctcttcccacccgcaaagcggtctcaccttcagttctagctttctttactccaaagtcttctgagtcttccaagcatctctttcgatttgttcccacactaatatgattaggaaatacattctgatgacccccatttaagatgccattgttatagaaatggttcagatgacaattctggaggttcaagagaaactgggcacactcttggaaaccctgggtttgtgcaatgtctgctgctgtcaggccactggcatttctcaggctgtacaacacaaaaacactgaattacaccccatccgcgtgctaacctggtctctgctcctgctgaactgactagctatctgaaggtggtatgaaagagtaaacaaattcatagcaaatcttcattaaagaatatgaattatcaaactttattggcttgttaaaaatgattgaattcagcaagtacatttatgatctatctacattgttaaaacagcactaaaaataaaaatttttaaaatgattatccattatttacagaaaatgtggaaaagatggcttttaaacccagaacattatagg

SEQ ID NO: 439489 - DNA, 1682 bp, Homo Sapiens
  misc_feature (162)..(174): n is a, c, g, or t
  misc_feature (948)..(984): n is a, c, g, or t
gtgtctttttggaaacccccattttgtgattttccccaccccctttcccccgaggatttatcccaggtttttaaccaaggtggggtatattatgggggcgacacacatgtattttgttaaaggccccattataaaccaaagaatattttgggggtgtggggnnnnnnnnnnnnncgcattcttcccccccgaagagggttaaaaaagcccccccgagacacctctacaaataaaaccgcggcccttaaaaaaaccccagaaagatccaaccccctccccatttggggtaaccttttttccaaaaatgtaaaatggaacactccctggaaagagccccctccccaacaaattttaaaaaaaagccgggggaaacccccaagtttttgcccaaatcttttaattttgtcatatctggtccaagacagtttcaggattggcggtccctttccttcctttcacagggacccaaggaaaaggcccacccctcccctacaaagcagcaggcttttaagaaaaatgtgctctacaggaaaagtggtttttcctgattaaccatcaggaacctagagtcaacaatcgctgtcctctccccgtgcctgtcacgctcccactccccacccagctgcaatgtggccttgattttctcatcagtaaaatgggaaagctggatttggaggctggaagagatctcacagcttgaccaccctagtaggagggagggagaccagacggaggccaggcaaccgacccaggcagcatctggctcagacgcagacacatcttcatgttgagggacctattcttacacagcaaaacccagagaagtcgactgctcagcctgagcctgtcatccctatatagactcagcttttaggagaagagggagagttgaggagatagcatcgctctctgtatcagtgtctgatgatctggagtctgcccctgggnnnnnnnnnnnnnnnnnnnnnnnnnnnnnnnnnnnnnacgtcatatatgggtgtgagctctgcccttcgaggctgtatgttctgaatgatgactcagtgatttaccagcctttctcagaaaaaagaaaagtctttaaagttttggaggattttaaagctgaaacaggttttcggtttgtttaacacattccccattctgaacctttgagaatctaataaaagctatggtcctttctccagaaaaatgctcatatgcagagattcagggaaaaaaccaaacttggcacgcaacttccggggactcttgtgaatggcctgaagccacctgtgacccatgactgatgtccccaagttcctccctccccgtgtgcagagggggctcccccgagcctgggagcacaggccccatgcctccgtcacactccaccaggaaaaagtcacgcctcctcaaagcagcagcgaccttttcagggatattttcaacaagaaagtggtttttctgcttaaacattagtaactggagccaacaatcaccgtcccccacatttttgtcactctccactccacacccagcagcaataaggtttcacggagttttggactcctagcctgagaataaatccaagtccacaatgaggaagaaggaaggttgggttgggacgggaggatgctgaggacattccacaaaccatccaagccctagatacccccaatatcccacgtccgaggacatcc

SEQ ID NO: 439490 - DNA, 727 bp, Homo Sapiens
aaaaaagtaaataatctaaagttagaagaaggcagactagtgaagtacatcctgaaaaaagattattaaagaatgacttatattaccagacacaaaatgtaatatattgtaaagcgaataaaacaatgacattcacataaaaataaataggtcaacaggataggcaggtgaaaaaaacaagagtaaggcttccacacagagcaagccttgaagtgactatccattagatctgggcttggcaatgcttatgcaatatcttcccatcctgtggtcatggccaatttttctacacagatagttgtctcaaagtgggtttcgccaaagaacctggaattaaaaccagtgagaccaggtttccataattctccatcatgacatctttatacaggcttctctgagctgggtccagataatcccactcctccttcgactccggcggggggctcggggaagccatctcccaggcagagaataggggcaggaattgggggcggcctcacggaaaggagcctctggtgaggcctacccggctgctggaaattaggctcgacgaatacgaggatccctggctgggtctggccagtgcctgcctcggcccccagacggtcacgaccccaacagcatatcagacgcgatccctggctgtcccccaaccccgaaccccaacccctactcctgcctggttacgcagcctttcaggcctcgctagagcctcctccccgctccc

SEQ ID NO: 439491 - DNA, 1129 bp, Homo Sapiens
  misc_feature (16)..(16): n is a, c, g, or t
  misc_feature (21)..(23): n is a, c, g, or t
  misc_feature (26)..(26): n is a, c, g, or t
  misc_feature (28)..(28): n is a, c, g, or t
  misc_feature (32)..(32): n is a, c, g, or t
  misc_feature (35)..(35): n is a, c, g, or t
  misc_feature (38)..(38): n is a, c, g, or t
  misc_feature (41)..(41): n is a, c, g, or t
  misc_feature (49)..(49): n is a, c, g, or t
  misc_feature (51)..(51): n is a, c, g, or t
  misc_feature (59)..(59): n is a, c, g, or t
  misc_feature (68)..(68): n is a, c, g, or t
  misc_feature (72)..(72): n is a, c, g, or t
  misc_feature (81)..(82): n is a, c, g, or t
  misc_feature (84)..(84): n is a, c, g, or t
  misc_feature (92)..(92): n is a, c, g, or t
  misc_feature (95)..(95): n is a, c, g, or t
  misc_feature (113)..(113): n is a, c, g, or t
  misc_feature (118)..(118): n is a, c, g, or t
  misc_feature (128)..(128): n is a, c, g, or t
  misc_feature (174)..(176): n is a, c, g, or t
  misc_feature (188)..(205): n is a, c, g, or t
gatccctgagccaggnttggnnngcncntggntanaangtnaacccctntntataaaanaaaaaaatnaccnggtttgtgnnanatgccgtnatncccggccacttgggaggntgagncaggagaatnccttgagcctgggagacggaggttgcagcctggccaatagagtgannnccgtcacaaacnnnnnnnnnnnnnnnnnngaaactggaaatttaagattttactgcaagccaagttaggctggcagaacagatttaagactctgcttgccacacatttggaaaatgtaggaaaaaaacagtgcttctgattaaagttaaaataattaaatagcaggtagactgaagtggctctagggatctaggttcctgtgtaacagcaacaaaacgatctaactcaaatgcgtatctcgtaagttactaccttaggagaaaacaaaattcaggcttaaccaaccataaatctccaattaatctgattacataaccagaaaattttctcctggacactctaaatgaaacgactacataactgtacccaatcaattatttagtttgctttgcctcttcacaaaccttaaagccttttcttcaagacccgctggtagcccccaaacgacaaaccatgtctggggctgtcccactggttcatcactgtttgctcatataaattctttaatgttttaatggtgcctccgtttatgtctgaataggttaaagtagggactggtgaccccacagaccagagctccttccacgcagaagccctgcacaccaagtcggcgtctttccctggtgaacctctcctcatcacctcacaagctggggaagatgcgggcgcagagctgcgcaaagagggctacaggctggggccaaagccgctgtgctgaaacggtacaggacgcctgggtaccctgcaccagaggagactgagggctgagctgaggggggctcaggctcacagactcggtcccgccaccgccatttccggccgactccgatgaggcctccccagtctccggacgccctgacccgcaaactcagcatttctcggctttgtgggtgtcctggagtcttagctatgaatgttccaataccagtaggtcacagggcgacggaggatga

SEQ ID NO: 439492 - DNA, 693 bp, Homo Sapiens
  misc_feature (99)..(188): n is a, c, g, or t
  misc_feature (195)..(205): n is a, c, g, or t
  misc_feature (598)..(598): n is a, c, g, or t
  misc_feature (668)..(668): n is a, c, g, or t
agtcgttaagtcttgcccagtaacaattatatagtgacttcttatgcccaacatgtgagagttaaagatcagtgggtgttgggcatggtggctcacacnnnnnnnnnnnnnnnnnnnnnnnnnnnnnnnnnnnnnnnnnnnnnnnnnnnnnnnnnnnnnnnnnnnnnnnnnnnnnnnnnnnnnnnnnnctctagnnnnnnnnnnntcagccaggtatggtggtgcatacctgtggtggtgtagtcccagctgcttgggaggctggagtaagatcacttgagcccaggcagtgagcttaagctgcagtgagaccctgtctcaaagaaacccaaaaactaaatcacacaagcaggaataaacacctcagaggggactcaaggaaaccctttcctcagggctttatttttcaccatggtaaatttactaaggaagacctgagcaaaatgtggatcaaccaggtaatggtatgttttaacagtggaggggggaggttctgcagccaccacagggcatggtatttgcatggaagaacagctgggggccaggtgacaagatgtctttgtgatgtagtccaccagtctgttgtactgttgctctnacagtctctctcggactccatctacctccacatcacagggccacttttgggcttgcttgagcttgcactngtgagtaaggttgtttctgcttgct

SEQ ID NO: 439493 - DNA, 1805 bp, Homo Sapiens
  misc_feature (450)..(539): n is a, c, g, or t
  misc_feature (721)..(721): n is a, c, g, or t
  misc_feature (1318)..(1318): n is a, c, g, or t
ttttttttaatttaatcagtaactttattataacaaaacctgtatattacccatttaaactcatgtgtaacattcagtgatgtgagctgtattaaacccaggtattagtgaaaatttgcattgtaaaacctggtaacagtagacatctatgggtggtcagtaattcaaggacaccttttattttaaacaattttatataattcatatcaatatgcaaaattaccataaaagatacaaggattaatacatatttacatttttagaaatagttactctgaggttgacagctgtcacttttctaaatatttacagaacaaactgaaagagacatttttcatagtcagaattgttcgttaagtcttgctttccagtaacaattatatagtgacttcttatgcccaacatgtgagagttaaagatcagtgggtgttgggcatggtggctcacacnnnnnnnnnnnnnnnnnnnnnnnnnnnnnnnnnnnnnnnnnnnnnnnnnnnnnnnnnnnnnnnnnnnnnnnnnnnnnnnnnnnnnnnnnnctctagaaaaaattttaaaaatcagccaggtatggtggtgcatacctgtggtggtgtagtcccagctgcttgggaggctggagtaagatcacttgagcgcaggcagtgagcttaagctgcagtgagccatgactgttcccactgtactctagcctgggtgacagaatgagaccctctctccnaaaacaaataaaaccagtgggcatttaaaattgcattctcttagtatctcaaaattctaggtaacaagctgtagccccaagtttaaatgtaatatcaatcagcaaacatgctctaagctactggactgtaagaaagatatttactgaacatttaagacatcttggtaacccaagatcttgagtcaaacccattcttagatgcaaaatattatcagacagacactgggaatatcttcatgctttgtcaagtcaattccacagaataaacaaaatggactggtataattgttagcattaatattggggttcttgtgtgctctatggcataccagggagttcccactatgtatgttttgtttatggaactagagaaactcacctgaacactttgggactggattcaatataggacaaagggatttactcaaagtttgcttagtaaaacaaactggaagaagaacactttttctaaaatgtacctggacagtaatcaatcaatcatcagactgttgtaaattttagtaaaatgcagacttcagagaaaatacacatagcagctttcaaagaatagcactgcaagttaaatggacaaatgtnaacaagcccacaaagtccctaagcatttcatttaaagaaagaatccctaggcctttgccagacaaaggagcatgaggcaaaggtggtgactcagccccaaaaacagatgcaacttgaagttttaactctggctctccattgtaaggcctggccacattctatgatggaacagagagttaataatagacccaaattaattacagtagagatttttgcaagtgtcatagagcaaaaataaatgcatcctctgtatgtggtaagaacatatagggccctgttaatcattgtctctaagtggggaaggaacacgtttttgtcactttgaagtatcttttagaggtaaggatgtaaataaggaaactgttggccttgtgtccatatcagatgatgttagagctgcctaggctttttaaaaaaatgcagccctttatggtggcaaaatgcagccctttatggtggcaggtgcttgtcagtcgtagctacttgt

SEQ ID NO: 439494 - DNA, 612 bp, Homo Sapiens
  misc_feature (103)..(162): n is a, c, g, or t
tttatttaaaaaactttattttgctttaaaaaaacaattattcaattcatgaagattaaccaaaatacaaaccccatcaaagtttattacaataatctttcannnnnnnnnnnnnnnnnnnnnnnnnnnnnnnnnnnnnnnnnnnnnnnnnnnnnnnnnnnnctttagttttagtgactaaaataaaagcagataaataatcttcttcacagggaaaaaatacttgagggaaaaaacaatggtataacatgtgtaaagcaggaaatttaaatatcagcttagttcctcattgccaacatggcatttatatcccagatgagatttcgtaattgatccataatttgtttcagctgttgattcttctgtttgagtttttttatttacttcagcaatttctcgcctctcttcactagcaaaacgaggtgggccagcccgatcatcattcttttgagccatcttcttccacatatggaataagttgctcgactggaatgggattcatcccaccacatttttcattgcatttgtcatataccaattctcagcttcctgaagagaactgaaagttggcgaagattatcctgtagctttgttaaccggtcttgatatgtt

SEQ ID NO: 439495 - DNA, 1099 bp, Homo Sapiens
  misc_feature (1024)..(1056): n is a, c, g, or t
tttttaacatttatttaaaaaactttattttgctttaaaaaaacaattattcaattcatgaagattaaccaaaatacaaaccccatcaaagtttattacaataatctttcataaaatagcattaaaaaaagttaatattttaatgtaaaaatcacaatgtaaaaataaaaactttagttttagtgactaaaataaaagcagataaataatcttcttcacagggaaaaaatacttgagggaaaaaacaatggtataacatgtgtaaagcaggaaatttaaatatcagcttagttcctcattgccaacatggcatttatatcccagatgagatttcgtaattgatccataatttgtttcagctgttgattcttctgtttgagttttttatttacttcagcaatttctcgcctctcttcactagcaaaacgaggtgggccagcccgatcatcattctttgagccatcttcttccacatatggaataagttgctcgactggaatgggatccatcccaccacagttttcattgcatttgtcatataccaatctcagcttcctgaagagaactgaaagttggcgaagattatcctgtagctttgttaaccggtcttgatatgttccagtgtggtaagtgacaccatttggcagctgcatgttcctcaggagctggaagatctccatggtgcggtacacgatgtcctgcactgtctcctgcccgatgcggcacagcgacgccgtgttgacttcccgggcggcctgctgagcctggggcccggcgaagggcccgggcgccatccccgacgcggccaacggaggggtggacatggcgcggctgcagcttcaggccggaaggggccagacagcaggtgtcaggggtctgcccggaattgggaggctgtggggcctcagcgttggaaccagcttgagagaccccccgcggcccgatttcaaaacagcggccgcgacttccgcccaccgtgacgtccgctctcgacgaattcgagctcggccgatttggcctgatnnnnnnnnnnnnnnnnnnnnnnnnnnnnnnnnnatgcgccgccaccgcgtaagctgcattccctatatgatcatcc

SEQ ID NO: 439496 - DNA, 1069 bp, Homo Sapiens
gagcgtggcgcgtgatgctgaccgtacccaggcgggagccgccgcgccgccgtcctggcgctgcacctgggtcccggcccggccgccaattggacgtgctcggggcgaccccgcgtgtatcgcgagacgagattggcagcggcgtgggcctcaagtgcccccgcgctggctttgtatgcggagcctgcctgccggtcctttaacaatgggcggcgcgagcgtccaggcgctgggctctagctgaggccggcgcttagcggcccactgtccgcagcatgagcggggccggcgtccgccgcacgacggcggggctggggctgtgagggccgcggttccggactcgagttgccgcgtcgggctgggcgcgccgccgggtcccatggagctggaggggcagtggtggcgaggacagctggccgccgatattcaccaagcgcttcgctacaaggagctgaagttgccctcctataaaggccagtcccctcagttaagtctcagacggtattttgctgacttgattgccattgtgagcaatcgcttcacactctgcccttctgcccgccatcttgctgtctatttactggacctgtttatggaccgctatgacatctctatccagcagctgcatttagttgcgctttcctgcctgcttctagcaagtaaatttgaagaaaaagaagacagtgtgcctaagctggagcagctcaacagcctgggttgtatgactaatatgaatctagtattaacaaaacaaaatttgctacatatggaactattattattagaaacctttcagtggaaccctctgccttccaacagccgcccattttcattgaggaattatctctctgaagcagtacacgaaacagatcttcatgacggctggccaatgatttgcttggaaaagactaaactctacatggccaaatatgcagattacttcctggaagtatctttgcaagctgctgcatgtgtggcttcttcgaggattatacttcgtctttctccaacgtggcctacaagactacatcgtcttactgcctactcttgggatttcttagtgcagtgt

SEQ ID NO: 439497 - DNA, 902 bp, Homo Sapiens
agccaacattaggcccagatgctaccacaggtcaattctcaaaatggcaaattgaagtctgtccaaattttcctgttgtactgaatatttttgaaatatttggaccatcagccaggacttgaaacatttttgtccatacagggatttgttgtaaacagaaatttgaacatactgttaaatttgccttagtctccccaggattcatggtgcattaaaaaggatattcagtctccctggtgctggtacctgaagagttctgatgtcatttagatccctttccttttgaacagaagtttacaaaacgcttacccatagcttcatgtcacaaagcagtctgggtcggttatcagcttcacaaataatcacctttcaaaacatggagtaatacaagggtaatgttcatttatctgataactccggttgtaagaaacactcagacagggcttaacttctactggtattgccagtgacatcccaacaccagtctgcatgtcccaaggccctgaacactagtttggaagccagcaggacatgtctgtagtgtgtaagatgaggtgtgtgtggtcgatacaatctgctgacagcttggttgttctgacgtaggatggcgatactgcagtgaggtctgatgtgtctgatggagatactgaggttgctgaaagtgaactggccgtgatggctgggaggctgtctggaatacacttagttgagctgactgaggtcctgcttgccctctctgtttgtttgcttctttcacatcattatcatgagcgatcaacagtcgttcaatacactgcactaagaaatcccaagagtaggcagtaagacgatgtagtcttgtaggccacgtggagaaagacgaagataatcccgaagaagccacacatcagcagctgcaaaga

SEQ ID NO: 439498 - DNA, 901 bp, Homo Sapiens
ttttgcagagtccaagtcggtcagttgatgtggcctgctgctgagcatgatgttctcgggcttgaggtcccggtagatgatgcccttgggagtggagatggcccagggccagcgtgatttcagccaggtagaagcaggcggtatctttcccaggaagatgccctctcgctccagatgcgttgaagagctcgccacctgcctcacagagcttgccgtggggattcgatgtcaaattcagcatacatctaccgacgcctactcggtgcctggccctgtgctgggtgaagctggggacaggatgaagagacccagccactgccctcaggacgcctcagtctacactgaggcactcaaggatgaggtagagtttgccaccagtcttggaaggcaataggccagttccacacataaaaggggtgcttcactgactctagaatgttccgctcagcccgttgttgtgtgctgttgtccttggcattgcgccaccatttttggccttccttaggactttcatggcatataatttttgcccaaagttggtgccttgcaccttttcgcacctggaacaccttgccatagccccccttgcccagcacacgcagcagctcaaagcagtggggcccgatgcgctctgggccaacgttcacgctggtctcagtcagctccacctcttcatagtgtcccacaggctctaggccagctgccctcaactcggcaaggggacatgcgtccgcggggctgagctctggctcgccctcgccctcgctgccttcactccgtctccaaatccaatcaaacacggccgccatggcggcgccggccccgcgggcccgtcggcccgtacctggccgcgcactgactccgctctcgacgaattcgagctcggccgatttggcctgat

SEQ ID NO: 439499 - DNA, 1799 bp, Homo Sapiens
gggtttgtgtagaggtttttcatgattcagccctttaatcttccagcgggagcgagttgagcgcggggtgtggcgggcggccctccgtgcccatgattcaggggcacagctgccccagcagacacacactttcatacgcactcacaccccacccccagacacacccccaggtctctggaactggcccagggtcctgctgctctcacagccgcagggacagggctcaagggctaccctcacccccacccggcttcctagcgccctggacgcccacggcccctcttggacttcttggtccctgaggggggacggatggggagaggggcggtggtcgagggcggcggcggtggcaggagtggaggtagaggtagctccgtgggctccggcaggctggggctgggccgaaacccctcaaaaggggagaacttgagggggctgacggggacccgggggctactgttgaggcgcctgggtgagcgcagcttgggctggaaggagaagccctccttgatgctgtccaggacagacggcgccacgtatgtgaagcccaggaaggcctggttggcactctcgctgagggctgtgtcatcaggactgtccaccggcgtctgccgtgtgaagcgggtatcaaactggctcacgtcctcctctgactgcagacagggcctgaaaggggggtccacacgccaggccagaaggtcgtcccaattcatgtgccggaaaaagggatgtctctgcacatcagcagcatcccctgggccacccccaatccgctggctgggattccgtttcagaaactttttgacaaggtcccgggcatctggggtgaggtaggggggcagtgccagcttgcccctgatgatcttatccatggttttcttccggttctctgcggtaaagggcggcgatccagtgagcatgtcgtacatcagggcccccaggctccaccagtccacagcccggttgtggccactgcgcaccagaatctcaggggccatgtactcaatggtgccgcagaaggtgtgagtgacggcgccctcatggatagactccttgcagagtccaaagtcggtcagtttgatgtggccctggctgctgagcatgatgttctcgggcttgaggtcccggtagatgatgccctgggagtggagatggcccagggccagcgtgatctcagccaggtagaagcaggccgtatcttccaggaagatgccctctcgctccagatgcgtgaagagctcgccaccactgaggcactcaaggatgaggtagagtttgccaccagtctggaaggcataggccagttccacaataaaggggtgcttcactgactctagaatgttccgctcagcccgtgtgtgtgctgtgtccttggcattgcgcacaattttggccttccttaggactttcatggcatatattttgcccaagttggtgccttgcacctttcgcacctggaacaccttgccatagccccccttgcccagcacacgcagcagctcaaagcagtggggcccgatgcgctctgggccaacgttcacgctggtctcagtcagctccacctcttcatagtgtcccacaggctctaggccagctgccctcaactcggcaaggggacatgcgtccgcggggctgagctctggctcgccctcgccctcgctgccttcctccgtctccaaatccaaatcaaacacggccgccatggcggcgccggccccgcgggcccgtcggcccgtacctggccgcgcactgactgaccctcgtgccgaattcgacacccagcctcgtacctagcctta

SEQ ID NO: 439500 - DNA, 1921 bp, Homo Sapiens
cccgtgtttgtttattgtctgttggcattttttagaaagagaattttatttggaatgaaaatatagagcccaccctcccgcctcctctggggagggagcagagggctgggcagtggtcggggagatggtccctcagaggtcgaggagctcgcctgggcgtagacatcctccacaggaacagtgaggaaagctgggcgctggcttcggcctgggcctgggacgggtgggggtgggaactgacccctgcgctgcctcagaggctctgggcagccagctagcccggtgcgacccgctggcagaagctgagtgggaagggggcggcggaggagatgaaggtggcgtgtggctgtggccctacgcatccccgttctccatgcggcccagctgctcctccaggcggcagatgcggtcgccctgctccttgaccagcgccctcagggcccgcagctcctgcatcacctcctccagcttcccagcctccccggctctggccaggctgccgctgggggtggcatcagcagcagtggtggtggaggcgggggcccctaggtgggaggagcccggggccatggcgggccggctgtcagacaacacgttgcgccggctgatcttcaggtcccgctgcttgctgggcacgtaggcctcccgcagtgagatgaggatcgggtcggcatcccgcccgctcacccactcctcagcctccagggctgcctcgggcccggctgtgtcggggtacagatcatcctggaagaggtccgactttcttggcacagtcatgacgatgggctcacacttgcgctcatgcagtttgtagaaccgggcgatctcgcacttgctgacctccaggccccgcttgggcatgctgcccataccccgctgcggctccttgctggtgaacgtgttcaggaagtggatgtagggaggctcctctgtgatctcaaagtaccggatgctggagtcacccttgccgcagacgtagaccacactggtgtcggggtcgtagaagggcagcagggccccgttgctcgagtccagttcctgcagggccatgggttcctcgaggttttctgggtcccagagcgccagctgccgctcgctcattcggctgaagcctgtggtgaacaccttgccatctgccaggaagatggcccgcatgggccgggccccctcatgagccttctcccgctctgccaccagggtgccccgacgggggtcgatgatgcgcacgctcttgtccttgcatgctgagcaaaacaggctgccattgtggttccagctgacattgtagatgaggtcagggtgcaggctgtccaggcggtacagctcctccgctgtgcccacattccagatgagtaccacgttgtcgcagcctgcactgagcagcacgtttcgggccgtggggtgccaggcgatgatgcccactcgcttggtgtgcccctccagtaccaccaccggctctgtcagcggggaggtcagcccgttctctgggatctgccacaccatgaccgtgcagtcctccgagccgctggctatgacttcgtcgttgtgaggacaccagtcgatgtccaggacaggtcccgtgtgcccacacaccgtcgggtaggccttgtcaatgcggcccgtcttgcttagggggagcaccagaaaggcaccccctccactggcctccacaatcaccgccaggaacttggggttgacggcgcagaaggtgctgtcccaggtaacacgggacacgcgaatgtcctcatagcactggtcgttcttgaccggctgcccgaacacatgccggaatttgctctgccggaccactttgcggaaggacatgtcgggggcaccgggggcgcagggggctgcggcaccggcttcgggcggctccggatcccggcctctgggaagcaggaagcaggattcaggaagtgac

SEQ ID NO: 439501 - DNA, 1072 bp, Homo Sapiens
  misc_feature (62)..(62): n is a, c, g, or t
  misc_feature (91)..(91): n is a, c, g, or t
  misc_feature (116)..(116): n is a, c, g, or t
  misc_feature (134)..(134): n is a, c, g, or t
  misc_feature (810)..(932): n is a, c, g, or t
  misc_feature (991)..(991): n is a, c, g, or t
  misc_feature (1019)..(1019): n is a, c, g, or t
  misc_feature (1052)..(1052): n is a, c, g, or t
aacccaatcacttaaacctaaaccctgcgaacttcggctgcccccccctatttaacagcccnctcccaattccagaatccattgtcgttanccctcccacttcaacctgaatcccnccctcattgtccatccanaatgccagaacctttcaataatagacctccaaaggaccttgttgccctggtcctgggatggtgtgaaagctggagctggagctggagctggagctggcaggactgggttgttcagaatcagatttagaggatatattctcctccacatctgaatcattgggatccacaatatcatcaaatggcggtaacgttgatttcttcttctctgatgtctcactttcaattttgacctttcccatcttgacatgagatttatcttttatctgttttttgtcagcagaacaagtgagtatcagtggtggtgcgctagaaaaacttttaaataaagcctctgagctactctttttcctttttttggctgagagttcttcagaatctgaaatgggcggccttttactaggagccttcttatcttgtccactggtgatggtgagtaagttactatctggttttggctcttttgacatgggtttaggttccttgaaggccatcttaggaactattttctcttctttcagtggtttattttctttgggtttcttagaggattctttggaagatttgttgtgatccctggaaggttctttgaaggcacttttatgttctctggagtctttagaaggtttttccttgtgctccttcattaatttgtgaggctttgaaaaactggtactannnnnnnnnnnnnnnnnnnnnnnnnnnnnnnnnnnnnnnnnnnnnnnnnnnnnnnnnnnnnnnnnnnnnnnnnnnnnnnnnnnnnnnnnnnnnnnnnnnnnnnnnnnnnnnnnnnnnnnnnnngtatgaatactcctattagggtcccctcctgccttcagcaactttctcctaaagtcctntgtggggttgttgaaagttagcttttcnacagcggaggtgatcactggtggatggcctctncaagatgcaggaattaattc

SEQ ID NO: 439502 - DNA, 1184 bp, Homo Sapiens
  misc_feature (327)..(449): n is a, c, g, or t
  misc_feature (932)..(954): n is a, c, g, or t
  misc_feature (1094)..(1114): n is a, c, g, or t
tttttttggctgagagttcttcagaatctgaaatgggcggccttttactaggagccttcttatcttgtccactggtgatggtgagtaagttactatctggttttggctcttttgacatgggtttaggttccttgaaggccatcttaggaactattttctcttctttcagtggtttattttctttgggtttcttagaggattctttggaagatttgttgtgatccctggaaggttctttgaaggcacttttatgttctctggagtctttagaaggtttttccttgtgctccttcattaatttgtgaggctttgaaaaactggtactannnnnnnnnnnnnnnnnnnnnnnnnnnnnnnnnnnnnnnnnnnnnnnnnnnnnnnnnnnnnnnnnnnnnnnnnnnnnnnnnnnnnnnnnnnnnnnnnnnnnnnnnnnnnnnnnnnnnnnnnnngtatgaatactcctattagggtcccctcctgccttcagcaactttctcctaaagtcctctgtggggttgttgaaagttagcttttcacagcggaggtgattcactggtggatggccttcaagatgcaggaataagtcataatcaaagcggactttcctaggttcttccttgtttttaaaataaacttcaattggcaaaatgaaaccagcatacccagattcttctactttgtaaggtggatctttgcacactctttttggcctaggaaagctttcgtgcaagtggaagacgactttctccacaaagtgctgtatgttactgtgctccggaccgcgtacgaacaccatccagtcgtgggtgaagccctccacggtgggttttttcctcacctgggcgcggtgccccagctccagcttcacctgcacggcacacgagctagccatgcctgggggcccggaggtttgctggggtgttgtgtggtannnnnnnnnnnnnnnnnnnnnnncagctgtaattcatgaagaggctgctatgaatgagagcgcgcccaggagcggagggtagatggcggacattctctgcctttttccccccgcgctcgcttgctcgctcgctcgcttattaaactcagccccaaaagcaaannnnnnnnnnnnnnnnnnnnntccagggtaaagaagatgattgcggagcatgcgccgtggcgcctgacacccgggctccgagcctcccgct

SEQ ID NO: 439503 - DNA, 1549 bp, Homo Sapiens
  misc_feature (48)..(64): n is a, c, g, or t
tttttttccttttaaaataagaactatcactgttttcttctccttccnnnnnnnnnnnnnnnnnctctagcaactattgccaccctggccccaaaagttatttatagagtacattggtagtaattatacttacaatttagtccatggagtgcaggaccatgaggaactatagctagataagattgtgccagaattagaagaatagacattttactttcagagaccatgactaaaagaatattaacaccaagatgctccttccatcagctggatgtacctttgggcttggaaagatggcaagtataggagttgtactggaacggctggatcaaataggttgaaggcatttttgtcattgtacatgtggggaaaagcaaccaagtaataagacacaacagatatctcttaaggcaccgacacagctcacagtgacacctccctccccagcacagcgtaagggtggaacagtagcaaaatatctatacacataacttgcagatgaatcatgcctgagtaacatggaggtggaaatatgacccaaattgggcaaacagacttgttttcccaagaaactggaattttgatgtgagatgcatagagggtgagttgtttacagcccaccaggaggacagtttatggattcctaccagtgagtttcccagagtttccctggttattcaacagttcccaagattccatgagataccccagtatccttccactaaagtcaactttatgagctgcagttgttgtttgagccagaacctttaactactacacttccccaaatagccttctctcatgttattcctttatgtgttcctttctctccaccaaaatagcaaaacagaaaaaacaattgggcttaccaagaatgctgtgatattttgactcactgagctttggctgtttccctgcatgaaattcccttcttcttcttcctgaaaccttgttcaaggatacttcaactatgatacttaccattgtcaacccctagttacttgctttgatttggaaggtcgtccactgtgccctgtcacatcaaaatcatggcacttaccatactgcactgtgtagtctttggtttacttgcctgtctcccccattagatggcaagctccttgacagcaggggctacttcccatctgactgtatttctccagttctttattacagtacctgcttgaggaatgtgaggaaaacagccaatgtaaaacagccacaccctttctagagctgatgacagccaactggtcccaaatgtggaagtccagcgaaaaatcagcagagccacctacccaacccacagttgacttagaagataattccagaagagctgtccaactaatgcagagactcctgaggatcaccaacttgagagctttgtttgctcaaaatctgagttagttgcatagttgacccacaggaatgtatcagctttaactggctagggtccctgtgaaggaatgggatcccgaggtgcttgccaggaccgtagcaggcggaagctgctggcagcgcgaacgggcggctcccgccggcgtgggtg

SEQ ID NO: 439504 - DNA, 1719 bp, Homo Sapiens
  misc_feature (246)..(259): n is a, c, g, or t
  misc_feature (304)..(304): n is a, c, g, or t
  misc_feature (308)..(393): n is a, c, g, or t
  misc_feature (406)..(426): n is a, c, g, or t
  misc_feature (457)..(525): n is a, c, g, or t
  misc_feature (1018)..(1052): n is a, c, g, or t
ggagatggcccgcccaccagcgccaaaaaggtaaccggaagccagggttcaccaaaaaacaaggggggttttcccaaggaaagccgtctcataaaaagaggcttcactaatttttcccaatggggccaggcacagggggttaatgtctataatcccagccctttgaaaggccaagggtagacggatcgctttagctcaaggaattggggcccaaccggggcaccatgggaaaaacccgccttctcnnnnnnnnnnnnnnttagctggcccccgtggtgctgacctgtaatcccagctactgggngggnnnnnnnnnnnnnnnnnnnnnnnnnnnnnnnnnnnnnnnnnnnnnnnnnnnnnnnnnnnnnnnnnnnnnnnnnnnnnnnnnnnnnnagaccctgtctcnnnnnnnnnnnnnnnnnnnnntccacacagctctatgggtcagtatgacagnnnnnnnnnnnnnnnnnnnnnnnnnnnnnnnnnnnnnnnnnnnnnnnnnnnnnnnnnnnnnnnnnnnnnatccggttggaacttgggtctcttttccacatcatgcatggttcccaagcaacggcttcagcatcatcacttaaggagctcattcaaagttttgaaaactacagattccagatcccatccctggaaagccacgttgtagggttggctccaagagagccctacctgcagtcagctctgggagccagtgccttacaggtggtcctgagggcaggaaggaaagtgtggggtggatgagaagacacagaaggaaaacgagggtgtcagtccagagaggaccttggaggcaggcttggcctacttttagcccttattctgcctaaacccaccccctcctctctactccgagtcttgttaactcgctttataccacatcctgctgctttaacctcgccttccttttccttctgaacaatctccttcctcctactgacctgaactttttgtgtatttaccccaggccgggatgggccagcacgcgcacatgcgcatgccnnnnnnnnnnnnnnnnnnnnnnnnnnnnnnnnnnngagtcacgcggggatgtccagtgtgtaaacacagatcctctgagagcagaaagcgtgcagttctctaggacagcagccgcgtctgggcccaaggctggctaactagcaggctgagtgaggctcgacggagggcgccttacgcgggcacttccatgactcccaggttctgacggcacaagagccctgatgcccacgctcacggacagttccccgctggagcgggcaggggacctaaccctacgacacagggcgtcctgtgtcagaggcaggaggctgaggacacagtgcgcagagccgcccagcagaggttacccggataacgataagtggtccccgcgacgccccttaagtctctggggttatctggagcgcaggtttgcagacccgctgcccccgcggtgggccaggtccacggggccggaagatagcaggatctgtccagccctcgggctgcggcggctgctcgcggagcccactctccccgacggtccccagcttgctccagctctgcctggagctcccatgcgtgccctccgcatccgccctggccgcccagtcacacacctgcagtccccgccgggcgccgagcccctctccagcggcgactccctgcgattcgggtgaccgtcgggaccaccgcgccccagctggagccgcgcggcgatcc

SEQ ID NO: 439505 - DNA, 922 bp, Homo Sapiens
  misc_feature (44)..(44): n is a, c, g, or t
  misc_feature (47)..(47): n is a, c, g, or t
  misc_feature (53)..(53): n is a, c, g, or t
  misc_feature (62)..(62): n is a, c, g, or t
  misc_feature (95)..(95): n is a, c, g, or t
  misc_feature (99)..(99): n is a, c, g, or t
  misc_feature (104)..(104): n is a, c, g, or t
  misc_feature (118)..(118): n is a, c, g, or t
  misc_feature (158)..(158): n is a, c, g, or t
  misc_feature (709)..(709): n is a, c, g, or t
  misc_feature (715)..(715): n is a, c, g, or t
  misc_feature (735)..(735): n is a, c, g, or t
  misc_feature (816)..(816): n is a, c, g, or t
acctgtgttttcgcagatatgtttctatttttctaaaagacaantcnagtcanttaaaactncttcatccctgcattcctgcgacattagttccnatanatccntccaacaacctccnaaaggttttggcttgtgcgtatctaaggagtgcaactganatctcttattcttcttactttttggaatagcatctatcatgtcatttagtttggacccatgtacataaaataatgtataaagcttctttgcatcagtcatgcagcttctagttatagacaaggactccccttgggccctacttgttaggtgttcaagagcaggatttctagactctacaagctgggaaaagatgatgttccacactgcgtatgataaccaacacatgggacaagctgagaaagtgcactcaggacttcgcgtgatgtcaccactatggcatatacttagatcctgttgcttaagcataccatgttcgctgaatgaatctgctttagctgtgcaccattattctgttgtccatcgagatttaacacattatcaggaaattccatcaccatcttcagggtgtcgtctatgtagaggggaatctgccttcctctcgaatggggaactcctcctccccttcctctgcacattgccatgagtctgcgccatcgtccccgacgctgccgttgccaccgtcaccacctcctcccagctgccgccgccnccgccnctgctgtttctgccgccgcngctgccgcctccttcccagctcctgccctttctcggaggaggctgtcggttccgaccttcaccgttttcgtggtcgcctcnctaactcccacctctgctccctgttactggctgacgaggcccgcgtcagggccggcgtgggcgggagcgcagctccgaatgtcgtttcctctacgggcagtcagcc

SEQ ID NO: 439506 - DNA, 1122 bp, Homo Sapiens
tcggttctagctgttacagactccttttcctgatgtgatggagcaggtattccatgaagtgggtattggcagtgtgctctccctccagaagttctggcagcaccgcatcaaggactatcacagttacatgctacagattagtaagcaactctctgaagaatatgaaaggattgtcaatcctgagaaggccacagaggacgctaaacctgtgaagatcaaggaggaacctgtgagcgacatcacttttcctgtcagtgaggagctggaggctgaccttgcttctggagaccagtcactgcctatgggagtgcttggggctcagagcgaacgcttcccatctaacctggaggttgaagcttcaccacaggcttcaagtgcagaggtaaatgcttctcctctttggaatctggcccatgtgaaaatggagcctcaagaaagtgaagaaggcaatgtctctgggcatggtgtgctgggcagtgatgtcttcgaggagcctatgtcaggcatgagtgaagctgggattcctcagagccctgatgactcagatagcagctatggttcccactccactgacagcctcatggggtcctcccctgttttcaaccagcgctgcaagaagaggatgaggaaaatataaaaggaaaagagggagatgttttgtccagacctactagacccaacagaaaaggtttttgtattagaatctgtttccttaaaaattgatttgactcctgttcttaaacacaagtggtttttcctaattccagaggaactggacgtcaccaaacaaggttgcattttacttttgcatccagtttttatagttttccacaaccaagccacccttcacagataaaatatgatgctggcatggcaatcagaccaaagcactgtccccaattgttgtcttaactatgactagacatgttatacagccatttatcttgtacaactgagaagaatcatactttgacctaccttgtagagatgtgaggatttagatgtttgctaacttcaaaactgtgcttgaatagactaataatatatgctcatatcagatgtcagttttcatttaacttgattcattttggctcaggtcattgggaacccattactaatact

SEQ ID NO: 439507 - DNA, 1607 bp, Homo Sapiens
gggggaggctgtttaatgagcggggggcagtacaaaagagcagccttctctcagtgggaaaaggcaagagcacctggcgctgggcttgctgggggagggagcagcttctcagttggttgggggagggggaggtatgttccctgggccttcggagggaagtgggggcctcagcattgggggcatgggagttggggggtgcaccccaggatttgaggggtgaactcccggaggctgagggtggaccccaggagccgacggatggaccccgggaggttgggggtggacccccggggcctgagggtgcatccctggggctggtgggtgcacccctggggcctgagggtgaacggcgggggctgctgggtgcacccccggggcctgggggtgaacccccgctgatgggggaggatggacccctggggctggtgggtgaaccccaggggctggtgggtggactccgggggctggtgggtgaaccccgggggctggagggtggactccaggagctggggggtggaccccagaggttggtgggtggaccccaggggctgggggatggacgccaggagctggggggtggacgccaggagctgggggatggaccccagatgcagggggatgcaccactggggccggggggtggacccctggagctggcgggggtagctggggtggtcccgggggccctgagggcgcaggccctgtggggggcatgggtggcagaggcaggcctcctggcgggggcggtggcaaagactcaggcagcggtggccgagggggcagaccgttcatcagcgggggtggaggccgcttcaccccaggggggccagcagggaggctgggtggagccgggggcttctccatcttaaagtggaactggaggaagaactgcttggtctcccggttccagtgtgtccagaacttgccctccgccttgtcgatctctctgctcggcaccttgaaggcaatggtctcgtagggctcggcggccatgagcaggtactgccagcgccggtccggaggctcgatcctctgctcgtacgcagacatgaagcggtgacgtggcatgatgccctcggcgatctcagggtagtcaatctggaagaggaggctctgctggcccatctccgagtctctctgcttggtcactttgtagcccgggcggccgatcttcacaaacttcttcacctccaccttgaccttctcaggcgcgggctgggcaggggcctccttggcctccttggctgctcgccgggccaggttggtctggtgcttcttcccctgcgtatgtgccaggtagctcccctcattgttgtgaagtgtcaggcagagtttgcattcataggagcccaggtggttcttcatgaagtacgggtccttgttgatgtcgatggtctccagggccagctgccggaggcgcttcctgcggtcacggttgctctcggaggaggaggccacgcccccgctcccggtcttgcccccggggcgatgctggaagtccatggtgatggccttagggctttagcagactgggagacaccagagcccaaggccgcgttatctcctcctcgtttcgccacctccacgattcgtttggcgatcccggg

SEQ ID NO: 439508 - DNA, 1128 bp, Homo Sapiens
  misc_feature (13)..(13): n is a, c, g, or t
  misc_feature (23)..(23): n is a, c, g, or t
  misc_feature (37)..(37): n is a, c, g, or t
  misc_feature (49)..(49): n is a, c, g, or t
  misc_feature (74)..(74): n is a, c, g, or t
  misc_feature (81)..(81): n is a, c, g, or t
  misc_feature (86)..(86): n is a, c, g, or t
  misc_feature (99)..(99): n is a, c, g, or t
  misc_feature (144)..(144): n is a, c, g, or t
  misc_feature (154)..(154): n is a, c, g, or t
  misc_feature (164)..(164): n is a, c, g, or t
tgtaacccggggntgaggtgaanccagagtggggtgncccaaagttgtngttgacccaagggctggggatgacnccagagntgggngtgacgccagagntggggatgaccccagatgcaggggatgcaccactgggccgggggntgacccctgngttggcgggntcgctgggtggtcccggggcccctgaggcgcaggcctgtgggcccctggttgcagaggcaggcctcctggcggggcggtggcaaagactcaggcagcggtggccgagggggcagaccgttcatcagcgggggtggaggccgcttcaccccaggggggccagcagggaggctgggtggagccgggggcctctccatcttaaagtggaactggaggaagaactgcttggtctcccggttccagtgtgtccagaacttgccctccgccttgtcgatctctctgctcggcaccttgaaggcaatggtctcgtagggctcggcggccatgagcaggtactgccagcgccggtccggaggctcgatcctctgctcgtacgcagacatgaagcggtgacgtggcatgatgccctcggcgatctcagggtagtcaatctggaagaggaggctctgctggcccatctccgagtctctctgcttggtcactttgtagcccgggcggccgatcttcacaaacttcttcacctccaccttgaccttttcaggcgcgggctgggcaggggcctccttggcctccttggctgctcgccgggccaggttggtctggtgctttttcccctgcgtatgtgccaggtagctcccctcattgttgtgaagtgtcaggcagagtttgcattcataggagcccaggtggttcttcatgaagtacgggtccttgttgatgtcgatggtctccagggccagctgccggaggcgctcctgcggtcacggttgctctcggaggaggaggccacgcccccgctcccggtcttgcccccggggcgatgctggaagtccatggtgatggccttagggctttagcagactgggagacaccagagcccaaggccgcgttatctcctcctcgtttcgcccctcgtgccgaattaacacccaggcctcgacctagccattggttgctcgctccttt

SEQ ID NO: 439509 - DNA, 1008 bp, Homo Sapiens
  misc_feature (97)..(97): n is a, c, g, or t
gtttcccgggggccccttgagggccccagggccctgttggggggccatgggttggcaagaaggcaggcctcctgggcggggggcggtgccaaaaggnttcaggcaggggtggcccgaggggggcagacccgttcatccagcgggggttggaggccgctttcaccccagggggggccagcagggaggctgggtggagccgggggcttctcccatcttaaagtggaactggaggaagaactgcttggtctcccggttccagtgtgtccagaacttgccctccgccttgtcgatctctctgctcggcaccttgaaggcaatggtctcgtagggctcggcggccatgagcaggtactgccagcgccggtccggaggctcgatcctctgctcgtacgcagacatgaagcggtgacgtggcatgatgccctcggcgatctcagggtagtcaatctggaagaggaggctctgctggcccatctccgagtctctctgcttggtcactttgtagcccgggcggccgatcttcacaaacttcttcacctccaccttgaccttctcaggcgcgggctgggcaggggcctccttggcctccttggctgctcgccgggccaggttggtctggtgcttcttcccctgcgtatgtgccaggtagctcccctcattgttgtgaagtgtcaggcagagtttgcattcataggagcccaggtggttcttcatgaagtacgggtccttgttgatgtcgatggtctccagggccagctgccggaggcgctccctgcggtcacggttgctctcggaggaggaggccacgcccccgctcccggtcttgcccccggggcgatgctggaagtccatggtgatggccttagggctttagcagactgggagacaccagagcccaaggccgcgttatctcctcctcgtttcgccacctccacgacttcgtttagtcgacgcgtggtcgacgatatcccggggaattccggaccgggtaccagcctgctttttaca

SEQ ID NO: 439510 - DNA, 1072 bp, Homo Sapiens
ccaaaaacgctcacggataagaagcagcaagtgagattcgtaatgcttaccaatacatccttttagagcctgcgccccggcggctaccgctgtctgtcgatgggacccgccttttagtaaaggtgtctatacaacgattctggatcgaccgttatcgatagggacacacccttttctccgcaggggggaaggcagtttcccccccgggggggccagccgggaagctgggtggaatccggggctttctccctcttaaaggggaactggaggaagaactgcttgttcttcccggttccagtgtgtccagaacttgccctccgccttgtcgatctctctgctcggcaccttgaaggcaatggtctcgtagggctcggcggccatgagcaggtactgccagcgccggtccggaggctcgatcctctggctcgtacgcagacatgaagcggtgacgtggcatgatgccctcggcgatctcagggtagtcaatctgcagggacacggccgggtggcagagccgcctcttgggtgcctttggccgccccccacgcccaagtccctgatctcacctggaagaggaggctctgctggcccatctccgagtctctctgcttggtcactttgtagcccgggcggccgatcttcacaaacttcttcacctccaccttgaccttctcaggcgcgggctgggcaggggcctccttggcctccttggctgctcgccgggccaggttggtctggtgcttcttcccctgcgtatgtgccaggtagctcccctcattgttgtgaagtgtcaggcagagtttgcattcataggagcccaggtggttcttcatgaagtacgggtccttgttgatgtcgatggtctccagggccagctgccggaggcgctccctgcggtcacggttgctctcggaggaggaggccacgcccccgctcccggtcttgcccccggggcgatgctggaagtccatggtgatggccttagggctttagcagactgggagacaccagagcccaaggccgcgttatctcctcctcgtttcgccacatcccgggaattccggaccggtcc

SEQ ID NO: 439511 - DNA, 1241 bp, Homo Sapiens
  misc_feature (150)..(166): n is a, c, g, or t
  misc_feature (208)..(208): n is a, c, g, or t
  misc_feature (210)..(211): n is a, c, g, or t
  misc_feature (215)..(215): n is a, c, g, or t
  misc_feature (219)..(273): n is a, c, g, or t
  misc_feature (843)..(843): n is a, c, g, or t
  misc_feature (1144)..(1144): n is a, c, g, or t
  misc_feature (1175)..(1175): n is a, c, g, or t
  misc_feature (1212)..(1212): n is a, c, g, or t
  misc_feature (1215)..(1215): n is a, c, g, or t
  misc_feature (1235)..(1235): n is a, c, g, or t
aaagatataaggggttctcttcccccaaaaattcccccaaatttatacccgtttttccccagttcctcgagggctgtgtaaaaagagggggccaaaggccctaaggctttaaaaaaggaggttccccaattggggacccccttttttacnnnnnnnnnnnnnnnnnccgcgtaaaactttagccccctccagggaaaacctttaaaancnncccncccnnnnnnnnnnnnnnnnnnnnnnnnnnnnnnnnnnnnnnnnnnnnnnnnnnnnnnnaaagtttaaaatattttattttaggaaaggtactcttagatttgtgttaatgttgttttctgtattaacaaattagtcacaatcaacttcgatatagccattgattcttctttctaaatctgtataaaaaggatattttcttgaaaaaccacaagaaaaatacaactgctttttcattgcccaggtcagttactcgctacagtcagactgcatttaaattagactggcatctaatacttttgagtatttacaaatataattaaaactatactcctagaccaccagctttcaaaaaagttggatctgcttgacttgcaataaatatgtaccaaacatgaataatttctaagccgcttatgaggaggttttaaaaattactaacatttattaagcagtttgtgtgtcaggcatattgtgagtgctttgctttatacaaattcacttacttttttcagaattcctttgaggtagggtaggtacttttagaaatgccattttacatgtgaaaagtgaggttggaagagcctcagtaacctgcccagggccacacagctagaaggtgagccagcncttgagccacatttctctttccagccagattctcagcactcagctgtgctgctggtggtcacagctggctgactggaccaggaagaaccttttagtgtcaggcgtgtgaatcacagcacttgggacaggttaccaagaaccatgatcacttaatttttatatttatacatgtacatttgtatatacatagagaaagtgcaggcaaaaccattatacagttactctaatagccatttgctactgccagcagtctcaggactgatccctgtctaagctggcaagtttacattctccttgtatnactacaggatttgctctggacaggagctgtnactcctcaacaaatcctgctttcagtctactactgcncanttgaattgttcagtaggccngctttt

SEQ ID NO: 439512 - DNA, 4024 bp, Homo Sapiens
  misc_feature (158)..(158): n is a, c, g, or t
  misc_feature (468)..(481): n is a, c, g, or t
ggtgtgtggaggggagtatccgcccagtgcccccctttatctctctgtcggctcctcgggggatcgcttcaagtaggggggcatacccacaaccttatagtgctcccccgagtgtggcgtcgtatataccgctaagactggggggcgcccgcgcggcnactcagaaggggaaacgtggtctataggagaaaaaggttttttctagtgagggcgccaaagggcggcgcccagaacatagggttgtagcttacacgtacggtttatattcaatctaggtgatcgcggatacgctaaaagaaccggttttggaacggtgaatacggcgcgataagggggccacaaaaaggtagcttcatctaggtaatgttttgccaattaatttaattccaccgtttagagataattacttctgttattaggatatccagagatgggttccaatagtgatgagtttccccaaagattgtnnnnnnnnnnnnnnaaaagaaaaatgagaaccgcatgaaaggtcttccctgaagaggaaaaaatcgagggtttttttggggaaggacccaaagattcccctgacagaaggctacccttagggtggagggacaaaagtaggttttcaaataaatatttaggtgggtttactgccttttttcccaaggatacaattctggggggtctgcattcctttttctcatttggtgccgcctgaccgcagaactagctttttccgtggcatgtaacgtaaaccccgcagtcttaagtcgtgacacgtaatgacaagatgctgccaccttggtggatacagaatagatttaatgaaatggctaggaagtctttcactctagttggtggaactggcaatagggtgagagggaagcaggaatgagaagacaaaaattaagaaacaggaaaaggaaggagctccatctctaatatggaggtagaaaaaaagggactatcatctaaatgagactgaagagtccctagaggagaatggcttccctctccttccttctgagactagaaacgaggaaagaggctacagcttgtattgagggaaatgcaagactgaggagaaaagaaagcaggtctagctgatctcaacttagcaagctaaaataagagtagcctggtgttagcggccacccaagcaactccctgctcctagtttccacttggggaatccatgtgattttggggaggctgacccccacccttttccccaaaggtgttgtccatgatatagaataagcaaattagcatgtatcatcctcctggccacagtgattggtcagggtggacatgtgacccaggcctaatcagtgtgaatattagggcttttgctgagatttctggtacaaagatgccttctttttctgattggacataaatggggaaaagtgtaatcttaggaatgctggcagccattaagtggcccagacttaaatggtcctacagaagatgcaacagtgagaaaaaagtcagtccggtatttagagacatactgaactactgggtcaagtcttcacctggagccagcactacctatggactttctagttacatgaaccaataaatcctttttattttaagccagtttgaattaggttttctgtgatttaaaaccaaaagatccctaacctatatattcatcatacttagcccattcctaccttcccacaggatagcacagggaatacaggtaaggtcactacagatttattggttacactaaagcccagggtatcaagctgaaaaggtcagaggcagcaaccaggtactaagtagactgggtgactcagctgtctgtacagaggagaatggacttccttaggaaaagaatagccaaatgagaagcaagtgcaaagaagggcctctactaggcaaagttaacgtagggatataaacactcttccccacagacctgtatcatgggggtgttgcttttgggtctttatgctcctgggataaggaactttgaagcacatgctcctttaagtctttattaccctgtggtgcagtgtctacctctccctttgccaaaggaaaagcctccttttggcttctgctgcccttgatgacactcacttttgaggggaccaagggaattttatcttctgcttctggtatgctgggaaccggggccccttcctcctttggaaacagtaccatctccctgaccctgggcaagtactgcccccttttcagcctctcccattggccctggcctctctgcccctccagctgagttgccttcccctcctgagccccatgtctcccatggtaaccttgaggactgggcagattccatggcagctgctgacttgagaggggtagaattcctttccccacttccacctgacttttttcgagggcgcccccgtttccttttggcatcacttgctgtatcctctatatcctgctttgctgctttagctggtggagcctgcccactggcctcactcacaggtacttcagctgtcctcttgacacccttgtcatgtggtccttggtcaccacctatgcctacctctctgttctctgtgccccggggctgagtgagtcccccaggtggagctcgcccaggcccaggtccaggtccaggcaaagcaggaacagttggtaagatcatgttaatgatgggcacagctgctgggggtgccccggccctactagacagaggcagtgtagccactttcagggcacctgaagaaagcctgggggccagaataggtggagagactgggattggcggaattagtgagcgaggggcccggggaaggagcagaggcagccgagccactagggcattaacctgcaggttattggctcctggggccgagctctcaactacactcttcttccgctctccacgtgcgagaggaccggccccagttcgggcttccagatccttaggaggctgggccagtctctctggcttcttgtgggctccaccctctgggttctcttaaccattctttggtttagatgaccgttcccgaggtgcatgttcgtcctcttcagcaagccccatggccttaagcacatgggcatgtgcagatcgggcagagatgagatgctgctgttgcaaggaagcgggcgacctcaacgatgggaacttgaggaccgttttcaggatccgctcttggccagtcacaggtcagggcacacgctgcctccaccagttcatctcgaggtgctggggttacttctgggcccatttttggactctcagaaccctttaggtcaagtccaggcaggggtggcatagacaccaaggtcttcctccttatgccactgtagcaatatttggactggccccggccaccaagccttcgagctttgatgtcagggaagatctctctgatgatcttgcccaaagttggctgtgctgagtgggcggcaacaggcaagactctcacagtacttccgataggcatcataaacactttgctttggcagacaggtgtcagtgtgctcttccaggtggttgcggatccacctataggcatacatgtactcctcattgctcagtgtacttggctctgagcttttgtctccagtggtgggtcctgaggggagctgaaggtagagatacagcttgtcattgtcagaaaatttctgtacatcttgcaggatcccctctactttgttctgcacggccttggaaatggtacctcggagcctctgaagaagggtggtaggttccccagcctcagcaccacctgggggggcccttcccccagtcttggggctcttagcatcaggctcatcttctgccatcccggcatgagggcttctccgaaaattagaaattattccattacttcgccaggcccatatatgcccaaagagatctttgccatctccattctatctgccccacctttctgaagtctcctaaatctggaaaactcgtagccaccttcactccagcccagccccaaggtcctggcccagccggctcgtgcgttgctttattttcctttttctgaatggttgtaacagccgcgatctgcctagatacacg

SEQ ID NO: 439513 - DNA, 1263 bp, Homo Sapiens
  misc_feature (77)..(77): n is a, c, g, or t
  misc_feature (105)..(105): n is a, c, g, or t
  misc_feature (524)..(538): n is a, c, g, or t
  misc_feature (896)..(908): n is a, c, g, or t
acagacaaactgcaattttcgggctgtgctctctggccctgcatccgagaaagttggggagactttgttcttttggnataaaaagggtggatctcttttttcttnttttgcatccttctgacaagtgtcctgggccttggagacagaactaaagagatcattttgagataatccttgggggtatgggaaagaggtggaagggcaggatctcacggactgaaaaattgcagattgttcacacaacgcagtcacgtttcaaaaagtaccaagctgatgaaaataccatgattatctctactcaatgattgcaatacttgtaaaatgcttctataaatccgaatatgattatcatgtaattccataaaaattatacgtctgtctctaacagttgttctactaggctaaaactaaagcttcatagactgtttctagaacttaacaactccactgcacagatgtaaattttatacattttttttaactggtacaaagaatttaagtttttattactttctttttttggnnnnnnnnnnnnnnntagaaacagtgcttttttatcacctttttattaatgttattttttccctcccataatataaaagtcagcaatgatatcaataatttattatactggaagaaatataaaaagaatgcttgttgatggcctaactagtgggttttttttcctaaatagcgactggttaagaagctgaatactgccgggtggaatggtttaaagggtgggtttgcacagcttcattcaactcagatgcacaagtgctactagaagcacccccttaacaacatgacctttggcttgaactggcaatgagtaacttagaaccattgataaatgattgttggtgcagtgggtcgtttagattcatcagttacannnnnnnnnnnnnctttcagccaaaccccagttccaatcccctaagcccctcccaacctcccctttcacaaaataaaataatgcaggtgcagaaaaaaatgactactgtagtcacttacactcttcccaaacagctgataaccccagtagcttaatattcagcatatataattcatttacataatatagcactctggatatggccctaaaccagtttttattcattatctagcatctgtctagatcaaccacaaaaactcctacagccagcaaccaaactacggaaccttcagaaattaaagacccacaatattaaaatacacagaacaaaatatctgaggtataagataaaaaatgtaatttttttt

SEQ ID NO: 439514 - DNA, 1692 bp, Homo Sapiens
agtgagatgacttatacattttacattttgtacatttagatcaccatatgtatagatgttctaatgctgaatccttggtcttcagtatctcatagtgctggatgctcggaagtatgacaaaaacttgtaacacagactaaccacaaagtaccagatatttcttgccatttgtgatcttgcaataaaaatgcgccagatgaggatcacaaggatagtattaaaaccataacgtatattccgcaacttgttcagatgttttctggctgcagggaggccagacatttcttcattcaatacgtacttcttagttcccaagcagtagttctctatatcagttctgcccaatgtaactgccgtacatcaatattgaaggtctttttatcttcagggtttagttgattcattaacatattgacattctcagtattccaaacccaagaattacttgtgaaatattcaagaaacaccatagctttgtgaagacgagttattgttttcatcatccttgggcttcttccagtcatcctgaggtagatatcatacaggaatgctggggccttatggcttacagcaatccagtaatgatataaaagatgattggaggttagatttacattgggccgtctgaaggcctgttcgagaggattcctcttgaaagtggaaattacatggtactcaacttcaccccagtggaaaggattagtgctgcctggttgtacaattatacaccatgatgtttcttggtctattaactccggaataccaggctgccgcaagactcatgttgacaactacatctacaggaacaagatctgcaagggcattgttggaggcacgtattgttcgaagaattcctttccctgccgcaataaagagaccacttggtccattaaagttatcaatccatcctggaaaaggttctttccaactggcaccaacaatcgatggccttacaattgccacatttagttttgctccttcttgttgtacaacatattctgccaatgcttttgtgtatatgtatgtattaggtctgtctcctatcaattttggcgtgatatcatttactaggccatcatccatccactctaaagaatcaatcagcttcttgggatccacaggtggtggatagactacttcatcaatatgcttgcgattacagtaggcatatgctgttgatacatgcatgaacacttccagattcttcatttgttgtgcaaggagaataagctgtcgcgttgcaatcacatttaactgaacagcatctcttaaattttcattaaaccttactgtagctgcacagtggaatataatattggtagaatctatgatcacctctttatcttcttcactgagagccagtttaggttgggtgagttcgctgttgattgctataattttctctctaaaatctggattttcatctctcaatctgtcaaaaagcttgccactaaggacttcttccactcgctcttgtggtgtctgtccagctttctgcctcaccaaaacatatactgaattcaccttaggacaagacctcagcaacttttccagaagcaccttccctagaaaaccggtagctcctgtgaggaggacgttcttgccttcatagtattctgggattgaaaccattttgatcctagacgcagaggctcaggcctcgctctcccactggccgtccagcaatagctg

SEQ ID NO: 439515 - DNA, 645 bp, Homo Sapiens
  misc_feature (598)..(598): n is a, c, g, or t
acgtttttagaagacagctaccaagtatatatttcggggttgtagagttcaaataataaatctctagcttcataatgtttctaagcttctctcccttttaaaatttttggtattagggatggattgataactttaatggaccaagtggtctctttattgcggtaagtaaaccttttgatttatttaatattctatacatttttctgttttttgtatatctttaaatatatatacactatggcttatatcttaaggtgttgtttttaatttcaacaaaggcagggaaaggaattcttcgaacaatacgtgcctccaacaatgcccttgcagatcttgttcctgtagatgtagttgtcaacatgagtcttgcggcagcctgggtattccgggagttaataggtatatggaggtgacaatgtcgcttattaaatatatagtaactgaaaagggaagacatagcttttgagtaatgttaattaatccctctatccagatattgccataccaatatttaggctgtatcactgccaactccaagagttggtattatcacagacaatagcaagtgctcccatcagtagtaatgaagaattaatgntaatgctcatgtattacttacaggatagacaagttcacttaaaaatg

SEQ ID NO: 439516 - DNA, 1555 bp, Homo Sapiens
  misc_feature (5)..(5): n is a, c, g, or t
  misc_feature (13)..(13): n is a, c, g, or t
  misc_feature (22)..(22): n is a, c, g, or t
  misc_feature (43)..(43): n is a, c, g, or t
  misc_feature (45)..(45): n is a, c, g, or t
  misc_feature (63)..(63): n is a, c, g, or t
  misc_feature (65)..(65): n is a, c, g, or t
  misc_feature (100)..(100): n is a, c, g, or t
  misc_feature (126)..(126): n is a, c, g, or t
  misc_feature (128)..(128): n is a, c, g, or t
  misc_feature (133)..(133): n is a, c, g, or t
  misc_feature (151)..(151): n is a, c, g, or t
  misc_feature (156)..(156): n is a, c, g, or t
  misc_feature (158)..(158): n is a, c, g, or t
  misc_feature (176)..(176): n is a, c, g, or t
  misc_feature (185)..(185): n is a, c, g, or t
  misc_feature (190)..(192): n is a, c, g, or t
  misc_feature (194)..(532): n is a, c, g, or t
  misc_feature (534)..(534): n is a, c, g, or t
  misc_feature (582)..(582): n is a, c, g, or t
  misc_feature (615)..(615): n is a, c, g, or t
  misc_feature (1114)..(1291): n is a, c, g, or t
atagntatataanctatgacanagcacagaataaaaacatgtnanttgtataatacacatttntnagagatacatgaacacatttgataaaataaaaggnttatgtgaataatagcactttttttntnaaaanaaagtgcctctcaaaganttttntnttttgacagtcgcttaantcttcagtntctgnnntnnnnnnnnnnnnnnnnnnnnnnnnnnnnnnnnnnnnnnnnnnnnnnnnnnnnnnnnnnnnnnnnnnnnnnnnnnnnnnnnnnnnnnnnnnnnnnnnnnnnnnnnnnnnnnnnnnnnnnnnnnnnnnnnnnnnnnnnnnnnnnnnnnnnnnnnnnnnnnnnnnnnnnnnnnnnnnnnnnnnnnnnnnnnnnnnnnnnnnnnnnnnnnnnnnnnnnnnnnnnnnnnnnnnnnnnnnnnnnnnnnnnnnnnnnnnnnnnnnnnnnnnnnnnnnnnnnnnnnnnnnnnnnnnnnnnnnnnnnnnnnnnnnnnnnnnnnnnnnnnnnnnnnnnnnnnnnnnnnncnaaccaacttcagtatcttatggttctcacactttagcatgcataaganttcctgggagttcttgataaaacacagattgcngggtcccacctccagagtttctgatagagtaggtcaggggtgggccaattatttgcatttgtaccaaattccccaggtgatgctgatgttgctattctggaggactaatagcaatgattgcaattcttggagtactaatggcctaggtcttgctctttagggaataggaatatatattctgttattctattattgctctacaggtgttataaaccgacaagtgatccacaggaagtacattttgtagatctttagcgcaaggaatattttctatctttaattttttacatctccattttatgaaagcatctaataataatagctatcaaattagcactatacatgcattacttcatttactcctcagtacaacgttgagattcctattttaccctgaataggaactgagttattatccctgttttatagccaagtacataccagattgtaatctctactgccccccaatgttcagagttagtctcaaccttttaccagnnnnnnnnnnnnnnnnnnnnnnnnnnnnnnnnnnnnnnnnnnnnnnnnnnnnnnnnnnnnnnnnnnnnnnnnnnnnnnnnnnnnnnnnnnnnnnnnnnnnnnnnnnnnnnnnnnnnnnnnnnnnnnnnnnnnnnnnnnnnnnnnnnnnnnnnnnnnnnnnnnnnnnnnnnnnnnnnnntcaacagttctgaattgaagtaggggggcaaggatgggaaaaagtgggagaaggtgaggacattggggagaggataggggtcagcaggcatcttcagcactggtccctatctgaatatttctggacactagcctcgtgatagctaagaagcacttttattttcattttttccatttatggaagttatttttagtataggtcaagaaacaagcctggcgctttagcaatggcccattcccagttgctaattttagggctcagaac

SEQ ID NO: 439517 - DNA, 1771 bp, Homo Sapiens
  misc_feature (18)..(18): n is a, c, g, or t
  misc_feature (21)..(21): n is a, c, g, or t
  misc_feature (28)..(28): n is a, c, g, or t
  misc_feature (33)..(33): n is a, c, g, or t
  misc_feature (39)..(39): n is a, c, g, or t
  misc_feature (41)..(41): n is a, c, g, or t
  misc_feature (44)..(44): n is a, c, g, or t
  misc_feature (52)..(52): n is a, c, g, or t
  misc_feature (57)..(57): n is a, c, g, or t
  misc_feature (73)..(73): n is a, c, g, or t
  misc_feature (83)..(83): n is a, c, g, or t
  misc_feature (118)..(118): n is a, c, g, or t
  misc_feature (150)..(150): n is a, c, g, or t
  misc_feature (152)..(152): n is a, c, g, or t
  misc_feature (1016)..(1016): n is a, c, g, or t
  misc_feature (1219)..(1219): n is a, c, g, or t
  misc_feature (1237)..(1260): n is a, c, g, or t
  misc_feature (1704)..(1715): n is a, c, g, or t
  misc_feature (1742)..(1742): n is a, c, g, or t
gttcccctggggagggcncgntcctcanagctncggttntnaanttttgccntgccnccgagccaccataganaaagacttgnatggccctttggttttgtaagcccagcgaggcgcntaggttttgcagggcccctgcagggcgggcangntgcaacgcggccagcggcccgctcatgcaggccagcatgcaggcctcataggtctcaaagtggttgaggttacggtggcagtggccgaaggtgaaggtcaggcagttgttggcctgggcatcgaagtgccagcggggtttgttcttcgccacagtcttcactgtctgggggcttcaggcactcggccgccggggaaagccgtgccattggggctgctctctgaggtggctgcagcctgatgacccctgaccaccgacagcgggaaatcagccctcaggaccccagccacgttccggggccgtgcaggtgtagatcccagcatcctgcagctgggcgttatagatgaccagctgggcaatgttggtgaccaccacgttgccacgcacatggttgggccgcatgaccacattctcccgatcctccaactgcttctcccaggtgatctcaggccggggccggcccaccacatcacagaggaagctcactgtctcacccatggtgaccgactggtgcacagggttgttgagcagcgcaggggccgccatgtccagctcaggggtctctggggaggctgtggtggggtgcatggtggtctcaggtggtggggggctggtgttgggccaggtgaagtgatagcggcaggttacaacggccagtgtgatgcctttggagcaggcctcggcatccatgtagcagcggttatagtaggtgaggccgtccgaggcgcaggtaaagctgggctccttctcacagcggtctttgcacttacacacgggctggccatcccagatgtcacactcagagccctgctgcagacacatgaagtggtcacatgtggcctccttgggcatgcccactgggccntcttccctttcacgtccatgtagcgggccgccacgcagctcttggtcccacatacgttggggcagcacttctcataggtctcacactcctggtccgtctcacactcccgcctgcaggtgctctgtgcgtccacccagaggttgggattcatgtcgttggggcagatgccggcgtgggaatagcggatgggcggcagcgccagnttcgcgggggcaccccgnnnnnnnnnnnnnnnnnnnnnnnngctgccacctgctcccagcgagaccagaaccggcgacaccttggggcccacatggtgcaggctggggcggctagagacctcccctgaaacgatgccagggtctggggcccaccagggccttcttctcaggggctgcagacacctgccctccccaccccagcaggtttcctgctcaggctgctgctcaggctgctctgccgctgctgcctccaccaagtcagcacagcctgccgggctgtgcggcttcagataaaagaaaggtctttagaaggaagctccctctcctgagtgtgcagggagaggagccacagcaggggcccgcgcccggatttatatcctgggcgcgccacccgagtgggagccagctaacctgatgcctgtcacaggcaggctgctggcgcctctgtcccgtggctgatcacagacttattgcagaaggggggnnnnnnnnnnnngaagctggaagcagtttaggcagcgtntctggcacggtgggacacctgcttgtttt

SEQ ID NO: 439518 - DNA, 1351 bp, Homo Sapiens
  misc_feature (11)..(11): n is a, c, g, or t
  misc_feature (33)..(33): n is a, c, g, or t
  misc_feature (1097)..(1223): n is a, c, g, or t
tattaagtttncaggtgccattccccctcaacntgtataaatataacagttcttgattatctgcctatagactttttgctactccactttaattgcccttgtagtcctaccatgcaccttccatatgcaactaaaattatatcatacattccaaggtaaaactagaatgatgttttgatcatatgccaacagtactattaagttcttggtagtcaaggatgatgacatacatctgtattgtctagcacaatgtaaggaacattcagtaaatacttaactgactgaaatactgccatagtgttttggataatccagtggttaaggatataggctaaggagacataatgtataggttcaaatatcagctctgccactcagtatctgtgcaacctcaggcaagttgctcaacttttctgggcctcagttttctcatctgctggtggctttatgaaaggtggtggaattaaaggtacaataatgggcacactgccatgatcctttgaccctgcaggtgagtcactgagtccatttccagtgcaagccctgaatagcctgtgcttatattgtatggtgaaataacactgtcctcgggtaattttggttttggcaaagaattttctttgagaacagaaatgtgctgccggctctccccatctgtagggtagctcctgaattcaatatcctcaccatcttttaattcaaccttatcatagccataccagccaaggagttcattcatggtgttttctgcaaagttcttcatctcctcattgatctcccttttcactgggtgagccggcttcctgctccgtttattttcgggaggtctcccttctttctccatttctgccatgtttttgtgtctgttttctgttgagtatgaatatggctgctgccgccgccggcgttggtgttggcggcggcggcggcggtggaggtggtgctgatggtggcgaggctggcggagttagctgtgctggcggggccggaccgagccgcgagggggagggcaggcgccgagaagcggggtctcttttagcggcggaggacgtcagtggctgtcacgggtaaggatagtgcggagagtctcggggatnnnnnnnnnnnnnnnnnnnnnnnnnnnnnnnnnnnnnnnnnnnnnnnnnnnnnnnnnnnnnnnnnnnnnnnnnnnnnnnnnnnnnnnnnnnnnnnnnnnnnnnnnnnnnnnnnnnnnnnnnnnnnnnatcctcggggccccgtggagtcgtcagccatcttccgtcgctcggtccgtccgcatgggcgcggggagcaagggccggcgcggagagcggccccgggcgtgcgtgcgcggctgtgtgtgatcccggga

SEQ ID NO: 439519 - DNA, 1839 bp, Homo Sapiens
tcaggttttaattgtacatcagtgactgtgaaaaagcaattattcccataattaaaatacaaactataaaaaaacagactcaaagaaaagaaagatgacagagtgaaagaaggtacatttctttcgtgttcaaaccacggagttcacaacacagcagcacacacagctgggcgctttgtggtctcggcaccctcggcttccccttcacggggccgctttcgactagtagaaggctgggctagaacctggggtagagctgtggattcattttcctcagacagaagatcttgaaactttctcttcatgtcttcatcctgaagccacgggtgtcttaaggcttcttctgtcgtaaaacgtgcctttggatccactaccaacaacttcttgacaaggtccagagctttctctgagacttctgcccagacttcaggaatgaagttgtattttccactggtgatctgatccttcagtgacacttgagtcctatgctcagagaaaggtggatacccactaaggcagataaaaagaataactcctaaactccagcagtccacagcacggttatacccagcagtcccaacagaaacaagaacttcaggcgccaagtaggtgggggttccacataaggttctcatgagagaggtctctcccaaaatcttggagtgcccaaaatcagtaatctttataagacagtcctcttcttgagatgacagtaaaacattctctggctttaagtcacggtgtataataccgttttcatgaaggtactgcacagccaagagcatctggtaaaaatagagcttgcaggtagcttctttcaggcgtttattccccaccactttgtcaaacagctctcccccttccatcaattccaaaacaatataataatcttctgcatcaaaaaagtttttaatcttgatgatgcaaggatgatttagctttttcaaaatttctatttctgtttcaacattgagagctgggtctgcctctcttgctgaaccaatagcaaacttccttttgctgatgatctttatggctactttcttacatgttttcctctcgaaagccagctttacctctccacaggcaccacttccaagagtttttgacatgatgtattcatctcttaatgccttaggataaactgactgatcatctacagtcagatcaaaaaagacaaaaactttatttctgcttagtgacagtgcaatttcagaattgttattcaaaggacggcgttttcctttccctacaagctctgtatttacaaaggttccattgccactgtgatcttctatgtatgcaatgtaagagtttttaggacccacttccctgaaaatccgaaagtgtttcttgctgtatgttcggtatttatctgttcttttcagcagtggttcatcaaagcaatattcacagcttttgtccctcccaaaccagtagttgtcattcacacattcaagattggcaaatccatcctgaagggcccataatcgagcccagggggcaggggtaggctcctcaggttcttggtcctcaggttcttggtcctcaggaatagaatagagttcctgagtggacactgtctctaaggagctcagtgtcccagagctggagtgagaggactggctggagtttggcatcgtgctggtagaggagctggatatgccctgggactgtgaggaggagccttgggactgggtaacgctgccatggggctgtgaacaggcactgctgccatgagactgctgagcctcaacatccgactcccgagacatcacgaccgcgtgagcccacctggagccgcacactctccgcagcctcagccagcagagtggcccc

SEQ ID NO: 439520 - DNA, 1073 bp, Homo Sapiens
  misc_feature (641)..(1022): n is a, c, g, or t
ttgacacatggactgttgaacccaaccttttctgggtaatactaagagcatcaatacaatgataacatttattgagcacttaaaatgtgtaaggtgcctgtctgaatacattgtgtacattgcaggaagtgatgctgtgctctctctacagaccagaaccccctgggaagaagccagtgattacaaaagctgagagtgctcacagttgttgtgtgatcacagccagtcctgcctgaggaagcctaagtcctatgtctttgggtatatagatggcagtggagctggagcatttgaggacacacgggccatgctagggacttgggcttttcccctgagcagctgtgaagtgttagggtttggagaggagtagtgcaacctgacttacttgccaatcagatgctgatcagaccatactggttgctgcactgagactaactaaacacggtgagtgagctgtgctggagggacagagggcagattgtgagcacccagtgaagatgcagttgcaggggtccaggaggcagatggctgggggattctgcatctgttttcgaagatggaactgtcaggattagatgtggggtagagataaggggaggagacaaggaagacagccaagggttttgatctgagcaactgcnnnnnnnnnnnnnnnnnnnnnnnnnnnnnnnnnnnnnnnnnnnnnnnnnnnnnnnnnnnnnnnnnnnnnnnnnnnnnnnnnnnnnnnnnnnnnnnnnnnnnnnnnnnnnnnnnnnnnnnnnnnnnnnnnnnnnnnnnnnnnnnnnnnnnnnnnnnnnnnnnnnnnnnnnnnnnnnnnnnnnnnnnnnnnnnnnnnnnnnnnnnnnnnnnnnnnnnnnnnnnnnnnnnnnnnnnnnnnnnnnnnnnnnnnnnnnnnnnnnnnnnnnnnnnnnnnnnnnnnnnnnnnnnnnnnnnnnnnnnnnnnnnnnnnnnnnnnnnnnnnnnnnnnnnnnnnnnnnnnnnnnnnnnnnnnnnnnnnnnnnnnnnnnnnnnnnnnnnnnnnntggagcaaatcacgcactgcactccacccaggtgaaagagaaattggtttc

SEQ ID NO: 439521 - DNA, 2731 bp, Homo Sapiens
  misc_feature (1610)..(1647): n is a, c, g, or t
  misc_feature (2345)..(2345): n is a, c, g, or t
  misc_feature (2438)..(2438): n is a, c, g, or t
  misc_feature (2567)..(2567): n is a, c, g, or t
  misc_feature (2584)..(2584): n is a, c, g, or t
  misc_feature (2617)..(2617): n is a, c, g, or t
  misc_feature (2632)..(2632): n is a, c, g, or t
  misc_feature (2644)..(2644): n is a, c, g, or t
  misc_feature (2674)..(2674): n is a, c, g, or t
ggattccctggatcggaacatgaagaagcgcctcttgatgcccagtaggggtaaggcctggagccgcgggcgggcgctgcgccggccccgcccgtgatgcctgtgctgtgctgctctgtgtccccgcggcgggcggcccagggcccatgcttggggcagtccacgtgagccaggccacagcccagttccccacattcctcccgacatcactggtcccttggtgaagaccccccgagcccaggcatctggccctcggccccctggccccgcctcctgtcagtggactgtcctggcacgtgtggccctggcgcccctgcctgcgctgtctgccatcgcgctgtgactgcccgcatgctgccagcctcagctcgtggggccgcccgtgctgtgcctgcaatccttccgtgcgcctgccaggcgggacagtggggagggtggtcgggggtgtctgtgtgggccgtgggcaactgagcttgtacacatgggtgccttctgtcggaggactggctcaggtgctctgtgccggttgcttggagcaggggctgcgggaccccaggccccttggggaagagcagataggaccaagcctagcatgaggaggccaggtgtgtggggcccgggtgtgcaagtgctgggcctgccagtgtggatgtgcctggagccccttcgccaggcggctttcactgacggtgctggccagggcagcagggccggtttggcgacctggaggtggatatgggtagtggctgcccagcccagccaaccctgtccccttggggcattctctcgaggccgctgggtgtcctggcaggcacgtcctgtggggtcagcacgccggctgcagcgcagggtgggcctgagatcgggtgccgggccccccatctccacctgtctggacacgcacccctggcctgtccttgcagcttcctcccgacatcccttggcggtgtctgtgtctcggccccagccccagccctcctttcctggggcacctcccagccatctggtattggggctgcccccattgcctagtcctgggcccagggccagcccactctgggctggctttacttgtctgttcctaatggcagggcgtcccaggaacagccccataagagctggtagaaacaggagggagtccttgtcagcaggcatcttcgagctttttgttttgtttttgtaaaaagcggttaaccagcaagttacataaaagcttatttgttcccactgaattttccacacctcacacgtgagtcccagccatgcagtgcttgtgagggagcatcaccccttgccgcctggctgggcggggccctgggctcagaggggtcagccacagaggaagcgcctgtcctgacgtgtagcggccaggacctgggcgctggagaggggccagctgggtgaagacggctcccgggggcactggcgcacacgaggtggggtctctgtccagcctgggtaggcatgagctgagctcgagtgagggccctgtctgtccacagcacggtgcccctaccgctctcaccgcaccttttgcccgcgcgccccggctccgccgttcccacccgggccgcctggataacgttccttcgctttttagtccatgattnnnnnnnnnnnnnnnnnnnnnnnnnnnnnnnnnnnnnnttgcggtcattcttcgaggtcaaccaccactgccgtccagccagcccacgaccgacagcccgtggccgcccgcctcaatctctctcttatcgacttcacccgcgctcgacgtatgcgaatccgccgccccgagcccccgcgcaagccgccgggcctcaccacgcgcgcccgatcacccgccaccccccctctagcaccacgccctctcaacctggagacatcacgacgacaacgcgcccgaccacaccattcactccctcctcctctgccctctcctctctgtcccttctcccttccgaccctcgcggcatcccacacctcatattatacatcacaccagcgactagccctcaccccgcgccttccctcttcctcacttctgtcccaccatgttccacattgttcacccacccctcccccggcccgcccccttgccgactacaacatcactggcgaacgccgttgccgcccaacgcccctcccgcgcaacgctcacccttgcccggacacgcttacacccacgaacacgctggccattcacgtccgctccgctactagcgctctcttcactcctcctcgtccctcgtctcccctcgcgttcccgtctctgcttcgccgtcttatgccgctttcgcacacgcgctttatatccctatatatgctgactcctatcttttcacgcgatatatacgctcctncccgtcgctatctctatcgcctacacaccttctctctctgtctgcgccaatcttcctttctctccaatctcctatcccaccacaccctcatcncgtctccgcgctcttaccgcgcctcacaactcactttcctcacgcgccatgaatagcccgaccctcatccctgccctctgcacatcatcaccccgctcatcgtcctctatctcgaccacacacagcacnccatcgccatatgcagngcactagcagtcacgacacgcaggactcatctntatatcagataatangtgttggcgaantatggataccatctactctacatgtatgcntcgactctgtactcatactccctataccccaggcataatgtcgatgcgactacacat

SEQ ID NO: 439522 - DNA, 862 bp, Homo Sapiens
ccttcacagaagaacatgtcccagacacgcagcacagagctccagggcaaggttcgggagaaggcgcacatgaacccattctgtcatatagaggagcgggtcgatcttctgacggctgaggtgcttgtgggccaccggcgacaccttctgcaacagcgagaaaaggatctccccgtccagctggatcgcctccagtttctcgctgtagtagccgggcaggtacttctcacagatctgtaccaggcaccagaaggcttgctcagcaggcatatgcatgagcaagacagcggcaatgggcgcctgggcctggcagtagccctcctcgggccggtacagcgtgtaggccttcagcacacggaataggtcctgctggccgtggcccccccgggacacaaacatctcatggaatgggaactgccggtgcaggtcacgctcaatcacgtccagccacttggggtccccaggggacatgtccagctcgtcaaactttccagggttctgctgtaacttcaccttgcctcctgacaggtactgccaagcacggccccgcagagaaggcgggatgcccttttggcaccgcagacgaatgcgccctcggcgccctgcgagcccacgatgaagccgaacttgtcgatgcggcgctcggcgaagccgttggcctccgagtcagacccgagagagctgagttcgtcggtggttgcggcgtcggggccctgggccaggctctcccgggttcccgacaggcttccccggccgcgggcgcgcgcggcccattctctccgttgctcttcgccatcccagccgcgcccgccgcctgagctccagcggccacctcagccgccctgctgccgccgacatcccg

SEQ ID NO: 439523 - DNA, 2459 bp, Homo Sapiens
  misc_feature (406)..(467): n is a, c, g, or t
tcggcaaggctgcctgcatttgggtctagtcctgccgccctccatgcttgcgatttgtgtgttggtctccaccgtaaatgggaggactcatgtgatgtggttttccttcgtatacttacagttagcttatgttagtgttcttgtaatttgtcgatcctgtgacctagctcctgtttgccttttgtctcaattttccgtgctgctatcgctatttggtgtgcctgccaacgctctcttccccaagtatgacattcgctggacttccaaggtaaggggagtatacgtgctctcctgcagcgtgcagtggtctgtcctgccacgcccgtccttccttattattggcattgttctactcatttgcacgattgtgtcgtcttcttttgtgctttgggttgttgtttcctgnnnnnnnnnnnnnnnnnnnnnnnnnnnnnnnnnnnnnnnnnnnnnnnnnnnnnnnnnnnnnnatgtgtcttttttcttctatacaaggctgtttatttctgtacaaaaccatgtttctattttacacaaagaacaccccaccctttcccctcacaccagcaccctaaccctggggagcatcccccaggaggagggggctgaaggaggccccaccccccaggccctagcttctgcctgccctggctgggccagcctgagtgccactgtaaagaaaataaataaggaggctcaggcagaatctgtgttggaccaggcagaatctgtgttggaccagccagactccagcccagcccagtggccaggcagcttggccctcagagggtgggcaggatgtggaatgtcagttcatgaaccgtgtagttatatggagaccccgccctggaggccttagctgccagggttacaagtaggtgtcctcactctcttgggacgtcaagctctcctgggagcggtggtgggctgagacctggggagccaaatcctgaggggctgagtccttgggggctgagtccttcgggggcacatgctgtgggggacatgcatctcctgcagcggccaccaccatggcttgatttggggctgggggcttctccagctgccctctccccttcatctgtttccgctgctccttctgggcctgcttgggtggcttgggcttggctttggagccagggaggggggcatctaggggcaggcggatggatggtgaaggttgtagggcaggccggggaccaggttctgcatccaagatagccttggcaccatgcagcctgggcggggagcggcactgcagctcaccccgggtctcctgccagcgccgcagctgaatgaggtgttcgcgctcaatctggcgctctgtcacgggcaactccaccacctcctggaccagaaaggcctcctgcatgatcttggggctgaggctccgcagtcgctcgatggtctcgtactggccctggcaggctttgaccttctcaggggagcccagcgcgtgcttcagcagcaccagccccacccggaagatgatcttgaccccttcacagaagaacatgtcccagacacgcagcacagagctccagggcaaggttcgggagaaggcgcacatgaaccattctgtcatatagaggagcgggtcgatcttctgacggctgaggtgcttgtgggccaccggcgacaccttctgcaacagcgagaaaaggatctccccgtccagctggatcgcctccagtttctcgctgtagtagccgggcaggtacttctcacagatctgtaccaggcaccagaaggcttgctcagcaggcatatgcatgagcaagacagcggcaatgggcgcctgggcctggcagtagccctcctcgggccggtacagcgtgtaggccttcagcacacggaataggtcctgctggccgtggcccccccgggacacaaacatctcatggaatgggaactgccggtgcaggtcacgctcaatcacgtccagccacttggggtccccaggggacatgtccagctcgtcaaactttccagggttctgctgtaacttcaccttgcctcctgacaggtactgccaagcacggccccgcagagaaggcgggatgcccttttggcaccgcagacgaatctttttgtgcttcttggccatccatttgtcccagttgttgagcatgtccagccacttggactccctctgcctcagcacctccaggggtacttcctccagcgcgccctcggcgccctgcgagcccacgatgaagccgaacttgtcgatgcggcgctcggcgaagccgttggcctccgagtcagacccgagagagctgagttcgtcggtggttgcggcgtcggggccctgggccaggctctcccgggttcccgacaggctttccccggccgcgggcgcgcgcggcccattctctccgttgctcttcgccatcccagccgcgcccgccgcctgagctccagcggccacctcagccgccctgctatcccgggaattccgg

SEQ ID NO: 439524 - DNA, 1891 bp, Homo Sapiens
  misc_feature (28)..(28): n is a, c, g, or t
ctcgcatcagtttctgccgctccgctcncgcagggggcaggcctccttcccctggctccaggcccaacgcaggagctgggccatgtggaattctgctgcccgcaccctgcccgtcctctctgttctgagcccttgggcactttccctccagaggcagaaagctttcttgagccgcccgtggcggtggtgggcacaggccactgtttgccactcttgctcctggtgacgtgctgctgcctgctggtgcccacatgaaccaggacctatccagaagctgttgctctgcgtgaaggatggccattctttctgccaggcggttttctcgatgctgaaacatcttctgcctccagagagaaaatacttgctttctcctaatgtctccctgtggaaacgtgttgcttcttgcactgaggacattttcctggtggcgccatcgccagagtctgttccatgtgtggaaggcagcaggcagggctctctgctggaaatgaccatccgctctggcctgtagcagctgcttgtaccgcctcttctgagtatactgtagccacaattcgatacatttgcacagcagtgctattctgtagtggtcccaggcagcatgcagtaaggggagcagctctctttcctttttctgctcaatctgagaccgccagaggttccagaacctgtgcagcagcagctggctgtgcctgtggtgctcttctgccatctcaaactgggcagcttcttctgcacacagcagcatgtagtgtttccagtgagtaaaggcgcgccgcagggccatcttcctggccagtttctccacctgggcatggtgagcgtacaagctctccctccgctcccaggcctgctgccagtcacagaagtgtatctggagcacagtgacatgatggaatcgctcagccatctcattctgctgtctcttcactctgcggacttgcaggtattcaagccaggcctttagaaatctccgtttttgccagtgctgatgatgtttcactgcagagacaaccttttgtttctccttctggacatacaggagctgttcccgccactgtgaccaagcctgcacctggaggctcagggccctgtgcttcaaagcagaggcatggagggcacggctcacacggacctgtcctagtcgctgcctccacgtgctccaccacacccgtaagataatccgttgcctaaactccagagctgtagtctgcatctgaagtttggtcctacgaacaaccacgtagatcaaccaggacttccaggcctgtcgcatcttttgctttgcatcatgaacctcggctctaatgtacttgttcctcatctcctgctgtgacgcacataggtcttccacgtctggaacatcaggttgtacaggtaatacctgtagtgacagtcagctcgaacacagagtttccactcgtgctggaaaacccaccactcctctttccattcttcgaagaccttccgtagtaatcgctgctcatagtaaaatctgatgcgcagttctcttaaccggcctgtcgggtacaagtatgtgtgccacgatactgcactagatgactggtactaggtaactccctccggatcccaaaggatgcagaagacttcttgttggacagtgtctttgcagaataaggtttcttaactgcaccatccttaaaatacctggaatcaaccttcttctccattctctgcttaatcactttttgatggaaattgtagcttgatatacacttctcagtgagcagattcttcatgaatcaaagtcttttatcttccccttctaactggggaagccgagccatcgggcctgacgttgggagaaaacccggcggtatacggcgatccgggacctgcttcttaactcccgcgcggtccacgcccgcct

SEQ ID NO: 439525 - DNA, 1122 bp, Homo Sapiens
  misc_feature (5)..(5): n is a, c, g, or t
  misc_feature (7)..(7): n is a, c, g, or t
  misc_feature (16)..(16): n is a, c, g, or t
  misc_feature (21)..(21): n is a, c, g, or t
  misc_feature (23)..(23): n is a, c, g, or t
  misc_feature (25)..(25): n is a, c, g, or t
  misc_feature (27)..(27): n is a, c, g, or t
  misc_feature (30)..(30): n is a, c, g, or t
  misc_feature (37)..(37): n is a, c, g, or t
  misc_feature (50)..(50): n is a, c, g, or t
  misc_feature (52)..(52): n is a, c, g, or t
  misc_feature (63)..(63): n is a, c, g, or t
  misc_feature (73)..(73): n is a, c, g, or t
  misc_feature (75)..(75): n is a, c, g, or t
  misc_feature (77)..(77): n is a, c, g, or t
  misc_feature (98)..(98): n is a, c, g, or t
  misc_feature (115)..(115): n is a, c, g, or t
  misc_feature (119)..(119): n is a, c, g, or t
  misc_feature (121)..(121): n is a, c, g, or t
  misc_feature (136)..(136): n is a, c, g, or t
  misc_feature (160)..(160): n is a, c, g, or t
  misc_feature (220)..(220): n is a, c, g, or t
acgcntnttcccccanatagntnantnagngagtgcncccgatgcgggcngngggagcccacnggacccatgntnantgaagcacatacatggtgcgnccctgcatgcagcttgnaacntntcatccacagctcgntggaaatcagctggggacatccanttgcccagctgcccacgggccccaccaggcgggagtggtaccgtgtcccgctgagaaggngttacaatcaccgtcttgctctctactcgtgccacatcctttgggtctgtgcgggccagccagcagttattgtacttggggagctttcggatgaggccctgctgctccagcagggtcagtgtggcagtattctcagcctcagttccatcacagatgtggatgccctctggttggcacaggcgggcactgtgctctacaaaatctcgaatgccagtgggaagctggcccagatctccactaagcactcgcagggtctggatgctacggcatgatggccagcccaagggctcagcccatgccatttaagcctggctcagcagagaggagcgaggagagagaggaagttctgagagttgcagatagagatcgcgcgttaagaggcgagcgaggcagagaaggggaggtgcaggcggaaacgaggagcaccggccggctgccctcccaagagacgcgcggcgcgggaggctggacccacagcagtcgcccctgcccgcctccgcctaggatgggaaacctggcggaggctgagagcaggagagcgccactggcagccccgagggggcgagcgcagcggaaggtgcgggtgggccccgggccgggggtcactcaccgcaggccagggcggtacaatgcggccatggcacctgggcaggggctgcggggtggccaggaaccgagcggagccggggaggtatggaaggcggggaaggagggagcgcggcgaagcgagccaacagcagagggtggcgggaggcgcttaaaaaggaggggggcaggcgcgggggcggaacctggtagggctggcactagctttcctccgcccgcgctggcaggccagctccctcggccccggggctccaggctccaggtcagcccagccgccgccccaacccctgccatcc

SEQ ID NO: 439526 - DNA, 2559 bp, Homo Sapiens
  misc_feature (62)..(70): n is a, c, g, or t
  misc_feature (73)..(110): n is a, c, g, or t
  misc_feature (1375)..(1375): n is a, c, g, or t
  misc_feature (1554)..(1554): n is a, c, g, or t
tttattgtggggagattttttgtgttttccaaaagaaaacccgcctttccgaggggttgttnnnnnnnnngcnnnnnnnnnnnnnnnnnnnnnnnnnnnnnnnnnnnnnnaaaattccccagaccgccccttaggttccctgggccccccaggggtttttcccctgaggggaaaacccaggtttttgtgggcccacggtttcccgcttttcccctaaaggggggccccggcgcgccccaaaatgagaaagggttttaaaaaaaagttttttggaggggccgaaggcggcccgacaagggaacttttccgaaggatgcacagtgtcgttttaaaatagataagcatctcttattattggacagtctttgtgggaaggtctatggcacattgaagatgttagttaatatcaaattgctcatattttctgcaaggtgccttccctattcccagatgagggtgctatgtcctcttgctagactagggcctcaggtcacattttgtgcacacgtctctccagggcctcaagctcagccaacacctctttgggcagatcctggttgacctgctctgtcaggtagctccgaatgtcacgaacctcctgttcccagaagtccttggggagggagaacagctgagtggtgtctatagctctgaggccgctgagatccaaggctccttcctttggcaccagcccaatgggtgtctctcgggcactgtcctccccctctaaccgccggcagatccagtctagcacccgagcattctccccaaagcctggccacaggaagtgccctgcctcgtcacgccggaaccagttgacatggaagatacggggcagctgggcccccttgcgcccttccatgctcagccagtgttccaggtagtgccccgaagttgtagccaaaaaagggccgcatggcaaatgggtcgtgcatgatgatcttccctttgtgttctgctgcagcagtggactcagagcgcatggtcgctgcccacaatactccccatgacgccagttgaaggcctcttataccaggggtaccctttgggtctgcggccaccaaagatgatggcgtcaatggggacacctctggggcctcccaggctgggtccatgatggggcactggcgagccggggcacaaaatcgagagttggggatgtgcacaagggcttccttgtcaccaggtttcccagggtttgcccagccaggaggtcacagtaacaccaggtggaagaggctggtcaatgccctcccagtacacgccaccatcactggtctcagccacattggtaaaaatagtgttactctggattgtagcccatggcgtttgggattggtggtggcagaggtaccaggggcaaccccaaagaagnccgttctcagggttgatggcccggagtcgaccttcactgtcaaacctcatccaagcaatatcatcccccaccacactccactttccagcctggcagtgcaggccgcatcatagccaggttggtcttgccacaggcactagggaaggcggctgccacatagcggttcttccttgcagggnctggtgatgcccaggatcagcatgtgctttgccagccagccctcatcccgggccagccgagagggcgatgcgtagggcaaagcacttcttgcccagcagggagttgccaccatagccgctgccgaaggagatgatctcccgctggttcgggcacgtggccaatcagggttttctctgggttgcacggccactggctcactggctccccttgtcctgtcaggggctggcccacggagtgcagacacttgacaaagtcaccatctcccagggcctgaagcacaggtgtccccagtcgggtcataatacgcatgcttgccaccacataggctgagtcagtgagctgcaccccgatgcgggacagcggggagcccacaggacccatgctgaatggaagcacatacatggtgcggccctgcatgcagcctggaaacctctcatccacagctcgctggaaatcagctggggacatccagttgcccagctgcccacgggccccaccaggcgggagtggtaccgtgtcccgctgagaaggagttacaatcaccgtcttgctctctactcgtgccacatccttggggtctgtgcgggccagccagcagttattgtacttggggagctttcggatgaggccctgctgctccagcagggtcagtgtggcagtattctcagcctcagttccatcacagatgtggatgccctctggttggcacaggcgggcactgtgctctacaaaatctcgaatgccagtgggaagctggcccagatctccactaagcactcgcagggtctggatgctacggcatgatggccagcccaaggggctcagcccatgccagttaagccgcaggccagggcggtacaatgcggccatggcacctgggcaggggctgcggggtggccaggaaccgagcggagccggggaggtatggaaggcggggaaggagggagcgcggcgaagcgagccacagcagaggctggcgggaggcgcttaaaaaggagggggca

SEQ ID NO: 439527 - DNA, 748 bp, Homo Sapiens
cctagctagtacgaggctgggtgttgtattcggcacgagggtcctgtgggctccccgctgtcccgcatcggggtgcagctcactgactcagcctatgtggtggcaagcatgcgtattatgacccgactggggacacctgtgcttcaggccctgggagatggtgactttgtcaagtgtctgcactccgtgggccagcccctgacaggacaaggggagccagtgagccagtggccgtgcaacccagagaaaaccctgattggccacgtgcccgaccagcgggagatcatctccttcggcagcggctatggtggcaactccctgctgggcaagaagtgctttgccctacgcatcgcctctcggctggcccgggatgagggctggctggcagagcacatgctgatcctgggcatcaccagccctgcagggaagaagcgctatgtggcagccgccttccctagtgcctgtggcaagaccaacctggctatgatgcggcctgcactgccaggctggaaagtggagtgtgtgggggatgatattgcttggatgaggtttgacagtgaaggtcgactccgggccatcaaccctgagaacggcttctttggggttgcccctggtacctctggcaccaccaatcccaacgccatggctacaatccagagtaacactatttttaccaatgtggctgagacagtgatgtggcgtgtacatggaggcatggacagcttttcactgggttctgggaccccgg

SEQ ID NO: 439528 - DNA, 1362 bp, Homo Sapiens
  misc_feature (73)..(85): n is a, c, g, or t
  misc_feature (351)..(442): n is a, c, g, or t
  misc_feature (886)..(1186): n is a, c, g, or t
  misc_feature (1193)..(1201): n is a, c, g, or t
tttttttatcctcttgacagagtctttttgcagagcaaaagttttatgttttgatgaagtccattttatcagnnnnnnnnnnnnnatggatcatgtttttgatgtcaactctaagtcccaagattttgtcctattttttcctaaaagttttaaagtgaatattaggtgatgtaaaaaattttgtgttagtttttttaactataatggtagtgtgtgtttttagagatgccttttagaaataacattgaaatatttacagatgaaataatgtggtgtttaagatttgcatcaaaataatataatacaggaggggatgaaatagagtatagaagaagcaagatttgctgtgannnnnnnnnnnnnnnnnnnnnnnnnnnnnnnnnnnnnnnnnnnnnnnnnnnnnnnnnnnnnnnnnnnnnnnnnnnnnnnnnnnnnnnnnnnngcttaagaaaattatctgttaaaccattcattggtgttaacttgagattaagtgagttgtagagaaagatgtctctttcagcctccgtggttagcttggcctgcaactgtcctccagcattcatctatgactattgttctgttcacctgtctccatagtggatgcttggagatttgtgcttttgtttgtgaaacatatttcaatgattttgtgtcactggataaaacagtgattcttcagatttgagaagagggagtgaagggtggcacatgtagttggaaaaagcatattcagtatgatagttttatgtttgaaaataagaagggtttattgatagttgtagtataatctgcaaagacaatatcttggctgggaatctgtaccaaggtaataattctaagtggaaggtctacctccccacaagcttttgtgttataattatcnnnnnnnnnnnnnnnnnnnnnnnnnnnnnnnnnnnnnnnnnnnnnnnnnnnnnnnnnnnnnnnnnnnnnnnnnnnnnnnnnnnnnnnnnnnnnnnnnnnnnnnnnnnnnnnnnnnnnnnnnnnnnnnnnnnnnnnnnnnnnnnnnnnnnnnnnnnnnnnnnnnnnnnnnnnnnnnnnnnnnnnnnnnnnnnnnnnnnnnnnnnnnnnnnnnnnnnnnnnnnnnnnnnnnnnnnnnnnnnnnnnnnnnnnnnnnnnnnnnnnnnnnnnnnnnnnnnnnnnnnnnnnnnnnnnnnnnnnnnnnttttttnnnnnnnnnttttcagtataaacaaaactttcaccagccctgcttttctttccttaagaaaagcttcccaaaagaactgtctacatgccccacaacaaatcacaatcactgttaactggtatccgactctactcccgctatccaccaacacgcagcagccagagtcagct

SEQ ID NO: 439529 - DNA, 1611 bp, Homo Sapiens
  misc_feature (45)..(114): n is a, c, g, or t
  misc_feature (126)..(126): n is a, c, g, or t
  misc_feature (165)..(165): n is a, c, g, or t
  misc_feature (298)..(318): n is a, c, g, or t
  misc_feature (324)..(324): n is a, c, g, or t
  misc_feature (335)..(335): n is a, c, g, or t
  misc_feature (337)..(337): n is a, c, g, or t
  misc_feature (353)..(353): n is a, c, g, or t
  misc_feature (358)..(358): n is a, c, g, or t
  misc_feature (366)..(366): n is a, c, g, or t
  misc_feature (369)..(369): n is a, c, g, or t
  misc_feature (373)..(374): n is a, c, g, or t
  misc_feature (382)..(384): n is a, c, g, or t
  misc_feature (386)..(395): n is a, c, g, or t
  misc_feature (402)..(402): n is a, c, g, or t
  misc_feature (405)..(405): n is a, c, g, or t
  misc_feature (409)..(409): n is a, c, g, or t
  misc_feature (415)..(415): n is a, c, g, or t
  misc_feature (417)..(417): n is a, c, g, or t
  misc_feature (463)..(463): n is a, c, g, or t
  misc_feature (1452)..(1548): n is a, c, g, or t
  misc_feature (1568)..(1568): n is a, c, g, or t
aaaaatgtttatttagaaatagaatgcttgttccccagggccacnnnnnnnnnnnnnnnnnnnnnnnnnnnnnnnnnnnnnnnnnnnnnnnnnnnnnnnnnnnnnnnnnnnnnntttatggcagtnggaacaatggcgagagcaccccggaacaatggagcgaanaatttttatcccttacccagtttgtccctgctactgtgtcctgtctccattggctggagccagacctcacaatctaaactaaaacccgattggctaacagtttaaaacttttttaaacaggtaaaggcaatannnnnnnnnnnnnnnnnnnnngaagtngcttacgaaangncttagaaaagtaatancattnccaaatanggnatanncattcccnnntnnnnnnnnnnggtgggnggngggngggggnangcctgtgtgcacgtctagcacagatatcttggttaaagtacgaggncatagaatgtactacgtgtctgtgagcatgtctagcataaagttagtctttaaaagaaactgttaattctaacacttatgatttattctttaacaagaagggaagctttgaagaggaactttttattttctacgatatacccacatcaataccatatgaaatgttttatttaagcatatctaattaagaagtatgttgtacattacacctatttttgaaagacgaaatatgaacaatagtaagaaaactaatatgactgattattgttccttgtgactactaacacatctgctaacacaatttgattggttgataagaatctttctgagaaaatttttccaacatttaaaaaataaaaatgaaaatttggttggtagtcagcaatttctttctgggaaatttattgtctatgtttaaaaattataaactgaaatttttagctttgtcttatgtaaaattaaatatttttatttacttataaatttaatatttatagtatttttacctaacaattattaagtaatgtttacatacttgtcaggattcttcaggaaatggagggtacactcttctaggatttagaagagaatctcataaagggcctatttccagcggtgtaggctgggctaaaggaaccaacaggggatgttgagggacccagcggccagccagagtggcctgagacggcaagagcgggaaagcactggagctggcatcttcctgggactcagtccttgacaggcagggagggcgtggaggtagaaataatctggcaactccctctttttgctccctgggcttcacctgcttagcttctcaaatagctgagaccacaggtgcatgccaccacatttggggcaatgttttgtatttatggagagacagggttgaccatgttgccagcctcctctgaactccgaactcaagcggtcacccgtgttggccctccgaagattaggataccggcatgagccatacgctagccctcnnnnnnnnnnnnnnnnnnnnnnnnnnnnnnnnnnnnnnnnnnnnnnnnnnnnnnnnnnnnnnnnnnnnnnnnnnnnnnnnnnnnnnnnnnnnnnnnnatattagtatttttccgggnatttaacagattcagactcttgggacttcggatttaaacacat

SEQ ID NO: 439530 - DNA, 1030 bp, Homo Sapiens
  misc_feature (16)..(16): n is a, c, g, or t
  misc_feature (20)..(20): n is a, c, g, or t
  misc_feature (26)..(26): n is a, c, g, or t
  misc_feature (35)..(37): n is a, c, g, or t
  misc_feature (50)..(50): n is a, c, g, or t
  misc_feature (63)..(63): n is a, c, g, or t
  misc_feature (81)..(81): n is a, c, g, or t
  misc_feature (96)..(96): n is a, c, g, or t
  misc_feature (107)..(107): n is a, c, g, or t
  misc_feature (114)..(114): n is a, c, g, or t
  misc_feature (123)..(123): n is a, c, g, or t
  misc_feature (126)..(126): n is a, c, g, or t
  misc_feature (131)..(131): n is a, c, g, or t
  misc_feature (133)..(133): n is a, c, g, or t
  misc_feature (135)..(135): n is a, c, g, or t
  misc_feature (137)..(137): n is a, c, g, or t
  misc_feature (139)..(139): n is a, c, g, or t
  misc_feature (142)..(142): n is a, c, g, or t
  misc_feature (175)..(175): n is a, c, g, or t
  misc_feature (189)..(189): n is a, c, g, or t
  misc_feature (191)..(191): n is a, c, g, or t
  misc_feature (194)..(195): n is a, c, g, or t
  misc_feature (200)..(200): n is a, c, g, or t
  misc_feature (202)..(202): n is a, c, g, or t
  misc_feature (210)..(210): n is a, c, g, or t
  misc_feature (221)..(221): n is a, c, g, or t
  misc_feature (226)..(227): n is a, c, g, or t
  misc_feature (238)..(238): n is a, c, g, or t
  misc_feature (283)..(284): n is a, c, g, or t
  misc_feature (288)..(288): n is a, c, g, or t
  misc_feature (329)..(329): n is a, c, g, or t
  misc_feature (364)..(364): n is a, c, g, or t
  misc_feature (426)..(426): n is a, c, g, or t
  misc_feature (428)..(428): n is a, c, g, or t
  misc_feature (456)..(456): n is a, c, g, or t
  misc_feature (462)..(463): n is a, c, g, or t
  misc_feature (468)..(478): n is a, c, g, or t
  misc_feature (480)..(480): n is a, c, g, or t
  misc_feature (482)..(483): n is a, c, g, or t
  misc_feature (485)..(485): n is a, c, g, or t
  misc_feature (947)..(947): n is a, c, g, or t
  misc_feature (956)..(956): n is a, c, g, or t
  misc_feature (964)..(964): n is a, c, g, or t
  misc_feature (981)..(981): n is a, c, g, or t
attgcttatttttttntctnaagctnatttttacnnnttagctataaagncatttgaattttngccggctcatgagcgcancatataaattaaatnattttgcgaanattcttntttgcaatnctnatatntnanananggnatgaagaataagcattaaatgtataaaaaatantgtttgtataaagnantgnnaaagnanattgctanagcatatgcantgtgnnatttataaccntgacatcacctcccaaggctctcaaggaagatttattttaaatannttanatagaagtcctagatgatattgtttaggaatttaagagggnggtggatatggtcctgtgaatagcacttcccctgnagccagctcatggtctgttcattttggtttataaaatgagcttgtattttgcagaagcccancnaaaaaaaatgtgatataatgtgttgttngtatannttacnnnnnnnnnnnanannanacaaaagtctataagactactagtaaaaaatgttcaatcaatgccgtcacaaaagacagtacaaaaaccaaagtgcccaaatagaaggagcagcgaacttgcccaaaacagaaaagctctaaatagaactttagtatatacaaaaaccactcggtagagttttagaagtttcttccatgtaagtgaagcatcttgagtcactcaggacttggctgtcctcgcacccgtggcaggctggggacggcacgaacctccaactgtttcccctagtccccggggcatcggaggctgggttcccacatgggagaggaatgaagactcactcaaagggaagggtcagtttaagataagttttcagtgaactccttcttccacccgggaaggtgtctttcagcctcttcacagtctcaagacaattgactgaagccacaggcatttgctaaacttcatggggccagcttntggggcggnctcttttnaggttttgaggaccatnggcagcaagagccctgcaagcgttgcagttgacccctgcgttttgggtt

SEQ ID NO: 439531 - DNA, 2215 bp, Homo Sapiens
  misc_feature (23)..(23): n is a, c, g, or t
  misc_feature (240)..(240): n is a, c, g, or t
  misc_feature (479)..(498): n is a, c, g, or t
  misc_feature (528)..(536): n is a, c, g, or t
taacaaaaccccgtggcctcaantccaaatgtcctgaaaaactgtgaaagaggcctgaaaagaacaccctccccgggtggaaagaaaggaagttccacctgaaaaacttatcctaaaactggaccccttcccctttgaagtgaagtccttccattccctctccccatgtgggaaccccagccctccgatgcccccggggactaggggaaacagttggaggttccgtgcccgtcccccagncctgcccacgggtgccgaggacagcccaagtccctgagtgactcaagatgcttcacttacatggaagaaacttctaaaactctaccgagtggtttttgtatatactaaagttctatttagagcttttctgttttgggcaagttcgctgctccttctatttgggcactttggtttttgtactgtcttttgtgacggcattgattgaacattttttactagtagtcttatgacttttgtannnnnnnnnnnnnnnnnnnngtaatttataccaacaacacttttatcacnnnnnnnnngttgggcttctgcaaaatacaagctcatttttaaaccaaatgaacagaccatgagctggcttcaggggaagtgctattcacaggaccatatccaccaccctcttaaattcctaaacaatatcatctaggacttctatttaagttatttaaaataaatcttccttgagagccttgggaggtgatgtcagggttataaatggcacagtgcatttgctgtaggaatgtggtttggcattgttttatacacacagtattttttataccttaatgcttattcttgatggcatctgtcagatattagaattgaaaataagaatcttcccaaaatcctttaatttacctgatgccctcatcaggtcgttaaaaattcaaatggttttaatagctaaaaaactacaaattaagctctaaaacaaacaaactacagaaatgtaaaccttcatttgccaaaggtccttggtggcctgtcccctgccctgggagcagatggccctgaagcccttccctcactgtgcaggccaccgggtgaggctggacggtcacccatggtggcttcactgcaaggagcaggactgccgagctcaagcacggggccttcagcttcccctgtcctctggccacaccgccagcccttggtccttatctgtgtgaggtttacaaataaagcttctgatgtcaaatgtttaaatcgtgccctcagtggacgaggccatgtcctgatgcagaaggctgagcccaggctctctgtggcgccgctgagagcagagggctgtcttggggtcttcgagctctggagccaaggatggcctggtcctacttctctgcccccaccaatgggggacttgaatgtggccagagaatacagtcagtcagggccagccagggtgtctgtcagggtgggcacagggtcctctccaaacctgcttctccctccctggtcaggccttcatccccaccacccgcacctgtaccctggacgctggctcagaggcctacaggtgtgtggacacctgggcagtcactgtgtcctactgtgcccctcctctgcaggcccagcttggtgtctgagcctcttacaagccagttactgccagggctgcaccaggccttgcggaggacagtgcctggcgggagggatggagggcgtcaaaagtcactctagagcccaggggcccgaccaatggtcacagacagggatgacaggctgcagagggatgggctggagaagagaaggagccagccatggcgcagttcttgttcttagcatgatgaagggccacagattggtgtgcagcagggtgacgaggggcagacatacctctagtggtcatcaggcagcctgtggcagtggatggggtgaggcagagatgcagatgaggcgccacccagcatccagggagacaaagggctcaggcctgcagcttcagcatcagtgattgatgagaaaaggaagggcagaggtacagcctgcaagttgctgacaggttcaagatttggggcaacaaaaatgagaaaaccaagaacaaggcctaagttagggcttagtgtgaagaactagaagtggggggtggcctgagggcaacagggagcccaagaggcaagtgtcaggcaaggagagtccatgacatgagaacactgaccactggcctgggctgaagacgaagaaaaagccagccagg

SEQ ID NO: 439532 - DNA, 2195 bp, Homo Sapiens
  misc_feature (37)..(37): n is a, c, g, or t
  misc_feature (41)..(41): n is a, c, g, or t
  misc_feature (45)..(45): n is a, c, g, or t
ggcgtaatttagtattttagtatgggagaaatggcanaaantggnggccagggcaaagggaggcaacagcaggagggactgatggcattcatcatggatttgaaaggtcaggctttgagaaaattaagccctaacattagcccagggcacccctcatatgtcttgaggtggcttcttccctggacatcaagaatggtgctagttgtgtaccctccttgggagaggtaaggaattagtcacaccactcatttctgtgcttggtattcagatgagggggctggtggagaaaggcttgagtgacagagtcaggtgtgcaagggtggggtgaccggagcgggaggtgcttaggaggggctgctcaggtttgctgtgaagagtggggaggtgagaccctctaggtaacagcagacacactacagttacagtgacttctatgagcttacagcatgggctattgtgcagaattgattccaacaagcctctcttcttggtcgtttctaagctcctctcatatgggcctcgaattcagattggtagcgtaaactacgtaaatgcatgccagaacatctctgttctcgttgttggaatggaaacaaaatgagggtgcccccaaggcacttcagacacctagacctccacctctaggacctgctggggttggccactcttcccatgaagagcaggcagctggtgcgatgctcgtagatgaggaaaagaaaggggcggtcgacagtgaagcggacttgggtggacagcggcatgaaccccaccgtggtcacagtggtggcttgggtgccttcctcgttcactgtgatcgtgccttggtgcttgaacaggtcgatggcgatcctttggtctgagatgcctgccatgttgccatttttgtcaaacagcatcctgatccccatcaacttcagggactccactagattgtagttcttctccagcttgaatttcggcagaagcacttctcgagttctgtttgtcatgcttttttgccatctctccaccacccggggtgtcagttgcgcttcgagggtcttcatcccagacatcttgtgtgggaccacaattagcatgctgatgccccccacgtattccagctggaggatgtcgcagtccagctcctggtcatttgctgcgaggaagttccccttggtctgcatcatggaaaccttaactacctctctctcattcagccggaagttgtggttgtgtgtcatttccactgggaatttattcacccaggatcctttgaagtagatgcagttgagaatcatcatctgggtagcagggtctatattctccagagcatcttttatgaggcccttggtgagcttcatgatgtggttgttggtttttgatatgaaggcagggtctgagaagtcagctatctgggcctcagcaaagtaatactctcttactttagttttgaagtcaagcaggattggaaactgcttctggatataaaggtcattgactgaccgcagtgtgtacccaaaattcctcctgaagaggcgatgagtcagcttacggaagagattatgaatggtcgtgatttcatacttgctgctggcattaacaaagtctttaaaatgcaaaatcgagtgcacttgttcatgggtctctcccttcagacctaaggaaatcatacccatcgcagtagaaatgccaacgggtgctatgaagatgttatcgaaagtgttgacctggtctttcagcactcggtagaggttgaaagcgaacttggcgttgaggatgttaagacgctggatccggctcttgccatgaaaaagctggaggatgttcccagcactcacatcagagtctgtcggggaaactgacagactgtcgacgatgtcgatgtagtcgtcgtcttcactgaatatcttctccaggtccagatagtcgtcgtcctcctccccctctggaatccagtcgttggtgacggtgttttccttgtggaagtcggcagggagaagaggcatgctcaggtttttgttatttaactgctcccactggggatctgcagactgagcagtttcccctcctttctctagctgatccagcgggcctttgctcccaccccacgcagatgttatgatgaggaaaatgagaagtgcgtttaatgagtgtttcattttggcggagctaaagctctgtgtttctgagaagtggcgcttcagagatccgct

SEQ ID NO: 439533 - DNA, 1898 bp, Homo Sapiens
ccggtcgaaagctatttattgaacacttactagtgcaccagctctctcactaccatctcatgtaattctcatgtaacaaccattaagaccaatgttagcattttcatttctgaggtgtgaaatcggcagctgggcaggagttgagtaattagcctgagctttacatgctacttcttcattcctttgcagggcacccagcctctgacgatgtgggtattatccctgtggggtctcaggagttgaggaacttgcccaaggtcacaaagctggcatgcagcaatgctgggacaggatcccagtttgtcccctgtccccaggcctgtgtgctgccccttcctgcctcccaggagacactggcttggatttgggccttccctgctcctgtgcccttcccctccaccaagccacttcctgagtagctggtgcagtcctgccctgcccaacactgctggacctccaggagtgatggaacagtcccacccatcccccccaccaggggccccctcggcccatcctcgctgcttcccggggcaccttcctcagcgcctgctctgcctcccggttctccatgaccaggttgtaaaactgtgactgcagctgcaggatctcctgctggatcttggccaccctggcctgtgatgcccggaaatcgggcttctgctgcttctcagcctcctgcttagtgcgaacgaggctgttctctgagcacttgagcacctggtgcaggtggtttttcagtttttggatcacaaggttctccttttccacctctgcattcttgttcttcattctctccgccaattccttttcaagagtatccaatgatttgttggttattactattctgtctactgatatcctggtaagaactgggccttatccctcgcttccatgggactagtgagtagtttttcaaacaggaaaccccggagctctatcaggctgtcaataaaattctgggcttctgcacttctaccctgtgtctgcatctgcaggagcctagcagcctgggggttgctgagcaagagtctaaggacgttcttggtggagtctttgatctgctgcataagtggtgagaggctggatttctgcagctctatggaaaggaggcggtctctgagccacccttcctcctcagcctctttctgctcctgcaattgcctttctttctctttcaggcacctgacgttttcaaggaggacctggcagagatcctcatgctctctcactgccctcatgacgtcctcccccagcatcccctccatatcctctctgttggatgccacatacgacagcaaggtcaccagctccaccttgtagatcgcctcatccaggatggacatgatccttttggcctcaatggtggtgagtttggtcctagagagaaccaagggttttagtggatcagctggccttttagatgggtctgtctttggccctattctgttgatggcaggggcctgatacaaaggggccatggcgagaatgtctaaagccatcttgtgagcagccctctgtgcctctgtaggtccacagagatggagacttcggtagactacttgggtctcgtgcttttattgtctctggccatcctgcaaaatgaagaagtaggtgtgagtgcagctgtgctgacatctgtgtggttagtgtggctgcagaaaccacaactgttgacatcaagagttcatcttaggtcctctgtcgcttttacacagaacctttcactggaagcagttttcagctttgtgagggtgttagggccacaagggcaggaagaccaagtgtggaggcatctcaggcacatgtgtcaggcggggaccagccaggcatacagacagcattctgctctgaccgctccaggtttccctagccacagttaccgccgcggtccccccgct

SEQ ID NO: 439534 - DNA, 1674 bp, Homo Sapiens
  misc_feature (180)..(427): n is a, c, g, or t
  misc_feature (429)..(465): n is a, c, g, or t
  misc_feature (985)..(1257): n is a, c, g, or t
atgaaaatataagtggagaggttctttgtagtaaacctctattaagtataaggtaaatgttcagagcaatacttttctacattatagtgtcacaaggaaataattatagttaaaagtatattaaaataaaatagtatattattttactaattgtacttttatgtaatgaaatacagtacnnnnnnnnnnnnnnnnnnnnnnnnnnnnnnnnnnnnnnnnnnnnnnnnnnnnnnnnnnnnnnnnnnnnnnnnnnnnnnnnnnnnnnnnnnnnnnnnnnnnnnnnnnnnnnnnnnnnnnnnnnnnnnnnnnnnnnnnnnnnnnnnnnnnnnnnnnnnnnnnnnnnnnnnnnnnnnnnnnnnnnnnnnnnnnnnnnnnnnnnnnnnnnnnnnnnnnnnnnnnnnnnnnnnnnnnnnnnnnnnnnnnnnnnannnnnnnnnnnnnnnnnnnnnnnnnnnnnnnnnnnnngttagattatgtgtgaacttaattttattattttttaaccatgttaagactactgtgcatttaatgaagcattattatgccactaactttaaacgatcctaccttactcaagggtgaagctacaagatggtaacaatacacaatttggcatatagtggaataacatttctagtaatcactttgcccgtggctttaaactgcaaatgagttaaagaatattgttcccacagattaaatttgtactctattttcttcttggaatttgttatttgtatttgtgcgtatatagtatgtgtatgtatttatgccttatatggcatcttttgaactcaggcctacaatatgcagtaattacattagggtaaataaggtgtccgtcacctctagcatttatccttttgtattaccaaaagtgtaattatatgcttttgttcattttaaaatgtacaattaaattgttattgactacaggattttttatggttataataattatacaaaaatacaaataaaatatgtnnnnnnnnnnnnnnnnnnnnnnnnnnnnnnnnnnnnnnnnnnnnnnnnnnnnnnnnnnnnnnnnnnnnnnnnnnnnnnnnnnnnnnnnnnnnnnnnnnnnnnnnnnnnnnnnnnnnnnnnnnnnnnnnnnnnnnnnnnnnnnnnnnnnnnnnnnnnnnnnnnnnnnnnnnnnnnnnnnnnnnnnnnnnnnnnnnnnnnnnnnnnnnnnnnnnnnnnnnnnnnnnnnnnnnnnnnnnnnnnnnnnnnnnnnnnnnnnnnnnnnnnnnnnnnnnngaaatagaaataaagtccatacatttctgagtcctgaaagtttattaataaatatttgttacatagctgtctttgaacatgtggtctctctgcctgcaagcatatagacttttagttttaatttacatagggttaaatatactcatattactctgaagataaaccttaggtgtatgaaaattatgaagcgagtgtttttgtgagtatgagtttgtacatattttcagaaggaaagagcattttttgcaacaaaacaaatcattttatttagatgattaacaaaactaaacaccttgaaaatgctaaaagcaaatctaaactttctggtttggattcatttaattagggtaaaattgttatggtttatgattcggttccttcccgggatctgcttattaaaccaagccattttgtctc

SEQ ID NO: 439535 - DNA, 1451 bp, Homo Sapiens
  misc_feature (414)..(424): n is a, c, g, or t
  misc_feature (429)..(429): n is a, c, g, or t
  misc_feature (607)..(623): n is a, c, g, or t
  misc_feature (773)..(773): n is a, c, g, or t
  misc_feature (989)..(998): n is a, c, g, or t
  misc_feature (1151)..(1151): n is a, c, g, or t
  misc_feature (1165)..(1165): n is a, c, g, or t
  misc_feature (1342)..(1342): n is a, c, g, or t
  misc_feature (1350)..(1350): n is a, c, g, or t
taaaagggctgacaggtctatgcattgcgttatgcttcacaaccagagctttcgagcctctatggctggcgacaagtcaggagatcttcaggcaaagaggggtgtgtgcagtcaaggggctgggagagaagactgagtgggtgtgcagaacagaaggacccagaggacatcaccctaaaaatgttttataggctgctccagtttaactccattaagacaaacccaaagagaaccttttatttgcattccatttttcaagctgcaagtttttaatacatcattgtaaagtaaacctgtggttgactgccaaggaagaatactgtgggctttccctttttgcccagttttccagaaatatcctcaccttggtcatagccagtcttttgacaaagtaagcagcattcgatgagggtnnnnnnnnnnntgggnctctttattccagcttccaattcaagatgtagagagctacaatgtctaaacctattgaattgctcctttagtccttgagacattatttctcagaagcagccacttaatctctcaacctttgttttccctctttgactataagagtttataaatcagagggttattttgttgtggagannnnnnnnnnnnnnnnnactcctgcaagttttacaactcaaaataaattataaaaaacaacagacctctgaaaccgaacaagacaaaattgtgcaaaaataacaaagatatgtacatacttttcagtctgaagaaatgtacaataaaaacataattcaaagaacatntttaaaaatataaacattgcttaaactttcctaagtttcatattgtttctgaaactattctggtcagttagctctgtaatatagtaaaacataaattattacaaaattaacactataaaaatttactttaagaatatcttctaaactttttttcaaagggtctaaccttgtttataatttcttaaacatttataagtcttaaagtctccttaaccnnnnnnnnnnaaaaaaagaaaaagtaacaatcatcccttcaatttgcagtctcttttcccaagacgtaaataaaccagcatataagtgcacttttaacactgtagaaataaaaatgaaatcatccgaactaatgtcctggtacttaatatcaactcctgattnttaaacaaatcatnttatattaaaaaatttagtaatcctataagaaacactcactgtcagtgcaattccattgatgaaaatcactccatttgcctcccgtctttgcaattccaattgtgtggtgaaacttaacagtagtctgatctttgggttgggggaacgggaaagaaaaggaaaactttggggtgggnatgagggntctgcccagctatgaaactagcattcatttctgatttaaggatgaaacaaaacctcccagtatctttgctatacatcatatacaaagttacatgattaata

SEQ ID NO: 439536 - DNA, 1695 bp, Homo Sapiens
  misc_feature (1687)..(1687): n is a, c, g, or t
cctattaaatggcctatccagttgctgttggtcttgcctaccccaagggtcactatggggcctttctggcctcggaatgtcttttaacttggtaaaaattctgcgggccatatatacctttatgcttgtgagagaggacccatcatacgctgtggctgacctgggagaatgaacaacaggtggcccagggacccatgggattttgagcaaagccaaagcctggagggggaagtaatggaggtggcaaatgtggtggaaatccaaacatgctttgtgggggaaaattaggaggccctggaaatggaaatccaggtgggctagacttgagatgctgaaggttgggctgctgtggcctcatgggtgaaaagtttgtacttgttctggggctggtgcttctggaagtaaaggtgatgcttttagaaggaaattctgatggacatgtgtttccaacttcaaaatgagatgtcgctactgctgatcctcttcgaaatgggtgcacagtttcaatattttgcattaaaatatcctcctgtaagggttttgcttgttctgcttgagaagtctgtatgttttctactgatggtgagttttgtgcaacttttaaattgtcactctgctgaacacacgagtttttctctgcagaacacaacttttcctctacattgatttgttctgttaagtgctccttgttgtgtgacaggccaggcagcatgtgtttttctccattccggcaactatctccatctttgctttctgaagtagttacaggctgacttcgtcctgctgcttgcctaggatcccttttcaggttgataaactgtggagacctcgctgtattagcaacaaggttttcactacagctcacattaccatctatgtttccttttcctacattagatctgcatggagaactatttgaagtctggttatcttgcaaattattctcttgatcttcctgaagctgtctttttaatgttttctctttactctccacagtttcctcttgttttgactgaattgataaatttgttaaaaatgcttctgtagaaacatctggtggcttacctctgagactaagactcgtcaaagaccctgcagaaatggaagaggaccctactactgatgtttctatttctgctgacttatctgtagattctgaaatattatctactttaacttttatctccttgttttcaccatcagttacttccacattatctgttttctctatttttgagttggtctgctcatttaaaaatggaatttctttaacagtgttttgttccatcactgactgggcctggtcatatacttgaccagtggtgcccaaaaggctttgaagtatatcatccacaggaagaggtttatttgctaattccagagtagtaggttgattctcccagccaatcaacacgccaggaagaaatcttaaaggttttggtggctcctgtttggtgacttccattaaaggttcaactgctgttggaaggtcttcctgaagattctgctgaggtttatttctctgcttgtgtaatacagttgtaaaagaattaaaaaagtcattttcttcctctggtgcttcttctgtagaaacttctattttactttttttatcaggtggcaatgctattggtggtgcactttcaggagtctcagctatatgactagtactagcacaggcactgtntgtcgctt

SEQ ID NO: 439537 - DNA, 2124 bp, Homo Sapiens
  misc_feature (411)..(411): n is a, c, g, or t
  misc_feature (418)..(418): n is a, c, g, or t
  misc_feature (1899)..(1926): n is a, c, g, or t
  misc_feature (2107)..(2107): n is a, c, g, or t
gagtggaaactgcagggttttattaacacgacttccaaattacatacaatatagttcaaacacatttttttggtacgaaatcacacaaatgaaacacacaacagtacattttcctttcaactacgtcattaccattcttcacacagatcctgaaaaagttaccacagcagttaacgcgaagtgaacaaaggggtggaacaggcaacggcattcccccaaggtaggtgtggtgtgtctgggagaaaacaggatggagatcaaacccagagaaacgcactcccgtcatctctccatgtctcaatttccaacgctctcccagtcaacacagcttcgcccccaaccagagccacccggtgcagcccgcagagtgtacacgcattcagggccgggaggccgtcggcaaagccagtnacacacnggtcagacggccgccacctccaagtggagtgagccacgctaccactaacactgaactcaagcacaagagctcctgcgaaagcagaggggcgggaaacaaagaagcgggtggttaagggcacgaaccgcacactgcgggacgccggcatctttgaatcgccactcactcctacagagccaaactgcaaaacaacagaattaaaaagttactctctccaatcaaagacctggaggaataaatcgtgagtgaagacctgtcgaagcaaaaggttgagaggtgatggagtggtaaacacagtgtgaaaatcgtcagcaccttcccacccagcccacgtggagttctcaaggctgaggcggagcagagtggcaggaatacggccctcacccagttgaagccaggaggtggagggagaggagcatggaaagccagggagatgggaaggtctgagagagtgagtcttggaatgggacaggagctaccagtgttaagaatggtagatgggtttagccaggaaagcaaaacagaaatggacagagagggagagcccagagcatggcatggtgaggtgatcccattactaaatgaacagtagcaagaagcaggcacgtggagcaaacagaatcagctcagacatgaaaaaggtcacactctgtgctttgctgctgtggtacctgaaaattaaacagtggaattaaagccccagagttcaagtcctcacagaggacaccatcctggatcccacgcctgtgaaaagcaaagctggattatagaaacgagcggtggctttttttgctccttcggctcagggcacccctgtgtgctgtgcgcgcgttattgaaaatgttacccacctaagaaaagactacagaacgcatacagctagaacgcatacagcttacacagtccttgcaaaaccagcttccgccacgggtgcccttaaaatgaaaagcagtttaaaagaaaatcatgctaaaagaatgcatgaggtctactttctagagtatattaaattattaaatacagaatacattacaatagtacctgtctgcctatccactctatggaacatattaaaataaaaaactacatgctgtttctttttaaaggcctacatttttctatataccttttaaaatcagtaaaataaaaccaagcaaaatatcaacatgaagacctccttctcttttagttggttagaagtcaaaggaaaaagcaagtactcagaagtgtctcactaaaatacctgttccgtccgccaatcttaaagatttcctaccaaaacatgacacagaaaagagagagttgagacattaaaagcattttctagccaaggcaggttacaatgtgtgaggcaaacggccttttccagccatatgctaccagcagaaggtatacctggggatccaatatgaatcagtgagttccgctttagttccagtacacaaaccacgggcttatgcacctcagaagttaggcatttnnnnnnnnnnnnnnnnnnnnnnnnnnnnccttacataaaatccttaggatttaatattaagtcaaggctaaatgcctttggagaattcatatttaagaatgtccaaaataacactccattcacaaactttaaaaatagctgaaaaagttaactgaaatgctctttaaatacactaaagtatctaagcctctccctagtcgatctggacntagcggcttttccgagt

SEQ ID NO: 439538 - DNA, 1107 bp, Homo Sapiens
  misc_feature (151)..(191): n is a, c, g, or t
  misc_feature (480)..(480): n is a, c, g, or t
  misc_feature (488)..(488): n is a, c, g, or t
  misc_feature (492)..(492): n is a, c, g, or t
  misc_feature (526)..(539): n is a, c, g, or t
  misc_feature (938)..(1007): n is a, c, g, or t
caaggcagttacaatgtgtgaggcaaacgccttttccagccatatgctaccagcagaaggtatacctggggatccaatatgaatcagtgagttccgctttagttccagtacacaaaccacgggcttatgcacctcagaagttaggcatttnnnnnnnnnnnnnnnnnnnnnnnnnnnnnnnnnnnnnnnnnccttaggatttaatattaagtcaaggctaaatgcctttggagaattcatatttaagaatgtccaaaataacactccattcacaaactttaaaaatagctgaaaaagttaactgaaatgctctttaaatacactaaagtatctaagcctctccctagtcgatctggactagcggctttccgagtggtggtagtcgggtgcctccgaacctttcctgccctgcacacactcctatcagtcaactccctggtagaatcgtcacctctaattttttgaaaaaccaataatacntttcgagntttntctcgcccacccccctccctcccactccaaattnnnnnnnnnnnnnntggggtggaggatcatagcttaatgaagggaagccaacctgggtctaaaagcgattacgtcaagccatagctgaggcctacaagtagggagggagggtaataaaaaaacgaatcccaggaagagcaccacgaaagcgggaagcctgaagtcacccacaaagggcactgcagacaccgcaccaggaatgtttcttaagagctggcagtcctctccagggagagagcagaggaggggaacagccgcagggactagagagtttctaggactccacgatgtgccggcacagcatgctgccatcacacacgctgacctccttgtcctgtgcaattacatgactaggacctgccttcgacaagcgtctgatggtctatgagcacattccgcttaccttcccaatnnnnnnnnnnnnnnnnnnnnnnnnnnnnnnnnnnnnnnnnnnnnnnnnnnnnnnnnnnnnnnnnnnnnnngtgatgagtgatgagttcttcaaacccatcccaggacaaggctccagggcctcgggggtccctcacctgccctacctgaactgtcccagctgatcaccac

SEQ ID NO: 439539 - DNA, 1181 bp, Homo Sapiens
cacccttggagttgctcaggtgtctggaatgcacaatgccagcaaagcatttttatttcaagacatagaaagagagatccatgcagctcctcatgtgagtgagaaattaattcagctgttccggaacaagagtgaattcaccattttggccactgtacagcagaagccatctacttcaggagtgatactgtccattcgagaactggagcacagctattttgaactggagagcagtggcctgagggatgagattcggtatcactacatacacaatgggaagccaaggacagaggcacttccttaccgcatggcagatggacaatggcacaaggttgcactgtcagttagcgcctctcatctcctgctccatgtcgactgtaacaggatttatgagcgtgtgatagaccctccagataccaaccttcccccaggaatcaatttatggcttggccagcgcaaccaaaagcatggcttattcaaagggatcatccaagatgggaagatcatctttatgccgaatggatatataacacagtgtccaaatctaaatcacacttgcccaacctgcagtgatttcttaagcctggtgcaaggaataatggatttacaagagcttttggccaagatgactgcaaaactaaattatgcagagacaagacttagtcaattggaaaactgtcattgtgagaagacttgtcaagtgagtggactgctctatcgagatcaagactcttgggtagatggtgaccattgcaggaactgcacttgcaaaagtggtgccgtggaatgccgaagaatgtcctgtccccctctcaattgctccccagactccctcccagtgcacattgctggccagtgctgtaaggtctgccgaccaaaatgtatctatggaggaaaagttcttgcagaaggccagcggattttaaccaagagctgtcgggaatgccgaggtggagttttagtaaaaattacagaaatgtgtcctcctttgaactgctcagaaaaggatcacattcttcctgagaatcagtgctgccgtgtctgtagaggtcataacttttgtgcagaaggacctaaatgtggtgaaaactcagagtgcaaaaactggaatacaaaagctacttgtgagtgcaagagtggttacatctctgtccagggagactctgcctactgtgaagata

SEQ ID NO: 439540 - DNA, 1612 bp, Homo Sapiens
ttttttttacaaaagagtaaacattttattatttgtacatgaatcagtttggtctgaggatacacaagcatctggctaactcataaaagtagcctgaagtgattgataggagagtgtttgtagtcatttccatttgctgccacatcccttacattatctacttgctaagcactgagaggcccagaatggacacatcaaactgtcaggaggaacatatgggacactggcacctgcaatggtttttttaaaagcagagaatgcagagcagtcacagactccacttcaaagccagggtgtgtggaggtctccggggaagagctctgcacaacaggtttcctgggggccagagggcctctcggggaggaacagaaaaaaaccagccaggagtgctaccgaccagcctcagccagaatgctgtcagaacaaggccccaaacatggcctggcctcagtgatctggggatgaacggtgtcacaagggaaccacctgaagggtgggcagaggcccccgtggaggagccacatactcttccatctctccgccgccgcagcaggatgttttttttattcttgggccagctgtagacatgagtgttctgaagccaggtgggcacatgctccttcttagcatttgggaagagcacagggatgaatctgaaattcatgcttccttgttttatgaactcaatctgcatcattcgatgaatgtacttagtatgtaagccatgctcatcctcgtccagctgcgactcagcgccttccacgtcctgtttgtatttggggctgattgctacgattatcatcacggtcttatccctaaggtagcgctccatccatttaatgatatcaatgcctcggattctatcctcaaatatgtcaattgcagtttggaagccatttaccaacaaaaagttcacgaatttcaccacctccatagctgtgtccatcgaataagtgataaagactttccgcaattcttctggcaaattgcttgtttttagagttcctctggctggagggttgctagggggtctaggcacagcagctggggacggaggctggggaacctgtggtctcagctctgcagggcactccaaggactccccaggagcaccagctctattaggtggctggtgatgtggctggtcctggtgccttggaagccccggaaaggagcagtctctctgtgcgggcctctcttcttggtcccaggggctgggataattcaggataaccttctgcacagggtgcaggcctctcacactggctccaggcaggggctgtccaggcagagccggctggatcacttgctggtaggctgctcgaggcgtagtcatggccatctgtaggtgaagacaacaaagacaacagggaacatcaactctagctccttcgtgtgaaaggagtcataagctccatgctcatttgtgtcttgatcccagctgaggggtccagatatctgttaccacctctgtgatgtttgccgtatttctctactgttaattacttgagtgttttcacgaaattcacttttttttgtcctaaataaaaacatctgcgaaatcaccagtttggtattccagctggagagctcaaaaaacttttcaaataaa

SEQ ID NO: 439541 - DNA, 1657 bp, Homo Sapiens
  misc_feature (1215)..(1215): n is a, c, g, or t
gctgtttagaatatctgaataggtgtttccacctactattagaggtgatagtgcttttgtgggggaaaaaattggtcatggtgaatggagatcgaggaagctcgggacaagggaggggtgggctgcctgattttgtccagttttccaaatatccacgcagaaactggagtatcctaaacatgagaatgtacagttgacagttgtaaaaactagggatctgtagtgaatgctgtgcagccccatatctcatttgggggtaggaaaatagctgaagattcatgtgcattatttgacatttcctttgtcatctgctttttaagcaaaaaagggttttgtgttagaaattctacttgagcagattataaagagctttaaaaaacaactttcggttgccaaaagtttgagcatttgatttcattacctgtgtctccctcactggtgtccagacggtcaactgaatactcctgaaacccagggagcaggtgacttcctggagtgctttgtccccagagtcagccactgcttcctctgtgggggtggagagtttgtctttggccatgcagtgtgcgacagttcaggacgggtagggatgggtcccattctgtctgggtcaagggctctatcagcttcttccatgtgcctttgggaagaaatctcgttactttaagtttgctttcctgttatcttgatgaagtgcccattttagcagacacttgtagtgctgaccacttagggaatgtacaaactcctaagcttctaaagggaggcatggcaaaaacgttggggtcaggatgtctctcacgctgctcatgttaatactattaacacatgatttgagaaataagttttctctaaaatgcatattttgccgccacacactgaacaatattatttccagtgaagtttgatgcctgttcttacgttgtgttcacctgttggttcaccactcagcagatctgattctgcaagaattaatggtagaactagatcatcctttctaacagacgagcctgtgtcctgtgacggcctttcacagcggaatgcagttgtacctcacattacttttgaaacttcactcgttccagttggtaccaggtatttgccaaagccatttcctatgttcaccgtggcccctcctgatgtggctgtcagcgcagcgttgttgaacagggctattctttttacaaggtgtgaagtgtgggctcttcgcttcgntctttgccatggcattaaaagaaagttccctgtcttctttcaatattagttatttcaaatgaatatgtgctacttaaaagcttgttttgtttctttgtatataatttgccttggatttattgtgcacagtttgttgagttgtatgtttttgtgaattatcaggagtaaatttgacaagtacatgtgaataacctcctgtaaatgaattttataacaaaaatgtactgaactattttttaaagttgtgcagattagcaattttttgctatagctttgacttttctatgctgtgaattaatagctgcgatttggcaaacagccctgttgtctttgttaaaccctaaattttaagaggaaatggcagaattaaaagcagaaacaagaagatggacatggattagaggttatgtattatgaagtaaacctacaaggtactaacatc

SEQ ID NO: 439542 - DNA, 457 bp, Homo Sapiens
  misc_feature (360)..(360): n is a, c, g, or t
  misc_feature (378)..(378): n is a, c, g, or t
  misc_feature (437)..(437): n is a, c, g, or t
ttttttttgatgttagtaccttgtagtttacttcataatacataacctctaatccatgtccatcttcttgtttctgcttttaattctgccatttcctcttaaaatttagggtttaacaaagacaacagggctgtttgccaaatcgcagctattaattcacagcatagaaaagtcaaagctatagcaaaaaattgctaatctgcacaactttaaaaaatagttcagtacatttttgttataaaattcatttacaggaggttattcacatgtacttgtcaaatttactcctgataattcacaaaaacatacaactcaacaaactgtggcacaataaatccaagggcaatttatatacaaggngacaaaacaaggcttttnaggtaggcacatatttcatttggagataactaattttggaaggaggacgggggaccttnctttaatggcctgggcaaag

SEQ ID NO: 439543 - DNA, 1521 bp, Homo Sapiens
  misc_feature (56)..(56): n is a, c, g, or t
  misc_feature (186)..(186): n is a, c, g, or t
  misc_feature (532)..(532): n is a, c, g, or t
tgactgggatttaacccagggacaagaccccaaagctaatgctcttcacacacacnatctcgagctctaaggagtatgagtgttcttaagtccacagaagatgctcaagaaatggttataggtaagattgaggaaacaatatgttgtcagtgacaccataccattattattatattctggacaacnagtgttagtgtcccctaagaacgtgtgaaaaatgcaaattcaaatcaactcatacagaaactctaggactgaggcttagcaatctgtgctttaacacgtccttccagtgatttcgacacagcactagagctcagaactactagattcctttatcccatccctgtgtaatacacatgagtaatgctcagtaaatgttcttgaaatgtatttaattaagcctagtgggtatggactcaataatcctcaccaaaatcctgctattcttagtataaagagcaggccattcttctcgacgtttgctagtctccgggtaaaggctatactaaggctaatcttagtgaaattnttttttgtcggtaacagttacagagaaagagttcatgatatacaaaatgattttattagatgccaaatttttattaacaccattttatttcttttgcagctttaatttttaacattataacatttactggctcctctgggtgactaaatatcttcacatgcccactagctaaaaagaatttctaagtagaactcaactgaaactgcaagctactgctctaagaaatgcatacttatgtttatttgctctcctatataatcctgtttacaaatagcataactgcaaagatttatatgtaatttctaaatccttcaggttgctctaccattcatcttcttatgtctggcaagataaacactcttagtgaacactttgctgcatctcttaaatgagatttgtctccagtttatttcctatagaataagggatgcacttggaactgaaaaattccttcaatttctaaagtttccacattcatacaacttttctcctgtaggagtttgcaggagattcctattgcctatagtctttcccacatttgctacatgtacacagatttttcctagtgtgagtatacttaggtcaattaagggattaatactgacaaaggctttcccacatttattgacttcatatgatttctctacagtataaactctaataaaaaaatctgcatcattgctaaaagtctcccatgttcaccaccttcatacaacttttccccagtatacatttttctgatgttaaataagggaggatctatgaatgaagtttaccgtgataaacactgcttctcttctgtaagatttctcacatgtatagggattcatatgatctaaaggcttttccacacttaccacactattgggtttctttccattatgtactctttgatgggcagtaagattcgagcctttgctaaaagctttcccacactcactacatttatatggcttttctccagtatgaattctctgatgtacagtaag

SEQ ID NO: 439544 - DNA, 1175 bp, Homo Sapiens
  misc_feature (77)..(77): n is a, c, g, or t
  misc_feature (96)..(96): n is a, c, g, or t
  misc_feature (121)..(121): n is a, c, g, or t
  misc_feature (154)..(154): n is a, c, g, or t
  misc_feature (158)..(158): n is a, c, g, or t
  misc_feature (169)..(169): n is a, c, g, or t
  misc_feature (274)..(274): n is a, c, g, or t
  misc_feature (276)..(276): n is a, c, g, or t
  misc_feature (279)..(279): n is a, c, g, or t
gaggcgtgaggaccatggccgggctgaggattgggcgctttgtcagtgaagtatggtgatttatatgttgttgaagnttttttgtagttatttgtnttttgttgttagggtatattttgtncatgctaatgttttttggtatttgtagagattntttntttattctttnctggctgtggatttaggattagggggactctgcctataggaggttataagattatttcatcctagttttcttctagcatgtttttagtatgtagtatgttttttntngtnatgtgagatattaaattttctttatctaggtgacttatctgtgacttaattctaggtgtgttcattagacgatttattttatggatataatgacaactgtccacactggttttcagtattaccagagagatcaaatgaaaacacaagcacaactgctttgtaatagttaagaagtgctctgcaaatataatttacatgtgactcaaaacaagcagtcaggaggtgaagggccaagtcactcaccatgggctgatcctcatcagtgggattgggaagcaggtaaagaatacagtgccgaggagaaagggcttcctcccccacacatcagacagggcaccaatgagtggggcactcaaaaaagagagcaggccctttacaccttgaatgagaccattcatgaggaatgtgtgttgagaaaatgtttcatgtagaacccaggtgctccccgcggcctgcgcgcccgcgcgcttctccggcatggctcccgcctcgggctccgacgccgccttctcctccagctccggcggcggctccacgctcatgccgcggccatgcccgcgccagctcggggcgctccgggacgacggcgacgccgcggaggcggcggcggtgcccgcgccctcatgggctctgcggcccgcggcgggctgcgggtcaagcggcggcccccagggcttaagaagccgcggaagctaaaacttgcgatcaggctagcaaaagaccgcaactccaagaaccgaccacttaacaaaccggaccgaccccgttttgtgctatttaccggcgggctttaagggcccggcctgtaccgtttggagggccacaccccgaaccttattttcccggcttaaagaaacaattcccggcccttggataagctcttcagcgaaaccccg

SEQ ID NO: 439545 - DNA, 1065 bp, Homo Sapiens
  misc_feature (14)..(14): n is a, c, g, or t
  misc_feature (16)..(16): n is a, c, g, or t
  misc_feature (23)..(23): n is a, c, g, or t
  misc_feature (27)..(27): n is a, c, g, or t
  misc_feature (36)..(36): n is a, c, g, or t
  misc_feature (40)..(40): n is a, c, g, or t
  misc_feature (43)..(44): n is a, c, g, or t
  misc_feature (50)..(50): n is a, c, g, or t
  misc_feature (53)..(54): n is a, c, g, or t
  misc_feature (63)..(63): n is a, c, g, or t
  misc_feature (77)..(77): n is a, c, g, or t
  misc_feature (79)..(79): n is a, c, g, or t
  misc_feature (82)..(95): n is a, c, g, or t
  misc_feature (100)..(100): n is a, c, g, or t
  misc_feature (119)..(119): n is a, c, g, or t
  misc_feature (122)..(122): n is a, c, g, or t
  misc_feature (128)..(128): n is a, c, g, or t
  misc_feature (130)..(130): n is a, c, g, or t
  misc_feature (132)..(360): n is a, c, g, or t
  misc_feature (702)..(702): n is a, c, g, or t
  misc_feature (708)..(708): n is a, c, g, or t
  misc_feature (732)..(732): n is a, c, g, or t
  misc_feature (751)..(751): n is a, c, g, or t
  misc_feature (758)..(758): n is a, c, g, or t
  misc_feature (770)..(770): n is a, c, g, or t
  misc_feature (778)..(778): n is a, c, g, or t
  misc_feature (809)..(809): n is a, c, g, or t
  misc_feature (820)..(820): n is a, c, g, or t
  misc_feature (843)..(843): n is a, c, g, or t
  misc_feature (877)..(877): n is a, c, g, or t
  misc_feature (880)..(880): n is a, c, g, or t
  misc_feature (898)..(898): n is a, c, g, or t
  misc_feature (924)..(924): n is a, c, g, or t
  misc_feature (979)..(979): n is a, c, g, or t
caagattgtcccgncncccgccngggnacggggggncccntcnnaaaaangannagaaaaaancccctgtccttagnancannnnnnnnnnnnnngatcnacaccctaggcctacatanccncgaacngncnnnnnnnnnnnnnnnnnnnnnnnnnnnnnnnnnnnnnnnnnnnnnnnnnnnnnnnnnnnnnnnnnnnnnnnnnnnnnnnnnnnnnnnnnnnnnnnnnnnnnnnnnnnnnnnnnnnnnnnnnnnnnnnnnnnnnnnnnnnnnnnnnnnnnnnnnnnnnnnnnnnnnnnnnnnnnnnnnnnnnnnnnnnnnnnnnnnnnnnnnnnnnnnnnnnnnnnnnnnnnnnnnnnnncatgggctgatcctcatcagtgggattgggaagcaggtaaagaatacagtgccgaggagaaagggcttcctcccccacacatcagacagggcaccaatgagtggggcactcaaaaaagagagcaggccctttacaccttgaatgagaccattcatgaggaatgtgtgttgagaaaatgtttcatgtagaacagtcaacattggagttgtcaaaaggccccacgcaaagaattcaagagaagatgacaatagcagcatggtacgcacttggtggtccaaagccttgtagccaggtgctccccgcggcctggcgcccgcgcgcttttccggcatggctcccgcntcgggntccgacgccgccttctcctccagntccggcggcggctccacgntcatgcngcggccatgccngcgccagntcggggcgctccggaacgacggcgacgctgnggaggcggcgnggtgcccgcgccttcatgggctntgcggcccgcggcggctgcgggtcaggcggcggngcngagggttgaggaggcggnggaggctgaagctgcggttcaggctngcagaagaccgcagctccaggaaccgaccacttagcaaaccgcaccgaccccgantgttgcagttaccggcggcgttaggggcgggctgcacggttggaggccccaccccgcacctcagctcccgcctcgagaacatcccg

SEQ ID NO: 439546 - DNA, 700 bp, Homo Sapiens
cgcacccaccctggtttaggtctttgagtgtacaccccagtgccttccctcgaactgagtgtcaatggccaggggcacatcacatggggctggggggaggagctgcagggcccagcagaaacctggcacacacccactcttctgccgcagtccagttagcacagcggtggtggagcctgcacagggggatggtcttgggacccgcactagggtcgatgctgggcaggtattagcatcttcaccgtcaatccccccgatggttcattttccgtcctcatctcagtcctcggaaggatgaattccacctctcaggccatggtccttcctcagagtttcctttgtcttagttcattccaaagatcatgttgtagggacgtttatctatcgtatacgttatttgcattaaacatgggctgatcctcatcagtgggattgggaagcaggtaaagaatacagtgccgaggagaaagggcttcctcccccacacatcagacagggcaccaatgagtggggcactcaaaaaagagagcaggccctttacaccttgaatgagaccattcatgaggaatgtgtgttgatgataaatgtttctatgtagaacattcaacattgtgagttgtcaaaaggccccacgcaaagaattcaaggaagatgacaatagctagcatggtacacacttggtgggccaaagccttgtagc

SEQ ID NO: 439547 - DNA, 460 bp, Homo Sapiens
tcccctgcgattgactccatggccgggctgctgacaagactagccgcaaaggtggctgagaccgatccataagctgtacttcgctcgtgctcctgagtgacatcagctacataggcaaatataacagaaaacgtgaccgagaagactccagacacagaaatcatcgcaaaataccaccatgggctgatcctcatcagtgggattgggaagcaggtaaagaatacagtgccgaggagaaagggcttcctcccccacacatcagacagggcaccaatgagtggggcactcaaaaaagagagcaggccctttacaccttgaatgagaccattcatgaggaatgtgtgttgagaaaatgtttcatgtagaacagtcaacattggagttgtcaaaaggccccacgcaaagtattcaaggatagatgacaatagcagcatggtacacacttggtcgtctaagcttt

SEQ ID NO: 439548 - DNA, 2075 bp, Homo Sapiens
  misc_feature (1556)..(1556): n is a, c, g, or t
  misc_feature (1627)..(1627): n is a, c, g, or t
  misc_feature (1630)..(1660): n is a, c, g, or t
  misc_feature (1672)..(1751): n is a, c, g, or t
  misc_feature (1770)..(1772): n is a, c, g, or t
  misc_feature (1774)..(1774): n is a, c, g, or t
  misc_feature (1778)..(1778): n is a, c, g, or t
  misc_feature (1789)..(1789): n is a, c, g, or t
  misc_feature (1793)..(1794): n is a, c, g, or t
  misc_feature (1798)..(1798): n is a, c, g, or t
  misc_feature (1800)..(1800): n is a, c, g, or t
  misc_feature (1803)..(1803): n is a, c, g, or t
  misc_feature (1805)..(1805): n is a, c, g, or t
  misc_feature (1809)..(1809): n is a, c, g, or t
  misc_feature (1815)..(1815): n is a, c, g, or t
  misc_feature (1838)..(1854): n is a, c, g, or t
  misc_feature (1857)..(1857): n is a, c, g, or t
  misc_feature (1864)..(1864): n is a, c, g, or t
  misc_feature (1869)..(1869): n is a, c, g, or t
  misc_feature (1872)..(1872): n is a, c, g, or t
  misc_feature (1876)..(1876): n is a, c, g, or t
  misc_feature (1893)..(1893): n is a, c, g, or t
  misc_feature (1897)..(1897): n is a, c, g, or t
  misc_feature (1901)..(1901): n is a, c, g, or t
  misc_feature (1911)..(1911): n is a, c, g, or t
  misc_feature (1922)..(1922): n is a, c, g, or t
  misc_feature (1924)..(1924): n is a, c, g, or t
agagccggcgtttaattctcagggctacgggcagagccgggcctactgtcctgggggaccccggttgtcgcagggtccggcgccggcagctctgccagtcctcagtcccccttccgcggcagcctggtgcccgcgggccccgggtagggcaggcccaggggcgggtaaaaggcctccgggagcgcggggcccggacccagcctctgcaggtgcgggtacaccaggcccagctccgcggggccgtagcggatggtgccgggtgtgcacaggccccgcaccaccggcggcaggaagcccgcgtgcaggagggtgggcggggggtccccgggaggcgccaggccccatggccgcaccggatcctgctttaggacccctgcccggatgaacagaggtgaactcgggcctcggtgtggccgggtggctggcagggatcctcgtcgccactgtcctcggagcctttggtttccctcgggcggggctccactttgatgcgtttgccctgggtctggggggcctcgttctccgctggggcagcctgcttcccttccgtcggaggctccggctctgtgggctctggccccgggctggatgcctcctcagaggccacgctggctgcaagctggaaggcatccaaaggagtttggccaccctcggcttggctgagcacgtggctgacccaaagcacatggtgctccccggggctcttcccgctcccagccactgtggccacagactgcagccacacgaagcccccggcacgctgcagccaacggtagtaaccagtcatcacctgacccttgtccagcaagtccacgtggctctggcggatcctcgtggcgtcctgtccgtggacaaactggtagcagctgcggcccaccagctctgagggccccaggtccatgtggtcgctgactctgctctcacaagcaaggatggtgagacccaggctgagacggaagacgatcatgtgtccatggagtggcagctcagccaggggggccgggggcaacgtgtgcccgagggccacaaggcccagggcgtgggcccgaaggcgcccagtcacgtggatgacctgcttgtaccctgaggccttgacgtgcagccccctcttggtgagcgtggatttcatgcggacaaagaaggagcgctcctggaccagggaggaggggggcaccttggtgaggctggcctcgatctcgggggtatctgcaagcgaagaggaagaggaggaggaagaggagacggagggcggggttggggggccgggcgtcggcgtccgcagccccagttgctccagcacctctgagtggtccccagggtgaatgtagtcgaagacgctgctgcccgtcatctccacctgtgagagacccagatagatggggactgtctttgagatgtagagggattttcctttctggtttaaggcgaacacaaagccatccagggactgcaagatgtgacctcccaggtgctgctcgaagacttcggagaccagcgctgcggggccgcggcggcctggggcgaggccagctggcggccccgcggctctcagcccnccagggcggcgccacccagcgcggcgaaccggcgcaggcggaggtaggtgacgctgaggttttttatgtantcnnnnnnnnnnnnnnnnnnnnnnnnnnnnnnnattggtataagnnnnnnnnnnnnnnnnnnnnnnnnnnnnnnnnnnnnnnnnnnnnnnnnnnnnnnnnnnnnnnnnnnnnnnnnnnnnnnnnctcctttatgcatttttcnnncngctnttttttcttcntccnntttntnaantntttnttttangtggcgccgcggccttccacgtnnnnnnnnnnnnnnnnnctntccactnccggnatngggngccgccatttccggggngttngttnaggcgggctncgagccccgantntcccgcaggaccgccagtccgattacttggccgcagagcaggctccgggcgcggcgtggggccggccgggcggcgcggaggggcagctccatagaccccggggcgcgcggggcgcagcgggacgcgcgggctgtggcgcccagttctcggc

SEQ ID NO: 439549 - DNA, 822 bp, Homo Sapiens
gtccccagggtgaatgtagtcgaagacgcctgctgccggtcatctccacctgtgagagacccagatagatggagactgtctctgagatgtagaggaattttcccttccctggttcaaggcgaacacaaagccatccagggactgcaagatgtgacctcccaggtgctgctcgaagacttcggagaccatctgctgcggggccggcggcggcctggtgtcgaggccagctggcggccccgcggctctcagcccccagggcggcgcccccagcgcggcgaaccggcgcaggcggaggtaggtgacgctgaggcgcacgatggaagccttgtccagctggctggagatggcgccgggcagcgggagaagcttggccagctcgaagaactccaggttctccttcccgcgccgcgagcgcgccgcgttccgggacttctccttgcgctgcgcctgcaggcacggtccggacggcgccttgaccatcagcccgggtagaaagtcccaggggacgctggcgccgcggcctcccacgcatttgacctcgcttccgccgccactgccgggatagggggccgccatctccggggggctcgctcaggcgggctccgagccccgagtctcccgcaggaccgccagtccgattacttggccgcagagcaggctccgggcgcggcgtggggccggccgggcggcgcggaggggcagctccatagaccccggggcgcgcggggcgcagcgggacgcgcgggctgtggcgcccagctctcggcgcccacctcggcctccgcctctcgacgaattcgagctcggccgatttggcctgat

SEQ ID NO: 439550 - DNA, 2233 bp, Homo Sapiens
  misc_feature (1064)..(1064): n is a, c, g, or t
  misc_feature (1072)..(1072): n is a, c, g, or t
  misc_feature (1093)..(1093): n is a, c, g, or t
  misc_feature (1155)..(1155): n is a, c, g, or t
caactgcacgaacataaataatttgaatatttaactctggttaaactttatgttgactgtgctctcttacttttgtcaatatctacagtggttatatataaaatacttcctaatcaattatcaaatttagaaagaataatgaaacatactttgaaatttcaaccattgttctcacagattacacagggtaaggcagagatgtaacaggttctttaatcaactgcctttaagagcatggctccctttaaaactgtctttgaaacattttacttaaagagcatatggaagataaattgtcagaattccctaagacaggtatttgcttttaatcaatccatgtgcaagctttactagacattttaaggggagttacttctagaggcttttaatagaatctcttgtgcataacaaggcgagacatggagaacactttaaggaatgacacgctgtgtgtttgctcattttcccaagtccctggagtgtaccacactgctctactcatgtcccctgggaaaagagcatccacatttctgcatcttgggagaaaagggaagctggcaagaacgtgtcttcaattccaactgattcctccagcagcatccattcaaataataatacaagtgagaaaattagacggttataaagcattatttggcaaagacacagcaccgtgcctgtcatcactgactcacaagagctcctctaagcctcggctaacagattaagtaaacacagaaatatacgcatttttttcctttttaaagaaagcttgtttatatcatcagttaccataggatacgctggggagtttattcaagaatttgctgagactcatatccttatttctcacgtttccaaggttcttcctcaacactgcagtcggctgactttccattggctgccagagttaccttgcattcatctactatgacagagttgtgtgcagcatagacacattgattagagttgctttccctgtggttctttatgtcatcataaatggattgagtcttgttcatttcaatatctttatgcacttcgatgctggtagtcaatggtatccngctcaganttggagaggtgatagactatnccagccccaaaagagtcacccacaacattgactgaggttctcatcctgtccagcagccagtncacagccaccagcaggctgatgtcctctgttggcaggcccacggctgtcagaatgaggagcatggtgaccagcccggcactggggatactggccgcgccgacgcttgccagggtggctgtgaggcttacagtcacaatctgtcctccatccaggacaacaccattcatttgggctataaagatggcggctaccgcttcataaagggctgtaccatccatgttaatggttgctccaacaggaaggacgaatctagtcacacgcttatcaatccccagattttcttccaggcaacgaaaggtgacaggcaaagttccagcactggaagcggtgcccagggcagtgatccaagcttggaaaatgccagcaaaaaaggagaaggggtttttcctggtcactacaaagtaaatcaaggggagaaagatgcccccgtggatgatgaggcctatgatcactgttaccatgtacatccccagttgcctagcaaccacttctaagtccttgattgcaatgatctttccacagatcaggcaggcgatacccaggggagagtaccacatgatcatgatcactaacttcattacaatctcattcaaaatgttgaagaaatccaccatcagcttggcctgatctcccatcttccccatagcgatgccaaaagcaatgaaaaaccctatcagacctaagacgttcatcccatccttgaactccaggcccttcttgataaccatcttagtctcctccggcacctcagtcacagtctcgttcaacagagagacaacagcgctggttgcgttggccttctcgtccggcggtggtgcaaccaggacttttttcgtcactgtttgaatctgttgaaagcaggcttggacaaggttttcagggaagagatttcgaataaggtccaggaaggcatccaggctggacacttcatcattcttcttcccaggccccagctgcttcttgagcttgggattgcctggatggatagccaagaccagaatgacccccagtactgcagcaatgatggtcgtggacatgtaatacaccatggctctcgtgcccaagcggccactagcc

SEQ ID NO: 439551 - DNA, 649 bp, Homo Sapiens
  misc_feature (32)..(32): n is a, c, g, or t
accaggggggggaatgttgggttttcggggtnttttactgtcagagacagctggatcagctccagccacatttattacaaaatagtgaccgcagttctggtatagaaaagatccctgacagcccagtacacctgcaacggcccccaccccacagagttcctctctcaggtgcctcaggtgtggaagttctcagattcgaaggtttcctgccaggagggcgctgtaccgggcagttgtgaggggcaggtaggcacctacagcctggtccagaacgtacagtgggtcagacagggtgctggggtcgaagccctcatttgccatccgaactttctgctgtttgaaggtctctgtggtggccaaagactcctggagcctgaggaatcggggccgggcataaggtggcaagttctcagacacgtgggtgtagagctgcataaggtccaaagcgtgggggggacgcagaactagggctgccattccagccctgccttcatgccctggcacagtgactccatagacgttcacctcctgaagaaaatctagggcctcgaagacctctgccacctcggttgtggccacattctcccccttccacctgtcagagagcagagatctgaaactgggagtcaggggtcagggccttaacaag

SEQ ID NO: 439552 - DNA, 906 bp, Homo Sapiens
  misc_feature (256)..(396): n is a, c, g, or t
aatgcaagcaagaccagtttactcaattgcaaaccaacattctggaatcagtacaagagttagttaacttaatcactgatactcacatcacaagttgcttactttatttctttaacaatgaaatagtaataacacaataattcagttgtaacaaagccaccaacagagcaaaacaaaaacaaagctaattaagaagcattgcttcagctcaaattagttatctcctttaaacaggaaaaacgaccattagtctacnnnnnnnnnnnnnnnnnnnnnnnnnnnnnnnnnnnnnnnnnnnnnnnnnnnnnnnnnnnnnnnnnnnnnnnnnnnnnnnnnnnnnnnnnnnnnnnnnnnnnnnnnnnnnnnnnnnnnnnnnnnnnnnnnnnnnnnnnnnnngtgctgtcagtgccgaaaactacaggtttaaagtaataaggaataaaaccatgcctttaagcattttaaaaccattaagctgattatacaataaattatttgctgtaatgctgggaaaacagggggaagcaggcaccgattcagccttcattcccgtttatccatgtttagttgcctatagttcagcttaaccaacattaaacgtggttagctttgcaaacacgctacccacgttgtaacgattactgactttacatcgagaaagccctccgaaatcacttgtttttacaccacttccgtccatgttaactttgcctagacgattaagtttcccctcccgctttttttacagtacttcctacaatgttctctgtaaagttctccgcttaacacgctctcgttttaacaacgttgctttcgtttccccttaaattattccttttcgccgtattatcgtacgcaatttttttacgcggtttcttccctttattcccaacacgggtggatatt

SEQ ID NO: 439553 - DNA, 870 bp, Homo Sapiens
caaaaattgaataagtatttattgttccagaaggtacattgctttttatacatatttcataaatgatacaggattttacacatgttcaatagtttgctatttgtttaaagaacttttctccatgtcctccctcccttgcttcccacacaccccaaaaagatttgctcgttgcactgtgctgtttcttcttaaaaaccctatgcacaaacaggataaatgggttaaaaataattcacacaacttaacaaaaataaatgagggaaggagctgacgactgggggtggtggagggagaaggaagtgggcggagggtcaggaagtggagacatgcatcctttcattccgtcatgccaatgaaaggggtgttggcaggagtagcagcagcagcagcaatcctggctggccttcaacctttgcaaggcacctggagtctgggtttgtcatttaaagtttttcttttcatacacaatgatcccaaaggaggaagaaaaagagaaagaaactccttgccacaatgaggaaggatgaatcacgtgaaagaaaaggccaatcagtggtgtggcagcccccatcatcctttccatcctgcccctacagcagttaaaaacaggatattagacacagattcctttgactcttcaagcgcagatgtcatctggaaatatggtagaaaatgttttgacaaagtataagattaattctctttctctcaatttaagataagaaaaaaatagggtgaagagagtgggcttgaaggaagccctagaaatgtattcctatataaaagataaatggacccctttgaggacccaaacactggatttacacctggaattgtggaaggtgggaaggccttacaaacaggggtggg

SEQ ID NO: 439554 - DNA, 928 bp, Homo Sapiens
  misc_feature (651)..(659): n is a, c, g, or t
gtctagaaatttattgaacatagttaatctattacagtagaggatctggacaataaaaatagttatttaagctttttattttccctgacctagtagctttcatgtctcttaaaattccctaaattttatttctcaaatcccatatcgtgattggttaaacagacagccaagaatctgagtctattttttgagaatctcaatcacatttctgggaaatgtgacttattgagtacatatttattttctcatttccattcagataaatgacacagctttgctgggaggactgacatcggcctcctacctgctggcatcctatttctctacctcacctccctcaaactaaaggatctgtaaccacatataaagacccacacccaagatggcagataggaacacaagtcaatgtcattgactcagcattccattgtcctcttcactggcttcctcctgcgctttccacctccctcaatcaccctagaaataagatgtctgatttatcgtagaaaattgtgactctcttacatctggagtattcatgaaatttttttgactggataaattttgatgaaaattaatgtataattgcctaaattgttagaaggatttaattaaaacattctaactgataagcctaataactgactaaannnnnnnnnaagacacagggtcttgctctatcacccgtgctgaagtgttgtggaagcttactgccaccctttaactcctgggttcaagtgattccccctgcctaagttctacaatagcatttgggaccttcaggcattacttccaccattgcctggcttaatttttcaaacacttttgttgtacacaaaaggattttcactacatttgcccaattctgtgtcttgcaccttttggaccctaaacaaattctttccagtttcacacctctccaaagtgg

SEQ ID NO: 439555 - DNA, 1283 bp, Homo Sapiens
caggatttaaccatggtttattgcagacctattgtgtgccaggcatgagcccagtgctcccacaaacagcgtctccaggtacgagaagtgtaatttcgaccctggaacaccttcctgcactcagacagaagcatgtgcagactgctctcagcaacgccacctccttcactccctggccattgggcccccttctctctacctgtcccctgtcactccacttcctgccccaggccttctcttagggattttccaggctttggggagctgctgctttcagtttctggctgtggggtctcagcaggagtttgttccaaaacccagtagaaataaaatccttcaagagggagatgattcgtgggctgggtggattccagtgaccagaggacgtgcaaactctgccctaatgatctgggaacctagcccatccattgagctttctgttttcacccagtttcacttcctggttctcttccgagccttgcacaatgctgggagacaggcctagaaaagtgccaccatgaggatggtggaagacacacataagatgccggcctggggaggctactctgggtcattacagcaggagcggggagagctttcttcactgccctgcccctaggctgaggacgactaaggccaggtcttcccaaccttggggctgtccttgtccatagcctgagtctccacccccgctccttatattcctcaagctcccctccaatccacttccctgcagcccacttccctgcacccagggaccaggacaacctgctccatacgtgagcatacatacatccttgaaatttccaaatgccaaactttctgtgtgtctctctagagccattgaattctcctgagacacactctctgggcctggccaggggtgtgggcctgagccaggggccagtaggggagctggagccttcttggatggagccaaatttcttttgagccttggaagccttggaggaagccgccctgcagtcctggggcagagaagactatgccacagagagggcgaggggctggcttgtggtcaaaaggcccagagctgtctgagcccaagggtggccactggcatggttttaggcaagaactggagcttgcagacttagactaggaggtgctccagacactccttgagtcaggtaaagttattttcaaacccccatcttgaggcaaattgccaggggctggagcataaggaatagatgagactgaggaagttagctgtgatataggctgaagtgtcagagaactagagctaaagaagcctcaaagga

SEQ ID NO: 439556 - DNA, 532 bp, Homo Sapiens
  misc_feature (335)..(385): n is a, c, g, or t
  misc_feature (466)..(480): n is a, c, g, or t
ttttcaaattataatattttattatagaaaaagcatcccaaatacaggatttcgtaaacactggtaggtgaacaagtgcaattttaaaagtaaatacaaagtagaggcaaaacctacaagcattttgccttcagaagaaaatgtaatgttctcctgcactagtgatcccacccagaacacaaatgtggctccatctcccatgaaagcatcatatttgctttctgagctcagtattcccatttcaataattgcaaagtgatggcaagaagtggcactgaatacattactacaaacccttgacttaaaatattgagacagggtcttgccctgtcatnnnnnnnnnnnnnnnnnnnnnnnnnnnnnnnnnnnnnnnnnnnnnnnnnnntgggctcaagcaatcatcctgtctcagcctcttgagtggctgggaccacaggtatgcactatcatgtccatgcctggctannnnnnnnnnnnnnnacgttgcccaggccagtctgaaactcccctcgtgccgaattcttggcctcga

SEQ ID NO: 439557 - DNA, 1430 bp, Homo Sapiens
  misc_feature (566)..(566): n is a, c, g, or t
caatttttcttaaacttcaactttatttggaccaggaaatttttccttacataaggttgacatgttttaaacaccttaggacaaactatttaaaaagcaacattttttatttcagaagggtcttgcttaagtggttttctgaattcttctcgttattatgaatatgtgctttataaataaatatattgtcggttactccattgtaatcaaatcagctgactaattgctatctgtactgagttatctgagatcagaagacttgatgcaggtcatttaaaattcacattaggcacagtgtctatgaggaaattggataatacaggattaatgtggatatttacctctagtttgttttcctaatgggcttccatgaggaagggtcctcacaataaattatataacagtacagtacatttgtttgggaaatcgtaaaaataattctacaaattagctccatatattatgttgctacagtatggtttaaatgatataaaataattagtatgtcaaacatcttcttataaacatattgcttttggtcatacactgaactgaaatgtacagcnataaattccctttttttcctctccctgaatggcacaaaaccaatggcttgatggtagggaaatgctacttcatgagaaagcatggtgcccatcaactccaacagtacctgtatttgcactcaaaaataaaataattcttgtgttgtcttgattgtatacaatttttgataactccagaagatgacacagtgttactttattagatgtatatagtcctttaggcaagagatacatttaaaaaattatttgaaaatcaagttccttcctacataaatcctatcacacatgggctgggtgagggcttggtaattaatggaatttttttgtaaaatgaacaatcatgtcaagagtagtttttatgcaaatgcagttttcccctactctgctggcactacccggggcacatcaatacccctacaacgccaccttcgtcactgaatttctgtctcatttcggcacgaaatgagaaccaaccctgtatcatttcctgacatcccagtaagctttctgactgtaaatgaggtatagtcctgataggtacagttacaggtatatcatttctgttggtgtcttacattacatttcataattgtatagtaacaaaaaatagaggtaacaagtagcattttgttttcatgtaacaagaaatggctgcaggttctcagtcagaacagaaacagagagacaaaagaaatggttactattcccttctatagtgcataggtttttttacacaatttgtcctttacccatttcagagaaggggaggaagagtaattcacagcatttgctagttaaaatttgttttttcagtcctctagttttctcaactgcacatcagctacttgatttggccagtagtgg

SEQ ID NO: 439558 - DNA, 841 bp, Homo Sapiens
  misc_feature (453)..(638): n is a, c, g, or t
tgtgtagcacggctgtgaggctcattgttgaatgaagcatccttaggcagcacgtgactgcatgcagatatgtgtgctgaaagaactttgcctttttaactaaattaatggacccaggtgacagaacttggtcttttacttgccattcattggtccttcataagggatgggcttccaacacttaacttcagctcttcaaatacttgtcattaaaccttctaatactacaaacttactacccagagtatacacattcctagcgatttgtggatcttaacccacagcatgaatgcccttgttatagcccttgcatttactctccactctgcgcccttaaaccaaggctgttactactgagggggcgccaagatttccaagcaacccattctccaggacacctgattaacagcacagcatgactctgtctaaatgcttgcaaaaacagttgacctnnnnnnnnnnnnnnnnnnnnnnnnnnnnnnnnnnnnnnnnnnnnnnnnnnnnnnnnnnnnnnnnnnnnnnnnnnnnnnnnnnnnnnnnnnnnnnnnnnnnnnnnnnnnnnnnnnnnnnnnnnnnnnnnnnnnnnnnnnnnnnnnnnnnnnnnnnnnnnnnnnnnnnnnnnnnnnnnnnnnnnnnnncccgacatttgctttgacccttgaggtggaaggtttccagtgaagccatatatatgggccactggcacttccagccctgggcatacaatgaggcaaccctgttcttcaaaaaatcaagaccgacccaatatatcctgttttgacccacgacaagggcccaaggcttcttaaaaggtttttttcttttggcccaaaatctcagg

SEQ ID NO: 439559 - DNA, 934 bp, Homo Sapiens
catgtttaaaacttttaacatttttaattaaaaaacccacacaatcttaggttgggcatggagagggtggcatgtcatatgatggggttgtcccttggggtgtgctgaatgctgcttggggtttcttcctgagccagcgctatgggagctgaagatgtagggctggcccttctcccctttgtgggccccttggggcagaggcttgggggctctgtctcttgcacctgctgcgagggtccatcccagaatcacaagccactcagtgatggtatgggagagaaaaggtctctgggggtattcaaagcttgggacacctcctccatggagccccctcccattgctccctgggcctcttgagcctcaggcaagaaaatggccaggactgggtgatgagcagcccctggctgcccttttggcccaggtctaggtctggtcaagctgttggagctgcctccccacacaggatgagttcccagggaagtgaggccacagcaggatccagagggcacccctttccagagcctgggcccaggcgaggccaacagctctgacagtgtggaaatgcatcaaagtcctgagtgagcaactcccttctgggaaattgattccagcgagaaaggtggggggcttccagagtctctgttcctgctcctgccgcacccccgttagggcccctggggctgtcccaccgaaaaactgaggggaagaggccccgctctgttccccaagcggttatggcaggccgggctgtggtcctggccaaggtccaggtccttcttgcccctctcaaggctgggataaccactgtgtgggggaagcactttcccccaatgggacccttcgtcgcctgaggggggttgtgcgcattcctcccttgcgccttgcggatccctgttttttaactgagacccggtatacagagcctctttttaag

SEQ ID NO: 439560 - DNA, 736 bp, Homo Sapiens
agaaggctgaaccagacgacctttaataacttttttcagttgagtactgtgagattcaatgactccatgacacttgcagattcagcttcagatttcagccactttacgggtaaaaagagacacatcgaaatcttgatcctgggacttgcaaccccaccgtggcacttctccaagaaatggatggttttcaccttgggtggctcctgcgtttggttcttcaaggcagtaggagggatgaaatagtcatgaacattcccttcagatccagagttcttgcattcagttattacatccattgcaagtgttttagtgaccttcttttcatttctaacactgcgaatggacacatgacccaccaaaagggtaggcagacatttattgaagccaatcttgataaaggaggtgctatctttatacctcatagttagtcaattatgatgcctataagttaaaaaccaaacctaagtactgtattttaaactttattcattttccactaccatgtcaagctctatgtaacctacaggtggtaaaacagggttttttaaccacagtactactgacttttggaaccatttaattttttgttgtaaaaaagattgacaattaaactgtaaatggtaattatatatttgtgacattcttggccctctgatgtactggcttttttcccagttttgattaccacttaaacttaattgttacaggaaatcttttattgtccaagtaatagcag

SEQ ID NO: 439561 - DNA, 1118 bp, Homo Sapiens
aggacactatcacaagatccaaatcaatgtccttccgggagaatttcttaaaatcttgtgtctctcgtgtcttcggaagaagcccgacatttcttataggaaatggaactcttcataagtctggccatggaggcatggtatccgtaacatcccccaaaggagctaaagaagaaatccacaatttaccatgagcatttctcgtctgaagattgccaagcgattcctccaggacattcctcaagatcaatttctgttcatccaccttgtcctgggagggacatcaatgggtttccatgtcctttggcttctggttgagttcactcagtggagaaccctggcaagaggcaggaaaaggggaggaagcagcctgaccggtttgaatttcaccttctgttcaccttggatgagagcagtaatcatcacgatcccagggaacagccaaaggaagagaaaaggcaaaagatttggacaagactcatgaagactaacagctcttggataattgagagaaggcagctgcgtgaacagttttgatgcaatcatgaaggcagggcccagtgcctgtggcatctgcctttttctggaaccaatccatatttcctatgtggttttctaaaggtgcagagagggcacattgggaactttgcttggggtctttttcacatcttagagggaaggtccctcaacatctgcattgtgcggagtgtgatcctcatgtccctctgaatgatctggacttgaggtaaccagccccttccaggaagcttgtcccatgagtgaagcctcagcagcagcctttgtcagtcccttccccacagaacctctggcttccttttgaccagccttgacatccagtgtccaaaccccgataaaattgattccactaagcgtgggaaagttctggagcctcgaatgtattcctcctttgcacccccgatacccctggatttagccctcttcccataatgtccctttgcttgtttgatttgagggaggtcaaagcccttttgaagaaagagtggaattccacaggattggaccagtctttataaatacaacttggaatggtcggggaggggaaaggatctaggaagttttggttataggatttccttaaa

SEQ ID NO: 439562 - DNA, 493 bp, Homo Sapiens
  misc_feature (397)..(397): n is a, c, g, or t
  misc_feature (433)..(433): n is a, c, g, or t
  misc_feature (443)..(443): n is a, c, g, or t
  misc_feature (457)..(457): n is a, c, g, or t
  misc_feature (469)..(469): n is a, c, g, or t
ttttgaaggctgaaccgggggacctttaataacttttatcagttgagactgtgagattcaatgactccatgacacttgcagattcagcttcagatttcagccactttacgggaaaaagagacacatcgaaaacttgatcctgggacttgcaaccccaccgtggcacttctccaagaaatggatggttttcaccttcctccccttttcctgcctcttgccagggttctccactgagtgaactcaaccagaagccaaaggacatggaaacccattgatgtccctcccaggacaaggtgggatgaacagaaattgatcttgaggaatgtcctggaggaatcgcttggcaatcttcagacgagaaatgctcatggtaaattgggggattcctccttaagcncccttggggggatgttacggataccatgcctccatnggcagaccanaatgggttttttcnccaataatgtcnccaagtgtatcaatgggatggttt

SEQ ID NO: 439563 - DNA, 634 bp, Homo Sapiens
aatcaaggaagtttaaaacgacattgttcttgctcttttcataatataaaatctgtcatcatacttcatgtaagtaactatagatgggaagccattgacattcagttagaggacaacagagagcagatttctgggttagttaaaattagatttggtcacacataacagaaaaccacaaagcagtcagttgcttaggcaaggtagaggttcacttctctgtcatgtaactgtaatactggctagcaaggtggtccttacaaattcatgctctgatctttccactctgacattttcagtgcatggatggcttttgtttccaaggccacctcaaggtccaaaatagctgctggaggtccagctgtcacattaaggtaggaaagagaagaaaagcagaaatgcaaaacaaactcttgctgacaatctatgcctttcaataaaacttcctggaaaagtcccactcagcatttttatttacattgtattgagcctagcttagccacatggtcatgccaagctgcaggagagaccaggaaatgtaatgtttagcacccaggttaaaagaagtttggtctttaaggaggggggagtgtgatggttttacggttttacgtgccagctttttcttgttgggcta

SEQ ID NO: 439564 - DNA, 1196 bp, Homo Sapiens
  misc_feature (568)..(655): n is a, c, g, or t
  misc_feature (664)..(664): n is a, c, g, or t
  misc_feature (926)..(926): n is a, c, g, or t
  misc_feature (929)..(929): n is a, c, g, or t
  misc_feature (1004)..(1004): n is a, c, g, or t
  misc_feature (1015)..(1015): n is a, c, g, or t
  misc_feature (1036)..(1036): n is a, c, g, or t
  misc_feature (1039)..(1039): n is a, c, g, or t
  misc_feature (1041)..(1041): n is a, c, g, or t
  misc_feature (1049)..(1050): n is a, c, g, or t
  misc_feature (1056)..(1056): n is a, c, g, or t
  misc_feature (1066)..(1066): n is a, c, g, or t
  misc_feature (1069)..(1069): n is a, c, g, or t
  misc_feature (1076)..(1076): n is a, c, g, or t
  misc_feature (1081)..(1081): n is a, c, g, or t
  misc_feature (1086)..(1086): n is a, c, g, or t
  misc_feature (1088)..(1088): n is a, c, g, or t
  misc_feature (1102)..(1102): n is a, c, g, or t
  misc_feature (1118)..(1118): n is a, c, g, or t
  misc_feature (1120)..(1120): n is a, c, g, or t
  misc_feature (1131)..(1131): n is a, c, g, or t
  misc_feature (1133)..(1134): n is a, c, g, or t
  misc_feature (1140)..(1142): n is a, c, g, or t
  misc_feature (1160)..(1162): n is a, c, g, or t
  misc_feature (1164)..(1164): n is a, c, g, or t
  misc_feature (1175)..(1175): n is a, c, g, or t
  misc_feature (1184)..(1184): n is a, c, g, or t
ttttttttacaccaagacaacctctttatttaatgggctcagagagcaagggaaccacacaaaatttacagtctgagttttgcgcgcagagacccctctccacctttttcatgcctgtgtgtacacacacactgtccaagcctcagaagagaagccgtttattggtaaaaagacacatggaaatgtggctgccaggcctcagagcatcctgcccttttcccaaacagctggcctctgctatccaccaggacttgggcttggcatccaggctggataccatgagagcaccttctgtctctggtctattctgccagtgtctccgtgtcagggtgggttggctccctccagggcacaaaggtctgggctctgtccaagagtgcccctccataggggtgggtaccaccatgccacacagcagtatttgccccatccggatgatcaagatacccctgcctcatcctgttaccttaaattccagaagccccatctctgcagctcagaaggtaaacaaaccctggttcaggcattggtctcccagagcaaggttgggaggcatcagtggtgcaannnnnnnnnnnnnnnnnnnnnnnnnnnnnnnnnnnnnnnnnnnnnnnnnnnnnnnnnnnnnnnnnnnnnnnnnnnnnnnnnnnnnnnntgcccagcnaggggaaagtgtcagttcttaacagatgaggcagcaggaatttagggttgagtccttaggtgaaagccagtttatttattcaacaagtattgaatgcctactgtgtgctaggcagtcttctagaagccaggggtacagcccgtcctggcaaggtcctgactcagcccagccaggacagtttcctgagcttcaaggttactgtctccaatccctatttctatctattcttcctcccctttcttcccttccttctccctcccancanctcccaggccctttcttctctgctaagcggcagagcccctccctttggtctcctgggcctccaccctccctggancgcgtcattcnagtcctgttgctgcctcctgnatnanggggcctnncctacnatcccctatnccnaaagggngtagngacangngccacgctggtgcntaatgcgggcagactntnccaaacccttncnnactctnnncctgtttggctcccccgnnntntccctttgttnccaatctancccgggggactc

SEQ ID NO: 439565 - DNA, 476 bp, Homo Sapiens
  misc_feature (33)..(33): n is a, c, g, or t
cattttcctaaactctcctaggttcagaagctnctggccccagaggtgacattgactttttttccggggaaaaatttaagtgtgaggaaaccctttttattttattacctttcactctctggctgctgggtctgccgtcggtcctgctgctaacctggcaccagagcctctgcccggggagcctcaggcagtcctctcctgctgtcacagctgccatccacttctcagtcccagggccatctcttggagtgacaaagctgggatcaaggacagggagttgtaacagagcagtgccagagcatgggcccaggtcccaggggagaggttggggctggcaggccactggcatgtgctgagtagcgcagagctacccagtgagaggccttgtctaactgcctttccttctaaagggaatgtttttttctgagataaaataaaaacgagccacatcgtgttttaagcttgtccaaaaaaaa

SEQ ID NO: 439566 - DNA, 1652 bp, Homo Sapiens
  misc_feature (394)..(394): n is a, c, g, or t
  misc_feature (418)..(418): n is a, c, g, or t
  misc_feature (459)..(459): n is a, c, g, or t
  misc_feature (571)..(571): n is a, c, g, or t
  misc_feature (573)..(573): n is a, c, g, or t
  misc_feature (627)..(631): n is a, c, g, or t
  misc_feature (639)..(639): n is a, c, g, or t
  misc_feature (665)..(665): n is a, c, g, or t
tttagggtataaaaagacagatgcaaccatacatttaatttttaaaaatggaatgtatcttacataaggattttgtgaaaaatcttatacctatctgagtattacagaagatgcatataccttccagagctcatggaggaaagagtgtataaacaattttgataaggagttgaaaaacaatttgaaaatagtttacaaagagagaatcaggaggcagaaaaagcttcaagaggcatggtcttcagaaattgttctggaatgctgtttcacttgtatcgatgtcatgttcctggttcaatttcttgaactccaccacttggaagaagacgtgctcaaggatatgtttggcatcctgttggtcctttggtagtttactggttactccaagaatatnaccacatttcctgaaataaaattncaggttttcttcagttcacttattggtaatctgagcaagcngtgccttctcagaggagaacgtttcatctaaatcaaatagctccagaggaggaggtggtaactcccggaaactgggaggaaaaaccgcagctgaagggttggcagcggcgtntnaaactgaggctggatgagctggagtggttaatgtttcacatttagctgcccgtnnnnnttgatgangctgtggaaggaggtggtatccagcnggaagatggacaggtcgaagagggtggtaaagtcccttgggatctcatcactttcctggagacactctcgattccgctttgatagggtggctgtgtagggcagcatcatgtagtcagaaatctctgggtcctcagcatcaatctggtttaggtggatgtctcctgtcgtgagccactggaaaacaacatccatgattttgctgttttcttctttgtccaaatattgatcactgaacatgtgacatgaaccaagcactgccagcttcccaccttggttctttgagtgatagaaagccaaaatgggtctgttaagtgggaagcagacagaacctgtagacagaaccgccactgctggtttcatgacactcaatgtggcaccaaaaggatacacaaaggtgagagcctgggcattgtttccactgctttcctcatcaatgatcccaggcacagcctttcctgcagctcggctaatttccctgttcaagactccactggaaactagagcttctttaggatggaaatatttgtgatatacatttctaaccacagcatcattattaaccatgattccatattcttctagtaaaaagttaatattggtgtcaaatctggattctccaccttctcctagcatcacaaagacatctccaccagtgtcaagatatttcttcaggatttcaaactcagctgcagtaaatttttcccttggcccagctgtaatccacagttttactccatttaacttctcagatgtgatttcatcttttaagctctgaatcttccaattactccgaagttttttctgcatggatttgtagccattgttggtggtaaatatctcctttttgtaggcattgaaaagaatggtgctccgcagctctttctccatggttacctgacgccgcccagcatcccgcggccaggtatccaaggccgcttagtaaccggagaggcgcgtcggtgcgccgggaggcgtggatcccggga

SEQ ID NO: 439567 - DNA, 799 bp, Homo Sapiens
cggtttcctcttgtccaaatatgatcaactgaacatgtgacatgaaccaagcactgccagcttcccaccttggttctttgagtgatagaaagcctaaaatgggtctgttaagtgggaagcagacagaacctgtagacagaaccgccactgctggtttcatgacactcaatgtggcaccaaaaggatacacaaaggtgagagcctgggcattgtttccactgctttcctcatcaatgatcccaggcacagcctttcctgcagctcggctaatttccctgttcaagactccactggaaactagagcttctttaggatggaaatatttgtgatatacatttctaaccacagcatcattattaaccatgattccatattcttctagtaaaaagttaatattggtgtcaaatctggattctccaccttctcctagcatcacaaagacatctccaccagtgtcaagatatttcttcaggatttcaaactcagctgcagtaaatttttcccttggcccagctgtaatccacagttttactccatttaacttctcagatgtgatttcatcttttaagctctgaatcttccaattactccgaagttttttctgcatggatttgtagccattgttggtggtaaatatctcctttttgtaggcattgaaaagaatggtgctccgcagctctttctccatggttacctgaggcccagcgaccaccgctcacctgacgccgcccagcatcccgcggccaggtatccaaggccgcttagtaaccggagaggcgcgtcggtgcgccgggaggcg

SEQ ID NO: 439568 - DNA, 1153 bp, Homo Sapiens
  misc_feature (13)..(13): n is a, c, g, or t
  misc_feature (16)..(17): n is a, c, g, or t
  misc_feature (46)..(46): n is a, c, g, or t
  misc_feature (59)..(60): n is a, c, g, or t
  misc_feature (62)..(62): n is a, c, g, or t
  misc_feature (75)..(75): n is a, c, g, or t
  misc_feature (80)..(80): n is a, c, g, or t
  misc_feature (83)..(83): n is a, c, g, or t
  misc_feature (104)..(104): n is a, c, g, or t
  misc_feature (110)..(110): n is a, c, g, or t
  misc_feature (113)..(113): n is a, c, g, or t
  misc_feature (121)..(121): n is a, c, g, or t
  misc_feature (130)..(130): n is a, c, g, or t
  misc_feature (136)..(136): n is a, c, g, or t
  misc_feature (138)..(139): n is a, c, g, or t
  misc_feature (141)..(141): n is a, c, g, or t
  misc_feature (147)..(147): n is a, c, g, or t
  misc_feature (160)..(160): n is a, c, g, or t
  misc_feature (207)..(207): n is a, c, g, or t
  misc_feature (219)..(219): n is a, c, g, or t
  misc_feature (230)..(230): n is a, c, g, or t
  misc_feature (239)..(239): n is a, c, g, or t
  misc_feature (244)..(244): n is a, c, g, or t
  misc_feature (252)..(252): n is a, c, g, or t
  misc_feature (254)..(254): n is a, c, g, or t
  misc_feature (277)..(277): n is a, c, g, or t
  misc_feature (280)..(280): n is a, c, g, or t
  misc_feature (282)..(282): n is a, c, g, or t
  misc_feature (297)..(297): n is a, c, g, or t
  misc_feature (309)..(311): n is a, c, g, or t
  misc_feature (320)..(320): n is a, c, g, or t
  misc_feature (332)..(332): n is a, c, g, or t
  misc_feature (342)..(342): n is a, c, g, or t
  misc_feature (348)..(348): n is a, c, g, or t
  misc_feature (350)..(350): n is a, c, g, or t
  misc_feature (363)..(363): n is a, c, g, or t
  misc_feature (367)..(367): n is a, c, g, or t
acttctattccangannaaaaaataattttttaacagaagttttanggaaactggcccnntntcaacagaaaatnaaccnttnttgaaaaaaaagctgcaatcnaaaatnganctgctggnttagttgtntccccncnnanctgctngagaaagctctcntcttctttggggcagcagctgatcttggtttttgctttgtcgaaaanatgtgattaagnccttccctttnacaaacaanaatcngcagaagnanatgatcgaaaccaaagtagtaanggngnagaaggccaattatngcaacccttttnnntattcaaantatacttataanaacccagtanagtccnanagtccaagctaanactnccgtgcgatgcctggatgctgaagtttagatgagacagaagtgaggagacacacctgaggctggtttctttcatgctccttaccctgcccccgctggggaaatcaaaagggccaaagaaccaaagaagaaagtccacccttggttcctaactggaatcggctcaggactgccattggactatggagtgcaccaaagagaatgcccttctccttattgtaaccctgtctggatcctatcctcctacctccaaagcttcccacggcctttctagcctggctatgtcctaataatatcccactgggagaaaggagttttgcaaagtgcaaggacctaaaacatctcatcagtatccagtggtaaaaaggcctcctggctgtctgaggctaggtgggttgaaagccaaggagtcactgagaccaaggctttctctactgattccgcagctcagaccctttcttcagctctgaaagagaaacacgtatcccacctgacatgtccttctgagcccggtaagagcaaaggactggcagaaaagtttagcccctgatagccatggagattctcataacttgagacctaatctctgtaaagctaaaataaagaaatagaacaaggctgaggatacgacagtacactgtcagcagggactgtaaacacagacagggtcaaagtgttttctctgaacacattgagttggaatcactgtttagaacacacacacttactttttctggtctctaccactgctgatattttctctaggaaatatacttttacaagtaacc

SEQ ID NO: 439569 - DNA, 1009 bp, Homo Sapiens
  misc_feature (6)..(6): n is a, c, g, or t
  misc_feature (10)..(10): n is a, c, g, or t
  misc_feature (14)..(14): n is a, c, g, or t
  misc_feature (18)..(18): n is a, c, g, or t
  misc_feature (26)..(26): n is a, c, g, or t
  misc_feature (38)..(38): n is a, c, g, or t
  misc_feature (40)..(40): n is a, c, g, or t
  misc_feature (47)..(48): n is a, c, g, or t
  misc_feature (117)..(118): n is a, c, g, or t
  misc_feature (120)..(120): n is a, c, g, or t
  misc_feature (136)..(136): n is a, c, g, or t
accatntatntgtntggngcatagancggtccaggatncntgaacanntccagcttgcatgcaagcctcgatgcgttctctgtccgtgcttgccttgagagacctcagtgccagctnntntttcctgctcggcatnccggcgggcttcttctttacacctctctgcttcctgggataaggacttccactttgggtgagagaaaggtgttcactttgcatcaggtgggtacacccccaacatctacgtcattgactggagagaccttggcacgtggccctcgggcaaacttcacaatcttctccccgttctgctcgaggactgtgaccctcttctccttctgcagctgcagcaacaccaagtagaaggtcctctcatctgggcaggagttagcacagagggtgctgagctctgacagggccaccacggggtgggaggagaggggcgagttctgatacagacgatacacctcctcagccttttccttcaacagctccacagcgacaaggacctcctcagctggaaccttattatctcccagcatgttagaaagagtccacttgagaggcttcagcaggaagaccccaaccccccaggagatccagctgctgtctacactggccatgaagtctgactcccgctgcagctcccctcgacgcagcaggtcctgcagcaccgtggccagccccagcgggacgctccccttgcgctgaaaggcctcctgcaagtcccgcagacgcaggcgcaccaccccctggcggcggctgtggctcagcaccaacggcgcccagaagcccatcttgctgtcccagtcggtgctgttcacctcgcgactcctcttgaaagcggagaacaggaaggacatgcgctcctcgtcctcctcccactcggggggcagaaggcccgccgggtctcccccggctggggcctcggcctcccgctccggggaccacatcggaaccccagccacggcaaggctgcgaacacaagcctggccctggtccgatcccg

SEQ ID NO: 439570 - DNA, 904 bp, Homo Sapiens
  misc_feature (24)..(24): n is a, c, g, or t
  misc_feature (34)..(35): n is a, c, g, or t
  misc_feature (59)..(59): n is a, c, g, or t
  misc_feature (64)..(64): n is a, c, g, or t
  misc_feature (68)..(68): n is a, c, g, or t
  misc_feature (72)..(72): n is a, c, g, or t
  misc_feature (75)..(75): n is a, c, g, or t
  misc_feature (690)..(690): n is a, c, g, or t
  misc_feature (701)..(701): n is a, c, g, or t
  misc_feature (705)..(705): n is a, c, g, or t
  misc_feature (717)..(717): n is a, c, g, or t
  misc_feature (731)..(731): n is a, c, g, or t
  misc_feature (755)..(755): n is a, c, g, or t
  misc_feature (761)..(761): n is a, c, g, or t
  misc_feature (786)..(786): n is a, c, g, or t
  misc_feature (803)..(803): n is a, c, g, or t
  misc_feature (826)..(826): n is a, c, g, or t
  misc_feature (856)..(856): n is a, c, g, or t
  misc_feature (881)..(881): n is a, c, g, or t
  misc_feature (901)..(901): n is a, c, g, or t
acaaaaagatggggaacaacccanattgtccatnnaatatgttgatttgtgttatatanacatnggtntggntgntataattggaattagcattgcagcccaaaaggagagcacccgttgtgtgcatggtaagagggcagcactcccagggcacagcagcgggcgggtcggtgtccggtgggaggaagagctgccacccagctctgccaggggaagcagttctccctgagagccccaggccccattcttgacttccccagtgccgggtggaggaagagggagggattagcccgaggcaagtggttcgagcagacagaagggaacaaaaagagcagcgagtcaggcctgatcggggccgcatctaccccaaaagaggggaccagcggatcaacagctgaagcgtaaggtgccgcggccagctcctgggtggggctccaggtggcatcccagttgtggccacccagcccttcatcctgggctaggcaggcgggagaggaaagcgcagactgcacggtcccgggcacgtcctcggcaggcagtggccttgcactggccggccctactcaatgcactccatgacatgtatctgcagggtgtccatatcaggggcctgatactggcacttgggacagcagaagttaggtggctcctcgggggggctcctcctcttgctaggcagggccaaggganaagagaagtangcangggcggggggcnaaggggcctggganacctccacatgccgcttcctcatntcctcnatcctcggccgactcctgacagctngccttcagtttgctgtnctccctctgcagctgctcagctntcctgcaggggtccttcttctcggcagctntccggggctgctctcagcctggaancggcttgtagatatccgctnggc

SEQ ID NO: 439571 - DNA, 1023 bp, Homo Sapiens
  misc_feature (801)..(863): n is a, c, g, or t
ggttatttttccaaaagttccccccccgggttcaaacacaggttagcgtctttcaggtccgggcaatgaagtcaatgccttcaggcaggaacccaggcaggcacccgagtctggcaccctcctcggaacccaggctcagcacatgttgttaaagttctgttgcttgtctggcgtcgatggttaacctggcacacagccacccagggccagttcgcaggaggaagaggagatagccatggctctggggcctggggcttgagcacaaagtactgagagttgaggtatcgggagtcccggacacagaagggacaggaatctgtgaggaggcctggtgatgaagcccagcctgaggaaggtgagatatgaggacaccaaccccttcttcaagcaataaatttctaggattctctgacttctctctttatactgtgagcctgaatcagggccctgccagtaaaaacctagtcttcaaaacgctctttataagaaattataggctaagggacaagaccatacagtgggaagatggagaaaggggctctgctcgccgcctgaatagttcaacttccaatgatctcacattaaactgaagcctctttcctctgacaaacgtttccgcagtccaaaagtcatctccgggaactatccttggttttcccaagactctctccttgactgtgcacttgcgcagctttactgactcgaagcatatttcccctttcgccagaatctcgcaggggaaagttcaccctctctcgtctcccacccctccctggtgggcaaggggcaaaggaacccagnnnnnnnnnnnnnnnnnnnnnnnnnnnnnnnnnnnnnnnnnnnnnnnnnnnnnnnnnnnnnnngcctctcccagaggcagcatctctgttacacaagttaaagcaccgcaggtgggattcaccgcggccgacgggatagggagtaggtcctacatgaagatatagccaaaccattcgcagggtccgatccggagggcggtctggagccagaagcgccgcagcg

SEQ ID NO: 439572 - DNA, 1153 bp, Homo Sapiens
  misc_feature (953)..(953): n is a, c, g, or t
  misc_feature (1049)..(1049): n is a, c, g, or t
  misc_feature (1087)..(1087): n is a, c, g, or t
gcgagttaccgcccactcgctgcggcgcttctggctccagaccgccctccggatcggaccctgcgaatggttttggctatatcttcatgctgggcttcatcaccaggcctcctcacagattcctgtcccttctgtgtcctggactccggatacctcaactctcagtactttgtgctcagcccaggcccagagccatggctatctcctcttcctcctgcgaactgcccctggtggctgtgtgccaggtaacatcgacgccagacaagcaacagaactttaaaacatgtgctgagctggttcgagaggctgccagactgggtgcctgcctggctttcctgcctgaggcatttgacttcattgcacgggaccctgcagagacgctacacctgtctgaaccactgggtgggaaacttttggaagaatacacccagcttgccagggaatgtggactctggctgtccttgggtggtttccatgagcgtggccaagactgggagcagactcagaaaatctacaattgtcacgtgctgctgaacagcaaaggggcagtagtggccacttacaggaagacacatctgtgtgacgtagagattccagggcaggggcctatgtgtgaaagcaactctaccatgcctgggcccagtcttgagtcacctgtcagcacaccagcaggcaagattggtctagctgtctgctatgacatgcggttccctgaactctctctggcattggctcaagctggagcagagatacttacctatccttcagcttttggatcccattacaggcccagcccactgggaggtgttgctgcgggcccgtgctatcgaaacccagtgctatgttagtggcggcagcacagtgtggaacgccaccatgagaagagagcaagttatgggcacagcatggtggtagacccctggggaacagtggtggcccgcttgctctgaggngccaggcctctgccttgcccgaatagacctcaactatctgcgacagttgcgccgacacctgcctgtgtcccagcaccgcaggcctgacctctattngcaatctgggtcacccactgtctttagactggactttnctgtgagttttagaactggcccctccccacccccaccctggcaactatgtagctagtggctccatg

SEQ ID NO: 439573 - DNA, 2196 bp, Homo Sapiens
gcaagggcatcataggtgtaagtgaagtaattcctttttccttccccctcctccactcctacagcccactcccatgcttgggagaatggggctgggacatgcactgagtgttgcacttttatttaggtagggaggcatgttgaatgagccaggaggtctagaactggagcttagtccagctggtacaataccaactccccttctagttcccaaaggcgatgtccagacacagactttatgattattatatttttcaatgccagtgctgctcagccctcagcagaacttcagtttccatgaaataaacaatgactatataaaattccacctttctgaaactgcagtctgacctcaggtgaagctcaggtgaaagtttctttcccaagcagcccatctgtgttccatcaagagagtcaaggttctccaagtgaggggagctgtgcctggatcctgcctccaagtcacatgagcactagctcatagtggcagggtgggggtgggaggggcaggtctaaactcacagaagtcaagtcttaagacagtgggtgacccagattgccatagaggtcaggcctgcggtgctggaacacaggcaggtgtcggcgcaactgtcgcagatagttgaggtctattcgggcaaggcagaggcctggcccctcagagcagcgggccaccactgttccccaggggtctaccaccatgctgtggccataacttgctctcttctcatggtggcgtccacactgtgctgctgccactacatagcactgggtttcgatagcacgggcccgcagcaacacctcccagtgggctgggcttgtaatggatccaaaagtctgaaggataggtaagtatctctgctcccagcttgagccaatgccagagagagttcaggggaaccgcatgtcatagcagacagctagaccaatcttgcctgctggtgtgctgacaggtgactcaagactgggcccaggcatggtagagttgctttcacacataggcccctgccctggaatctctacgtcacacagatgtgtcttcctgtaagtggccactactgcccctttgctgttcagcagcacgtgacaattgtagattttctgagtctgctcccagtcttggccacgctcatggaaaccacccaaggacagccagagtccacattccctggcaagctgggtgtattcttccaaagagtttgcccaccccagtggttcagacaggtgtagcgtctctgcagggtcccgtgcaatgaagtcaaatgcctcaggcaggaaagccaggcaggcacccagtctggcagcctctcgaaccagctcagcacatgttttaaagtttttgttgcttgtctggcgtcgatgttacctggcacacagccaccaggggcagttcgcaggaggaagaggagatagccatggctctgggcctgggctgagcacaaagtactgagagttgaggtatccggagtccaggacacagaagggacaggaatctgtgaggaggcctggtgatgaagcccagcctgaggaaggtgagatatgaggacaccaaccccttcttcaagcaataaatttctaggattctctgacttctctctttatactgtgagcctgaatcagggccctgccagtaaaaacctagtcttcaaaacgctctttataagaaattataggctaagggacaagaccatacagtgggaagatggagaaaggggctctgctcgccgcctgaatagttcaacttccaatgatctcacattaaactgaagcctctttcctctgacaaacgtttccgcagtccaaaagtcatctccgggaactatccttggttttcccaagactctctccttgactgtgcacttgcgcagctttactgactcgaagcatatttcccctttcaccagaatctcgcaggggaaagttcaccctctctcgtctcccacccctccctggtgggcaaggggcaaaggaacccaggccccaagccgcgccccgccctccaccctcccgccgcccgctccagttggcccgtccctccccgcctctcccagaggcagcatctctgttacacaagttaaagcaccgcaggtgggattcaccgcggccgacgggatagggagtaggtcctacatgaagatatagccaaaaccattcgcagggtccgatccggagggcggtctggagccagaagcccgct

SEQ ID NO: 439574 - DNA, 1009 bp, Homo Sapiens
  misc_feature (913)..(913): n is a, c, g, or t
  misc_feature (922)..(922): n is a, c, g, or t
  misc_feature (951)..(952): n is a, c, g, or t
  misc_feature (958)..(958): n is a, c, g, or t
  misc_feature (974)..(974): n is a, c, g, or t
  misc_feature (977)..(977): n is a, c, g, or t
  misc_feature (985)..(985): n is a, c, g, or t
  misc_feature (989)..(989): n is a, c, g, or t
  misc_feature (995)..(995): n is a, c, g, or t
  misc_feature (997)..(997): n is a, c, g, or t
  misc_feature (1003)..(1003): n is a, c, g, or t
attttctgctcagacaccgttgcttgcaaaattccacccagaagacaagggaggaggcagtatcgctgcagcgtcctgctctgtgcctggttatattactggatccttgtgttgcagccctaagatagaaggattgtctccatttcacagatgagagagaactgatgcgcaggaggctgaaattgtctgaagtcacacagcagcctcctcttaaacatgacaaagaatccaaggacttgtgctggggctgtcagctgctattctggtgccctggggacgaagaagggatctggagggaagactgtcaccctcttgcgaatgtttccaagaagcagctcagcatgggagagaaaaggggagatcccagttccaggaacacctggccagtgtttcacctgtttatcggagttgacaggaccagccagccctttcccacctctccccatcatgatggatgggagcctggcctttgagattcctgcgaaggaatgacaaagaacatcaaggctcaatccttggaactctccatcactcatctttaaattagacttctctgctgactctcagagttgtgtatgctgagaatccactgcctctaagacatcctgcttggcaggttcctatctcccttcgactgaggcatcgtttccaaatcagacacttctcgtcaccactattgccctccccttgtccaacccacctttggctcttggctggagtccggtgagtctcctagctggctctccctgttctcgtcatttcccagtaagttccaaccctgccttcagactcttctgcacacagcttccagagtaatcctttcaaaaagtaagtcagatcccatcttttccctcccgtctcactctgtcagccacattcattccaaaggaccatgtggtccatgtccctgatnctctctggntctctcactgctctctctgtgcttactcnnctctgnctcacaatgtttgcantantgtttctntgcntggaantnttcctncaagac

SEQ ID NO: 439575 - DNA, 749 bp, Homo Sapiens
  misc_feature (501)..(556): n is a, c, g, or t
aaagagattttcagactaaatagaaatgtcaaaatgatgtatcaatggttcttttttagaacaagttttcaaagcataaaaagaggttgagagaaataacatatttattgattcacataagtatgtttttcttcattaatcgtctggagaaacccacttgtcattaatttgttttgggctaggttttcaaacttaccaaattgctttaaaaaagcaatttggaaggtaatttgataggctttccaacttaaccaaattttttattgtaattcttggatagtatttttgtctttttcaattcatttgtctttttcagtatagtttttgttaaggcaaatgtcttcccttaatatccaaatattgctaataaacggtagaagatgctttggaaattaaaattatctcgctgttggttagacttaacactgttaatcttcagccaaatatcacatatggatcaaattattttcttttttgttgtttaccctatcctcaacaacnnnnnnnnnnnnnnnnnnnnnnnnnnnnnnnnnnnnnnnnnnnnnnnnnnnnnnnnctccaaaataataaggtgcaaagctattttatgcttaactgttgctctgtcaaaacagctatgcagtggagttgcatttgatgttctagagtttgattacatgcagagttgtatatagccaaaacttctcttatcaaactctgttatgtaggcatatttatatatacattaaagacctgttgtactgtgtctc

SEQ ID NO: 439576 - DNA, 1888 bp, Homo Sapiens
  misc_feature (1571)..(1605): n is a, c, g, or t
ctgggtggtttcttgtcgctgtcgaagtttcgcgttcgttggggattccggctggtatgggccaatgtgtcggcagttctcgcccgctgttgtttgtgcgccgcgtgcgtgtgtgcacccggtgtcagtgtgggccccgggaatggtaattctccggaggtgcaatgcccgcagtgagtggcctatgtgtagttatggataggtgagtaggctgagtgtgttgcgaccgttaagggtgtgtgtcgaccggagttctccgcatgcgatctgccccaccttggcagagatgtaattttatgggagtagctcttttggtacagggccggaatccttatgcacgctgtgatactggtagtgtccactggaggtttatttgttgctgacggcttgactgaactgtacaaggttcccattaggcaactgcactgcaccattcacggtgctatctatgctggtgtcctctttcaagtccacgctgggaagcctctctctctctggagcttcctccagatctccaagtttgaatgagactgttctctcctccaccacagcctggaggggcacagtggcaggccctacctcagaaacaggatgcttgttttcaatatcaccgacagaccactttgtttcttcatggtcttctttcaagctattcttgtttttccattaaggggctttcagaaggactacactttatttctcgttcaatttttctcttcatcctgggacatacatagaaccagacgataagggcacagaaaactgcacatcccaccgagatgaggatggtaccccacagaggaagtttgtcaaagcccagcaacggtgctccagtatacatgatggaaaagaggtttattccaactgtgcaggcatagaaaactggcaaagctcgcaaaccattaggaactggatctgccttatggaggatgaatgcacgaaccaggaagaataaaattccagacataattccagaaagcagtggggacacgaaccaagacatcacaatttttatcagttcagaccacttgacaccctcctgcccctttgccacgagggagaacccaatagttgccccaaacaattccatgggttccagaaatagggagctttcaaaaacgaagcccacgagttgccacacagcagacccaaacatagcccctgactgagccggccatcagtagcccttgagtcgagttgtacatctccacgtcaatcaagccccttcacggatggtttctgctcactttggcccccagtaagacagagcccactgtttcaaagatgctagctaggatgcaggcttgcttcagggtcactacacctgagcccacagctgtaccaaaagaatttgctacatcattggctcccacggagaatgccaagacaaatgcaataatgaagcccaggatgagcatccataggtagtccaccaaaggaccagaagcggcggtagcagctgtagtactggtaatcagcgttgccattctctggagtagtggttgtttagtaagagaactactgagcgcctttcaagatgtgtaaacagaatatgaggtatcaaaaatgcnnnnnnnnnnnnnnnnnnnnnnnnnnnnnnnnnnnctgtaaactacggcacagaaaccgagctggggagttactgctatacgctgcgtatgggcatctgttgtctggggtttctttggctcaggagggctaaaagcacggagcagaattccatggcggagaagagaaaggacgcaagttcatccagggaaaagggagggcggagcgggagacgaggagatcgaggcggcagcggctggagccacgggcacacggcccgggtcggcggcaccggggacagctcagcgggactcacgaccttcccaggaagcagccgcgg

SEQ ID NO: 439577 - DNA, 2224 bp, Homo Sapiens
  misc_feature (457)..(474): n is a, c, g, or t
  misc_feature (2185)..(2185): n is a, c, g, or t
tttttttctaaaaactgtaggcttttttattcagttaagaggtagacaaatgaacatggaaggctgtcccatttaacttgcccaaagttcacattccacttcattcatccatcccacactgccagaaatcttaaagaaataaccaagattgccaacaggctttttctttcttacttcttcttagcaataacagtcaataaactgcttgcaaaaaagttactaatttaaattttcactgtgttcaaagaacctcatccctctaagaagctcccgaatatgccaatagatcctgccactactgacaggagggcagagtaccaaggactctacttatataagagactacaagggaagttgtagttatatttttgttgttaaatccctgtgcatgtgagggcagaagctggtgaaaccaacaacgcagagcatgctctgtcaaacggctcttcatggtttnnnnnnnnnnnnnnnnnntcacaagtcatcttcagagacaacattaaaacataatggaattgaagcctgatacaaaaagtagagaaatatgtacaggaattcacagcccagaaggaaaggggacctcagcaggagccagtggaacccgggctattttacacagctaattttgagacaattcatatttagcacaaaagcagttatagcacaagtaacacttccctcctctggctcccaaataaaaagactcttgtcagtcttctgttaacactgtaatcattcttcaggggagcaggaatacctaagatggtcccaaacattgacacaaattttaatctcaaacagcttcacattctgaggatgacatatctgaagattgccatgatggcagcactgataactccagaaatggggactgtgacaaaccaggccataaaaatgttacgaaagagacgccagtcaacagccttcttggaccggagccagccaacagacacaacagagcccactttacaatgtgttgtactgatgggaaggccaatatttgatgcaatcaccacagtgagggcagatgccagttcaatactgaagccactagagggtgtgatcggtgtcagatccttccccatggtctggataactcttcttccccaaacccacagaccaacacagataccaacaccaccatagagtagaagccatattggtgttgccacttttgaagaaacatctcctgtgtcataaaccaaatataaagcaaccagaggcccaatggcattgcttacgtcattgccaccatgggcgaatgacccaaagcaggctgtaaggatctgcaggaactggaagaggagagagacttcaggcttatcctggtcataccattcttctagagagccattacttccttttctgtcacctagacccatctctgccttgacactcatgtctatctcagatgctgagtgaaggtcagacacagcattgcagtaactggtgtaactgtccattcgaattcgcttcttggagtctgcattaggccatgtcagcttctccatttcttcgcccttctgttcaccttctttggcacggaatgaatccagaggcatgccacatattgccatggtataggaagtatagctattattgcgccttaagggtttgtcaccggagtctcccatgcaatctcccaccttggcaagatgtaatttatggagtagctctttgtacaggccggaatccttatgcacggtgtgatactggtagtggccactggagtttatttggttgctgacggcttgactgaactggacaaggttcccattaggcaactgcactgcaccattcacggtgctatctatgctggtttcctctttcaagtccacgctgggaagcctctctctctctggagcttcctccaaatctccaagtttgaatgagactgttctctcctccaccacagcctggaggggcacagtggcaggccctacctcagaaacaggatgcttgttttcaatatcaccaacagacaactttgtttcttcatggtcttctttcaagctattctttttttccattaaggggctttcagaaggactacactttatttctcgttcaatttttctcttcatcctgggacatacaaagaaccagacgataagggcacagaaaactgcaccatcccaccgagatgaaccctcgtgccgaattcggccacccagcctcgctaccntaccccgggaaggggggaggtttttaaagcctttgtgga

SEQ ID NO: 439578 - DNA, 1095 bp, Homo Sapiens
  misc_feature (372)..(406): n is a, c, g, or t
agcggaagtaggggccggcggggtgctccgctggagtgatggctgccggcgctctctgcgtggttcttcttctcggccgctgaaacccccgcggctgcttcctgggaaggtcgtgagtcccgctgagctgtccccggtgccgccgacccgggccgtgtgcccgtggctccagccgctgccgcctcgatctcctcgtctcccgctccgccctcccttttccctggatgaacttgcgtcctttctcttctccgccatggaattctgctccgtgcttttagccctcctgagccaaagaaaccccagacaacagatgcccatacgcagcgtatagcagtaactccccagctcggtttctgtgccgtagtttacagnnnnnnnnnnnnnnnnnnnnnnnnnnnnnnnnnnngcatttttgatacctcatattctgtttacacatcttgaaaggcgctcagtagttctcttactaaacaaccactactccagagaatggcaacgctgattaccagtactacagctgctaccgccgcttctggtcctttggtggactacctatggatgctcatcctgggcttcattattgcatttgtcttggcattctccgtgggagccaatgatgtagcaaattcttttggtacagctgtgggctcaggtgtagtgaccctgaagcaagcctgcatcctagctagcatctttgaaacagtgggctctgtcttactgggggccaaagtgagcgaaaccatccggaagggcttgattgacgtggagatgtacaactcgactcaagggctactgatggccggcctcagtccgtggctatggtttggttcctgctggggtggcaactcctgggcttcgttttttgaaggctccctatttctgggaaccccttggtatgggtgggggggacctattgggttttctcccctcgtgggcaaagggggcaggaggggtggtcaagggggcctggaacggaaaaaaataggggaaggcccttgggtcccgagctccccacggccttctcgggaaataagcacgggcattatatattcctcccgcggtctcgacactacctgccaccccaaaggcacacct

SEQ ID NO: 439579 - DNA, 981 bp, Homo Sapiens
  misc_feature (892)..(928): n is a, c, g, or t
ccaccagcttccttattaattcttgattccggaactaaacatgccctttccccagttcttctcccaataccccatgggatttaattatcttcccacatctcaaagagctcttttccagtcatttgagtaattaagaagtccctgatgaaaagtgcagtcctctcaggtccactgctctgtaacagggctccaataactgcaaagaaagtctgctgtaacacagctgggggcactgggaattcttcactcagtgttaactgctccacagccaagtttctagccacgtgacacacgacttcctcaccagtgagaaagtcaacaagattttttatgccttcagtgggcatgtctgggtactcgtcttcaagaaactgtgtaaggcaagtctgtgaaaaagatgtcccttgttcggatagttcttgattacttttaagattcagaagaacagcttctttctctatcccaagttgttggcgtttggcctcctcacttttaatatagcagctattaacaaatgcagttttgagaagatctaaggaaaagttttcctgtaaccgatgtccaaaagcttgtatttctgcatggtaatcccagttcggcttctctgaacggcgcacgggcggcggcgggcaccgcagaaggcgctgccgctctaactccttctggaagcggaaggcggcgcggaatcccttcttcactccccgaaccggagggaccagcttgggggcgactggagccaggaggcagcgatgtccctgctgcagcaatcttaccagcccggacgccattgcacgagagaaaacgatggaagacggaacgaaagtagtcgggccagtgtccccgtaacacccccgctctcgacgaattcgagctcggccgatttggcctgatnnnnnnnnnnnnnnnnnnnnnnnnnnnnnnnnnnnnncgccgccaccgcgatgagctcgcggttcgccctatagtgatctatcagttcct

SEQ ID NO: 439580 - DNA, 1355 bp, Homo Sapiens
  misc_feature (1258)..(1294): n is a, c, g, or t
  misc_feature (1308)..(1308): n is a, c, g, or t
  misc_feature (1321)..(1321): n is a, c, g, or t
gatttgatcaaaccaagatttcagaaaaactaaaccaaaaacactgtgacttggttaacatttatttaattttgggaacacagtaaaaaacagaaacaaaacatctatttcttcacaattgtgaaaatgtctggcttgaaacacctttgacatttatctcactttcgctctcaagtttcaggctgctgcatccatggcggctagctggcagtgatgctcttttctgctctcaaggtttctttgggcttggaatagttccacggccgtctattttctgtgaatccataaagttttctaagggccactcgagcagcctcttcttctgcaaccaatactgtttccccaggtccttctgcaatcaactttttatcacagtataagccaacaaaatacaaaggcaaagctgtggtgccaccagactgcctagtaagtcttgattcaggagctgaaacattccttttcttcagttcttctaccaatagccccatgggatttattatcttccacatctcaaagagctcttttccagtcatttgagtaattaagaagtccctgatgaaaagtgcagtcctctcaggtccactgctctgtaacagggctccaataactgcaaagaaagtctgctgtaacacagctgggggcactgggaattcttcactcagtgttaactgctccacagccaagtttctagccacgtgacacacgacttcctcaccagtgagaaagtcaacaagattttttatgccttcagtgggcatgtctgggtactcgtcttcaagaaactgtgtaaggcaagtctgtgaaaaagatgtcccttgttcggatagttcttgattacttttaagattcagaagaacagcttctttctctatcccaagttgttggcgtttggcctcctcacttttaatatagcagctattaacaaatgcagttttgagaagatctaaggaaaagttttcctgtaaccgatgtccaaaagcttgtatttctgcatggtaatcccagttcggcttctctgaacggcgcacgggcggcggcgggcaccgcagaaggcgctgccgctctaactccttctggaagcggaaggcggcgcggaatcccttcttcactccccgaaccggagggaccagcttgggggcgactggagccaggaggcagcgatgtccctgctgcagcaatcttaccagcccggacgccattgcacgagagaaaacgatccgctctcgacgaattcgagctcggccgatttggcctgatnnnnnnnnnnnnnnnnnnnnnnnnnnnnnnnnnnnnncgccgccatcccgnccaggattaacanctcgcgggggtcgccctagttagtgacgtctaga

SEQ ID NO: 439581 - DNA, 1372 bp, Homo Sapiens
taggctaaagggtttgactgtttgtgtcgaaagcaccagtccgtttaagttctggtttcaacactctggcagacattgcccaaggagtaaattggaaattgagaaaaatatcagcaggtgttacccagagcttgaatcttctgacccggtaccacagtaggaatatgcaaccctgcatgtgcagccgaatttaggtaacttattaggtagatgcaaaattactagtataaaattccttagaggacatcgtgaaaatgataaagtagcaggaaattacaaagatataacgttatttacaaagtccatagagaagcgccaattggaaagcttcaagttgaagataatttcatgaaaacgcacttaatccaaatggaattataagttttctgaactttggatactcttcaaatttccggaggtaccactcatgatgctcttttgctctaccagataaaaaacaaaacgtgaagaaagcaaaagccgcgccttggacagaccagctggccagggcatagccacaccactccatgatttctccaaaatagttggctgcagttacgtattcaaataagcctccccttggtattttgtatccagtatctcctggttttctgagattccttaggatatgatctgaatggatgtttatcaacatgcccgttaaccacaagccaaaacctattagaaaacggggatctgttacccagtcatcagcatacactgcacaatggctcaagtatctgctttgcaaatagccgttacaggtacagaacataatcgccattgtacacgccaacagtggcataggctttcctcctcgcatcagaaatgggtaaattaagcaccgatgcccgtagtggacgaggaacatggccaggaggatgcagttgggcgcgctgcggagacgcggggcggactcgctggcgtactggtagagcggcagggccagcgagggcagctcctgcaccacccaggcggcccgcgccggcactcggagcctgtggctgggcagcgcgtggcggccgtacactgagttcgtctgacgattccgcgcgaagaccgcgcagcccacggcgcactgcaggtaggcgagcgcggccagcaggcgctcctccgccacccccgtcgccgttgccatcgccagggctgggcagcgtgctccatgccccagaggccgcggcgggcaacatatagggcggcggcgcgggggcaggaggggcggctaccggaggggcggctaccggagtcccgcactgccgggactctgcagaaagggttctcaagtcaggcttctccggggtagccggggctgtgggtgcggccccgggggcggggcgagcacttgcgcggggagggacctgcaagcgcccca

SEQ ID NO: 439582 - DNA, 1448 bp, Homo Sapiens
  misc_feature (956)..(956): n is a, c, g, or t
  misc_feature (990)..(990): n is a, c, g, or t
  misc_feature (1004)..(1004): n is a, c, g, or t
  misc_feature (1018)..(1018): n is a, c, g, or t
  misc_feature (1022)..(1022): n is a, c, g, or t
  misc_feature (1024)..(1024): n is a, c, g, or t
  misc_feature (1026)..(1026): n is a, c, g, or t
  misc_feature (1045)..(1045): n is a, c, g, or t
  misc_feature (1053)..(1147): n is a, c, g, or t
  misc_feature (1155)..(1156): n is a, c, g, or t
  misc_feature (1162)..(1162): n is a, c, g, or t
  misc_feature (1180)..(1180): n is a, c, g, or t
  misc_feature (1189)..(1190): n is a, c, g, or t
  misc_feature (1206)..(1206): n is a, c, g, or t
  misc_feature (1213)..(1213): n is a, c, g, or t
  misc_feature (1219)..(1220): n is a, c, g, or t
  misc_feature (1225)..(1225): n is a, c, g, or t
  misc_feature (1230)..(1230): n is a, c, g, or t
  misc_feature (1254)..(1254): n is a, c, g, or t
  misc_feature (1263)..(1264): n is a, c, g, or t
  misc_feature (1268)..(1280): n is a, c, g, or t
  misc_feature (1284)..(1284): n is a, c, g, or t
  misc_feature (1307)..(1307): n is a, c, g, or t
  misc_feature (1321)..(1321): n is a, c, g, or t
  misc_feature (1328)..(1394): n is a, c, g, or t
  misc_feature (1398)..(1399): n is a, c, g, or t
  misc_feature (1420)..(1420): n is a, c, g, or t
  misc_feature (1427)..(1427): n is a, c, g, or t
  misc_feature (1434)..(1434): n is a, c, g, or t
aaacttagcaagatggcggctccctgggcgtcctgcgcctggtcgcccccatgtggaatgggcgtatcagggcatccatcgcctgggtgcggcagtggccccagagggcaatcagaagaagaaaaggacaatactccagttcctgaccaactatttctacgatgtggaggctctgagggattacttgctccaaagggagatgtacaaggtgcatgagaaaaatcggtttctagacctggagtggatgaggccagataagtatgtccatttgtctcaggtgttctggaatttctgtgaagtgcctgtcgaagctgtggatgcgcggtgactgtgacttcgactacgagggcgtggatcaggccagactaagtatggccatttctctcaggagttctggaatttctgtgaagtgcctgtcgaagactgtggatgccggtgactgtgacatcaactacgaagggcctgcctgcatccaacctccagaacctccgcaggctggacatctcggacctccctgccgtgtccaaccctggcctcactcagatattggtggaggagatgctgcccaattgcgaggttgtgggagtcgactgggctgagggcctgaagtcagggccggaggagcagcctcgggacacagccagccctgtccctgcctagcctttagccctgtccccactcacgtggcttctcagcgggctgcatggaatgtctggtagctcaccacacttctggcttccatttgtcttcactcaacgtcagggtgggggagtggtgctggccaatcacaggagagagcgtgagttcccagtattatattcctggctgcccttggcttaaggtcacagctcctgtcaccctgtcaggcagccctttccatgcccctgttcaggcctggggaggtaaaggctcaccctgttagtacccccacagacccacactcaccttgtcagganactcttctcaaactgtccttatgtgagtgcactnccatctcttgcagngaccctcactcacncagncncnaccactcacacttcacaangatggttnnnnnnnnnnnnnnnnnnnnnnnnnnnnnnnnnnnnnnnnnnnnnnnnnnnnnnnnnnnnnnnnnnnnnnnnnnnnnnnnnnnnnnnnnnnnnnntattgctnnttatcnatttattcactttatgtnccaaattcnnctttttcagttcgctnttttttnaaaggnnataanctttntcagtagagggctccacacacccnttataggannaaannnnnnnnnnnnntggntcttgttggttgtgcctctcccnctgcaccccccacnccctgtnnnnnnnnnnnnnnnnnnnnnnnnnnnnnnnnnnnnnnnnnnnnnnnnnnnnnnnnnnnnnnnnnnntccnnagttgcctaggagaccccgcncctcccntgaggcncttctctggaaata

SEQ ID NO: 439583 - DNA, 982 bp, Homo Sapiens
  misc_feature (931)..(931): n is a, c, g, or t
  misc_feature (967)..(967): n is a, c, g, or t
  misc_feature (970)..(970): n is a, c, g, or t
acaggctggtacgcccggaatgtatggataaccttagcaagatggcggctccctgggcgtccctgcgcctggtcgcccccatgtggaatgggcgtatcaggggcatccatcgcctgggtgcggcagtggccccagagggcagtcagaagaagaaaaggacaatactccagttcctgaccaactatttctacgatgtggaggctctgagggattacttgctccaaagggagatgtacaaggtgcatgagaaaaatcgatcttacacctggctggagaagcaacatggtccatacggcgcaggtgcctttttcatcctgaagcagggaggcgcagtcaagtttcgagacaaggagtggatcaggccagataagtatggccatttctctcaggagttctggaatttctgtgaagtgcctgtcgaagctgtggatgccggtgactgtgacatcaactacgagggcctggataacctcctccgcctgaaggagctccagtccttgtcgctgcagcgctgctcccacgtggacgactggtgtctcagccgcctctacccactggccgactcgttgcaggagctctcgctggccggttgcccccgcatctccgaacggggcctcgcctgcctccaccacctccagaacctccgcaggctggacatctcggacctccctgccgtgtccaaccctggcctcactcagatattggtggaggagatgctgcccaattgcgaggttgtgggagtcgactgggctgagggcctgaagtcagggccggaggagcagcctcgggacacagcagccctgtccctgcctagcctttagccctgtccccactcacgtggcttctcagcgggctgcatggaatgtctggtagctcaccacacttctggcttccatttgtctcactcaacgtcagggtgggggagtggtgnggccaatcacaggagagagcgtgagttccagtattnatnctggctgccctt

SEQ ID NO: 439584 - DNA, 519 bp, Homo Sapiens
ccgtgcaggtccgctgtgcccactgcaggacatgcagcatctttcgccccactccactcataaaaggccagggcaccccaggccccatagtattgctggttatggatttattgactttatgttccaaattcagctttttcagttggctgttttttgaaaggggataagctttgtcagtagagggcaccaaacaggcattataggaggaaaggcgcctccttcgtggttcttgttggttgtgcttctgcctctggacgccgcagtgcatgtggcttccccagcacccagctcctgaagcaccaggcggtcagcagctgcccttggcaccctccagccctcagaagttgcgtaggagacacagcgcctccactgaggcacctctctgggaataacgttccccagcaccccaaatggatttccagtcaattcagaagcattttaccagtgaagccctcattattccagttcactgttaaagccagtaattctctatattaaactttccctgttcaagttaaa

SEQ ID NO: 439585 - DNA, 1078 bp, Homo Sapiens
gcgtgggtccatctcactgcgcgggtgtcagggtgtgtaaaatgaggtcgtgcagatcagggggtcagggaacctgttgcccttagctccgagggcaagccgcgggatcgaaatgctgggcagcgctccgctttttccgctcgggttggcgaggggcgtggttccccccacccttaaggtggagtgagggcaaatggaagccccggaaggtggggtgagcttcccaggccattccatgccggcccgctgagaagcccacgtgagtggggacaggggtaaaaggctaggcaggggacaggggctggctgtgtcccgaggctgctcttccggcccttgacttcaggccctcagcccagtcgactcccacaacctcgcaattgggcagcatctcctccaccaatatctgagtgaggccagggttggacacggcagggaggtccgagatgtccagcctgcggaggttctggaggtggtggaggcaggcgaggccccgttcggagatgcgggggcaaccggccagcgagagctcctgcaacgagtcggccagtgggtagaggcggctgagacaccagtcgtccacgtgggagcagcgctgcagcgacaaggactggagctccttcaggcggaggaggttatccaggccctcgtagttgatgtcacagtcaccggcatccacagcttcgacaggcacttcacagaaattccagaactcctgagagaaatggccatacttatctggcctgatccactccttgtctcgaaacttgactgcgcctccctgcttcaggatgaaaaaggcacctgcgccgtatggaccatgttgcttctccagccaggtgtaagatcgatttttctcatgcaccttgtacatctccctttggagcaagtaatccctcagagcctccacatcgtagaaatagttggtcaggaactggagtattgtccttttcttcttctgactgccctctggggccactgccgcacccaggcgatggatgcccctgatacgcccattccacatgggggcgaccaggcgcagggacgcccagggagatcccgggaattccggaccggtcca

SEQ ID NO: 439586 - DNA, 606 bp, Homo Sapiens
acgaaaccttagcaagatggcggctccctgggcgtccctgcgcctggtcgcccccatgtggaatgggcgtatcaggggcatccatcgcctgggtgcggcagtggccccagagggcaatcagaagaaggaaaggacaatactccagttcctgaccaactatttctacgatgtggaggctctgagggattacttgctccaaagggagatgtacaaggtgcatgagaaaaatcggtttcgagacaaggagtggatcaggccagataagtatggccatttctctcaggagttctggaatttctgtgaagtgcctgtcgaagctgtggatgccggtgactgtgacatcaactacgagggcctggataacctccgaacctccgcaggctggacatctcggacctccctgccgtgtccaaccctggcctcactcagattttggtggaggagatgctgcccaattgcgaggttgtgggagtcgactgggctgagggcctgaagtcagggccggaggagcacgcctcgggacacagccagccctgtccctgcctagcctttagccctgtccccactcacgttgcttctcagcgggctgcatggaaatgtctggta

SEQ ID NO: 439587 - DNA, 1143 bp, Homo Sapiens
  misc_feature (1003)..(1003): n is a, c, g, or t
  misc_feature (1013)..(1013): n is a, c, g, or t
  misc_feature (1022)..(1022): n is a, c, g, or t
  misc_feature (1057)..(1057): n is a, c, g, or t
  misc_feature (1076)..(1076): n is a, c, g, or t
  misc_feature (1087)..(1087): n is a, c, g, or t
  misc_feature (1089)..(1089): n is a, c, g, or t
  misc_feature (1093)..(1093): n is a, c, g, or t
  misc_feature (1096)..(1097): n is a, c, g, or t
  misc_feature (1100)..(1101): n is a, c, g, or t
  misc_feature (1109)..(1109): n is a, c, g, or t
  misc_feature (1124)..(1124): n is a, c, g, or t
  misc_feature (1131)..(1131): n is a, c, g, or t
aggatccttaattaaattaatttttcctccccggaggcttcccctcgtttggcggcggcggcggcttctttgtttcgtgaagagaagcgagacgcccattctgcccccggccccgcgcggaggggcgggggaggcgccgggaagtcgacggcgccggcggctcctgcaggaggccactgtctgcagctcccgtgaagatgtccactccagacccacccctgggcggaactcctcggccaggtccttccccgggccctggcccttcccctggagccatgctgggccctagcccgggtccctcgccgggctccgcccacagcatgatggggcccagcccagggccgccctcagcaggacaccccatccccacccaggggcctggagggtaccctcaggacaacatgcaccagatgcacaagcccatggagtccatgcatgagaagggcatgtcggacgacccgcgctacaaccagatgaaaggaatggggatgcggtcagggggccatgctgggatggggcccccgcccagccccatggaccagcactcccaaggttacccctcgcccctgggtggctctgagcatgcctctagtccagttccagccagtggcccgtcttcggggccccagatgtcttccgggccaggaggtgccccgctggatggtgctgacccccaggccttggggcagcagaaccggggcccaaccccatttaaccagaaccagctgcaccagctcagagctcagatcatggcctacaagatgctggccagggggcagcccctccccgaccacctgcagatggcggtgcagggcaagcggccgatgcccgggatgcagcagcagatgccaacgctacctccaccctcggtgtccgcaacaggacccggccctggccctggccctgggcccggcccgggtcccggccctgcacctccaaattacagcaggcctcatggtatgggagggcccacatgcctcccccaggacctcgggcgtgcccnccgggatgcnaggcacctnctggtagagctcccaagctcttggctgaaggaccnatgcggatgtgctgccccnagaagaccctnanaagntgnngcnnggagcaangggcgcctttcccgngcccctncgtccaccgcgc

SEQ ID NO: 439588 - DNA, 1113 bp, Homo Sapiens
  misc_feature (7)..(7): n is a, c, g, or t
  misc_feature (17)..(17): n is a, c, g, or t
  misc_feature (22)..(22): n is a, c, g, or t
  misc_feature (24)..(24): n is a, c, g, or t
  misc_feature (30)..(30): n is a, c, g, or t
  misc_feature (34)..(34): n is a, c, g, or t
  misc_feature (40)..(40): n is a, c, g, or t
  misc_feature (44)..(44): n is a, c, g, or t
  misc_feature (58)..(58): n is a, c, g, or t
  misc_feature (66)..(66): n is a, c, g, or t
  misc_feature (74)..(74): n is a, c, g, or t
  misc_feature (82)..(82): n is a, c, g, or t
  misc_feature (94)..(94): n is a, c, g, or t
  misc_feature (110)..(111): n is a, c, g, or t
  misc_feature (113)..(113): n is a, c, g, or t
  misc_feature (118)..(118): n is a, c, g, or t
  misc_feature (140)..(140): n is a, c, g, or t
  misc_feature (150)..(150): n is a, c, g, or t
  misc_feature (164)..(164): n is a, c, g, or t
  misc_feature (171)..(171): n is a, c, g, or t
  misc_feature (184)..(185): n is a, c, g, or t
aagcaantttataaaangaccngngccacnccgnggcacncccnggtaattgtgaaanccgggaanagtctctnttgtcaanaatcaaaggggnttgtatccccaccatnngnaaaancccctctccacgaatcactccnggataggtgnacacttgctttgtnttatcanccaatgaaatttnncaccagtcaatgtaaaattgagtacgaatttttttatcacatgttattacaggctccatttcttgactacatctcaattgattctgtggattttcaacttctcgtaaacaagaagaaaacgggacatctgcaccaaccatgacataaacgccctccttcaggtcattaatgggaagtggcaccctgccacccctgtctagggccgatgtgatgtttatggcgttcaggcgctctggctgccacacatttttcactgcgccaagaaagtctccaagaacctcactggccaacatttcttctacattcatattcttaatgaagaattctgcttgatatggcaacgggaagtcttctgcagacattatattaattatcaaattatgccttgcagtctcaaaggtgcgcctgttgtaggcagttatctcaatgattgttggcttccccacattttcagctgttggggacccatataggactccatcactatatggtgtcctttggatatatcgaagccatccaggtcggtctgggtaacccattaaatttgtattaaatgttatgggatcattactaatctcgccaggttttgggtaaggtggaaattcccccttaaaatattctctttccaaaacatgaacaaagaggacacctgctgatgggtatacattccgatcggagtgtaccttggagaaaatactgtacactgtcagcaagaatgtgccagtggtcgcggggctcatcctgcgtgtcccccgaccctgtcccgtccaagcacaggggtctcccagctcccaccaccggggcaattgcattcttggcctggctaggccgtccgtcctcgattctcccctcccctccctttcttcttcctctcaccaggatcggccagttcagcatcagcatcccgcaccccctcggtaatcccgct

SEQ ID NO: 439589 - DNA, 818 bp, Homo Sapiens
ctaggccgatgtgagtttatggcgttcggcgctctgctgccacacattgttccactgcgccaggtaaggtctccaagaacctccactgtcctacagttgcttcacatgtcatattcctaatgaagaattctgctgaatatggcaacgggaagtcttcttgcagacattatattaattatcaaattatgcccttgcagtctcaaaggtgcgcctgttgtaggcagttatctcaatgattgttggcttccccacattgttcagctgttggggacccatataggactccatcactatatggtgtcctttggatatatcgaagccatccaggtcggtctgggtaacccattaaatttgtattaaatgttatgggatcattactaatctcgccaggttttgggtaaggtggaaattcccccttaaaatattctctttccaatacatgaacaaagaggacacctgctgatgggtatacattccgatcggagtgtaccttggagaaaatactgtacacatctttcatcccagcagccatttttctgctgataataaaattgttggcctgtctggtcttccagttaactgttccatttatgccatcagcacagcttaataaaaaagcttaaaagcaaactgtcaagtctttctctgtccactacttcatttgtctctttcatattccactgtcagcaagaatgtgccagtggtcgcggggctcatcctgcgtgtcccccgaccctgtcccgtccaagcacaggggtctcccagctcccaccaccggggcaattgcattcttggcctggctaggccgtccgtcctcg

SEQ ID NO: 439590 - DNA, 899 bp, Homo Sapiens
  misc_feature (30)..(30): n is a, c, g, or t
  misc_feature (39)..(39): n is a, c, g, or t
  misc_feature (43)..(43): n is a, c, g, or t
  misc_feature (46)..(46): n is a, c, g, or t
  misc_feature (49)..(49): n is a, c, g, or t
  misc_feature (55)..(55): n is a, c, g, or t
  misc_feature (149)..(149): n is a, c, g, or t
  misc_feature (152)..(153): n is a, c, g, or t
  misc_feature (159)..(159): n is a, c, g, or t
  misc_feature (181)..(181): n is a, c, g, or t
  misc_feature (232)..(232): n is a, c, g, or t
gagccggttctcctcctcctcgcggtcgcngtctggcangaanctngtntccacntcggggttcttgcccaggtttccggcgcgcctggcctcgccgcgtcggcctggtcatcgaggtcgtctagtgcaaaggacaggcaggagatctntcnnttgcgntgcgccgctgctcctgtgcgcntgccgctcctgctgcagccgctgctcctcccaggttgtggcgcttggccantggccctcgcgctccctgaccagggcctcctgccgggccttcatgtcgttcagggtcaccaggcccaccgtgctggacttcagctcggcctccacggcgtcgtaatgcgccgagaacctcttgtccactctgcgacttgaggatgtgtctcctcggcgatgcgctgtttcagcacctccatcttctcccgctgcttttcgcgcttcttgaggaggtgcatggcacggcctgcctcgcgcatggtgcccttgtactgcgccatggcccgcgcctacccgatgggctctgcagcaaagaggaaaaacgcggcaggtagaggggggcccacgcaacggcggggaatgctcagctctgcgcctcctcacagggctttcggcagtgatggaagcgttcaggggctgggccgacctgctagggtaaccaccaacctgacagtgtcaccaggcaccaatttccagcattttatttgacctcaataaatgcaaatgcgaacggccccacgtaacgggtggctgccatgcctgagcgcagcgctgaatttggggagctgcatacagagagggttgggctactgagcggacccttacctgcccaagcaccctgtcgagcggagacacgcgggagctgacctccacgagaaccacccacgagcagaggcccactcgcc

SEQ ID NO: 439591 - DNA, 1650 bp, Homo Sapiens
aataagaacagaaacatttattaagagctaagcgttttacaaatattaattcacttaatactcacatcaatcttataaagtaagtgctcttgttatttccttttacaggtgaccaaactgaggcatgggggtttaataagcttacccaaaactacacagcaaggaggaggctgtgtcgggaatcaaactcagtcactgtggcccccaagtccatgctcataaccaccaggtaaaaaatgtgcctcctattctaatttctgtctgacagtgggcccagtcatggtttcaatacagctcagcagagcaatgcagcaaatccaggtggcaacactaaaatactcagaaaagaccaaccaagcaaccaaagcataacatcagcaatagcacaaccaatgtgaatcatgagaaccctctgtctttattaaatttgggggaagaaatcaaggtcacgaaatcaagtgactggtgatggggcctagaaatgagtgtctccccccacccccggtttccgctctggcaggcgggtgttagcggatggtgtacttgtcccacttcttctcggggtcataggcctcccagcggctggcggggaagatgtgcttgttcttctcgtaccagctgcgcagcaccaccttgcccgcgtgcgactcgtccttctccatggtggcgtcgctgagcaggcgcacgtcatcgtgcacatcgaagctgaagagcggcccgctcttgcccctcgccctggcgatgatgaagtcgtagaaggtgtggtagtgcggcaggatgaggtcctccttgatgaacatgagctgctccacgccggcggagcgcagctccaggaagtccttgcgcagcccctgcagcgccttcttcaggaactgctgcaccgtgttgcccttgcgcacccgcaccgtgcgccggtggcccgagccgtcccagtagctgaaggtgacctccatctcctcgtccttcactttctcgcgctgcgcctcccactcttggcgcagctcctctcggagccggttctcctcctcctcgcggtcgcggtctggcaggaagctggtgtccacgtcggggttcttgcccaggtttccggcgcgcctggcctcggccgcgtcggcctggtcatcgaggtcgtctagtgcaaaggacaggcaggagatcttacgcttgcgctcgcgccgctgctcctgctcccgctgccgctcctgctgcagccgctgctcctccaggtgctggcgcttggccagctgccgctcgcgctccctgaccagggcctcctgccgggccttcatgtcgttcagggtcaccaggcccaccgtgctggacttcagctcggcctccacggcgtcgtaatgcgccgagaacctcttgtccacctgcgacttgaggatggtctcctcggcgatgcgctgcttcagcacctccatctgctcccgctgcctttcgcgcttcttgaggaggtgcatggcacggcctgcctcgcgcatggtgcccttgtactgcgccatggcccgcgcctacccgatgggctctgcccaagcaccctgtcgagcggagacacgcgggagctgacctccacgagaaccacccacgagcagaggcccactcgccccgggctctcgcgacagccgtggacacaggaagtggaggcgt

SEQ ID NO: 439592 - DNA, 440 bp, Homo Sapiens
  misc_feature (404)..(404): n is a, c, g, or t
aataacaacagaaacatttattaagagctaagcgttttacaaatattaattcacttaatactcacatcaatcttataaagtaagtgctcttgttatttccttttacaggtgaccaaactgaggcatgggggtttaataagcttacccaaaactacacagcaaggaggaggctgtgtcggggaatcaaactcagttcactgtgggcccccaagtccatggcttcataaccaccagggtaaaaaatgtggcctcctattctaatttctgtctggacagtggggcccagtcatgggttttcaattacaggcttcaggcaggagcaatggcaggcaaattccgggtgggccaacacttaaaattacttcaggaaaagggcccaacccaacccaaccaagggcttaacntcaggcattaggcacaaccattgtggattcttgggg

SEQ ID NO: 439593 - DNA, 2351 bp, Homo Sapiens
  misc_feature (134)..(164): n is a, c, g, or t
  misc_feature (619)..(669): n is a, c, g, or t
  misc_feature (823)..(838): n is a, c, g, or t
  misc_feature (2279)..(2306): n is a, c, g, or t
tgcccctaagcctttttaaaattcgggactcccctttatttggggggccccccttttgtacaaaaggaaagctggggtacggcgtaagctttgggcccccctcgagggggatttctctagagccgggccgcccnnnnnnnnnnnnnnnnnnnnnnnnnnnnnnngggtttctaatccaaacgcacttctctttattcaaaccagggtcaaactggtcaatgggaaacgccctgaagccacgtgcctggggagaaaggcttcctactcggttcggttcagcgctgcgtgggatccacgcggctggctgtgcgcaacccccacagttcacctcagacactaccaagcaggtcagtcgacaaaagcaaggaattaaacaaaaaacagaaatacactcagtagatttcttctagaagctcccagagtttctggaccaccaagtcccaacccccaaagccaggagcgaggggactaacagcgcaccccctccaccagtgccgacggaaaccccgttttaaattaaaaaataagccagtatacatcgtagaaaatttctcttaaaaatctcacaatttgtaaatgtatattttttctttaacataaaagtttacaatataccgtnnnnnnnnnnnnnnnnnnnnnnnnnnnnnnnnnnnnnnnnnnnnnnnnnnncctgaagttttgaattaaagctgaagacattttttttaaaccctgttgttgaaccagtgacttttttttattgtgctgatgggttagagaaagaaatatttaaaaacctcagtccagacgacacccacagccgctccaaaagcctcgcgccctnnnnnnnnnnnnnnnngcaaggttgagtcgccactttgccgccaagtttgtgattgtcacgagttcacaagtttggaatcctgggtctgggccgtgcagacgtcgcggcgccgcgggctagcgtcggtaggggtggaacccttgcacgttgtggttctgccctcgtccaaagccgctgccgccggcgggggggccccccgaccctggcacggagggacccccgtaggaaggaggctgctggctggggtctgagaagccctgtccgaagccactcaagtcctgcccgtaacctgcatactgaccataggggaagtctggctgagctgtcgggggcttgctcatgtccggggcagcctgagacggaggcggtgggaaagccagaggtgctgccccgggagtggctggtggaggaggaacccccggaggggcaaactgatctggcggtggaggtggaggcccgtagccaaaactgaactgtggcggggcaccgtagccctgagggaagccctggggagggggaaagcctccaggaggggtggacacgatgtaggaggtgaacggtgggggtggcgggggggctcctcttcctgcagggggcggtccatagccaccaatcgcctgtcctgccggcacccacattccttgcgggccatatccttgctgccacgtgggcgggggctggcctgcccagccattggcagcgttgggcacaacccggctcccccactggctggcacctggctgtcccggcgcttggctcttgctgtcccgaggctcagctcgtttaacttccacttttttgcccatgatgtcgtgaaaatgcatgttgacagcctggtccactgattgttcgtcctcgaaagtaataaatccaaaacctcggggcctctgcttctcggcgtcatagatcatgactacctccgtgaccactccgaacttcttgaagtattccctgagctctgtctcaccacaattgtgaggaattccaccgacaaatatcttatttgatttactgttatcgctcctgggtcctttctgccatccttccttcggccgtgttctctccggctgcatcccccggggtgtgcatggcttggggtcgatgtttcggccatctagcgtgtgcggtctgctggccagcaccgtccccacacagtttgggtctttaaatttgacaaacccaaagcctcgagactggttggtggttttatctttcatgataacacaatctacgacttctccatattgggaaaagtagctgcgcagagtctcttgggtcgtgctccagtcaagaccgcccacgaagagcttcccgatctcgtcggcgcccgagttgttcatggcggcggcggcggcgacgctcggcgctcccgggcctcctcgctcgctcccgcctccggaaggtcacccgctccgtcgccctccccacagccgcggcccggatctgcgcaacgcannnnnnnnnnnnnnnnnnnnnnnnnnnnacgcagcggctgcctcctcccctcggcgccaacgatcaccgcgcg

SEQ ID NO: 439594 - DNA, 373 bp, Homo Sapiens
catcccccggggtgtgcatggcttgtggtcgatgtttttgccatctagcgtgtgcggtctgctggccagcaccgtccccacacagtttgggtctttaaatttgacaaacccaaagcctcgagactggttggtggttttatctttcatgataacacaatctacgacttctccatattgtgaaaagtagctgcgcagagtctcttgggtcgtgctccagtcaagaccgcccacgaagagcttgccgatctcgtcggcgcccgagttgttcatggcggcggcggcggcgacgctcggcgctctctgccctctggaggcttagaagtctcaggtttctctggggtcctcaggtggagccgggaggtcacccgtgccc

SEQ ID NO: 439595 - DNA, 267 bp, Homo Sapiens
ggacaaaaatgctactggcctaaataaggtttatagttaagtatttagtcttaagttgtaagatgctaagtgtagtcataagttacccgagggtgtgtctaaagggaagggggtgctgggacccgcagcctcgccctaaaccagagctcggtttgtttaggtggaagttaaacgagctgagcctcgggacagcaagagccaagcgccgggacagccaggtgccagccagtgggggagccgggttgtgcccaacgctgccaatggctg

SEQ ID NO: 439596 - DNA, 458 bp, Homo Sapiens
  misc_feature (103)..(103): n is a, c, g, or t
tcgaccacggcaaacgccatgccaaacgctagcaggccaccaagcagggtctccatggtctggtcactcagcgcctgggcgaggcagcatctacccccggctngggtggcaccgaggccggctccgcggggcgcccgggctccccggctcggccacgcatccttccccgcccgagacagactcgagctaaaccctccggcggctccggcgaatgcaggcagatggtggcctcggacgtccacgcggggaaagccctgagcggctttattcagttatatccatggcatttagcaagaagaaggggggaaaagcacaacttgttctcttctcttccagattaaagaaaaataataataataatccctccctaggaggatgccggtaggattttccggatcgaagaaccccaggcattcccaggaacctcgggcatcttggaatgtggggtgtcttcaagt

SEQ ID NO: 439597 - DNA, 1143 bp, Homo Sapiens
  misc_feature (827)..(874): n is a, c, g, or t
  misc_feature (1048)..(1048): n is a, c, g, or t
ggcccccaaaccccaccccccagcgctgagcatcagggttgctcctgggagctcgcagcgagggggtgaccgctccgagtgtgtctacactcgccgcgcgggtgccgccctagctctgttccttccggcgcagcttggtcccaccagagccgccacctcgaggctgacacctgccacagcccttttggccgagatgcggtcactttccctgaggtctggtgtgcccaaaagacgagattccagtccgagccctgtcctcaacttgctgtatgaccttgggaattgctagccctcgacgtttcggcatctgcaggatctggattagaaactcggaggtcaggccccgagaccttggtaccgggagagcagggcatgtggacagaccctccgctgctctctgcctctcggtagaccccaccctcacccgggcacgccggccgggtctggaataccggccggcgagctccagtctgggcgccctggatgtttgggggcgcctgggcttttgttctcgctacttctctttgtacattggaatcgacttgaaccccccaccctccaccccacagcgggaaagggaggcgatgacagcttgctgatagttctgggagggtctcgctcaacagctgcaggctgagctccgccgcgtgcgcccgggtcattcggcctttctcgccaggggatgaaagaggtcacgtcacctcgccaacggcccttccgaagtgtggggcggcgcgcttcagtcatcgaattgcagggaacaggttgtgcagtgaacgtttctgacaccctttcccctcccgccctcaaacgcacgcaggattagnnnnnnnnnnnnnnnnnnnnnnnnnnnnnnnnnnnnnnnnnnnnnnnngcgcgcgcgaaaagtaacaaagagaccagttcctgcctcagtacctagagactgcggatctgaagggagggtctgtgctccaagtctgtgcacgcgctcgtgcgagtgcgcgtgggtcttgggtcgtctcgcgcgcgctgggctgcagtttttagtcgtattccccacccttcnaccgcagcacgaagcctcggacctccaggtcgccgcgatggaagataagaaagtttgttactcgggcttgggccacccttggaacccaccctctt

SEQ ID NO: 439598 - DNA, 1634 bp, Homo Sapiens
  misc_feature (996)..(996): n is a, c, g, or t
  misc_feature (1076)..(1076): n is a, c, g, or t
  misc_feature (1143)..(1143): n is a, c, g, or t
  misc_feature (1157)..(1157): n is a, c, g, or t
  misc_feature (1270)..(1270): n is a, c, g, or t
  misc_feature (1291)..(1291): n is a, c, g, or t
  misc_feature (1298)..(1298): n is a, c, g, or t
  misc_feature (1308)..(1308): n is a, c, g, or t
  misc_feature (1324)..(1324): n is a, c, g, or t
  misc_feature (1366)..(1366): n is a, c, g, or t
  misc_feature (1369)..(1369): n is a, c, g, or t
  misc_feature (1398)..(1398): n is a, c, g, or t
tagttatacaagccagatgatctacttgtatattactaataatctgtttatttttcattgtatactttttcctggctatgagagatacacaaacatattttcagaataaaatagcaaatacctatatgctttgacacttgctatgtgtccaaaatatcccatggccttttgagaggtccttggtaggggagtttagatctctgttctgtaagcaataatattgaatgggtaaatacacatgtggaatgcttagttagtcctcatttaaccccttccctatctcaacattcatgtcctcagccgaggacaaagcacttaactgactttctatgtgaaaatgtatcagtgattcagaaggggttttaattgtttaaggctgggataacaattaaggtttgccttttgtgttaactctatacatttgttcttcaatatctataagggatgtctatagaaagattcaaggctatggtctgagcttgacgagagtgacacatttagattaatgatctctctcctgggcatgggaaggaaaatatcctcacaggagctgagctgcatatttgacacccctgataaagcattaggttatgctgacaccacattgtctacagatgatctttgcaccttctgatttgcttagtatccattgtcaaacacttaaatatgggttaaggctactataaaaattatttacttaattatttacttatgccattttttttcagtactaaaactgcattttaggttgtgtgctcagagtaattgggccaagattccagtgaaatacctgaatggtgctaaaaataaattcaatgaaattcctttaagtcctttctcagtggttagattgtttactcctcaaattccttgctaacaaattcttcctaatagaggtcctgttagagtcaattagttaagatttatttataattagaaactcctatttgcacgcaattgactctttcaaagtctttcagtaggttaagtttgttntctgcagttttgattacaaatacttcatttttgtaacaaagttaagctttagtttaattcttggtcatatcaaacatttnaaattcattgagtctaaatcatgagttgattatattagatttgtgtaataaagcattaacaatcatnacagttaagatgantcttttatgtgttagttcattggggcagaagacagcataatacagatgcccagtgtaaagaagttagcagattcaaattatccagtggttcactcaactagaaactctaattnttaaagaatgatgtaaaattngctgggnacttgtgtgnactcgcgagcatatgntcttgtgttgttggtgtatattgttctgctttgttttgttgntcntcatatacattcaaataagagcttttctnacttggtagtagtaggtcaggataaagagctggggtgtgctatcccctacttgtgagttgtatataatttgttaggattcttttgtgtccacctttttttaagtttagatggctggctctgactgctataacaaggtatgtatcacagctatgtaatgtaagaatgcgaaatctactatagttgtactataaattcagcacctgttactgtataattaagatactgaatttgaaga

SEQ ID NO: 439599 - DNA, 2465 bp, Homo Sapiens
  misc_feature (2277)..(2332): n is a, c, g, or t
tagccgtgaatgaaggaattatttaattgctgttgaatggtttacttaaaaacagcatcattcatataatacacaaccccaaggtcacagaagaaagtgcccaggcttcaggctgacccacattgtaaacagtccttcccaaatcttttctctataaacaacagtcctctatgctgctgcctccaaacataatgccatccattaataccactggctgggcacaccgggatcaaacctgtgaccctaaactgccatggaaatagcttaaactggggttggagactcataacactgagtggggggattccctccatctcactccaaatgagtccaaattcacttcacactgcttttctgggtgagcacagtacttgagaaggactgatagaacccagatgatctccagaacaaggcagatggctccagccttccccagcccacaggcccaaatatttagagtcagaggagttctcattcttaacaaataaccaccatgcttcacatttgcaatgtctatttcccctcatatttccatacctattatgtcactcaacacaaaattccatgattctgtgcaactccagatgaaaaacacattttagaatttgttacaccagctactatttgaaataaatggaccatcaactattctagaaatctctttatgtcattgctgattttctctgcaacggcatccaacctgtccctcatttatccttattccaaccctatgaagtagacaggaaaaccagagctaagagatttttttctatatcacacaactcataggtggcaggtccaggtctaccctttagatacctcggagtgctgccacctagcagccaacatgaattattcaccagcaagtgggagtcacacctacaactcagaacccactgctgcatttgggatttgcaacctgtgcagagaaacctccccacatctcccagccctccagaaaagccccagatgagaaaggagtctccacgtgcatataaatgattctttatgcccttcccccatgcaatgggggatggagcagggggaactccccgccctcatgcagggaacgggaggtcaatgtatactagtcttattgccagatgccctgtggccatggggtggggaataggggtctacagcccctttcttctggcattggtcccccttcaccaagtcaccgtggtggagctggggggctggaggccctaggagctgaggtaaagacggttctctccagggaaggaaagctgctctccccgcctgcccaccggccgtctctggatgagtgggaggagctgccagcgggtactgaaatgtcatccaggtgtctctacccagtgggcagtgaggccagacaatgtctccagcttgaggctacccacacagatcctcggtgacgggggcagcatgccccaaacaccttgtccagctggtacctccagcagccatgagagttcttctctgactgatgcattgactcaagattcctgctcctggagtccagttcagaactgtagtgaccctcatgacaacctctcgtccagaatgggagctggaacgggcatctggtggccgcagctgcccaaggaggtgcaagattgtataaccgcagcgctgaggcaagagcgtccgcatgcgctgggcagctggggggcggctcgtggccccagaggtggggcccgtccgtgagttcctggggcctgacttccctgccgtccctccccctgcatctcctcctatgtccttggtcttgtcataatttaggaccttccactgctggttcactgcctgccagcgcttgaagatgcggtagacagaggagccttcatggatgatgaggcctatgcagacgacatccatgaagccatacatgccgtagcagatctgaaagagcagatcctgtcgttgccacttggctgaagggctgagtgaggaccagatgagccaggagatgctggcaaccaggaagagcgagcccagaactatggcagcaatctgggccttgtggatgaccgtcagggagatggcctgccactgcagtgggttcttggtgctgatcgccaggacctggtgcttgaagtagcagagctcacaggtccaggagcccctctcgctgatccagcggatgaggcaggggtgatgcgtgcagcgcactgagccgtcgcagcggcaggggcttaagagctccccctgctccgggccctggaagcagatccggcactgaggggttcggagtccgctgtccaggctactgctgagcgacagggcgtccannnnnnnnnnnnnnnnnnnnnnnnnnnnnnnnnnnnnnnnnnnnnnnnnnnnnnnntccttgtcgccggccaggccccgggcccgcggctccgacccgtagtactcctcctcgtcgccgtcgccgtcccgggtggagcaaccagcgaagggcgcccagccgcagcctcgtgccgaattcgccacccagc

SEQ ID NO: 439600 - DNA, 1693 bp, Homo Sapiens
ggggggggtttgctcaaagcgctaccgggcgggggggcccatggcttctttatgcgaacgggcaatacacttattggggcggcctcgcctcgaggaaggttcacccaattggcggggggcccccggcttcgcggggggaagaattaccggaatgtcccgaacccccgaacggcgcctggcaaattgcggttgaagcaaggacggggcccgggccctagtcgttcctcgtgttccttctcctgcgttttcctgttggtcctccttcctgtttcctcctgctccggccatggtttcggcgggcgcgcgcaggtgcccggggctggcgtcgtcgggcagccccagcccgcggcccctccaggctcttctgtttccactcgctgatgagcttgcttggagcgcgaggcgtccagcggcacgtggatggtcatgtggcggcgcgcggggtcgtccagcgagggcgcgctggccctgggcagcgtgtggctgaaggtcaccatgttctccttggccatggggctgcgcggggccagcaggtccacgtccacgctggcgcgcttcaggctgcccagcgaggtcttctcgcgggccacgggccggggcgcgccctccagccgccctgggggccccagctcgtcggtgctcaccgacttattctgctgataaaccgagtcgtggccccgctgcgtcagggcccgcagcgcgtccttggcgggggccggggccgcgggcttctctgcaggtggggcctggaagttgcccaccgcgtggcaggccaggtaggcagcgatgcccgccccgatgaggaagccggcatacacgtccacagggtggctgcgggtactgcgtgatctgcgtgagcccgcatacgcccgcggcgatggcaaaggcgaagaccaggatgggcttcagcagcttggtggtgtccgagatgaccgagttgaagtacatcgacacatagaccgcggcgaaggctgacagcgtggcgtgctgggacgggaaggtcttccgtgcagacaggatggcgtggatgtcgtggccggagcagatgtcctgcgtgatgtaggggttgacctcgcaggacgtgcccaggagagtgtagttgggcttgcagacggtgaggaagaagggagtgtggtaacccgtggccagctggatcacgtccgtcaccagggctgtggcacacaggccgaacacgtggacacccacaaaccgcaccgtacgccgcaggaaggagttgaagttgcagccgccggcgttgatgctgccctccgccccggcgggccccccggcacggccccacagccgggactgcagacagtacaacatgccctcggccaccatgatcgaggcggcaggggccgcgaaggccaagctgagcagcatcagcagcgggatgagctcctcgttggtctccacgtagggcatggagagagtgcggtcatagcactggaagcccaccttggccggcttgaagaggtcggtcagctccaggaagtacaaggatacgatggaagaagccactatgggcagctccacgaagtagaagcagggcagaagcgtcatgctgtcttcgggatcttgttcttctccttggtggagatcatggtgccgcgggcgccgcaggccgtggctggcgcggccggcgcccagcacaaagcgcgtctcctccgtggggcggggccgatcccgggaa

SEQ ID NO: 439601 - DNA, 1853 bp, Homo Sapiens
  misc_feature (1727)..(1784): n is a, c, g, or t
gcggccgcgctcctccgcgtgctgcctccggccggcctcaggatcccgggagagggaccggaacttggcggggctccccggtggaggagctgccttggcgggggtggcaacagcggggccgggaggggtccggttcaagttggagttgccggccatggcccgccgcagggggctctcgggcaggggctccacaagcagcggggtgctgcggcagctctccccagtgttgtaggcgctggtgctgtccttgtccgacttctcgggcagctcggagatgtcggacagctcgtgcttcttgggctcgctggccgccaggtcgtagaggctctcctcctccagcagccaggccttcatgcagcgctcacgcagctgctgcatcttctgcgcccgcagtatgttgcggcacttgaattccaggtgccttagctcctcctccagcatggccatctcgtggcccaggctctcgttgcggttgacgtccagggcgctgttgcctccggaggcccggggaaagaggaggcccagctggttgccgttctccaggtggcacttgatctccaggagctcacggtagcgctcatactcctcatccgtgaggcccgggacgtcgccccctcccagccccgccccctcggccagcagagagtccatgctgaaatggaagtcccggctctgcagggcgtccccttgcaggccaaacttgcgcaggcttcccggggtgttggtggagctcgggggttcgtcccccagcaggtcgtgctcagagctctcttcgttccgggtgctctcgtcagtccggcccaccccgctgtccagctcctggctgttgctcaggcctgggccggcatcgggagcccccttctcctcttcgtttccgggctgctgggcagggggtgatttcagtttacgagcacgcagctccccctcattctcagagccaaagtcatccaggaagtcatcccggtcgctgtccttccaccttttcgccagctgactctcaggtcgggccaccagcagggagatgttggtgttctcttcctggctcaggatggccaccgcctcttcccggttctggacgtctacaccgttaatctggatgatgcggtctccctcacggatccggccgtctttggctgcaatgctgttgggatttacctctccgacataaatgcccaggtcctcctcgtcgtccgtgcggtagcaaaccatcaggcccagcttgtcccggtggctgcttttatacagctccacctcctcatactccagctcatccaagcggtctgcctcctgcgggccgccctccataaactccgccgggtcataatactcatggctgattggggggggctccaggatgaccatgggcggggtgggcggacgcagcttgcccagcgccatgatatgctcgaaggtgatgtcggtctgagtgccactgtccaccagctgcaggtcgtgacaggagctgtccccccggaggcgggggctgcgtctcagcacctggatcaccaggggctccttggaggagcgcagggcctgcagagtttgctcctgagacagcttggagagctccttcccgttcacctgcagcatcactttgtactgctcctccggtttctggaccacgcacatattacatcccatgttgctggccggcgagaggaggcggagggcgggaacgggaagacgcctttcactgacccgggcgcgggacctcgggtcccgggccnnnnnnnnnnnnnnnnnnnnnnnnnnnnnnnnnnnnnnnnnnnnnnnnnnnnnnnnnncgcccccgaggtgggggcagcggctcgcccctcaggttaatcttcgctgatcccgggaattccggaccg

SEQ ID NO: 439602 - DNA, 1076 bp, Homo Sapiens
cgcgcccgggtcagtgagaggcgtcttcccgttcccgccctccgcctcctctcgccggccagcaacatgggatgtaatatgtgcgtggtccagaaaccggaggagcagtacaaagtgatgctgcaggtgaacgggaaggagctctccaagctgtctcaggagcaaactctgcaggccctgcgctcctccaaggagcccctggtgatccaggtgctgagacgcagcccccgcctccggggggacagctcctgtcacgacctgcagctggtggacagtggcactcagaccgacatcaccttcgagcatatcatggcgctgggcaagctgcgtccgcccaccccgcccatggtcatcctggagccgtacgtcctctctgagctggccgagggaggaccctcctgtccgggacgtcgctgccggaagtgccagggttgagggcctcagctcctcctcctccatcctctctcctctgccgcctcacaagcatcactccttgaatcttcttgcatcccttgtctgtctcattcctctacctgctctgaatttcctccatctcttcagcttctttctttggcccgaccggaagaagggcctttcatccaggcctggtggctcatgaccgtccccccaatcagccatgagtattatgacccggcggagtttatggagggcggccgcaggaggcagaccgcttggatgagctggagtatgaggaggtggagctgtataaacagcagccaccgggacaagctgggcctgatggtttgctaccgcacggacgacgaggaggacctgggcatttaatgtcggaggaggtaagatcgcaacagcattgcagccaaagacggcggatccgtgagggagaccggatcatccagattaacggtgttgaccgtgcagaacggcggaagagcggtggccatccctgagcccgggaagagaaccacaacatttcccttttggttgcccgacttgagagtcagctggcgaaaaggttgaacggcacgacgcccgggatgactccctgattgacctggcctggcaatagggcaggtcggtgccaaactgagatcacc

SEQ ID NO: 439603 - DNA, 1716 bp, Homo Sapiens
cggccgccggcgggtaaggggcggggcgccgcggccaccgggtcctcagccgcgcgcatgcgccggaactgctctgccgtggggaagacgggccggcccaggcgccgccactcgccgtcggggctgcagagcccgttgtccaggtagcgcgtgacgtagaccaggcccgggccggggggcaccccgcgcagccgcagggtcaccgcgacgctgcggttggggtgggcgcgggtgtcgtcgctcgcgtagatcagcaccgcggcgcgccaggcgtcggccgggccctgggggcggtgggcgctggccaggacgcccaccgtgtggttgctgtccaggacggtcccggcctgcgacacttcggcccagagctgctcctcatccagcagcgccagcagccccatggccgtgagcaccggcttgcgcaacagctgcacgtgcggcgggcgggtgttgttgacctggaagcgcgcggtgagcgtgcgctgcgcgaaggggtgtgggtggtagctcaggaaggcattgtcgttgctcaggagcgcgtaggggaaggcggaggtggtgttggccagtagcaggttctgatgttgcgcgatgactttcaccaccatggccgcgtaggtcacgtccgccctccacggctgtggcagggaccagcccaccagcgggtccgcctcgtcgttgtaaatgggggtgtccgcgaacttggggaagagctgccggatctgctgcgcgacgaccttctcctgctccaggatggagatggagctgcgcgcacccttcctgtggagggagatgtagtccagccgcacgcccgcctccccagtgaagaagttggtaccgtcgtggcagtggcgcaggaggccccagctcagcggggatcgcggtggggtgtggaaggagtcgccggggcctcccagccgcagggcggggctggcggcgcgcagaccctccgagcaggcatcgtagtagttcaggaagccttgcatggtcatggagacgttgtcaaagtcgtggtggtctggctcattccacgtctcgaagttccacttggaaacatgcgccagtccgtacctaccgatgtatctcctggccaggctggagaccaagtccttccactcaaacacctgctgcttgtcctcaaagtcagtgaagtggcccgaggcgctgcccatcagctcaaaccctgggaggagctggttctccctgagaaggtccaggtacccgtccaggtgggtgaagttgtagctcaggccccgtccagtggaccccctggtggtgacaagctccagcagccagtgggtccggacctgcttgatgccgcggtgagggacggcgcccacataggcgaggttgagctgctggtcccagctgaggacgtactggtcagcctggctgtgtggcagcggggggcagaagcctgtgctcctccagaagcgccgcaggggccacagcgcgcgggccgcgtccacctgcaccaggtgcggggcctcggccggggccaccgggggcgcggccaggagcgaggccaggagcgccagcagcgcggcgcgggggcgcaggggacgcatggccacgcgtgctcggggactgcggggcttcgggctgcactgccggttccgcctccgggtcggagtctgggcgcgcaccccatcccgggattccggaccgttccaaccgaagagaaaggggcataatgcgtaatagtggacgcgtaaa

SEQ ID NO: 439604 - DNA, 974 bp, Homo Sapiens
  misc_feature (890)..(891): n is a, c, g, or t
  misc_feature (907)..(907): n is a, c, g, or t
  misc_feature (927)..(927): n is a, c, g, or t
  misc_feature (942)..(942): n is a, c, g, or t
  misc_feature (946)..(946): n is a, c, g, or t
  misc_feature (963)..(963): n is a, c, g, or t
  misc_feature (970)..(970): n is a, c, g, or t
caggcaacatggcctgagaggcctggggcctccgggcggcgccgtgtccgcgaccgcgtaccctgacacccccgcggaattccctccgcacctccaggcgggtgcgatgcggcgccgcttttggggcgtattcaactgtctgtgcgccggcgcgttcggggccctggccgccgcctccgccaagctggccttcggcagcgaggtggtaagagacgtcggggactgaggcctcttcccttaccagggacctaaaaccttttctccggttgggctagttcgctctcggggaagaactacacctcctacatccaccctctacctctcattttaagtcccttgtgcctgagcatttctctccacgtgactcttaaggtgagcatgggtttatgcgtcttaggcattattgtgatggcgagcaccaattctctgatgtggaccttctttagccggggcctcagtttctccatgtcttcagccattgcatctgtcacagtgactttttcaaatatcctcagctcggccttcctgggctatgtgctgtatggagagtgccaggaggtcttgtggtggggaggagtgttccttattctctgcggactcaccctaatccacaggaagctcccacccacctggaagccccttccacacaagcagcagtagcaccacttggctagacggaccagctggcaaagatcatgatggtggcccagccttgggatgtcatgtgggactgtgtcctagggcgatccagttgtgcaggcttctgaccatcagccaaggggaagcaggcctctgatggagcaggctctggctctgtaaggagaggtgcagctgcagcagtgttctaccggaagtgttttgatcatctgtacagtgctttggattcttcnnctcaggcctaccccantgagccttcgcagatgctgngagatcttgggggtnggtntgctttgtgtatggtanttgaaancacg

SEQ ID NO: 439605 - DNA, 1026 bp, Homo Sapiens
  misc_feature (1005)..(1005): n is a, c, g, or t
  misc_feature (1011)..(1011): n is a, c, g, or t
ttttttttaacttacaaaaaacgtatttattaatccagttttcctcttcttgccataatacataagcatgacacagatggcctgatacatcagcatggaactgtcagaaagccccaccagtcactgcttctagagttacatgactggcttttgtttggcaacaggacaataattacagcgtggtttcaagtaccatacacaaagcagaccaaccccaggatctccagcatctgcgaaggctcactggggtaggcctgggaggaagaatccaaagcactgtacagatgatcaaaacacttccggtagaacactgctgcagctgcacctctccttacagagccagagcctgctccatcagaggcctgcttcccttggctgatggtcagaaggctgcacaactggatcgccctaggacacagtcccacatgacatcccaaggctgggccaccatcatgatctttccagctggtccgtctagccaagtggtgctactgctgcttgtgtggaaagtggcttccaaggtgtttgggagcttcctgtggattagggtgaagtccgcagagaataagggacactccgtccccaccacaagacctcctggcactctccatacagcacatagcccaggaaggccgagctgaggatatttgaaaaagtcactgtgacagatgcaatggctgaagacatggagaaactgaggccccggctaaagaaggtccacatcagagaattggtgctcgccatcacaataatgcctaagacgcataaacccatgctcacctcgctgccgaaggccagcttggcggaggcggcggccagggccccgaacgcgccggcgcacagacagttgaatacgccccaaaagcggcgccgcatcgcacccgcactggaggtgcggagggaattccgcgggggtgtcagggtacgcggtcgcggacacggcgccgcccggagggcccggcctctcggccctcgtgccgaattcgccacccaggcctcgtaccntaccgngggtactgcacgtca

SEQ ID NO: 439606 - DNA, 1885 bp, Homo Sapiens
  misc_feature (510)..(521): n is a, c, g, or t
  misc_feature (639)..(651): n is a, c, g, or t
  misc_feature (1747)..(1792): n is a, c, g, or t
tttttttacttaatgtgcagttttcagttgcagttatctgtctgaagcttattaacccattctttagttttaaaacttattggtttcaacccagaaataagaaccaaagggaaagaaattccatcaaatcaaaccagtccccccaaatacaaccttcctttttgttttaagcaagaaatgaaaaaaaccaaaaacatgttaaatattttccttcttttactccgaagtgttattgaagttgcaaaattagcctcagttagactgagtaaggaaaacaaaaagctaaacaaaaggcagtatgtacctaaactgctcctcaaatcagtttgattgagttttccagcagcccctttaaaaggggctttactgacccattaaatttaatgtgaggctatgtttgttagttgggaggtaaaaaattttaagtcctgcagcaaacgttaatgagggctttgtcttaactaaccaaggagactgcagcaacggactccagaccaggacagaacacannnnnnnnnnnncccccaaaacccagcccaggagctgcattttgtatgaagacattacagattaataaatgatagcaccatggttttagaaattaagttaatgtttcagtaattaacatttagtccgacnnnnnnnnnnnnnaaacattctagtcacaggccagaaattaagtttaagaacccaaattatttttatgtgcaagtaagaaaatcttaaaatcttaaccgtaaaaagagaattaaattctgcataaaattctaaaatactattccccctattttttaaaggaattaggaacagaaacaaaaaccaccctatttcatttgacttagtcaaacagggcacattgtttatgcttgtctctttccatcttgatcatatcaagatctttatgaagaaaccccaatggttgtcacttgagaactctcttgaccacaagactgagtattctatggcagaggcatatacacatgaaagacatcttaataaagatgcaaaggaaagcaaaacaacccaacacacaccttagaagaagacaaaacggcaggcaactggtcgtctgaccctctgaaggcaaaaaataaacatatctttacacgaaagaataagtcaggtgaaagaaagagggggtggaatggggaccgtcgtggcgagagaagacgctgacctgctcgaattcaaagtgctagaattaaaggtctaaacgaaaatgccgacgatgcctcctccaagcggggcctggccgggcccaggacgggcggggcctcagtcctccttgcgctccagagtctgtgccgcgtggatgccgttgctgtagacggggaagggcagcgtggagaagagtccctcggccgtggtgaacacgttgccggcgggcatctgcgtcaggctagctgcgctcactgcgccgccgaacggtcctgacatgttgagccggtgcacgtggtggtagagcatctccatgggcgtcttggggtcgaggccaaagccggggctgttaacgtccacgaagttaacagcgtgcgcgttgggcagcaggttgctctgcatggccagggtcacctcggcgggcgcgtagcggatggtgcccgtggtgtagaccctctgcgcggccgtgctggtggcggccagggtcccggtcaccctgtgcaccagcgggagcacgacgttgcccgcctgcaacctctgcagcgcctccaggtccccagtgtacagcaaggagttggacgcgctgggnnnnnnnnnnnnnnnnnnnnnnnnnnnnnnnnnnnnnnnnnnnnnnttcccggggtgcttgtcccgcggggacgccgagagcgggggtgacagcgggtcggaggcgacgggggccagggccgcggtggccgaggcgccg

SEQ ID NO: 439607 - DNA, 475 bp, Homo Sapiens
  misc_feature (314)..(359): n is a, c, g, or t
acatgttgagccggtgcacgtggtggtagagcatctccatgggcgtcttggggtcgaggccaaagccggggctgttaacgtccccgaagttaacagcgtgcgcgttgggcagcaggttgctctgcatggccagggtcacctcggcgggcgcgtagcggatggtgcccgtggtgtagaccctctgcgcggccgtgctggtggcggccagggtcccggtcaccctgtgcaccagcgggagcacgacgttgcccgcctgcaacctctgcagcgcctccaggtccccagtgtacagcaaggagttggacgcgctgggnnnnnnnnnnnnnnnnnnnnnnnnnnnnnnnnnnnnnnnnnnnnnnttcccggggtgcttgtcccgcggggacgccgagagcgggggtgacagcgggtcggaggcgacgggggccagggccgcggtggccgaggcgccgaactgagtcttgcgggcggccgc

SEQ ID NO: 439608 - DNA, 955 bp, Homo Sapiens
  misc_feature (7)..(8): n is a, c, g, or t
  misc_feature (14)..(14): n is a, c, g, or t
cttttgnntccctntccctttttgatctctcgaatacactcaagttttcttttctgcacggtgaaggttccactgcatccagctatatcataaaggaaattcttcagtattacttttccattttctgtaagcccaacttcagggtggaactgtgctccatataactttttagattcatttgctatgcctgctactatgtttccagaacgtgccacaaccttgaatccatcagctactttgtctacactatctccatgtgtaagcaaaacaacttcttccttctgaaggcccctgaataatgaacatgtattatccacactaatgttgaaaactccatcttctctgacactttttttgtgcacagtacctccaaataccttattcatcatctgcataccatagcaaattccaagaacaggcttgccaatagtgaatattgctggatcaaaccagggagcatcttcagcatacacagaattaggtcctccagagatgataatagcacggaatccttgttcctttatagcaaatgctggtgtttccaaggggaaaatttcagactgcacgaacagttccctcactcttcggtctatgactttcccgtactgagcaccagcatccagaatgacaacagctccttcatagtggtggtggccatccttaaggtctcctccagcattctccagcttggagtctccgttgcacagagccatcggggccagggccggagccgcggcggtgacggcgacagtacgagacggggcgggagggtgccggaagggtcggcgccgcgggctgaggttgagaaggaggcctggtcgaggagcagccggcagcggagaggagccagccgccagaaaagcgccgaatggagcaacagcagcggagcgcgggccccagcgccgcgggagagaagaccagagcgcgcacgctgcccccgcctcctgcttccgcc

SEQ ID NO: 439609 - DNA, 1043 bp, Homo Sapiens
  misc_feature (1021)..(1021): n is a, c, g, or t
aagagtctcgctcgcgagtagtgtggcgcagactgccttgggtgcgggagagtgtcactgcggagtgacgtggtggtgcgccctcgtgcttggttctcgtcgtgtggtggtgagaggtgtttccgctgttcgtcgtggggcgacgttcggtcgctgaacctggtgtgcgtgtgccgcggttggtgcgtgggtcgtgtttgcggagatgtcgtcgaagacttccgatgtcggtagagccccactgcgggggactgtgctccaagagacttttgaattcatgtgcttatgccttgctacgaggtttccaggacgggccacagcccggaatccatcggctacgtggggctacactatctccatgtgtaagcaagagcgacgtctgtccttgtgaaggcccgctgaaggaatgaacatgtattatccacactaatgttgaaaactccatcttctctgacactttttgttgtgcacagtacctccaaataccgttattcatcatctgcataccatagcaaattccaagaacaggcttgccaatagtgaatattgctggatcaaaccagggagcatcttcagcatacacagaattaggtcctccagagatgataatagcacggaatccttgttcctttatagcaaatgctggtgtttccaaggggaaaatttcagactgcacgaacagttccctcactcttcggtctatgactttcccgtactgagcaccagcatccagaatgacaacagctccttcatagtggtggtggccatccttaaggtctcctccagcattctccagcttggagtctccgttgcacagagccatcggggccagggccggagccgcggcggtgacggcgacagtacgagacggggcgggagggtgccggaagggtcggcgccgcgggctgaggttgagaaggaggcctggtcgaggagcagccggcagcggagaggagccagccgccagaaaagcgccgaatggagcctcgtgccggattcgccacccaggcctcgctaccantactcgggggtactgccgtcga

SEQ ID NO: 439610 - DNA, 1281 bp, Homo Sapiens
tgtttttaaatcttatttcagaaaacttcctcttggggtaggaaagtacacatggaagcagcaaagtaacgaagaaaaacttaaatagggccttcagagatcccacacactacaaagattctgccaagccataagataagtgtgaagcccagtatatgtccagcttttctcctcaggacatcttcagtgtttcttctcttttaaacaccacatcaggttctagccacagacttgtgttttgggtgtgcctgctttgaggggtccatgcccagtgtgtctgctggtgacccaggactcagcagtaatgactaacggccgcccttcaggatcacagatgtgcttggtggtggtggcaaagcatggcacttgtgtgcagtgatgagaagcagcacacggcaaggctgagccctttatcagcaggcctccgtagagcgtgtctgcgttgtcagctgccaatgggctgagtggctggccgtacccactcagtccaagagaggaaggaaacagcaggagaagctgtcagcttgccattcatgagctgctgctgcccaccaaagctgcttactggcaagaagagatgtggggaagacatgagctggtgaacaccaacctggtgcacatgctgccaagtctggcccctgaagaggagagggggtgcagagtccaaaattgaccggggctcctgctctggcatggagctgggtcagaggtgagagaggacctggatcctagggctcacgcaggtgtcgggcgggtgccagggtcttttcactccaactttttggctggcacccgtgtccgagcaacaaggatgggcacaagggccaggccggcaatgaggagggcccacaggggtcggtagaagagccagccagccgccacggtcagcagggtcagcgaggtggccacacagaaggcaaaggctttcaggccaatgttgaccaggtctcggaaaacaggaaaccagtccaccaaggtgtagaggatccgtgtcataaggttgaggcccatgaacatggccatccagccagctgcccgcaggccccaggtcttcatggagttgctccttagttctatatgaaacacctcctctgctgagaagtccccgtggtgcaggagcagtaaggtatccccagacttggtggagaatgggactagctggtcaccccgctgccgggcaatcacagtgaccacgtgagctgggcccaggtcagggtcatcgccgctcagtccagcataggaaaaggagacacgcaagtctcccacctcggaatcccggga

SEQ ID NO: 439611 - DNA, 1210 bp, Homo Sapiens
ctgtcataagtgcgaattatgagaccccttttgagctgcccttctaaacgtgggtccatggaatgcctgggggaaaatgggagctctgaaactgctcagaagcgtgcctgcctgagagtgtgagcgagagtgtgcctttccccagggaaaaggggttccaagcgctcctgacattgaccaaggtgtctgtgtccaggaaactcgtgaggctctgacttagtgtctgcccctgggaagcccggttaccacgtgagctgggcccagttcaggttcatcgccgctcagtccagcataggaaaaggagacacgcaagtctcccacctctgaatacttgggattttcactgtggtagaaaaagtctccccgccgaatgatgtccacatgagggttctccagcttgaataggctcagggacctgaagttgtcgactttgtcgatgaggcctgacgagaggaaaaacctgccaatttggacaaagggggctgttgccatgaatgactccactgccatggcactggggtttttgtggccaatctctcggtcgaagtttttgctgttgatgatttctgacctccattcagtgttgtaggaatacctcgtctccttcttcacctgcccatcctcggtgtactccctggactcctcagtttctacccattggtacatctccacgtgcctccgcagtttcacagccggaagatggaccccatagtttggatcagacaaaagcttggatgtccgtaaggcgccaatgatgtgcaccagccttccttcattctccggagccacactgtggatgctgtcgggagacaccacaagcgagagcccctcagccaatgaggttgccgtcttcaatgcgcggccctcattggtgaaaattaggtagaaggagagcaggaaggccatgagccccacaaacatcccacccgaggtctcgctcagccgttccaggaagcctggctgggagctggttttaactttgacatgttctctccgggtactggtactggaataattcgcggccatggtgggacccggctcgctgccgccgcctcgcgctgttcagctaggaagtgggctgacgactggagcgtggtgtccagcggcctcttgccagccccagcttcgaaaatccgcgtggactccagggccaagcgggacttactgcagttacctccccctgtgcccagtgtttctgcgcatgcccgct

SEQ ID NO: 439612 - DNA, 2202 bp, Homo Sapiens
  misc_feature (586)..(623): n is a, c, g, or t
  misc_feature (672)..(672): n is a, c, g, or t
  misc_feature (877)..(877): n is a, c, g, or t
  misc_feature (962)..(962): n is a, c, g, or t
  misc_feature (1627)..(1879): n is a, c, g, or t
  misc_feature (1888)..(1909): n is a, c, g, or t
catgcgcttcttgttttttaagactgctacaattttatcttcccatagacatttcgagcccttgtttgtttgtttgtttttacatctcacctttccattcacccttcttagtacaggcagaaaactacctggcactgtgggggactgagtataggagaaagcaggatgacgatgggcctgaatggtggtgtgttttcctccacacaatgtggctttgtcctccaaggtgtctcacgtgatgggagctggctgatctgacttgcttgcagatgtctgtaacagcattagcagcttccaattgtcaggagctcgctgcttgccaggcacgctgtcgggcacactgaaatgttgtgggatggcgctgggatcagccctagaaccatgagacctactttcacagaaaggacactcattcagagcagggcaaggaagtcactgtcaccgagaccaacactgctcctggcccatgcgagtaagtggctgatgggcgaagctgcactgtgggacagtgaaatgcgacgtttgttgatcctgtcaggagacatcgtctgtgcgggaggcttctgagggcagcagccagaaatcnnnnnnnnnnnnnnnnnnnnnnnnnnnnnnnnnnnnnncttccatgcttagctgatgctgaatcaattcgactgttccttttgtgangagtccacaaacctttacaataatagacagtcatttgtcatctggcaagatgagattgagaagattctcagtgagagactgaatttacccaactgaaatgttcacttaaagtttttttcctctaaaacctggactactcatctgtggatgacttctactcatgtaattttttttctcaaattggatacttaaatgattctatgtntttagtaatcgcaaaaagtcagttttatggatacagttttctctgaacagttttggtatagacaaaaagaggtgttaccatccanccggcgtgcattataattctgtccttgcctaatccccacccaaatgcccatttccatctacacgaactcattctttctgaatcataaatgccacaccctcagttgcacataaaactttgccatattatgtatacatcagtgtgtacgaagacaagttgtggcttagaagcagtccatttacagtttctggaactgtttatcatctcacttctccataactgattctaggtctgaaaggttcccttctaaaatttgatagcctgattttgaggatatgtttccaatgccttttctggttacaaatcctgatgttggcaggtctttttcctgtaagcatgaagcccacccaagccaaggtcccctgtgctgttaatcaaagtggcacagaccacctatgtgccaggtcatagccaggagtgtaatgtaacatggatatggagggccacaaagagtcccatagccctcctgctacacatctgaaaatctcctgaaattcagaattaaaccccattactgaaaaacaaaagtgtttattggcataccagactgtttcaggaattcatgaaagatagaaaacagatgggtcttgtgtgatggagaaataagaccaaagaaaagaccaaaggctaaaagatctacaggaggggccgggtgcaggtgctcannnnnnnnnnnnnnnnnnnnnnnnnnnnnnnnnnnnnnnnnnnnnnnnnnnnnnnnnnnnnnnnnnnnnnnnnnnnnnnnnnnnnnnnnnnnnnnnnnnnnnnnnnnnnnnnnnnnnnnnnnnnnnnnnnnnnnnnnnnnnnnnnnnnnnnnnnnnnnnnnnnnnnnnnnnnnnnnnnnnnnnnnnnnnnnnnnnnnnnnnnnnnnnnnnnnnnnnnnnnnnnnnnnnnnnnnnnnnnnnnnnnnnnnnnnnntccgtctcnnnnnnnnnnnnnnnnnnnnnntctataggagatgacttctgtgaaggtggctgtgagttctgagaaagctctgccctttatggaaatagggaacaggaaggagccctggggcaggagtcagggtgattatctgggggcttttggaggatcagccagctgccttcgcccccttccccacctctctcatgctaaactgtgtcacagtgagtatgtgcacacaggccagagcactggtgacaagaggcacagcaagaccctgggtagcaagaaatctgcactatttctaggtgggctagaaaggccctcctgactga

SEQ ID NO: 439613 - DNA, 989 bp, Homo Sapiens
  misc_feature (26)..(27): n is a, c, g, or t
  misc_feature (37)..(37): n is a, c, g, or t
  misc_feature (81)..(81): n is a, c, g, or t
  misc_feature (108)..(108): n is a, c, g, or t
  misc_feature (114)..(114): n is a, c, g, or t
  misc_feature (458)..(479): n is a, c, g, or t
  misc_feature (488)..(740): n is a, c, g, or t
gtgccagctatacattccctcaaatnnttcgcaattnaaatttggggctcatatttcaaaattcctattctcctgtctgtngaaccaggttctgatgacatgagtttncctctnataaccacagcagaggaaacacagggcagtgtgaggaaggctgagtcctctcagtcaggagggcctttctagcccacctagaaatagtgcagatttcttgctacccagggtcttgctgtgcctcttgtcaccagtgctctggcctgtgtgcacatactcactgtgacacagtttagcatgagagaggtggggaagggggcgaaggcagctggctgatcctccaaaagcccccagataatcaccctgactcctgccccagggctccttcctgttccctatttccataaagggcagagctttctcagaactcacagccaccttcacagaagtcatctcctatagannnnnnnnnnnnnnnnnnnnnngagacggannnnnnnnnnnnnnnnnnnnnnnnnnnnnnnnnnnnnnnnnnnnnnnnnnnnnnnnnnnnnnnnnnnnnnnnnnnnnnnnnnnnnnnnnnnnnnnnnnnnnnnnnnnnnnnnnnnnnnnnnnnnnnnnnnnnnnnnnnnnnnnnnnnnnnnnnnnnnnnnnnnnnnnnnnnnnnnnnnnnnnnnnnnnnnnnnnnnnnnnnnnnnnnnnnnnnnnnnnnnnnnnnnnnnnnnnnnnnnnnnnnnnnnnnnnnntgagcactgcacccggcccctcctgtagatcttttagcctttggtcttttctttggtcttatttctccatcacacaagacccatctgttttctatctttcatgaattcctgaaacagtctggtatgccaataaacacttttgtttttcagtaatgggtttattctgaatttcaggagattttcagatgtgtagcaggagggctatgggactctttgtggccctccatatccatgttacattacactcct

SEQ ID NO: 439614 - DNA, 1666 bp, Homo Sapiens
  misc_feature (1640)..(1640): n is a, c, g, or t
  misc_feature (1657)..(1657): n is a, c, g, or t
aatttttcggatctggctggcgcacccagcccctccttccattccttcttccccctctctgcagcctctgccagcccgcactgcgcatgctttctgacgccccctttggtccagcgtgggaggaggggatggaaatgaggttgggctaagcagcttgcgcgcgctcccttgcctgccctcccccgacgccggacgcgcgccgggcggggcagctccgctggtccgagggcagtgcagcagcggcgacagcggctgcggccgtggccgtggcgggaggagccggaagccccgcccccggggaggggccgtcctgcaggtcccccctctatcctccacggccccatccaagccagggatgaaatttaacggcaagaagggcgcagttgacgcggcgtcaatgaactgagactaagtcaaaagccgggccctccaaccctatccccatcagcctggtcatcaccggcgtcacccccgccccgcgccctgcccctaggttcctgtgccagcaagatgctggagcgaggcgcggagtccgcggccgagggctaccgatcctagtcccactggcaaggaacacagtgaccaaagaagctccccaccagggcccaccgcagaagcccagccagtcagctccagggcccaccgcgtccgcggggctcgcctccccggcctcgccggcggcccccgccccagcgcccgcaccgctgccccgactgtgacaaggccttctcgtacccgtccaagctggccacgcaccgcttagcacacggaggcgcccgaccccacccatgcccagactgccccaaggccttctcctacccctccaagctggcagcccaccgcctcacgcacagcggcgcccgcccgcacccgtgcccacactgcccgaagtcctttggccaccgctccaagctggcggctcacctctggacccacgcacccacccgcccctacccgtgccccgactgccccaagtccttctgctacccttccaagcttgcggcccaccgccacacgcaccacgccaccgacgcccgcccctatccttgcccgcattgccccaaggctttctcatttccctccaagctggccgcccatcgcctatgtcacgaccccccaaccgcgcccggcagccaggcgactgcctggcaccgatgctccagctgcggccagcctttggccagagacgcttactgctccttcatcaacgcagccaccaccaggtggagcacaagggggagagagactgagccctcccttggctcactgtccccttctgccgccagccctagccagtaagaggtgggatttctaagaccgactgtatgagctcgcctcttccagatagctggcagagggcagggcaagggattggccatttatactgggctcgagctcagaagcccgaggaactctttgctcccctgctttggggagatctcaaaccatggacgtggagctgtggtttgacagcgctggctctgcttctccccacacacttacatggcaaaggtaaaaagtctgctactatcgtgggttgatgaggattgtgggcaaacaggctctcttgttaaaagtttaaactggtgtctccactttggccatatgacggtatctaagaaattgaaaatacatacatnctttctcaactcttccncttgtagga

SEQ ID NO: 439615 - DNA, 999 bp, Homo Sapiens
taacatgctcctctctacagggttttgaagtctaaggtgacatgatggatttcttcttgctttgatgttaagtgaaaagcttgctttaagctttcatttttttgatcacctggaaaccgtactgagttcttccaacacgttctgagttttgagatacagcttccactgtggatcctctaaactcttcagctaactggatcaggttcaatgttacctctgctctccttccactgacagcaggatagttgaggctggtgagcatctgcagactctatatagttgttcactgtactgcatcatctgatgagcttttgctattccatagtgaacttttgtctcatccatcagaggcatgctcattagctctactgttgtgtcaaaagcttgctgaaagcattcagaagctttgttgtagtatcctttttcattgtagatgtcccctagcattgtacttgctctcaccaaatctaggctttgaaaattgtttcttgcaattttcacaaattttttcacgtatttaattgcttctgtcatctctccttggctctgcaggaccttgagctatggcttcatagcctctccccagactgagatcatcatccaggtctgtggcagattttacagtaagtgtcaaggactgttaatgctagtttcatatttcctcagcagctaagtgtgctaagcccaagtcagtaagaggtttccgcttccatctttttgtcacttccttctttggctatttcacgaagcttttattagaattttgatggcctgtttgtatactttattatgctagcatttggtctgagagtaatctgtaagatcctcagcgagactctccaccagggccaacaagttgagaagagcgggctgtctcatcctttccatattccgcccctggttttcatttgactggaattgcttcagtaatgctcaggcagcttccagaagcttgaccatcttcctccgtagagaagaaccctattgcttgtgtgcccg

SEQ ID NO: 439616 - DNA, 941 bp, Homo Sapiens
atttcaacatttgttgagataatctgtagtcttcggagacttcacaagccaacaatggagagacggcctgttttcatcgttccatagtctgcgcctgtgtcaattgatggaatgcttcataatgctcagcagcttccagaagctgaccatcttcctcgtagagaagacccatatgcatgtgtgcctcggcttctttcttcccacagtcaattttgatcagctgagcaatcttaaaacatcgttcatagaagtggttccttacccacttgtcttcagaattattgaagtaacaggccagagcatacaagttattatatacatcttcgaaggattctttcctctcagcgtcctcagccctggtcaggtaatggtacaggtaatccagtttatcaggctgctcctccaggggcttctgcagccagaagagggacctgactctcgcagcctccctcagggcatcccaccgctccatcagagcgaagagctcggtgaaggacttatgataaccatctcgcagcatgtccacacagatattcttcttgtaggagttcctataagcagcaacttcctcttttgataatcctttgaaatttacctctagataatgatctatgtcatctttttctttgatcaattgagaccttggaatttttctggaggagcaaggcagcttctgtctggctaaggctgtaagcttcgggcgtgtcatgggcagtgggggcagggtggtcatttcggaatttgcagattactgctgatggtctctccaggcttatagacttcagcctcggtgcactggcccagggaaacaactccagttttccgttccgccgaagtcagtcccccaccggcggcaggtgctgggcgttggcgctgccccctcctctctcagtgattccgaagcctggctccgccggagcggagacaggggacgccccgct

SEQ ID NO: 439617 - DNA, 1022 bp, Homo Sapiens
  misc_feature (10)..(10): n is a, c, g, or t
  misc_feature (19)..(19): n is a, c, g, or t
  misc_feature (22)..(22): n is a, c, g, or t
  misc_feature (49)..(49): n is a, c, g, or t
  misc_feature (56)..(57): n is a, c, g, or t
  misc_feature (68)..(68): n is a, c, g, or t
  misc_feature (72)..(72): n is a, c, g, or t
ttccttaggntgcttttcntcnagccccgttaccccggacacacaggtntcttcannttcacttgganggancatcttgcgcaggcaccaggggctctgctcctgcttcgggatccattgggatttctctctcttcggggtggcgctgctcccacacacaaggttcttccctgggctcagcctggactggagcatctggcttggggactgagccctccgcgtccagggacatgagggttttgtagttctccttaacaaggttgttataaagctccttctgccattcgtccaagttcttccactcgtcttcggagaagtacacagcaatgtcgacaaaagtcactggaaccttgggggcctccccccttgctgcccgggggcagccgcaggacccagaagttcctgttgcgcagcaagttctccaagttctccagccgcctctgcagcagcccgtactcctgcagcagggtccccagcacggcccacttgctctccatgtggttcccaaattccacggccgtcttttcacagtcggccagcttcttctcggctgtccccgtgcgcccctccaggttcagcagctggctggcctgggcatccaccttcctctccacagcctgaatggcagccaccacagtccagagtgagatctctgctgtgggcaactggggctctcgcatcatgcggtcggggaagacaggtgccctatctggaaagggtgggaactgaaaaggcattggccgccgggcgtccatgtcccattcttgagcctgcatgggcggcattccctcggccatttccccgcgcagcgccggctcctggtggcagacctcctccgggggcagagcctgggcccagctccagctcccgctgtccagccccaggccctggatgcccagctgctgaggctgcggccgtgttgacacaaactgcatcctgggagtgctgttccccgctcgggtcggccagggagaagaagaacgttttccaggcgccttccccctctccggatcccgggaatt

SEQ ID NO: 439618 - DNA, 886 bp, Homo Sapiens
  misc_feature (520)..(520): n is a, c, g, or t
  misc_feature (621)..(621): n is a, c, g, or t
ggttctcatagtgtactgtccatcaacgtgtctgttagaggttccattctgccatgccgtccagaattctcccagtcctgctacgtggaaacagaccgccatcaatttctccaatgacactggacgccttgggggcctcccgcctttgttgcccgtgggcagccgcaggatccagaagttcctgtttgcgcagcagtttgtgcacgttctccagccgcctgctggcagtagcccatactcctgcagcagggtccccagcacggcccacttgccctccagctggttcccgaactccacggccatcttctcgcagtcagccagcttcttctcggctgtccccgtgcgcccctccaggctctgtagccgggcagcctgggactccatcttcttctccacagcctgaatagcggccaccaccgtccagagtgaaatctcggtggtctgaaaataggagcttttctctgttgcttgtgaaggaagtgtggaagaagttaaaggtgtggagcgtcgttttctcctnaagcaagcgtcagagaagtttctgggcaagggcgcacggcgccgaggctccgaccccgctgcagaaggaagcggagggaaaaaagggcagagcactgggtncgcgaagaggagggtccgcgttcacccagcgccaaacggcagccccgggaaaccaagaccccggcggcgtccaaaccgcgaagccccgcccccaggcaggggactccagccatccccaacgcgccctcgagccagcgcgccggtgcctctttacccgagcaggcgccgactccgccatggctccagtcgcccctcaacacccagaccccgcctcggagcccccgtgctgcgttcactgtccgactcggcgccccagagcctgttg

SEQ ID NO: 439619 - DNA, 1138 bp, Homo Sapiens
cccgctggcggaaggaggtttccccaagaaagacagctgggggggcattcctgggccaaaaggggaggaagtaaattgagaagaccttccaggcaatggattccgggaggaaagggactttgccccccaggaggccagagatgggaaaggatgttccttgtgaagggtggaggaaatcccggggcatgggttgagcagcaggctttccagggcacccggaacaaacagagcaggaagccagagatttactggactgggggtccacaggaacatctggaatcttggggtcagggcggtgccagttgcagggctccttcccttgttcaatctgggagaggacctcggacttggagatggcgtagtccaaagagaccagcatctcgcagttgcccctcatcacgtgcttgtagagctccttttgccagtcctccagcttgccccacacttgctcagagaactacacagccacatcatcaaatgtcataggcaccttaggggactcccccttgctgcccgggggcagccgcaggatccagaagttcctgttgcgcagcaggttctccacgttctccagccgcctctgcagcagcccgtactcctgcagcagggtccccagcacggcccacttgccctccagctggttcccgaactccacggctgtcttctcgcaatcagccagcttcttctcggccatcccggtttgaccttctagggaaagcaggtgagcagcctgcgattcaatcttcctctccatggcctgaatcgtggctgccatcgtccacggagaaatctttcagaaacaaaagagaaactggcatcactcattccatccactgtcttcattgagcccctctctccctaggcacgggggagttgggctgggagtccatatgtgtggacaagtggggctatcctataccacatgccagatctcaggttggccatcacctgcttgggtatgttaggtctatgtctgggtgggtgcctttacgacaggcctctgcagcacaatgcagacccttatcacggtgcttatcaccctacacaataatttcctacccacacctacactgtgggctccctgaacatggtattgcatcttttcataccactgtccttgacacatggcatcccggga

SEQ ID NO: 439620 - DNA, 1209 bp, Homo Sapiens
  misc_feature (202)..(203): n is a, c, g, or t
tatgaaccaggaggttttggttttggaaattgaattattccctaggaaagccgggggacttgtaatgtggcccttacatcagcgtttttggaggggttcttttttccccattcagaccggttttcccccctcctgttttcgggaaggtgcacagcaaccttcattaaaatttgacagggacttggggaatttctccattggnntgcggggggcaccggcagattccagaaatttctgttttcagcaggttctccatgttctccagccgcctctgcagcagcccatactcttgcagcagggttccccaacaggacccgtttggttttccagatggttcgggaactccgcggctgttttctcgcagtcggctatcttcttttcatttgtccccgtcctgccttccagggtcagtagcctcatggcctgggcctccagcttcctttccattgcttggacggcagcccacacagccaagcgggtgatctctgccgtggggagcggctgttccttctggactgcagaagagatctggaaaggggtgtccttttgggaaaccgggctctggagcagcgggtccatgtcagtctcgggaactgttggggaaagggtcagggggtctttctcaggagcttcaggggagtgaacgggggcttcctggtggtggggggagtgggagagaagggaggcttcttgttcagcagcagctgggggtggatactgggtcccttcctgggaagccagggggccctggagagaagtctcttgctcagaagcggcagaacacaggagtgagggtcccttctggagcacatgtggcatccagccagaagtctcttgcttgggagcactggaagtttggggcagggagccttgacggggaatggtgggagacaaagaaggaatttctttgggaggaagaacgcgggattggaacagagtttctcgggggagtccagcaggggcctgacgtaaggtttcttcttgtggaacactggggaacgacagaggtgatgagcgttggttctccatgtccagctgctgaacctggggtcctcgcctgcccaggcaccctcgggcgaggccgggaggcgcgcgggcggaggcgcagtcggagcgcgcagcccaggcgacgtgccggggtctggaggcggcttgattggctccgacagccttcctcccgccgatccctgcgcctctcatacacccgct

SEQ ID NO: 439621 - DNA, 617 bp, Homo Sapiens
  misc_feature (35)..(35): n is a, c, g, or t
  misc_feature (81)..(82): n is a, c, g, or t
  misc_feature (87)..(87): n is a, c, g, or t
  misc_feature (95)..(97): n is a, c, g, or t
  misc_feature (102)..(126): n is a, c, g, or t
tgttaactcaactttttataggatatgataaaagncctaattctaaattcaccaaatttatgcttttttattaatgaaaanntctcnccgccccnnnttttnnnnnnnnnnnnnnnnnnnnnnnnnggaaagcactgtctccttggctctagtctaaaggaacgtaagcaatatgaaggaccctagaggccaaggaaattgaagagaagtcagaggaagggatataaaatggaatgtattaatggattttagcccctttaagcttgtacttttgtgagagggttcaatggagagctttaatgcagatgagacttgaagcttctgaagaagatctaagtcttgatgaggttattcaaactcaaatcttgaatgcataatgatgataggccatggtcttcaaaaacgtggtacttgatgctctcccagagtgctaggatttgaatgccacaatacatattgactcatgtttttgtccattaatggtccgtgggtttctttaaatgaagtccattttagagtccatagatttcagtgttctgcaaaactgtcggggatcctaggctcccagcgcatcccagacgctccgccccacccatggcgtcaccctccatcccagg

SEQ ID NO: 439622 - DNA, 1826 bp, Homo Sapiens
  misc_feature (165)..(174): n is a, c, g, or t
  misc_feature (355)..(527): n is a, c, g, or t
  misc_feature (1069)..(1069): n is a, c, g, or t
taacaatcgcaacaaaacaggtgtactaagaaaaatttttcttaaacacaaacagtaattgcctttagaggctaaaataaaaaatcttgtaaacaacatagagggtttgggaataggaaccaaagaatatagtgtgggtgagaataatgggaagggccaaatctnnnnnnnnnntagtgaaccatttgtgtgtttaaagcaaactgccacagtatgtatgagtgtgtaataaagagtaaagggcctgcaagtgggataagcccgtgtgtgaacatgatggcatgaatgtgtaagttccgtgtgtggtgtgtgcatgtgtatgtggtacacattagagtatgggtatgccggtgannnnnnnnnnnnnnnnnnnnnnnnnnnnnnnnnnnnnnnnnnnnnnnnnnnnnnnnnnnnnnnnnnnnnnnnnnnnnnnnnnnnnnnnnnnnnnnnnnnnnnnnnnnnnnnnnnnnnnnnnnnnnnnnnnnnnnnnnnnnnnnnnnnnnnnnnnnnnnnnnnnnnnnnnnnnnacacattagagtcacttccaaagtcatttcttaactcaccatggactttgcccaaccaccccaaccaatcccacagatctgatcctctagagactgggctgcactatctaatcaattcctcacattaccaaaggtcttacacattaaaatcacaacagattgttcacctaatggaagaagctctgcaagtaaacaggcacatttttaactcagccacaacacagtcgcttaggatctaatagttgtcttaaaggcaaaaccgaatgtccggacctctacaggtgacccttcccttggtttcccataggctgtcgtcacactttaggtgcacatgaacgctacccggggttacgcacacaaatgcctgtgcgctccgtggctgacaagaggcattttcaactgtgagttttctactattcacaccgccaacatgcagattaaatgaatcaatgtattccacacacttgttaacagtagcggggaatattttcctgtacaaaaaagatgtcaccccttaatctaaaatgcaagcctctaaatanattatagctaatcatgtttagatcccttggtattttccaactttgagctttggatagctttgggagctagattggtaacactggggccccaaaattaaccggaaaatatcaattatcagctttttttggtttatattactatggacattttcctgtaagtatatgatttatggctgatctttaattttgcattttaatttgtattttaaaagaagacagcgttctgtttgtttcaagttgccttacaagtttacttacttacttgatcaaaggtggtataaagagctgttgacttcagaaaaggaaagaaatgaaaataaacaattaaagcaaaatacaaatacactaacactatgcaaaataagaaaaaattctggtacatggccacacatcccaaagttttttgttaaaacaaacattcatctagaaacactatgagaggaatgtcactgacaaaataaacacattacaaaagacgcaaaaacccagtgcagctggccatgaagccgcattaggacactgctctcaacagagctttagcccagttatctctaaaatgtacaatcccaggccctcacaaatcgctgctcatacaacagaatacttctcctgacgactggtatttgtgcacaagggagcacagcttcctattttctccaatgaatagccttgtctgtttttattttatttcatgcccgctgcttctcagcatcatcggcacggcctacagacatgggctgtcctgagttctgatccc

SEQ ID NO: 439623 - DNA, 568 bp, Homo Sapiens
  misc_feature (552)..(552): n is a, c, g, or t
  misc_feature (555)..(555): n is a, c, g, or t
gggcctggcttttctaaaggaacgtatgcgtgcggttacgaggaaccgtcgtttccccagcagggtgaggctgagcgtgcacttaacagtcgcgagggccacaggctcctcttgcaagtaacttaaggttaaggagcaacatcgtggacaaatcggcctcgcccagcatttcagtgagggcttggtgcgaattccagccagagccctagaaagtatcttgggcaggtcgaaatgcacccctccagctcccagccacgaggggaccggcttccctgtacgcagctccggccagaggaggccgccgccgccccaccacgccgcggaggggtttgcagggtcccttccacggcctggagtttttccttttcccacgcctgaggaaggcctcgggcgcgcggtacagacgggcaggcggggggcgcacaagcccagggcacgatggcagcagcgctggatccggctgggcgctgctcggccccgtatccgtccgagaggaccgccgctgccaggcctagaggagacatgaagagaccgggcgcagcgcgacccggnaantccgccgaggtag

SEQ ID NO: 439624 - DNA, 1641 bp, Homo Sapiens
  misc_feature (78)..(193): n is a, c, g, or t
  misc_feature (309)..(336): n is a, c, g, or t
  misc_feature (487)..(665): n is a, c, g, or t
  misc_feature (1431)..(1497): n is a, c, g, or t
tgtttcagtttttttaaagcaagactatactgacctgcataaagaaaagaaaagggtggggcgcagtggctcatgcgnnnnnnnnnnnnnnnnnnnnnnnnnnnnnnnnnnnnnnnnnnnnnnnnnnnnnnnnnnnnnnnnnnnnnnnnnnnnnnnnnnnnnnnnnnnnnnnnnnnnnnnnnnnnnnnnnnnnaacgtggtcgtacatgcctgtaatctcagctactcgcggggcttgagacaggaggctgaacccaggaggcagaggttgcggtggcctgggcaacaagtgtgaaaaacactgtttcnnnnnnnnnnnnnnnnnnnnnnnnnnnnggaaagaagcatttgcttaaccttcaatttctgtgccaatgaatgcctgtctattcctgaaataataataaccacaactactatttattgagccaggttctttactatataatggtttgatttatttcatctgattggtctctattatatnnnnnnnnnnnnnnnnnnnnnnnnnnnnnnnnnnnnnnnnnnnnnnnnnnnnnnnnnnnnnnnnnnnnnnnnnnnnnnnnnnnnnnnnnnnnnnnnnnnnnnnnnnnnnnnnnnnnnnnnnnnnnnnnnnnnnnnnnnnnnnnnnnnnnnnnnnnnnnnnnnnnnnnnnnnnnnnnnnncaggtcagtgagtcagaccttgttatgcccactttatagaggcaaaaacggagaccaggaggttgcaggacaagtctgaggttttacgcctttcagaaacagaacccacgtctgtccagtcaagcccgggacccacgtccaaaagcagctcgcgtcagccatgggcacgggaaaggggaaaaaacaaggaaaggggaggaacctactctagaatggctgttttcttgtccgggagagggacgctgcgtccgcggcgttcccgtggggctgagaacagtcgtcgccgcctcagatggcttctcgcggggccttgaatccgccctcagggcctccgcaagggcgagcgggaggcgcaccggaaggaactgagaggaactttcagggcttttcgccccaccgtggcggcccggccctcctcgcctcgccggccaacactgccgccgcccgggcgcgggtcgaagcggttggtcctccgggcccctggggtggctgggctgctcctccgggccggagcctgcgggcgactaggccctggtgcgtccccgcagcagccgcagcgccccccaggcggcgcccggccccttggctggctcagaccccccgcgtgcgcatcatcccaagcccgcttagcgcttagtccagcggcatgccgtgggcactgtgccgccctcactatctgcctctgctaaaacaccgaaacagagtagcagaggagacagcgccgggcgttgaggcagtccctgagttggaataccacctccatcannnnnnnnnnnnnnnnnnnnnnnnnnnnnnnnnnnnnnnnnnnnnnnnnnnnnnnnnnnnnnnnnnnaaaccctagaaaacagggcagacacgaaaccccaaggagcttacagttgaacagatcatctcacagctatatttaacagtgtgccaatattagatggaatgacagcactcgaatgaaagctaacctagcccagggctaggaaag

SEQ ID NO: 439625 - DNA, 1008 bp, Homo Sapiens
  misc_feature (2)..(2): n is a, c, g, or t
  misc_feature (5)..(5): n is a, c, g, or t
  misc_feature (7)..(7): n is a, c, g, or t
  misc_feature (15)..(15): n is a, c, g, or t
  misc_feature (20)..(20): n is a, c, g, or t
  misc_feature (22)..(22): n is a, c, g, or t
  misc_feature (25)..(25): n is a, c, g, or t
  misc_feature (30)..(30): n is a, c, g, or t
  misc_feature (32)..(33): n is a, c, g, or t
  misc_feature (36)..(36): n is a, c, g, or t
  misc_feature (52)..(52): n is a, c, g, or t
  misc_feature (55)..(55): n is a, c, g, or t
  misc_feature (60)..(60): n is a, c, g, or t
  misc_feature (62)..(62): n is a, c, g, or t
  misc_feature (64)..(64): n is a, c, g, or t
  misc_feature (91)..(91): n is a, c, g, or t
  misc_feature (96)..(96): n is a, c, g, or t
  misc_feature (100)..(100): n is a, c, g, or t
  misc_feature (105)..(105): n is a, c, g, or t
  misc_feature (182)..(182): n is a, c, g, or t
  misc_feature (215)..(233): n is a, c, g, or t
anaancnccccaggnccctnanagnggggngnnccnagttcagatagttttnctntttgntntntggattatattgaaagtataagaaaanaaaancaanttcgnacagtctggggcacgggaggaggccgcttctgtgcctgaacagtcccctggggcaggcgtcgtttctccaggcgggntgggctgcagccttctgtggctgccggagctgnnnnnnnnnnnnnnnnnnntgaggacagcagggccaacgccacggtcggcgggggctgggcgcggccgggctcccacagactgcgtattgctgatgccagtgccgccccccgcctatgtgtctgagtccggcctcctcgggtcggctggacagaccgaagctcaggatgccaaggcctgaggccgtccttcacggaccacagggaaacggagtgggcgggcggcagagaacgggtgaagtccgaggcgagtggagaactgtggctgagacgtgggctctccagggagccaaggccactcccggggcccctcaggggctgtgtttgtcaggagaccgtggtggtctttatcctcccgccgggctgcgtgcacgtccagcctgaccggttgattaacaagtcgcagccttccccctccagacacggaagcatgtcacaccactgcttggtcttgatgattcttgcgtccacacaggcgggccgggctctcgtggtgccggcgatctgcccctttctacacgcacagcgggcggtctgccgggcgatcgtcctccgaggctggctgctgtcccggtccaaggtcacaatctcacaggtgccggcggccagctgactgcagtaggcgatgagcaggctggccaggatcatgaacgcccagaaagttgaggacatgctgggcagggcggtcgcatcttgccggctgccggtcctgggcgatggcgccattgaagccgcggcgcccgcgcggggggcagcagcgcgtctcagcagccggccctgcccgcgcccccgcgcc

SEQ ID NO: 439626 - DNA, 2397 bp, Homo Sapiens
  misc_feature (74)..(82): n is a, c, g, or t
  misc_feature (430)..(447): n is a, c, g, or t
  misc_feature (1938)..(1938): n is a, c, g, or t
  misc_feature (2026)..(2026): n is a, c, g, or t
  misc_feature (2106)..(2106): n is a, c, g, or t
  misc_feature (2231)..(2231): n is a, c, g, or t
  misc_feature (2343)..(2343): n is a, c, g, or t
  misc_feature (2349)..(2349): n is a, c, g, or t
  misc_feature (2351)..(2351): n is a, c, g, or t
ttttcaaaaggagtttttctttatttttcataatttagctgaatcaacacaaaattgaatactgtaaaacaagnnnnnnnnntatgctgtaacatcttaaatctcccgatctctgccctcgaaggtgtctacacttgctttcaaaagaaacaggcgagggggaggccgtgaggacgctggctggcagaggctgccggcccgggccgccggagccggggcagcttgggaaggaccctttccaggcccaccccctctgtgatgacaaacccaacctcagccccttcttttagtccaggatacaaatgcctataaatttgtggtgactgaaaggtaaattatgtcctcatggataccggaacaggtcttaaataaatggattttctttcgtatcttcagtctatggttgctggaacagcttctatatagttannnnnnnnnnnnnnnnnnagtaggatagaactagcataatactcatgttaattggactcataggtagtatatacttcagcgggaactcaggaaaatgaaggaggctggcgaacgacggccaggggagaaaaaccagaattgtcgcttattcctcggccctgccggccccgcctgcgcctctgcccggcgcgactttctggacctagtgacacgaagacagaggacttctcagaacgcggggacacaggcgtggggagaagggccgtcaactggcctcaaggtccgtgagtggcgaaaggggcaggaaatgggaaacaaaacccattggaagaagcatgttcaagatattgtacgctcaagtgttgaccaatacagggaccagagagggaatcaggagccaagcctggcccgcagcgaggggaacccggcctccccgggcacgaccgacacatccgggacgccgacgccacggtcctccgcacgcttctcccagagtcccgccttccgtgcctggcaccccggggtccgcggggcaccacctccccgccgtgtcccacccccagagtcttcagaaacacacggggctcggcccgactctcaggacggccgggactgccacgttaattgttaaataggattttctacaaatatacaacatataaaaactgttaaatatataactttaggctttgcaaaatacatttaatgatctctttcaaacaagtgttactcgagttttctttgctttctggagctaaatggggtatcgatgaggcagcagtcacgggagacccaacatgctcttggcagatactggattatccaactatcaaaaatggagctgtagaagaggcatgtttaactggttaaaacagaaagggattttagtacggtcaagttgatctaagtacagaggaataaagcggcctgcgttcccggcgtctgcgtgggggccgtcgctgcctcccgcaggtgtgccacggcctccgcgcagccgaagcccgtcctccgagggtgtgcggggtgctcctggggtggaggcctccaccacggccgccctctccgctccgccggggccaccagcatgtctctgccaccattgccctcccgcccgcacaagcgaccccagggaccctgacagtgagggtgcgtccaggttcagatagattttgctctttggtctatggagtatactgaaagtataagaaaataaaagcaattcggacagtctggggcacgggaggaggccgcttctgtgcctgacagtcccctggggcaggcgtcgtgtctcaggcgggctgggctgcagccttctgtggctgccggagctgcctcctcctcctcctcctctgaggacagcagggccaacgccacggtcggcgggggctgggcgcggccgggctcccacagactgcgtattgctgatgccaggtgccgccccccgcctatgtgtctgagtccggcctcctcgggtcggctggacagaccgaagctcaggatgccaaagcntgatggccgtccttcacggaccacagggaaacggagtgggcgggcggcagagaacgggtgaagtccgaggcgagtggagaactgtggntgagacgtgggctctccagggagccaaggccactcccggggcccttcaggggctgtgtttgtcaggagaccgtggtggtntttatcctcccgccgggctgcgtgcacgtccagcctgaccggttgattaacaagtcgcagccttccccctccagacacggaagcatgtcacaccactgcttggtcttgatgattcttgcgtccanacaggcgggccgggctctcgtggtgccggcgatctgcccctttctacacgcacagcgggcggtctgccgggcgatcgtcctccgaggctggctgctgtcccggtccaaggtnacaatntnacaggtgccggcggccagctgactgcagtaggcgatgagcaggctg

SEQ ID NO: 439627 - DNA, 1071 bp, Homo Sapiens
  misc_feature (25)..(25): n is a, c, g, or t
  misc_feature (27)..(27): n is a, c, g, or t
  misc_feature (34)..(34): n is a, c, g, or t
gttgccgtctttttgcgctgccatngnccagctnagcagccaggtgctgtcgtccaacagcgcagtggtaagcaccagcgtcatcaggttgaagaagttgtagttgcccggtgatgataatcagggacctgcagcagcacctgcgagtagaaagcagccaagcgcaggcgtcgaatgggggcgaagaacaggggcggcacagcgatctcaattaggaaggtggccaccacgctgagcttgtgcagccagaccggcaggtggtgtgcgaaccaggcggcgggcgtgggcaggcactgggtctcgtagtggtaggtgagggcagtgagcccccaccacgcagggcagcggctggtcagcttgaccacgcctgaggcgaacatgaggcggaacagcagccatcgcaccagccagaaggggaggtcttcgtggggcagggcccctgcctgcctgccctggggggcctccttgcggtgggaggctggcctcagcggggccaccagcacggccaggaagccagtctctagcagcagggagtcccactggaaataaaggaacacctggcccacctggcaggctgacaggtaggcggcccaaagcagcaagtagatgacagggtggcgcagtgggctcagcagcagggctcccagggccactagtgcacccagcaggctcagcagctccaggccctgggccgtgtccagccccagtctcggcgcttcccacagcagcgtcggggtctcccacagctgctgccagcgccccttgccctgaggccgcagcgtcctccttgcaggtaggatgccctcggggccatacaggcctgggatttgcgtgtagagggaagcgaaagcaaacatgaagacggccgccacgccctggaggaagagctgccgcgggagccgggagcccgccatgtccgctacgcggcccgctagagcagggcccgccctccgcgtccgcccgcccgcggcagccccaggatcccgggaattccggaccggtaccagcggtgtgttttggatccgatacgagacacaattatgcccgtggggcgccgggggggtcgggcgg

SEQ ID NO: 439628 - DNA, 1815 bp, Homo Sapiens
ttcaagcacaaaagacgcctttattggtgcccagatctaaagggcaggatgggctggtgtgaagatgacgtggaagatgacagtgcttcccctcttcccctgggagtcagcctcttcccctctggcacggggcctagggttgggggctctagactcagacccccacagcccagggcaggggaagggtcttgagcttggtcgtgttttcctcctgggccaatcacagaggcaatagtgggagtcctggggaggggcatggctggcgtggggggtggggcctggagccctcaatgcagcaccctgcaaaccccaggggcagccccccaacctgtgcctggccctgcagggtcagctaaggcacagtggctgggtcctgtcctgccggaggccagagcactcccggcgacctggccctctcaggacgtgcagctgggagaacacagctacttctttcgccgggtggtcctcgaactactggagcaggggttgggggctgcggtggcctgttcggaggcagctccggagtctttctgggaggctggcctgcgcttctccccgctgactggtgccagcggggaggaccggagagaacagggtgctagcagggcctgcacaaatctgacagcccccacggccatgaggagcccccagagcagggcgggggcctccaggggagacagctgagagcgagtccagtggagggcctgggccagggtgctgttggcgctgcgggtgcgaggtgggcttttctcctgtagtccaaactgcctgagcagcgtctccagcgtggggtcccccagggacacggatgggaagaactcctccacccactggcgccgccaccactggccctgctccccaggctgggagaaccagtacttgtagcgctgggctcggacgtaggtgggcggctgcttgtggaagggatacctggccacttggctctggacaaggcggatcactggctccttgccctgcagcaggcgcaagaccaggcttgtgaaccacgggctgtgcgtgtgtgggcccagggctgcaaaccacatctgccagtccaggcgtggctggtggggcaccacaaccgggggcggccggctcaggttcccaggcttgtacatgaactcgatctccgtccagtggtggccgtcgtaactgccctccagcaccacctcaggccgtccaccaagcccagtcatgcggcggaagaggccgtaggagttggccagctgtaggtgctccacggcaccaaacaggcggtgggccccggtccagaggcgcccgtgggtcccgggctccacgtaggagtacggcaccaggctaatcaggaacaaggccacggtcgcagtgcccacaagggacagttggactacagcactgagcttccgtagccagccccgcacctgggtccacctccacagggcactcagcagctcccagaccagggaggccacacccagccacacagtgggcagcgtcagtgtcttcagccactgagaaaactggtggaaggtgaaagtggttctggagtggatggtgcgctgctgccagtcaacctccaggccaaagtagtgcacagtgccataggccagaagcccgtagacggctagttccagcagcagcgacagggtggccagcagggccttgggccaggaggtggccgtcttcttgcggctgccgtggccaggctcagcagccaggtgctggtcgtccaacagcgcagtggtaagcaccagcgtcatcaggttgaagaagttgtagttgccggtgatgataatcaggcctcgtgccgaattcgccacccaggcctcgctacct

SEQ ID NO: 439629 - DNA, 862 bp, Homo Sapiens
ttggcagcgtcagtgtcttcagccactgagtaaattgtggaaggtgaaagtgttctggagtggatggtgcgctgctgccagtcacctccaggccaaagtagttgcccagtgccatagggcagaagcccgtagacggctagttccagcagcagcgacagggtggccagcagggccctttggccaggagggtggccgtcttcttgcggctgccatggccaggctcagcagccaggtgctggtcgtccagcagcgcagtggtaagcaccagcgtcatcaggttgaagaagttgtagttgccggtgatgataatcaggacctgcagcagcacctgcgagtagaaagcagccaagcgcaggcgtcgaatgggggcgaagaacaggggcggcacagcgatctcaattaggaaggtggccaccacgctgagcttgtgcagccagaccggcaggtggtgtgcgaaccaggcggcgggcgtgggcaggcactgggtctcgtagtggtaggtgagggcagtgagcccccaccacgcagggcagcggctggtcagcttgaccacgcctgaggcgaacatgaggcggaacagcagccatcgcaccagccagaaggggaggtcttcgtggggcagggcccctgcctgcctgccctggggggcctccttgcggtgggaggctggcctcagcggggccaccagcacggccaggaagccagtctctagcagcagggagtcccactggaaataaaggaacacctggcccacctggcaggctgggatttgcgtgtagagggaagcgaaagcaaacatgaagacggccgccacgcctggaggaagagctgccgcgggagccgggagcccgccatgtccgct

SEQ ID NO: 439630 - DNA, 3303 bp, Homo Sapiens
  misc_feature (3281)..(3281): n is a, c, g, or t
  misc_feature (3286)..(3286): n is a, c, g, or t
caacagcaagttctaagcccacatttatttgcacatgtatagtaatggccaacagatactccaagttcatacaaatttgtaaaacaacaaagttaataatcacttggtacacttgtgtgttatcttgcttacatattaaaacctagatgaacttccttcattttgtggacttccatacaatacttccttaaacaaaattcttgaaaacacatatcagcatgtttaagttagagccaacacaaagttaagacaagacacaaactcaaaaaccaagtttgaaagatacttttctacctccctcccctagaaagaagtgattttctttaacagatgtatgttatatcacacaagtaaccatgaagacaaaagaatgacgctcccatcatcaggaagaaaatggccaaccaggatcatactgtttaggttatctaccggacatatggttaaaatatgagaaacgggggaaaatgcttagattaaaataacaagggagaatagaaaatagcaaatgattttaaagagaactgttccccctcaaagctgcaaagctctgactctgacaactaaaaactgtccaaggcaaataaaaacgaggaaaccttcaaaaacattctaatcacgtgcagtatctagtgttaaaagctgaaaatgataaagaggatatttattatacaagtgtcaacgaggacatcccaaaaataatgaaataaacacacatttatttctacaaaagcaatgtatgatacagaattagaagggaacagacttaaagatttgcctattaaaatatacagattcttactgaagagtataggatatttaaaaaagatgacaagggatgttaatctttttttattattatcatttttacatattttggaacctcacataattttgataaataactcttacaaaattatgcaaaaagtacaagaatgtctggtaaacaaacagtctgtattttccaaaaagattttttacaacatgcaattcttaaggcagcatcctctttacaaggaaaggtaatccttttttatcaagaaatcttctgctgcaaagaatggctaagaaagcctggcttcttccattaacgccttttgtctttcctgtctgattttcggtctctttcacttcttgaagatcttttgcctgatcgactactctctgatatagacctctttctgtcggaccgggaattcttatcctttgatccttttgtatctctactactaccaccttttgaagatttgtgacttctttctagtcctgaagtatcccttctcttccgatccacgctccttctgtgctttctatctctattatgtccccggcccctactccgacttctactctcactactactactagtgctactgctactatctctgctgctgctgccacttgtactggagctgctactggaactactgcgactgctactacttccactgctggaactacttccactgctgctactggttgaactgctactagaactgctactgctactgcttcgacttctactcttgcttgttttatttctagctcgacctctacttctgctcctagttttggttttgctcttgctctctggatgtactgtcaagactggctctactggtacctcagtgagttttacagactctacaggaaaatccttcctctcaggtagtaaatgcccttgctcctgagtaacttggggtgttggctgtaaaacagctaatgacaaatcctcaggctgagagggaggctgggactggagtactggttgggactgggattgaagctgaagctggggctgagactgaggctgaggttgagccacaggctcaggttggggctcagattctttttcttctttttcctcagactccttttccatgtctaaagcactgacattctctttcccaggagaaagggatttacattctttatctggctcaatttcaaattccatttctggttccaattctttgctagcttcattttctgaaggttctacactttcaactcgattagtttccattacctcctggtcagcaattacatgtttgacattctcaaccatctctagcacatccataacttcttcaggctgactatcctgctgcttctcactttcccttacctcagtttcctcctccatcttaacctccatttcctgtttttgttcttcctcctcctgttctttctctgcatcactatgaacaatcgctatttccttttcctcttcctctcctgcttcctctatttctacatcattgtgctgattacctgtctcctccaactcttcctctcgctgagccaccttaccctcttcttgttccgccttctgttcttcattacgcaccacctgatgctctttttccttcattgattgtcttctaggcctagcctccattttatttatttgttctgcaaattcgatgcgtctaccttcaaataaagcgttcatttttctctgtgactcttctattagtttttgggtagctggacacattcttccaggaatataaaacaaatggggctttgtcttagttcttatatatttaattattttggcattatgttcattccattcttcttgccagtgcgcaagctcaactttctgttccaaaagccgcagttctgtctgtttagcacgcctctcttcaaacagttctctcctttcattttcaacctgctttctctcttcttctgcctgaacttcaagtttttgttcaatttcctggcgccgcttttgcctttcagtagcaacagtggattcttgtttaaatttttgaagggtacccatcaacaagccaaatattcgccggttcctttgctttcccttttcatccatattttgatcctggataaggtctctacgtgtgcgctctttggaggtagctacaactgaagactgcaatgctggctttttaacatcatcatcctccgggtcgctttcctggcgtgattctcttctggtccgacgctccccgcccagcctactgactgccccttcaaggtctctctgtttggctgggggtcctcctccactatctgagaatccacgcctcagtaataaactaccacgtcctctacctccaccaggaccagaaagggccagcaatctggcttggatgggcctcacgtcattcggatcccgcccggtgagcttgcgaatgttctcatccacgttcttaagactctctttggccttttccagctgttcctgcaaagttcttacggcgaccgccatcttctccctgcggcaggcttgagactgcttttgggggggngaggnttaatttaattaaggat

SEQ ID NO: 439631 - DNA, 351 bp, Homo Sapiens
aaaacatagatctctgtggggcgtatcacaacgtcagggtcaggaggcctcaggactggagcagggggtgaaaccccctggatggaactccatacaaaaggaggtgaagcggaactgaccctgtaaagttaaaaacccaagttgaacggaaccaaaacccacaggtgagtgtgagaccgagtgtgtatgtggcagtctgttacagtgactgctgctgtgtgacctggactgttggcggaaggatgagtgggtgtgactctgtgcccagggagtggggccggtgggccagggcggggcgggcaggcacagaccggcgtgccaggccccctgggttgtgaaaacttctgtttc

SEQ ID NO: 439632 - DNA, 999 bp, Homo Sapiens
tgccgctccaccgcagccatcttcctcacagggtctctccccaaggagggggctagcttggtccccatgctcttgggcaactacagcagagaagcctccctgccttggaccccaaagtctcctgtcctgccctttatgtgtgtgggtgaaactgggtgcgtctgagcacgtgggagccgtgtgtgtgcctgattactgagtggccaccaggggccgctctggactagcgcggggccgtggaggcgtgcaccgtgtgcatgcgtggggtgtacctgtgagagcaccctgtctcctcttccaaagaaagtcagaggccatcctgcaccctgggtccagctgtttgcccagcctgtccttccagagcctcacccagcctgagcggggttccctggtgaatccctgctgcttggggaggccccaagggccccttggaggcagcgcccccaccttgggcttctgagggcatcatagggggacccctagagtcagttcaccacaggccctggggagagtcaaagacccccgagggtgcccagccccccacactgtgactcctcacactcagcgatgacctgtggggtggggggccctgggacgtttttaaacctagggtttggagtctggactaagctccatccacgtcactcacaagtttctgtttatatttctagctttgaatctacgtaacacatagccgagacacaacgaacaaccgaagtttgcacaacccaggggcctggcacgccggtctgtgccgtgcccgccacggcctggcccaccggtcccagctcccttgtgtgcacaagaggtaagaacccccacgttcgattcccttttccagaccaaacgcaggtcccacgggtttctgagcaccaaggcagatccaggtcaagctctgttaacagccggaactgggcgcagcattaacaccacgtcccggggccttccatacgtacatcctgttgcggcgttacatggggatcccggtagaaatagggg

SEQ ID NO: 439633 - DNA, 790 bp, Homo Sapiens
  misc_feature (730)..(730): n is a, c, g, or t
  misc_feature (738)..(738): n is a, c, g, or t
  misc_feature (782)..(783): n is a, c, g, or t
  misc_feature (785)..(785): n is a, c, g, or t
caatgttgaaattttatttctgaaatgtttcttttaatcaatacatattaagtatataatttccttaaaaattaacaaataactctgattttcactgttaggacactgttacagagaaggaaacatattgctcttctaacttttcttctttttacatttatccacattccaagtagattatcatagtaaggttcttctgtgttacttttgtccaagttgtgacaactgttttatgaactgtgtagcattaaaaagctcactgcagccatataaaatgtgtttgccttgtttcccctttatgtagtcaacaagattctgatattcaatgtagttgcctcctcccaccacaaaaacaatggcctcttggaatggatttttatttctgggaactgagctgtcattgccccgcagcattttgggatcaaaatatctatagtcatcagtttcggggtttgacttcatctccataagattgtccaaaatacgagtaacaggtagattttgctgtttcaaaaccaggttcttcactccttccatcacaaactgtgatcctgtattcatgactcgtgataaaagacccattggtttagtggtagtgctgccatagctggccggagctgaggccatcttggtaaaagccttccactgtttgatatattgtaaaggattaaggttgcatcctgcatcagttaaagcttttttatattgctccaaatcagcctcataattntctttctnttttcttatataatatataataaacaacctcattttatcttctnnanttcct

SEQ ID NO: 439634 - DNA, 2062 bp, Homo Sapiens
  misc_feature (252)..(253): n is a, c, g, or t
ctgttcaaagagaaggaaaaacaaattgctccttctaaccttttcttcctttttaccattttacccacaattcccaagtagattattcaaaggaaaggttctttctgtggtacttttgtccaaagttgtgacaacttgtttaatgacctgtgtagctttaaaaagctcactgcagccatataaatggtgtttgccttgtttcccctttatgtagtcaacaagattctgatattcaatgtagttgcctcctcnncaccacaaaaacaaatggcctcttggaatggatttttatttctgggaactgagctgtcattgcccgcagcattttggatcaaaatatctatagcatcagtttcgggtttgacttcatctccataagattgtccaaaatacgagtaacaggtagattttgctgtttcaaaaccaggttcttcactccttccatcacaaactgtgatcctgtattcatgactcgtgataaaagacccattggtttagtggtagtgctccatagctggccggagctgaggccatcttggtaaaagccttccactgtttgatatattgtaaaggattaaggttcatcctgcatcagttaaagcttttttatattgctccaaatcagcctcagaaggtgcttgctgtgtgcttatataatagataagaaacaacctcattttatcttctggagttcctgcatcagggtctgatattatatctagaagagatttatccagagtagttttgctcattattttttcttcatattcaaaatatacatccaattttcttgcctttatatgttctaaaacagcagtggcaacatttgtatggagatcaataagtctttttttctcaaggagttctggcaaagaactaacagctgatgttagcttagcggtattgtcagaaagcatacttatggctccttcatcttccccttctagtccccataatgcttttaagtcgtttgacctcatcttcctgtgctctgtaagattctagttcttgctgaactgattctgcaacttctgggaatggacttcctttatgtttttgccaaaatttatcaaccggagttaaatcataagacttcttgttttttctctttggtctagcaccagctggagagttttccactcctgaagattcttccaaattaaccctgtttaaatggaaatccagtacatcgtgcaccaatgcttgatatgtccaagtatgatgtaaaggagttgccaaatctatgtttctgtcaacaaggactaataagggcctctggaagctgaattggccagctccaagtgtatcacctgtaaaaagactgtttcttgcatctcttagattttctcgaagtttcttgtctagtttcactgctaccatttctgctgctgttcctcttgaacatctgattataggaacagcacccagagtaacaaaaaagcagaagaggctgtcaactatagtgtccataacagtttccatttccgtgtctgtgatatctggcctgttaatggcacgatatgaaacaagctccttattttgattacataatacaaacatatcatcttccaaagtaataaaattgagatattggtcaaaaaccttggctacttgtgttactgcactagctgctaacgctgcatttgcaatatcttccagtttacttcttgaaatagcagaaataaaatttaaataatatgattcatatagttgatttcgaagatcctggcacattctgtcaatattttcttcagttggcattacaaagtatactgcaggaacatctggaataggatctcgatcagagtgtaaaagcagatgcagagtgattcccatgtctcttagctccttcacagatagcagaggagagattatatcttggccaaatctgtcataaatgagtaccttccatactggttctcctgtgctgtttttaatatgaggcacattgaaattcaacatacgcttcaaagccactgtctgcctttcccgaatactggctgctgctgctgctgtcgctgccgccgccgccgccatcttggctcccacgagccactgcccc

SEQ ID NO: 439635 - DNA, 909 bp, Homo Sapiens
  misc_feature (820)..(856): n is a, c, g, or t
gatgatgtaaagggagttgccaaaatctatggtttctgtcaaccaaggactaataaggggcctctggaagctgaaatgggccagctccaagtgtatcacctgtaaaaagactgtttcttgcatctcttagattttctcgaagtttcttgtctagtttcactgctaccatttctgctgctgttcctcttgaacatctgattataggaacagcacccagagtaacaaaaaagcagaagaggctgtcaactatagtgtccataacagtttccatttccgtgtctgtgatatctggcctgttaatggcacgatatgaaacaagctccttattttgattacataatacaaacatatcatcttccaaagtaataaaattgagatattggtcaaaaaccttggctacttgtgttactgcactagctgctaacgctgcatttgcaatatcttccagtttacttcttgaaatagcagaaataaaatttaaataatatgattcatatagttgatttcgaagatcctggcacattctgtcaatattttcttcagttggcattacaaagtatactgcaggaacatctggaataggatctcgatcagagtgtaaaagcagatgcagagtgattcccatgtctcttagctccctcacagatagcagaggagagattatatcttggccaaatctgtcatgaatgagtacctgtctgcctttcccgaatactggctgctgctgctgctgtcgctgccgccgccgccgccatcttggctcccacgagccactacccccgctctcgacgaattcgagctcggccgatttggcctgatnnnnnnnnnnnnnnnnnnnnnnnnnnnnnnnnnnnnncgccgccaccgcgataagcgccagttcgccctataggtgagtcgtatacatct

SEQ ID NO: 439636 - DNA, 1509 bp, Homo Sapiens
aaaaggaacataaacttttattgtcatccagcacctgtgatagtttcatgtctctctaaaggagacaggaaattggagcattgtgggcccttttaaaagaaaagaggagtaggtaggcacacccaggtgcttctaaaacaaccaagcccaaacctgacatgctcctccccacagtcaccttcattgtcccctttaaaagtctggaacagtatgtagcaaaacaaataaattacttttcatttcaaaaagtaagttcaaaggttgaagctgcctaggccaggcttctggacaggtgcctccaaagaagtgagctttccttttcaacttccttagctctagccagtagaccagaaacccctgctttccacatcaggattccagatggtgtttagttagacttgggatcccgttgcttgggcatctctcctccatcttccaaatccatttctgcagcaactgacatacacaggacctggaggtaccttgtggcagaccccacgatccttcggaggtaaagcggtcgcttatgttctggcactctgatgatgaggaagtaaaagggcaggcctgagagggcaatggcaatgccgatgagggagttgatagtatcactgtaaagtggaacagccaccaggaagatggtgcagaggcagaagacaatcgggaagaaaacgctgagcttgaggggacgaggtcgatcaggctccttccagcgcagataaagctgacccacaatagaaagccccacaaagaaccagtagctgaagctgtagtagttaatgagctggaagatgtcttccacgcacaagtagatcaatgccatgataccattgaagagcagagaaggcactggtgtgaaccgctcaacatggatcatgcagatggcatcagggagatggccttctcttgagcccacaaagaaaagcctagaagcagccacaatggaggcattgaggccaccaaaacaggataatgcaactgacagtggaattatccagttaaatattccaaatatctgatctgcaaaagtcacagcaacagcatcactggccaagatgtctctcatgtctagcacagtataataggccacattggtcaagatatagatgatggtgacaatgggcatggagatgccaatggagaggggcaggttcctctcaggattcttgatctcttcagtgacatagttgagggtgtcccagcctgagtaggagaacagagctgagtacagtgccagggcaatgtcacccactgcaaatgatgaaccctcaaaggaattctcaaaatgagtagaggctccctggccaagtctaacaatgcctgcaacgatgaccgcgatcagtgccaatactttagcataggtgaaaatatcttgtaccagggttccccatttgacataggcacagttaatgaaggttaagagacctgtccagtgacctttgggcaggtgcggggaggaggggctaccagctgagtcaggggagaggggaaggtgctagttaggagaac

SEQ ID NO: 439637 - DNA, 1173 bp, Homo Sapiens
tatcttgtaccagggttccccatttgacataggcacagttaatgaaggttaagagacagatgcaggcagtagccagcattcggctggcagcataaggggcgaagcaggtcgggaagagaggctgtaccatgtagttggcaaaggtgatggcaatgatggcctggctggtgtgctcaatgatgagcagggaggtccatattctgatgaaagcatggtattcttcataggcctccaggatataggcatagctggccccagatttcttaatggtggtgcccagttccgcataacaaagggccccaaagacggagaagaggcccccgacagcccagatgaccagagagagaccaaaggaggcactgtatatgagcacacccttgggggaaacaaagatgcctgagccgatcatgttccccacaatcaggcacacgccgttaagcagtgagatctccttcttcagcttcacctgctccggccctgggctggccccatcacccaaaggggaggtttccacctcaggctgggaggccacttcatactcagtgctgtcaaccatggtggaggagaggaaacccttcaccagcttcctggcattgcctccttggtcctggatataagcaggttctcacggcagtgtgagcggcagtcagggagagaagtgccttccaggatctgtggtctgatgctcctccttcccagccagcagtaaaagggaaggccagacaaatgcctatggatttaagcaagaagggtggaggaggtgaggcagcccgcaaaggaaggagtgaggggagggaggggcaaaggagtattaagcaaccatctgggtccaaggttcactggcccttcacatctgcaaaaggggcagctaggagctcttggctcagcactttctgtgataagaaggtgctctctcaggaatctcctttgtcagctctgctctgggaccaggggcccagaagaaaggacagtcagctgagtgcagtatctgtagccctgcggaagctgtcccagagcaagttagctgaggacaggacagtagctgggaaggaatacacagcactctctctctctgtgtcctccatgccccaccctagcctctcttctctctcaccccaagcatttaagaaagggaggaaggttgcacagtgtgacacaaaggcttgttccgct

SEQ ID NO: 439638 - DNA, 2830 bp, Homo Sapiens
  misc_feature (2482)..(2482): n is a, c, g, or t
  misc_feature (2509)..(2509): n is a, c, g, or t
  misc_feature (2518)..(2518): n is a, c, g, or t
  misc_feature (2531)..(2531): n is a, c, g, or t
  misc_feature (2535)..(2535): n is a, c, g, or t
  misc_feature (2543)..(2543): n is a, c, g, or t
  misc_feature (2559)..(2560): n is a, c, g, or t
  misc_feature (2569)..(2570): n is a, c, g, or t
  misc_feature (2575)..(2575): n is a, c, g, or t
  misc_feature (2579)..(2580): n is a, c, g, or t
  misc_feature (2584)..(2586): n is a, c, g, or t
  misc_feature (2589)..(2589): n is a, c, g, or t
  misc_feature (2591)..(2592): n is a, c, g, or t
  misc_feature (2604)..(2604): n is a, c, g, or t
  misc_feature (2611)..(2611): n is a, c, g, or t
  misc_feature (2620)..(2620): n is a, c, g, or t
  misc_feature (2625)..(2625): n is a, c, g, or t
  misc_feature (2628)..(2628): n is a, c, g, or t
  misc_feature (2644)..(2644): n is a, c, g, or t
  misc_feature (2646)..(2646): n is a, c, g, or t
  misc_feature (2672)..(2672): n is a, c, g, or t
  misc_feature (2680)..(2680): n is a, c, g, or t
  misc_feature (2694)..(2694): n is a, c, g, or t
  misc_feature (2696)..(2696): n is a, c, g, or t
  misc_feature (2731)..(2731): n is a, c, g, or t
  misc_feature (2738)..(2738): n is a, c, g, or t
  misc_feature (2749)..(2749): n is a, c, g, or t
  misc_feature (2751)..(2751): n is a, c, g, or t
  misc_feature (2794)..(2794): n is a, c, g, or t
  misc_feature (2810)..(2810): n is a, c, g, or t
  misc_feature (2828)..(2828): n is a, c, g, or t
acagagccggtggtggagccgccgaggccacctcgtgtatgcagagaccatgtgtgtctgatctgctgggatcctagagctggaacaggagggtcacgcagcacaatgccagctctgcccctggaccaactccagatcacccacaaggacccgaagacaggaaagctgaggacttcaccagcgctgatttgcacctgtaactccatgatacaaatttgatttaaatgggagggggtcctgcagacccacatgagaggtggccttgaagaatccttgtggtacccacaggctctacagtttggaaactcgccaccccgagcagaaggcagaccggtattttgtgttatacaaaccgccccctaaagacaacattcccgccctagtggaggagtacctggaacgcgccaccttcgtagccaatgacctcgactggctcctggccttgcctcacgataaattctggtgccaggtgatctttgacgagactctacagaagtgcctggactcctacctgcgctatgtcccccgcaaattcgacgagggggtggcctcagcccctgaggttgttgacatgcagaagcgcctccatcgaagtgtttttctcaccttcctccgcatgtccactcacaaggaatccaaagatcacttcatttccccttctgcgtttggagaaatcctctacaataacttcctctttgacattccaaagatcctggacctctgcgtgctctttggaaaaggcaactcaccactgctccagaagatgataggaaacatctttacacagcagccaagttactacagtgacctggatgaaaccctgcctaccatccttcaggtcttcagcaatatcctccagcactgtggtttgcaaggggacggggccaataccacaccccagaagcttgaggagaggggccgattgacccccagtgacatgcctctcctggaattaaaggacattgttctctacctttgtgatacctgcaccacactttgggcctttctggatatcttccctttggcttgccagaccttccagaagcacgacttttgttacagactagcttccttctacgaagcagcaattcccgaaatggagtctgcaattaagaagaggaggcttgaagatagcaagcttcttggtgacctgtggcagaggctctcccattccaggaagaagctaatggagattttccacatcatcctgaaccagatctgcctccttcccatcctagaaagcagctgtgacaacattcagggcttcatcgaagagttccttcagatcttcagctccttgctgcaggagaagaggttcctccgggactatgatgcactcttccccgtggccgaagacatcagcttgctgcagcaggcctcatcagtcttggacgagacgcggactgcctacatcctccaggcagtcgagagtgcatgggaaggggtggacagacggaaagccacagatgctaaagacccatcggtgattgaggagcctaatggggagcctaacggggtcacggtgacagcagaggcagtcagtcaagcatcatcacatccggagaactcggaggaagaggagtgcatgggagcagccgcggctgtgggccctgccatgtgtggggtggaactggactctctcatctcccaagtgaaggacctgctgccagaccttggtgagggcttcatcctggcctgcctggagtactaccactacgacccagagcaggtgatcaacaatatcctggaggagcggctggcccccaccctcagccagctggaccgcaacctagacagagaaatgaaaccagaccctacacccctgctgacgtctcgccacaacgtcttccagaatgacgagtttgatgtgttcagcagggactcagtagacctgagccgggtgcacaagggcaagagcaccaggaaggaggaaaacacgcggagtttgctgaacgacaagcgtgcagtggcggcacagcggcagcgctacgagcagtacagcgtggtggtggaggaggtgccactgcagccaggcgagagcctgccctaccacagtgtctactacgaggatgagtacgatgacacatacgatggcaaccaggtgggcgccaatgatgcagactctgatgacgagctcatcagccgcaggccattcaccatccctcaggtgctgagaaccaaagtgcctagagaagggcaggaggaggatgacgacgatgaggaagacgatgctgacgaggaggctcccaagcccgaccattttgttcaggaccctgcagtgctgagagagaaggcagaagccaggcgcatggcctttctcgccaagaaagggtaccggcatgacagctcaacagcagtggccggcagcccccgaggccatgggcagagccgcgagacaacccaggaacgcaggaagaaggaagccaacaaggcgacaagagccaaccacaaccggagaaccatggccgaccgcaagaggagnaaaggcatgatcccatcctgagacctnttccaattncattctttattcntctnctctttantctccacccccccctnncttctcctnnttccncctnnctannnccncnnatttcaactcancccctcnacaccctcngcttnccnccccctcacaaccccncntctcgtctaccacccacccatgaccnccttcctncagaacacacattncnttatcccacagccgaagaatccgtgggcccggcangcaggcnccttcctctcngngcgctagcgggaaagagatggggatggagtcccaaggcaagcnccccaaacctcgggcncacaagacaccacttccnct

SEQ ID NO: 439639 - DNA, 621 bp, Homo Sapiens
tttttgaaagggtcaaaaattttattagcaggactttttgtgtttttgaatatacaggtttcctgctgtccagggtaaaggggaagtggtgtcttgtggcccgaggtttggggcgcttgccttgggactccatccccatctctttcccgctagcgcagctgggggaaggtgcctgcttgccggccccacggattcttcggctgtggcataaggcactgtgtgttctgcaggaaggcgctcatggctggctggtagatgagaggcggccttctcaggggctgcaaagctgaggctgttgaggggttgagttgaacttggggcccctagtgaggaggccccaggcgatgggagcacggcctggtgagtctggtgccgctgcctccccactggccctgcaccaggtctcaggatgggatcatgcctttgctcctcttgcggtcggccatggttctccggttgtggttggctcttgtcgccttgttggcttccttcttcctgcgttcctgggttgtctcgcggctctgcccatggcctcgggggctgccggccactgctgttgagctgtcatgccggtaccctttcttggcgagaaaggccatgcgcctggcttctgccttctct

SEQ ID NO: 439640 - DNA, 854 bp, Homo Sapiens
  misc_feature (79)..(123): n is a, c, g, or t
cacttttgtaaactttgcagaacgcaataatctttttaagaatagcttgccagcggggggctaaagaactcttcattgnnnnnnnnnnnnnnnnnnnnnnnnnnnnnnnnnnnnnnnnnnnnncttcttttctgtagaatttaaatatttctattctaaagttccaaaataatcagtggaatttgagattagagcaagaaagatagctctatctaattgtttttgtagcagctgaaactaaaataatttgagtgctgaaaccttagttatgctttgttagagatcatttgaaaatattccacacttaagcattcattgtttgaagaactagacagtttgtcctcaggtacttacacctctgttttgcctcctgactctagatgaaatggtggtcactttgggtgaaggagcctttgtcacagttgtagagtgtattgatcatggcatggatggcatgcatgtagcagtgaaaatcgtaaaaaatgtaggccgttaccgtgaagcagctcgttcagaaatccaagtattagagcacttaaatagtactgatcccaatagtgtcttccgatgtgtccagatgctagaatggtttgatcatcatggtcatgtttgtattgtgtttgaactactgggacttagtacttacgatttcattaaagaaaacagctttctgccatttcaaattgaccacatcaggcagatggcgtatcagatctgccagtcaataaattttttacatcataataaattaacccatacagatctgaagcctgaaaatattttgtttgtgaagtctgactatgtagtcaaatataattctaaaatgaaacgtgatgaacgcacactgaaaaaca

SEQ ID NO: 439641 - DNA, 1332 bp, Homo Sapiens
ggttaagtaattgcattatcagcctcctccaggtctctggggagaggatgccaatgttaagtagcagcagacttccatctccccttgtgtctgagtgaagactgcctgttttccctgccagtgcgaggacagcaaggtggatgccctgggggaagccctgcagaccacggtcagtcgctggaaatgtaagttctcggcccgctgcccctggagctctatacgtcgtccaacttcatcggcctctttgtaaaggaagacagtgcggaggtcctcaagaagtttgctgctgactttgctgcagaggctgcatccaaaaccgaagtgcatgtggaacctcataagaagcagctacatgtgaccctggcttaccacttccaagccagccacctacccaccctagagaaactggcccagaacattgacgtcaagctagggtgtgactgggtggctaccatattttctcgggatatccgatttgctaaccatgagacattacaggtcatctacccctataccccacaaaatgacgatgagctggagctggtccccggggacttcatcttcatgtctccaatggagcagaccagcaccagcgagggttggatctatggcacgtccttaaccaccggctgctctggactcctgcctgagaattacattaccaaggctgatgaatgcagcacctggatatttcatggttcttattcaatcttaaatacatcgtcgtccaactctctcacgtttggggatggagtattggagaggcggccttatgaggaccaggggctcggggagacgactcctcttactatcatctgccagcccatgcagccgctgagggtcaacagccagcccggcccccagaagcgatgcctttttgtgtgtcggcatggtgagaggatggatgttgtgtttgggaagtactggctgtcccagtgcttcgatgccaaaggccgctacatacgcaccaacctgaacatgcctcatagtttacctcagcggagtggtggtttccgagattacgagaaagatgctcccatcactgtgtttggatgcatgcaagcaagactagtggttgaagccttattagagagcaataccattatcgatcatgtctattgctccccgtccctttgcttgggttaaaactgcccacaatttttttgaaagggttacaacaagaaaattcccttgaagattcctggttgagccccgctttttttggaggtgacaaaaatggggtgcttgggaggcacatttacctgccatgggatccctccatcaaagagtaggttgcgagccaaccttgggggtgtggtacacacccaacag

SEQ ID NO: 439642 - DNA, 1270 bp, Homo Sapiens
  misc_feature (637)..(647): n is a, c, g, or t
  misc_feature (697)..(732): n is a, c, g, or t
  misc_feature (974)..(974): n is a, c, g, or t
  misc_feature (1258)..(1258): n is a, c, g, or t
tgtgtgtaaagggtttttattggagagcctgtggcgctgaagtgccaccaaggatttggaaggtcactttcagcagccgccatttctgccaggaccagtggcaagcacctggcagatggagcccgggtgtttctgcgtaaggcagaggaatccagcttttccatgagattcagctgcagttgtcgaaaaccctgtgtgagccagcagttccagttcaaaggttgagggggcgaacagctgcgaggtggccaggctcccgtgagtcaccactcaggcctgagtacaccgtggagaggagagataaagcagccacggctgttctgttgccagtcccacccctctggcaaacagatgggggaaaacagagaaggaaagtcaacaaagaaggtgaaatgcagggagcagagactacacgcaggccccccgtggctggcaataccatgcgtgctgggccagctgcgccaccctcacccagggcttcccacgggctctgctctttcctgcagaggcgaaactgccttcctggcaggcggaggctgccgagctcccatgccccttcccacatatcccaactcttctcagaaaactgaagaaccgaagatggaggtgagtcaggaaaggctggagttttcatccnnnnnnnnnnngagcaggacaataaacaggcaaatacacaaaccctggagcaaagccaggnnnnnnnnnnnnnnnnnnnnnnnnnnnnnnnnnnnncacctttctagagagagcaaaatcccagggtcccgaaggcactgctaatagactaatagaagcatctttgttgcagccaatcacctctagcctgggaacaccgctagtcaggaggcctcaatcaacctgagaagtcagcccaaggccctgtctccagaagccagcagcagatccctgggtcatgtcacaggcaagtcctcacttcaccagctcagaggtgagccactctcacctgaaccctngccttccggcagggacctcctgggtcctgtggggtctcctgggtccaggtgggttcctagtccagccccgtctagactgacttcaaatatagtcccctgacagtgtgatttttttccagccagccaaatcaccgttcatttttaaaatggtttttaaaaattacatttctaaggcaaacaacgtagaactgtgacagagcagaggaacaacaaaaaagcacaaagaatgttgctaatcacaggctgcctagcactttcctttcccttcagagaaggagaaactnttttataggtat

SEQ ID NO: 439643 - DNA, 564 bp, Homo Sapiens
gcggccgcactgtgggcaggcgaagggcttctcgcctgtgtgcacgcgctggtgcttaaagagcgaggagccctggctgaaggcagcaccgcagagcgcgcacacgaagggcttctcgcctgtgtgcgtacgctcgtgctggatcaggtgcgagttgcggcagaagcggcggccacactgtgcgcaagcataaggacgcccacccgcgtggatcttgcggtgctggctgaggttggagccgtggctgaaggccttgccgcactcggagcagcggaaggacttctcggccgtgtggatgcgctggtgccgcaccagcgaggagctatgccggaaggccttgccgcacacggggcacgcgtagggcgtctcgccgctgtggatgcgctggtgctgcgtcaagtgcgacgtctggctgaaggccttgccgcactgggcgcactcgtagggccgctccccggtgtgggtgcgtaggtgcttgaggaggtcggagctcttcacgaacactttgctgcacgcgcctgcattcgacaggcacttcttccgcaggcgtcaagacgcctctcc

SEQ ID NO: 439644 - DNA, 1092 bp, Homo Sapiens
  misc_feature (884)..(884): n is a, c, g, or t
  misc_feature (1009)..(1009): n is a, c, g, or t
  misc_feature (1017)..(1017): n is a, c, g, or t
  misc_feature (1025)..(1025): n is a, c, g, or t
  misc_feature (1029)..(1029): n is a, c, g, or t
  misc_feature (1037)..(1037): n is a, c, g, or t
  misc_feature (1040)..(1040): n is a, c, g, or t
  misc_feature (1042)..(1044): n is a, c, g, or t
  misc_feature (1047)..(1048): n is a, c, g, or t
  misc_feature (1055)..(1055): n is a, c, g, or t
  misc_feature (1075)..(1075): n is a, c, g, or t
  misc_feature (1077)..(1077): n is a, c, g, or t
  misc_feature (1083)..(1083): n is a, c, g, or t
  misc_feature (1089)..(1089): n is a, c, g, or t
ggaattcccgggatcttcgccgcccgcgtcaggccacaccggtggtctgggctggggaccgcgggtcgggtccggtttccagggggttcctggtgctcgaggctggcggcgaggaaggaccagatggcctttgaggatgtggctgtgtacttctcccaggaggagtgggggctcctggacacagcccagagggccctgtaccgccgcgtgatgctagacaacttcgcacttgtggcctcgctgggactctccacctctcgacctcgtgtggtcatccaactggagcgtggcgaggagccctgggttcccagtggaacggacacaaccctgtccaggaccacctacaggaggcgcaaccctggttcctggagtttgacagaggatagagatgtttctggagaatggccacgagctttcccagataccccacctgggatgactactagcgtcttccctgttgccggtgcctgccacagtgtaaaaagcctgcagagacaacggggtgcctccccatctcgggagagaaaacccacgggggtgtcggtgatctactgggagaggctcctgctaggctcaggcagtgggcaagccagcgtcagcctgcgactgacctccccgcttaggcctcccgagggcgtccgggcttagggaaaagacactcacagagcatgcgttgctggggaggcagcccaggacgcctgagcggcagaaaccatgtgcacaggaggtccctgggagaacctttgggagcgcccaggacctggaggctggccggcggtcggggacatcaccgaatgggtgcagttttgggaggagcctcatagactccctcggtggccaggagccctcgacctgggacgagctgggcgaggctcttcacgctngggggagaagtccttcgaatgcagggcgtgcagcaaagtgttcgtgaagagctccgacctcctcaagcacctacgcacacacaccgggcgagcggccctacgagtgcgcccagtgcggcaaggcnttaaccanacgtcgcncttnacgcacancancnnntcnnagcgggnaacgcctaagcgtgcccgtntncggaanggcttncgg

SEQ ID NO: 439645 - DNA, 967 bp, Homo Sapiens
gtcaggccacaccggtggtctgggctgtggcgcgcgggtcggggcccgaggcgggcggccaggaaggtacggaccacgagcagccggccgcgcccccaagcctcggtatcttcgagacctgatgaccttcgaggatgtggccgtgtacttctcccaggaggagtgggggctcctggacacagcgcagagggccctgtaccgccacgtgatgctggaaaacttcacacttgtgacctcacttggactctctacctcccgacctcgtgtggtcattcaacttgagcgtggcgaggagccctgggttcccagtggaaaggacatgaccctggccaggaacacctacgggaggctcaactctggttcctggagtttgacagaggatagagatgtttctggagaatggccacgagctttcccagataccccacctgggatgactactagcgtcttcccagttgccgatgcctgccacagtgtaaaaagcctgcagcgacaaccgggtgcctccccatctcaggagagaaaacccacgggggtgtcggtgatctactgggagaggctcctgctaggctcgcgcagtgaccaggccagcatcagcctgcgactgacctccccactcaggccccccaagagcagccggcccagggaaaagaccttcacagagtaccgggtgccttgggagggcagcccaggacgcctgagcggcagaagccatgtgcacaggaggtccctggggagaagccttcgggaattgccttcggaccttgaagggccgcagtggtggcagggatcggagaatgggcggcaggctttggcaggagcctcatagacttctcgggtggccaggagccctcgacctgggacgagctgggcgagggtcttcacgctgggagaaggtccttcgaaatgcagggcgtgcagcaaagtgttcgtgaagagctccgacctcctcaagcactagcaccaa

SEQ ID NO: 439646 - DNA, 1779 bp, Homo Sapiens
  misc_feature (882)..(882): n is a, c, g, or t
  misc_feature (1726)..(1726): n is a, c, g, or t
  misc_feature (1761)..(1761): n is a, c, g, or t
agcggggtactcagccagctgctgctgaggtgggaggaaaagtcctggctgggagaattgagctagtgcagcacacgtaaaaaagcgattccgatgggtcctttgaaagcttttctcttctccccttttcttctgcggagtcaaagtagaggggtgaggttggtcttcttgttactgaccctgcatttgggaaactgtgttgataaggcagatgatgaagatgatgaggatttaacggtgaacaaaacctgggtcttggccccaaaaattcatgaaggagatatcacacaaattctgaattcattgcttcaaggctatgacaataaacttcgtccagatataggagtgaggcccacggtaattgaaactgatgtttatgtaaacagcattggaccagttgatccaattaatatggaatatacaatagatataatttttgcccaaacctggtttgacagtcgtttaaaattcaatagtaccatgaaagtgcttatgcttaacagtaatatggttggaaaaatttggattcctgacactttcttcagaaactcaagaaaatctgatgctcactggataacaactcctaaatcgtctgcttcgaatttggaatgatggacgagttctgtatactctaagattgaccaattaatgcagaatggttatcttcagcttcataaactttcccaatggattgaacattcctgtccacttggaattttcaagctatggataccctaaaaatgaaatttgagtataggtggaaaaagccctccgtagaagtggctgatcctaaatactggagattatatcagtttgcatttgtagggttacggaactcaactgaaatcactcacacgatctctggggattatgttatcatgnacaattttttttgacctgagcagaagaatgggatatttcactattcagacctacattccatgcattctgacagttgttctttcttgggtgtctttttggatcaataaagatgcagtgcctgcaagaacatcgttgggtatcactacagttctgactatgacaaccctgagtacaattgccaggaagtctttacctaaggtttcttatgtgactgcgatggatctctttgtttctgtttgtttcatttttgtttttgcagccttgatggaatatggaaccttgcattattttaccagcaaccaaaaaggaaagactgctactaaagacagaaagctaaaaaataaagcctcgatgactcctggtctccatcctggatccactctgattccaatgaataatatttctgtgccgcaagaagatgattatgggtatcagtgtttggagggcaaagattgtgccagcttcttctgttgctttgaagactgcagaacaggatcttggagggaaggaaggatacacatacgcattgccaaaattgactcttattctagaatatttttcccaaccgcttttgccctgttcaacttggtttattgggttggctatctttacttataaaatctacttcataagcaaaaatcaaaagaagtctgactaaattcagtagaatcttttgtacttcagtaacttgaagtttaaaattaaaatgcagagagaccaatgggtaaaatgtgaatagtattgtaactattttaaggccttcagaagtaaataagtagcagctttcaggctaatttacgtgaaactgattagttgcaaaatccagtagttaaaatactccatnattttacctaaaattccttaattaacttaaaggcnatataatttgaaatttta

SEQ ID NO: 439647 - DNA, 828 bp, Homo Sapiens
ggataccattcgtgacattttccactggaagctcaagagcagatcctgattttccagctgccctgaagtctttcgttagtacgtgatgtgttctgaagtagatgtgttgagcagtaattgtgccacgtcggggatccaggcatgaccatcagtagagctgcgaggaatgaccagtcttccaaggccgtgaggaataccgtaggacaggctgtgtgtgcatcttccattgtcgcactcgtccagtccttgcatgcgtgctcaggccatgacgtggaccagttcccagcaccatgagcattatggtttttcagttttgggtttatccaggatatgcacccatgtttagcaataaatgctgaggcaagggagggagaagatgtctagggcgcctcgctcgcgcccgccgcggtactcagcccaagtttccaacggaggcgcgacgcctgactcagccgccgcttccccctcggggtctcgaccgccgcactccgccgcctccggggctgtttacaccgccccggccacactcacgccgccagccgccgctcgctgccgccgttctctccaccctagcgccgttgccgacttcggccgccagccaccgtcctccgccgcagcctcgtctctctggagcatcttccaaccaccagaaccctgagaatcagagactccagccgcgccggcaggaaactcccccagcaactgctaggggaacgaggccgtcagagcaccggcggcttttcccgccattgagcagaagccgctcggctccttttgcaaccccctctccgctctcgacgaattcgagctcggccgatttggcctgat

SEQ ID NO: 439648 - DNA, 3179 bp, Homo Sapiens
  misc_feature (43)..(85): n is a, c, g, or t
  misc_feature (201)..(209): n is a, c, g, or t
  misc_feature (225)..(371): n is a, c, g, or t
  misc_feature (395)..(404): n is a, c, g, or t
  misc_feature (429)..(439): n is a, c, g, or t
  misc_feature (451)..(576): n is a, c, g, or t
  misc_feature (1870)..(1870): n is a, c, g, or t
  misc_feature (2934)..(2974): n is a, c, g, or t
ttttccccccttttgatttaaaacggggcccataagggaaaannnnnnnnnnnnnnnnnnnnnnnnnnnnnnnnnnnnnnnnnnnaggggccacaagggtttattcccctggggatttaggtttttccacccccttttgggggggttccccgtcggccgaaggtttaaaaaaattacccccctattcccaaaaattcccannnnnnnnnaaaatttaaataaagnnnnnnnnnnnnnnnnnnnnnnnnnnnnnnnnnnnnnnnnnnnnnnnnnnnnnnnnnnnnnnnnnnnnnnnnnnnnnnnnnnnnnnnnnnnnnnnnnnnnnnnnnnnnnnnnnnnnnnnnnnnnnnnnnnnnnnnnnnnnnnnnnnnccccttttcttttccttttggggnnnnnnnnnnaaaaaaaggttttaaaaaatttttnnnnnnnnnnngggcccccaaannnnnnnnnnnnnnnnnnnnnnnnnnnnnnnnnnnnnnnnnnnnnnnnnnnnnnnnnnnnnnnnnnnnnnnnnnnnnnnnnnnnnnnnnnnnnnnnnnnnnnnnnnnnnnnnnnnnnnnnnnnnnnattccacatcacatgctttatttggacttaaacacttataatttcattctaaacacttggttgacatacattttgatgtgtgtagttaggctatacagaatatacaaaccaaagctgtatgaataatacataggtttttcaaaagttatgtttcataaagaatacagagaaaggaaaaatagccacacatccaatatctcacaacttctaaaaataaaactacagagatgtaaaatataaacaaatcaaacaacacacaaattatcatccttgaaagaaaaattacaggccagcatcagccattctttgaagaactaaaattattaaagaaaacataaatttattacaaagctaactatgagtgtactaataggtaaaataatatgaagcagtataattctacattaacaagtttttccataatatagcataatctctctaatcaaaatttctaattctatctagtattaatttaactactgactttaattcataattggtagcctaatttctggcatacaatgtgaaatgacatataatttcattaaatccatagtactataaatagtcaattttacactatctcataaaggtgtatgcaaaggcctttttaaaaaacaaggctatctgaatataataaaactagttttccaagattcaaataacaaaacagttatataaatgcatacattacacttcctaggttaaaaaccatcaaagatcacaaaaatattaccaaaaaggaaagtcatattttttcaccactcatctttgtccctgcatcttcattagagctgtctaattcagcaagaccactttctgattcagtatggctttcctgcattgtcactgggtttccagcatcactgttcgaagaagtagctgtggcagctggttcagcagggctttcttctccctctactttagctagcctgtaactagtcagcatctcctccagaagttgtcggtagtttcccctatgattaattctcatttgcctgagagcttccaccaattttccctgtgatccactttcctctgcttcatcggaggccccatcactttctctatgtggattcagtctactataaacagcttcaataacattacgcttgccagcaagacctcccccaggaggcaaatttgggatattttctgcagacaagatgcgcatgacatgggcaagatcaggcattccttcctcgccagacttctccataatctcttcaacccgtgattccaagtgcttatccaactctgaatcttttttcaccgcttcatctgagaccttggnagcatttgaaaagcaaactagtacaatactcatgttatctcgacttcccttgtgtaaacaagtgtccactacccaattgcacacattttccaggtcatcagatacctcaagcctagatttaacatattcacagagctcctcattactcataacatcccagatcccatcacaagccaagatgataaattcatcctcttctgctcttaaaatttcataaacctcaggctctggagaaacaagttgttctgttgggcccttgccatcaacacacttgtaatcatagtcccccagagcacgagatactgctaatgaaccattaacatgttgtatcatcatgctgcctcctgcattttggattcgctccttttcccttggattgcaaggtttgtgatcctgggtagaaaagcagacttgtccattcctatacagaacagcacgtgaatcaccacagttgataaagtagatatgtttaggtgaaatcataactcccactgcagttgaaccactcctgtccatcccgtttctgaggtctgaaaagttacgcatgtattcatcaattttcaaaaatccagttctgataccattcttaacattttccactgaaagctcaagagcagatcctgattttccagctgccctaaagtcttcgttagtagtgatgtgttctaataaatgtgttgagcagtaatttgccactcgggatccagcatgaccatcataaactgcaaaaaatgaccagtcttccaagccgtgaggaatacctacaacagctgtgtgtgcatcttccatttccactctccatccttgcatgctgctcaggccataacgtaaaccattcccagcaccatgagcattatgtttttcagttttgggtttatccaaaaatgcacccatgtttagcaataaatctgaggcaagggagggagaagatgtctagggcgcctcgctcgcgcccgccgcggtactcagcccaagtttccaacggaggcgcgaccctgactcagccgccgcttccccctcggggtctcgaccgccgcctccgccgcctccggggctgtttacannnnnnnnnnnnnnnnnnnnnnnnnnnnnnnnnnnnnnnnntctctccaccctagcgccgttgccgattcggccgccgccacctcctccgccgcagcctcgtctctctggagcatcttccaaccaccgaaccctgagaatcagagactccagccgcgccggcaggaaactcccccgcaactgctaggggaacgaggccgtcagagcaccggcggcttttccgccattgagcagaagcccccccgct

SEQ ID NO: 439649 - DNA, 1950 bp, Homo Sapiens
  misc_feature (457)..(457): n is a, c, g, or t
gttgacgccctgtatgagtcttagttgcctcctgtatgtaaaatgaggaataatactggtgcacagaaattttgagaggaagaactcaggaatttcagtcctaatgcccaggtggtgtgcccacagggagggcacacatacattatcgcaataggatcaggaacgtgtccagaaacatgttgcatgactttttaagagccacttaaattaccattggtccttcccaagtctcctgtccttgtcttcttggagggaaccttagagacccatcaggatctagctctggagtactaagctccagagagcatgttagtccatgcttcaggatctttctgtcactggagaacctagacaggcgtgcttcactctgatgctgtagcaaagtgggccatgaacctgacaaaactgacttcagggaatccaagttcatgacacacttttgctttaacccgaactnaatcactcctgcttccttctattaagacttccattctcttgcagtaatggagaatgaaccagttccagccagttaagggcagagggaggtgctaactccagcacttgtacaaagtcatttggagcacaggggagaaatccagttggctttggagtgtcttgttggaaaactaggagagggtgaggttgagtctatgtagaaatgtttgcttctcagttctggcagagtcttatggtgcgtagaggtctgatggagttagggagtcagaggtgaaagctcagaggcaggtggatgtatggatgaatgaatgaaacagaacattggatgcatgaagggaagcgatggggcccttggggcgccctcctgatgccattgacattgctgaacatgggatgtccagtccctcaagtgttcaggccacctcatgtcacactgctcctgttctattcctccactggtaccgcagagttctccttgttctcagatgggatggcaaggtagtcagacgcgttttcttgggctgcctcttcggcttttgagacctttctgtagcaatatatcatctcgatgagcagccacaaggtgaggaagaccagaaggatgtacatcatgatttctgagaccacagaggtgaagtcctctccagcctcctcggtgactcttagggggatcagccgcgtcgtcttcacaaagggccgatgcgcctcaaactcaaactcccgggacacattgcaggtgtagaggccagagtcgttcagagtgacgttgagcacagtgatggacacgtcctgcaggtccttgctgccattccactgcaggcgcccctgaaaggggctctccacctcctggtggccattccgatactcgtaaataaggaaatctttaccgccctcgggcctgtagaaccattccaccaccgtggtggcctccacctcctctctcttcatgcaggagatgcagcgcagcttcatggggttgccctgcacggcctccgtctccgagggcacttccacacacacagggaagcagacactgacccagtagataagcacgagagaagccaggggaaacaatctattgaaggcaggcatcttctggggctggcggcttccaaggctctcgcctccccaggatcggttgcgttccgactggaatcctcccagccccgcggctcctgcttcgtccgccctaactgcttctccagctgggcgtgaccccactcccgaagccgccggggccgcccgtctgggctacagaatgcgttccacgtcggtcccgtccacgcccgccctcggctccctggggaggtgcagcggggccgggaaggaagcggcagctcccgttcggccggcgatgtcagaggttggggggtgggtgtagaggcggagccccttcccgggagctcgcccccggatggtgcggggccccgaccctgggtggcaggtgatcagcaacccttctgtaggcccccagatcccgggaattccggaccg

SEQ ID NO: 439650 - DNA, 1102 bp, Homo Sapiens
  misc_feature (933)..(933): n is a, c, g, or t
  misc_feature (955)..(955): n is a, c, g, or t
  misc_feature (973)..(973): n is a, c, g, or t
  misc_feature (987)..(987): n is a, c, g, or t
  misc_feature (993)..(993): n is a, c, g, or t
  misc_feature (1005)..(1005): n is a, c, g, or t
  misc_feature (1012)..(1012): n is a, c, g, or t
  misc_feature (1028)..(1028): n is a, c, g, or t
  misc_feature (1034)..(1034): n is a, c, g, or t
  misc_feature (1067)..(1067): n is a, c, g, or t
  misc_feature (1069)..(1069): n is a, c, g, or t
  misc_feature (1076)..(1076): n is a, c, g, or t
  misc_feature (1078)..(1078): n is a, c, g, or t
  misc_feature (1086)..(1086): n is a, c, g, or t
  misc_feature (1095)..(1095): n is a, c, g, or t
  misc_feature (1098)..(1098): n is a, c, g, or t
atttccaggatcgtagagaagggttgctgatctcctgccacccagggtcggggccccgcaccatccgggggcgagctcccgggaaggggctccgcctctacacccaccccccaacctctgacatcgccggccgaacgggagctgccgcttccttcccggccccgctgcacctccccagggagccgagggcgggcgtggacgggaccgacgtggaacgcattctgtagcccagacgggcggccccggcggcttcgggagtggggtcacgcccagctggagaagcagttagggcggacgaagcaggagccgcggggctgggaggattccagtcggaacgcaaccgatcctggggaggcgagaggtgaatcaacctggacccttccacagcctggctgctaggccagcagtgcgactcccttccgagctgagcttaccctgggcgcaaacgagcgaggcaggggcgcgagtggaagctggagttccggggtgggcggggaggcgactgtccgtggtgctgagcgccggcgagagcgggcgcggagcggctgatcggctccctcgaactggggaggtcccgtggggtcgcttaggggccaaagcccccacccgggtccaaaagctcccagggccctccccagggaccggtgctcggcccttccttcggtcagaaagtcgccccctgggggcagttcgtcccaaagggtttcctcgaaagaatctgagagggcgcatccttgaccgagggaatctctctgtgtagccttggaagccgccagccccagaagatgcctgccttcaatagattgtttcccctggcttctctcgtgcttatctactgggtcagtgtctgcttccctgtgtgtgtggaagtgccctcggagacggaggccgtgcagggcaaccccatgaagctgcgctgcatctcctgcatgnaagagagaggaggtggaggcancacggtggtggaatggtntacaggccgagggnggtaanatttcttatttngagtatngaatggcacaggaggnggaganccctttcagggggcctgagtggatggagcaagncntgcagangntcataatntgtcaagtnatntgaa

SEQ ID NO: 439651 - DNA, 958 bp, Homo Sapiens
cttccttcccttcctcttctctttttctcctattcctttctcttttgttcctccaaagtttcaaaaagttttattttgaaagaatgagagaaataaaacagagaggtatcaattaccaagaacaattacactgaagaaaacacaataataagtactcttcccacacaaccccccccatttccccatccctggcacaataatattaaaaccaccaaagcacacctaacaaggaaaaacaacagtacgtaatgaaaaaagcaaatgtccatactgctcagtccaactaacccttatgaaatgtccttcccccagctaaaccctacccactggaatgataaagaaatgtagagacaaccctaggggagacttggaactctgcttatactagcaaagctcagtgaagaatcagtaagagtagtgaatctgtttggcagtgaaacactggatatagcttctttttcaaattttggatgattgcagagaacaggtagagtttgaggctcacagacttctaacaggactgatccctgttccctcaaccgtaacagtggagcagctgccaaatcctggttggctgctgagaatagtggaagtgaggcaactttgggcttaagacaatctgaaaaagatgtctggaaacaagtttactgcttcagtttcaaactgtgagtaaagggttttaataggtggggcttggacaaaggcaaggtgaaacttcctatattatcacttgaagaattaaactatcaatttgaccgcctgccttcctttgttgtaattaaattcattacgggacttttaaaaatgtaaacaaactgtttgaccttgaagccctattaaatttgcatttataaccttaaggcccgaaaatagatggtttcttgtcttcctcccaaaagaacaaggttaataattttttatttattttgtgcaagaaatcccggcgctcaaaaaataa

SEQ ID NO: 439652 - DNA, 1027 bp, Homo Sapiens
ctggaataataaatacgttttctctgctacagtctcggcaaaggccacggccctagaacggggcgccgcctccgatgcagtctcagggccacagcctcagcgcagccacggcctccagggcccacccgggccctgcggccccgccctgggggcggcgggcagcgcccgggtcagacccggcagcagcggcggcgcgagcagagggaaggggccgccgagcgatggcagcagcgggcggcccgcgtagacctcgggcgctggggcctctgcgggggcagccggggacagcgaggccgggcggcgggagggtcccagctggcgcaggcaggctgccaggtggcccagcaggcgggagcgcacgtcggccgggacgccctcgcagccggccaggaagcggttcacctccgccagacactcgtggaagccggcgcggtacttgcccagaacggcggggtcggcgctgagcgcggccgtcacctgcacgcgacgcaggctccgcaggtgtctcacggtcatctccaggatgtccgccttctccagcttcgagtggcgggagctctcttttctgagggcgtccaggatgagggttttgagctgagcgaggctctcgttaatacgcgctcggcgccgcttctccatgaccggcttggaggacttgcggtgctcggccgcgctccggggcttgtctggggtccggctggcgctggccggcgctcctgccttcggtgctgcgctcggtttcccgggcttgtctggggtcctggtggcgctggccggcgctcctgccatcggcgaggcgctcggtttccccggcgtgtctgcggccatggtgcgccccgcgcctccccgtgccgggtggagcgcgccgccacggaccacgggcgggctggcgggcgagcggcgagcgcgcggcgatccgagcccctagggcgggtcccggctccaggcccgcgcgcgcctcaggccttttccctatttaaggcctcgccgccgcggggtgtgtgaacccggctccgcattctttccc

SEQ ID NO: 439653 - DNA, 1784 bp, Homo Sapiens
ttttttttgtggattttccttttaatgcaaaatgttgcaatacaaaacaatgtggagaaagtcctgttcctcaggacactgaagggaggagtgaggaagagaggacagagctggacgtctcctcctatttctccctccccaagtcactctgaggggaagaacactgctgcctgctccctgggcctgcccgcatacaaggttagagccctgggtctggggcatccttagcctgaaatttgttgacatggggcaggagagcaggagggaacattgagggttttgactcttcgggctctaaaaggattactcaggatctggagttccgtatgaaacaaaggagctgaaagaatttgattgccattggctaaaaatatagaggatttgagccacaactggcccacatttgaagaatgaggaacaagaaatttagtggggatataatataaatgtatgggagtgagaaagatgcaaaaaacaaggctagctcctcaaacctcctcctctttcttcctcatctccagcttatagacaatctggtagccatcatcccaggcatagagctggcgttctcgggggttatagcggaggctggcatgggcaccatatctgcggggaaaataagggagtgctgcccgttcaggggtcagggtgccgctggcatcaaaggagcactggatgcgggcccgactggcaggacgggtgttatagacgacatagagggtcccacagatgacaaaggcagcctcagcattctctctgggacatggtgtgtcccactgctgctctgtgtccagtgtctgtggatctaacttggccagacacaagtgcctgtcatcctcccgggtggcatagacagcccaaagaccttcctcatcagctgccaggtcgatgtaggtgtctgctgtcaagccgtagggggggatcagcccctctgctgggaatactgagctgtccaccactgttcggtttgccaggtggaatttgattagctgcaaagtgttctccatctcaccacctccaccaggtcttccaggaggcctccgagcaaaataaagaaagccaccatataccagctgccctgtgcctacccaggggaagggcacccggactcgggaagctttccgggcagccatggcaagggtgaagtcacgcagccttgggaagacaaaggctgtgtcattctgtgtcccatctaacacgtagatcttctctgtttgccccagtggatccttggtccatagaccagctgggccaccaaatcgcttcagaatcttcattgatctcacttgagagattgtgtagccacagtctgtcaccatatcgtacttctcattccttcttcccttgcctttggtcccagggcctccagtcaccttctcatcaaactctacacagggcagagctgggttctgggtctccagatagtctacctcccgctccagacgatccactctcccggagatggtgtcggcctcagttctgagtgcctcccgctccttctctgccacctccagcagtggcagcatcttgttcttgaagtcccgcagctcagcagcatgccgactactctggtcctggcactgggccagccgttcctctaaagcagctagtcggcgttccatgtactccacaaggtggtgctgctgtccttggaggggtcccgaccatgacaaaaggaacaagatgaggagaggggtgctgggccccatggcagcctggagagtggtgccagagtagaaggaacgtacagtcagcctcttccccatcccgggaattccggaccg

SEQ ID NO: 439654 - DNA, 1917 bp, Homo Sapiens
gcctagggcccggaattcccgggatcgcctttacctccccactcggcgtccagtctcttagcaacgactccggcttcctaggaactgctcctttctcaaccattcctgcccacaacaccccagcttgctgccagcaaagcccctccacacccctcaaactccagacccttcacatcaatttactgttttcttcgacctcaccccagcaattttctctgaatcaaccccctttcctcctctcctaagtctctgagtttctctctcctcctgccatcctgagttctgccatccttaggggccgccaagacctctcttttcgttcctctcccgcctcagaccagcagccttttattttagatcatgtctggagggaagtcagcccagggtccagaggaagggggcgtctgcatcactgaagcccttatcactaagcggaacttgactttccctgaagatggggaactgtcagagaagatgtttcacactcttgatgaactgcagactgtccgcctggaccgggaggggattactactatcaggaacttagaaggcctccagaatcttcacagtctctatctgcaagggaataagatccagcaaattgagaacctggcttgcatcccctccttgcgcttcctgtctctggcaggaaaccaaatcaggcaggtggaaaacctcctcgacctcccatgcctccagtttctggacctttctgagaacctgatagaaacattgaagctggatgagttcccccagagccttctcatcctcaacctgtctggaaacagctgcaccaaccaggatggctaccgcgagctggtgacagaagccctgccacttctcctggacctggacgggcagcctgtggtggagcgctggatttcggatgaggaggatgaagcctcaagcgatgaggagttcccagagctgagtggcccattctgctcagaacgaggcttcctcaaggagctggagcaggagctgagcaggcacagggagcaccggcaacagacggccctgacagagcacctgctgaggatggagatgcagcccaccctcaccgacctgcccctgctacctggggtgcccatggctggggacagcagcccttctgccactcctgcgcaaggggaggagacagtccctgaggccgtctcctcaccccaggcctcctctcccaccaagaaaccatgcagtctgattcccaggggccaccaaagctctttctggggaaggaagggggcacgagcagccacagcccccaaggcctctgtggctgaggcccccagcacaaccaaaactacggccaagagaagcaagaaatgattctctgtcaacctttctctactagtggagaggagtggggcctgcccctcttctcagacctctgacctgtgacagaagcccatccccagtaaagtgtctctaggccctgagtatgcttttcatgtcacttggggtatctcaggggaagaaaccagtgaaagctccaggaaacaaaatacagagctcagtgagccacctgattctaaagagcgagtctggaatctttcgggagctacccacagggcaggcatgcctcaggcccccgctggcttcctggctcccacttgggcaggaagcgggcaccacctcatggaagaggcatgccatctcactgccacccctagcgagtgcccttccccggtccaagccaaggaccaaggagctgtggtcctagtcatccccaacagcagccagctcctgtcccctccctgtcctcctgcccagtccccatcactcacccactcataggaatgagtacacaaccacaggccccgcagccagcccacagctgcctttgggcctcacttggctctcccacccccactggtcctggataaagttcactaagagaaaataaagcacatttttaag

SEQ ID NO: 439655 - DNA, 2929 bp, Homo Sapiens
  misc_feature (16)..(16): n is a, c, g, or t
  misc_feature (23)..(25): n is a, c, g, or t
  misc_feature (30)..(30): n is a, c, g, or t
  misc_feature (35)..(36): n is a, c, g, or t
  misc_feature (44)..(45): n is a, c, g, or t
  misc_feature (51)..(51): n is a, c, g, or t
  misc_feature (59)..(59): n is a, c, g, or t
  misc_feature (66)..(66): n is a, c, g, or t
  misc_feature (73)..(74): n is a, c, g, or t
  misc_feature (101)..(101): n is a, c, g, or t
  misc_feature (109)..(110): n is a, c, g, or t
  misc_feature (124)..(124): n is a, c, g, or t
  misc_feature (255)..(255): n is a, c, g, or t
  misc_feature (271)..(271): n is a, c, g, or t
  misc_feature (287)..(287): n is a, c, g, or t
  misc_feature (341)..(341): n is a, c, g, or t
  misc_feature (348)..(348): n is a, c, g, or t
  misc_feature (390)..(390): n is a, c, g, or t
  misc_feature (455)..(473): n is a, c, g, or t
  misc_feature (553)..(578): n is a, c, g, or t
  misc_feature (2332)..(2333): n is a, c, g, or t
  misc_feature (2367)..(2367): n is a, c, g, or t
  misc_feature (2434)..(2434): n is a, c, g, or t
  misc_feature (2458)..(2459): n is a, c, g, or t
  misc_feature (2461)..(2461): n is a, c, g, or t
  misc_feature (2467)..(2467): n is a, c, g, or t
  misc_feature (2469)..(2470): n is a, c, g, or t
  misc_feature (2472)..(2476): n is a, c, g, or t
  misc_feature (2479)..(2479): n is a, c, g, or t
  misc_feature (2487)..(2487): n is a, c, g, or t
  misc_feature (2494)..(2494): n is a, c, g, or t
  misc_feature (2497)..(2497): n is a, c, g, or t
  misc_feature (2512)..(2513): n is a, c, g, or t
  misc_feature (2517)..(2517): n is a, c, g, or t
  misc_feature (2520)..(2521): n is a, c, g, or t
  misc_feature (2524)..(2524): n is a, c, g, or t
  misc_feature (2534)..(2534): n is a, c, g, or t
  misc_feature (2539)..(2541): n is a, c, g, or t
  misc_feature (2547)..(2547): n is a, c, g, or t
  misc_feature (2549)..(2549): n is a, c, g, or t
  misc_feature (2551)..(2554): n is a, c, g, or t
  misc_feature (2570)..(2572): n is a, c, g, or t
  misc_feature (2584)..(2584): n is a, c, g, or t
  misc_feature (2591)..(2591): n is a, c, g, or t
  misc_feature (2594)..(2598): n is a, c, g, or t
  misc_feature (2608)..(2608): n is a, c, g, or t
  misc_feature (2611)..(2612): n is a, c, g, or t
  misc_feature (2615)..(2615): n is a, c, g, or t
  misc_feature (2624)..(2625): n is a, c, g, or t
  misc_feature (2627)..(2627): n is a, c, g, or t
  misc_feature (2629)..(2629): n is a, c, g, or t
  misc_feature (2633)..(2633): n is a, c, g, or t
  misc_feature (2637)..(2637): n is a, c, g, or t
  misc_feature (2639)..(2640): n is a, c, g, or t
  misc_feature (2642)..(2642): n is a, c, g, or t
  misc_feature (2664)..(2664): n is a, c, g, or t
  misc_feature (2668)..(2668): n is a, c, g, or t
  misc_feature (2675)..(2675): n is a, c, g, or t
  misc_feature (2683)..(2683): n is a, c, g, or t
  misc_feature (2707)..(2707): n is a, c, g, or t
  misc_feature (2714)..(2716): n is a, c, g, or t
  misc_feature (2724)..(2724): n is a, c, g, or t
  misc_feature (2744)..(2745): n is a, c, g, or t
  misc_feature (2774)..(2776): n is a, c, g, or t
  misc_feature (2834)..(2834): n is a, c, g, or t
  misc_feature (2836)..(2836): n is a, c, g, or t
  misc_feature (2841)..(2841): n is a, c, g, or t
  misc_feature (2846)..(2846): n is a, c, g, or t
  misc_feature (2867)..(2867): n is a, c, g, or t
  misc_feature (2874)..(2874): n is a, c, g, or t
  misc_feature (2902)..(2902): n is a, c, g, or t
  misc_feature (2909)..(2909): n is a, c, g, or t
  misc_feature (2916)..(2916): n is a, c, g, or t
  misc_feature (2920)..(2920): n is a, c, g, or t
ctcacctgctcccgcntcccagnnncccgncccgnnccacccgnncctgcnccctccantgcccgncccccgnnagagcccgcgctcgcgctgggcaaggnagccgagnnggcccagaggccgnaagaggattcgaccagaggcagctgtcccgagcagcgcacggtgatcgcctcccccggaggaggaggcgcctagacggttgcctcctttcttgtttccccaccaccacccccgtaattacattggctgctngaggggaccgggaganacagaggaggcgcctngcttcccccgcacgcccgccacctctgctctttcccgtctcgggccaggatgantggagtntttgatagtctagtggctgatatgcactcgacccagatcgcngcctccagcacgtaccaccagcaccagcagcccccgagcggcggcggcgcggcccgggtggcaannnnnnnnnnnnnnnnnnnctccacaagccccaggagtcgcccacccttccggtgtccaccgccaccgacagcagctactacaccaaccagcagcaccnnnnnnnnnnnnnnnnnnnnnnnnnntcgctctacgcgcacatgggtttctaccagtaccaagccagcggcctcaacaacgtcccttactccgccaagagcagctatgacctgggctacaccgccgcctacacctcctacgctccctatggaaccagttcgtccccagccaacaacgagcctgagaaggaggaccttgagcctgaaattcggatagtgaacgggaagcaaagaaagtccggaaaccccgcaccatctactccagtttccagctggcggctcttcagcggcgtttccaaaagactcagtacttggccttgccggagcgtagccgagctggcggcctctctgggcctcacccagactcaggtggggctcgcgccctgcaggggcgaggagagcgcgggcctgagatggctgggaagcaggcgggtttaggacaatgctttttaaagttcattttaagtacttttaaggatttccaggcctgcgcctcgagcggccctaagtaagcttctaggcccaaagctggaaacccccaaggggccgccgtgggagggaaggaaagggaccgggtggacagaaatcccgtacctctcgctactgattaagcgggtgaaataactggccctcctcaccctcccgctgtcaccatcatcacagtgcacgtacaccagcagtcctggccttttggcaattacctccccagggagcaggaaccggcagagcctcgaaggccgccgcccgtgatcctcttatctccccagggcgctcgctgcccaccagctagccagcggtttttctctgccttcttttttctcctcttcgaacccctactgccccaagactaggttcctccactaatgctcaggtctttttcctcaaaggtcaaagatctggttccagaaccgtccggtccaatgttcacgaagatgtggactatgtggtgagatcccctcggagcagcaccctggggccagcgcttctccaccttgtgcttcgccgccagtctcagcgccggcctcctgggactttggtgtgccgcagcggatggcgggcggcggtggtccgggcagtggcggcagcggcgccggctagctcgggctccagcccgagcagcgcggtctcggcttttctgggcaactacccctggtaccaccagacctcgggatccgtctcacacctgcaggccacggcgccgcgtgctgcagcccactcagaccccgcagccgtgatcaccacgcaccatgcatcacggctggcgtgggggcgccccggtgagcgctggggactgattttctaaccccagggagaactcgccagagactgagagcagagaccacttatcctcattgcttaccccctgagccggggttccctcctcccggcccgctgtcgccagccacctctcctgcaggctgctacctgcagtggctccgtctcaggccctgctcactcccggggccaccaaacgggcccctctctcgggggaaccggacagcagcttggcaaaggcctccctaaaaggccgcatttctgacctgagccccgggtctcggctgtttcgagccccgcctcggacttgccttcccttccctccgggtgagcctgtctggcgccttcctcgccccgggctgagagctgggtcccgggagatggaagcctcccaggcgcgcgaggcttcccgggcgctctgaggcttctttctcctcgcccgctcccctgggctcagctcggacgctgcagttattgacctcccggtcccgcctgcccgccctccnncacgtggccccttgacccgggcggccccgccgcntctttccttcctgcagttcccagccctcggagcccccatcccttatcttacccccaccgcccccccnaggagcgctccctcagctctcccnncnaccaanannannnnnccnctcttatnttttatnccnataaaaccaaaagtnncttngcnnatnacctcatttngacgnnnaaaaananannnntcaatatgtgaacacnnnaaaaaacccccnaaactcnctnnnnnaaaaccaaancannatnattagcctnnanancaanacananncngtaaataaaggtaactgtgcanattntcccacngatttgantgttatataaaaatactcatcttnccagacnnntttgcaancccccagttgtgaaaacggnngtttagcagtgacctcagcaacccctccnnnttattttttcctttaaaaacattgggagttaagattaagctactcgatttggatttgntntatcntatcntaaagtctttgttgttgaaanaaaaggnattttggggttatttattatcgaaaacnacatgcncttaatnttgnttttacaat

SEQ ID NO: 439656 - DNA, 1345 bp, Homo Sapiens
tcctggggtcagagttttaatcctgggaaaaagaatctggccgctgggccatgccctgggactagcccgctggtccctggtgtgtccgaatcagtgctccagtgcccgcctcttctccagcttcttctgtagctctgccgtcatgtctgccagcccggctgtggggaagagaggctgggctgaactgactggcagcttcctgcccaagccaccattaaagactttgggctctggcttgggtccaacgggtggctttggaagcttggcaggaggctttggcaacttctttggcttcaggatgactggccaactagaggaagccacatcttggttctcatagtcaacagctgggccatctccaatgggggtcacgtagttctcttcctggttcggtagtgggggcagtgggggcagcttgtcctggctagacgcaggtgacagcggcttggggccacctgtgcagggtgcaggacctgggcccggagcggaggggcgccacccacacattctcgccattctccttatcggcttccacgtagcctagcaccttctcgtagtcctcgtctaacaggaatggcaccagcgcctttttggtatgcgacacgaaatagttgaccacggcgtccaggggaggtgcaagagaacggctgttccacatcgatcacgtacttggggccctcccgcattcaccttgtaatgccggaccacgtgcgtcccgttgtgcatctgccgcgtggtgaccgacacgccgtcggcgccgtccccgctgggccagcagcagcaggttcccgcactcggggtagcgctccaggagcagttgtgcctccagccggctcaccttcaggaagcacgagggtgtctccagtgcacggcgcgcctcctctttggccaagacttcagacatcatgtataggtgccccaggaagcagggtcaagtcggtcgggacacggagctccaccaccgttaagatgaagcctttccacatttcccgacactccaaggtctctaccttgaacttgatctcctgattccggagaatcaggctgaagtgggtgccagggtcacgtgagcttccccagggaatctcatctgtgagtttctcaaatgctcccaagttgagcttctccacgtgctggaagtcccgattgctattgtagaaataaatggtgagaccctgcaggcctgcccagaacttcttgtaatcccggtcacagggccccttcttctctagaaagctctcatagtagtgtgaaggcaggacacccttaggcttggggacacggggtggcctcagggcagaggccatgacggagccagggtcttccgcctggcctctccttccag

SEQ ID NO: 439657 - DNA, 818 bp, Homo Sapiens
taacttggacttttgcatcttccgccctttaaccttggcacagggggctcaactttaggtttgggggttcttgggttgttctgcctttgagattccaggcacttctgtctctgtcggatattgcccttctggatggaggactccttggggatgctgagttcagggtagatattctccaggtaccacttgaagctctggcagcgcagattcttcctcaggtccaatctgctctcaacattcccgaagggcctctccagggcgaatggccgggcagcgtaatagtattgcttgtattcatccatccacacttcaggtgtccgcttggtgttctttatatacgtgttggcatttccatcagggaaaacgtaggggtgcttcttccggaagacgtgccccactcggctgcagggggacgatctctaggctgcccccgcacatccacactcggaaggagatttcaaagttctccccaccccagatgtccatgtccatatcatatttccccaggtaatcaaaccaagctttgtcgatcacgaagagccctccagctatgataggagtcctgatgggctccgtggggtccaggcgccgagccttctgctctggggagagctgctcccactggaagtggaggctccagtcaaacccccctctgagctccgaggcagactcgatgtaggtgaaggtgtccaggttaatgatatcgatcacagggcacaccacccgcgtgtagtcctctttgaccctgtgcaacagaggctggagccagtccctgttcacctcacagggctgtcgaggaaagtcagagtggtgccctg

SEQ ID NO: 439658 - DNA, 1169 bp, Homo Sapiens
gagacactttcaagtttctctttatttcttttggaaacacctccattcttcatctctcaatgtagtcctggcctagtgaaaaagaaggcttttctttctggcctccagagactgcttcctttgtaggaaaaggaacaataaacacttcccattaggtttctgtctccagataccaatcagggaatgactggccaggactggaacttaacggccttgagaacatgtgggatttgtctttgagccccattggcttgtgatgttttcctctgtcctccctgagacagttgctcctgtcctggggggctctgcctccacctcccagtccaggatgtctgaggtggttgcaggctgcttgctgcccagtttccagtctgttctggtccagggaagcaccaccccatggcccttgctgcttctggcaggggtcctcaagagctcaccatgtcccagtgctggctcatgagtgaggactcacatgggttgacgacgatttccttgccgttctcggtgccatcaccgaacatatctgtatcgaggcagaggtgggatgctatgtgctcgatgtgggaaccagttttggtccattgctgtcggtcatctccattcttgcaaaggacaagaaccactggggcgccagggaacaaggtgatgactgacaggcacagctcctcctggaggatctgctgggtgtatgtgaaggcccatacttcccgaagggcctctccagggcgaatggccgggcagcgtaatagtattgcttgtattcatccatccacacttcagctgtccgcttggtgttcttatatacgtgttggcatttccatcagggaaaacgtaggggtgcttcttccggaacacgtgccccactcggctgcaggggacgatctctaggctgcccccgcacatccacactcggaaggagatttcaaagttctccccaccccagatgtccatgtccatatcatatttccccaggtaatcaaaccaagctttgtcgatcacgaagagccctccagctatgataggagtcctgatgggctccgtggggtccaggcgccgagccttctgctctggggagagctgctcccactggaagtggaggctccagtcaaacccccctctgagctcccctcgtgccgaattcaccacccaggcctcgtacctagcca

SEQ ID NO: 439659 - DNA, 1188 bp, Homo Sapiens
  misc_feature (23)..(23): n is a, c, g, or t
  misc_feature (28)..(28): n is a, c, g, or t
  misc_feature (37)..(37): n is a, c, g, or t
  misc_feature (50)..(50): n is a, c, g, or t
  misc_feature (60)..(60): n is a, c, g, or t
catctgctgcagcacccaccaantcgtncttctgtcnacctctgaacaanaacctgctgnactctgggatctgctccttcacacacatgccttccatctgcccatattccaggctcttcaccattcatgctgggtgaggcactcccaggtgcctgtgtcccatcagcaggagactcaccgagacacttggagcccacctgctgatagccagggctacacttcttacagcgacctggccctgcccccatgcagcctaggcaggccttggcacagtctcggcactcataggagccctcagtgttcacgcagaattggtcagctccacagttggctccctctgtgccacactcatcaatgtctacacacttgaggtgatgcagggcccagcccttcttgcattgcaaacagtttgattcctcaggtcctgagcatcgggcacaggggccaaaacaagccgaacataccagatggctggcgttgcgttctgcctcaaagtagccaaggccacactggccacaggcctcacccccgtagccggcttggcagtcacagtgcccgctgccccctcgtgtcccttctccttcacactgcccgtagccaccgcagggcctctctgttcccccaggacagggaaggcaggagggcccgaaggtgcctgcggggcagcagagcttcagggaatctgagcacagccactggaagaggtccggggcctcctgctgcttgtgaaaccaccagctctccaccagctcctcactcagctccagcaggcggtggcactcgaagtctgacttgctgcacacaccctccagcacctctaccaggcgggtctcactgtctttgtatttggacaaattctcttcctcccaggcagtgtttccacctccaaagttgtcccggatggttctctccaggcccttgttaaagctgtcaaccagtccccggcaggtatgacacggatggggctgaggcgggggagaagactggggaggtggagagggctggagccagataggtcctgggaggttgaggaagaggctgaggccccagagcacagctgggactaggcccttcgggggccatggggccatctttacccaggctggggaccctcgtaggccacggagaaggaagaagcgaccgccccagcccgcgggcgccgtgggccgtctcctcaccgcgtcgctg

SEQ ID NO: 439660 - DNA, 1325 bp, Homo Sapiens
  misc_feature (254)..(254): n is a, c, g, or t
  misc_feature (260)..(260): n is a, c, g, or t
gtctgttggaaaaacaagtttgtttttccccccagggtcccggaggccccttgggggcccacggggggcccaaaaaacaaagccgcggaacaattccccaaaatatggctggggcctttgggctttttgccctctaaaaagtgaagccaaggggcccccacctgggcccccaaggcctttccccccccgttagcccggcttggccattcaccagggccccgtttgcccccttgggttccttttctcctcaccantggccngtaggcaccggcaggggcctctctgtttcccccaggacagggaaggcagggagggccccgaaggtgcctgcggggcagcagagcttcaggggaatctgagcacagccactggaagaggtccggggcctcctgctgcttgtgaaaccaccaggtctccaccagctcctcactcagctccagcaggcggtggcactcgaagtctgacttgctgcacacaccctccagcacctctaccaggcgggtctcactgtctttgtatttggacaaattctcttcctcccaggcagtgtttccacctccaaagttgtcccggatggttctctccaggcccttgttaaagctgtcaaccagtccccggcaggtatgacacggatggggctgaggcgggggagaagactggggaggtggagagggctggagccagataggtcctgggaggttgaggaagaggctgaggccccagagcacagctgggactaggcccttcgggggccatggggccatctttacccaggctggggacctgcagatagagggcgtggagaggcttcactgaaggagtcaggccccacgcgagaaagaaaaaggtctgttctaaggtgccgtggcgctgggatctgcgttattacaagcaaaagaggccaaactgggtattgcaggggctgtggggatgggtggggaaaggcgcataagatgcaattccagaagagaaataagttatcctcgctagcatggggtggagaggaaagtggcctcgctccttgacaagggggcagaagtcagcctcttgtctgagggtctgataaagaatattaggggccggatccgcagaattagggagaagagatcagattccaagtactgaaggagaggaggccagaggggttgtcttgggggaggtgtccggaaccccgggcttggagggaggagcccggatccggatatgaagggaagggatcagattcagggcctcgcagaagggcaaaggcacggcccacgagccggcagagaaggatccagaccctcgtaggccacggagaaggaagaagcgaccgccccagcccg

SEQ ID NO: 439661 - DNA, 1333 bp, Homo Sapiens
  misc_feature (131)..(148): n is a, c, g, or t
  misc_feature (245)..(245): n is a, c, g, or t
  misc_feature (254)..(254): n is a, c, g, or t
  misc_feature (266)..(266): n is a, c, g, or t
  misc_feature (270)..(271): n is a, c, g, or t
  misc_feature (273)..(273): n is a, c, g, or t
  misc_feature (275)..(278): n is a, c, g, or t
ggtttttttattggggggagggtccacgcaccagggtgtgggggggatttttcctggagaagaaaatatttccccctttctccctcctttttgggcccccccgccacaaagaatgttttaaaaattttttnnnnnnnnnnnnnnnnnnccaagccaaaggaattttgaaggagtagaaagccgtcccggacctggacaatagatttgtaccttttttcagtgaattggacaagatccacattgcntgggggggntttgaggagttncagnntntnnnnatttttataactttccaagacctttctttatttcctgagatgaataaataagtggcaatggggtgtggggatgtggtgaacacagaacaggaactggcagcatgcagctggcaggagggagctgtgatggccccacccctgtgaggaccacctaatcctaagcaggggccaaagctctagcagccaccattaaggaaaaacttttgaaattcacacattgtgaagcctgccagtccccgccaggtgaagagctcatggtatccaccttcagggctactttttaccccaggggccttgtctgcccgggcctgggtacctgggctgctctgtaaggcaggtaggggtgcttaccccactctcaaaaataaaccaagctgtcctgagtgtccagcaggagggcagcccaagctctgggggcagcgtgggtgggaggaggtcctacaggtggtggccgcgattatctgcccttgatgaagccctccagcacacggtcactgcgctctgacaaccagtagccagtcatggccgccacagccccaatgaagatggcggtgaacaccaagtcgcccttagcagccagcgtggccagtgcacagatgatgatgccaaagaacatctgctgcagcaccaccaactcgtcttctgtcatctctgagaagaagcctgctgactctgggatctgctccttcacacagatgccttccatctgcttgtagccctcggcacagatgcagcgataaccgccctcggtgttttcacactgcttgttctctcccggacacacctctgtctcacactcatccacatcgagacacttggagcccacctgctgatagccagggctacacttcttacagcgaccctggccctgcccccatgcagcctaggcaggccttggcacagtctcggcactcataggagccctcagtgttcacgcagaattggtcagctaccacagttggcatccctctgtagcacacactcatcaatgtctacacagccttgaggtgatgcaggaccagcccttcttgcacttgcaaacagtgtgattcctc

SEQ ID NO: 439662 - DNA, 1121 bp, Homo Sapiens
ggaattctccggatgttttacgcaggctgtggcagtgacgcggtccccagcctgggtaaagatggccccatggcccccgaagggcctagtcccagctgtgctctggggcctcagcctcttcctcaacctcccaggacctatctggctccagccctctccacctccccagtcttctcccccgcctcagccccatccgtgtcatacctgccggggactggttgacagctttaacaagggcctggagagaaccatccgggacaactttggaggtggaaacactgcctgggaggaagagaatttgtccaaatacaaagacagtgagacccgcctggtagaggtgctggagggtgtgtgcagcaagtcagacttcgagtgccaccgcctgctggagctgagtgaggagctggtggagagctggtggtttcacaagcagcaggaggccccggacctcttccagtggctgtgctcagattccctgaagctctgctgccccgcaggcaccttcgggccctcctgccttccctgtcctgggggaacagagaggccctgcggtggctacgggcacgtgtgaaggagaagggacacgagggggcagcgggcactgtgactgccaagccggctacgggggtgaaggcctgggccccatgtggccttgggcactttgacggcagaacgcgaggccaggctgtcgggaaggttagcttgggttgggccctgggccctgaggccccgcgaccccggaggaaccgcactggcttgaaaggcaagaaaaggtcgcgggttcggaaccgccctcgggaggctggctcttcgatgtacgcgcggccccgttccggcggatgtttgcggggggctgagcgaggttgggttgggacgcgtggagggctgcgttgggtaccgccaaagagctctggcgaagggcctccccgcccgcgtagctcggtggggaggtacgcggccgctgtgttgcggaggttgcgcatctgtggttcccgactcagcgcgcggggcgatgaaaggacggcccccgccgtggctctggcgcgcgggcgacgcggtggcgggtcgatcgttaatatatagtctcgagagagggcgaaggcgacggcactggacggtag

SEQ ID NO: 439663 - DNA, 1166 bp, Homo Sapiens
  misc_feature (861)..(861): n is a, c, g, or t
  misc_feature (961)..(961): n is a, c, g, or t
  misc_feature (1002)..(1002): n is a, c, g, or t
  misc_feature (1051)..(1074): n is a, c, g, or t
  misc_feature (1091)..(1091): n is a, c, g, or t
  misc_feature (1094)..(1095): n is a, c, g, or t
  misc_feature (1097)..(1097): n is a, c, g, or t
  misc_feature (1108)..(1108): n is a, c, g, or t
  misc_feature (1133)..(1133): n is a, c, g, or t
  misc_feature (1140)..(1141): n is a, c, g, or t
  misc_feature (1152)..(1152): n is a, c, g, or t
  misc_feature (1156)..(1156): n is a, c, g, or t
ttttacgttgcttcaaaatatttaatacgtgttagacacgtagaagttacatttttatacaaaaatcaatacaacgaaggagaaaatactgtacaaaaaccttatcagctcccccaacctttatacaacaaagactggagtcaccatatctacaaaaccataaggtctttccacttcgggcttctgtctgtaaactctcattaaacactttttaaaagcactgtgtagtacttctgacctagagcttttaaaaatatatcttttctctataaactccattatttccaagcttgaactcttctgtgaagttcgtcaagctttttctcccctgcggggaagcaaaggaccgttaatacgccccttttctagagtaatcacaggatataaacgttttttcattgggagagaaaggtggggagggacagaaggaatccaagtctgtgctcttggctaaatccctctcgtcttaggaaatcctgtgcggaaacgccactcctggccctgaagcgggtctagctttccggtgaggggtaggtgtaaagtctctccctccccggagaacgaatggggaactccccggcccaaaccttttagccgcttccttctccacgcagccggcagaggaaagtccctgtctgtccccaatctcttaaaccctggggaaggagtggtgcattccagaagagcaaaatagtcttaatgccacaagacaaacttacatacacagacatacacaaactcaaaagttaacgatcgttctcttccaatgagccttaagctcccaggtctccagataagccagatgcgcccgggggcagtttgcgatgcccagaggcaaccagtctgcccaacgcgctcagncccgcggtctctgggcgtcctcgcagccgggaagggcctggccctcacttcggggacgcccgctgctccacctcctccccgcaggggcccaagggctcanaaggccacgatggctgtgctccaggggttcatgtctctcancaccggcttatcgcagcagatctgcccgggctcggcggcttccggacgnnnnnnnnnnnnnnnnnnnnnnnngccgccccggggttttncgnngngtccagagaantggaacgaaatctgatgagttacangttccgnntcatttctcgngtgncgtctctctc

SEQ ID NO: 439664 - DNA, 1058 bp, Homo Sapiens
  misc_feature (25)..(25): n is a, c, g, or t
  misc_feature (32)..(32): n is a, c, g, or t
  misc_feature (43)..(43): n is a, c, g, or t
  misc_feature (56)..(56): n is a, c, g, or t
  misc_feature (65)..(65): n is a, c, g, or t
  misc_feature (74)..(74): n is a, c, g, or t
  misc_feature (80)..(80): n is a, c, g, or t
  misc_feature (102)..(102): n is a, c, g, or t
  misc_feature (120)..(120): n is a, c, g, or t
  misc_feature (137)..(137): n is a, c, g, or t
cccttctctcctctttctttttccncccgggntttcttagagnccaaaactgaacnagatctatnagtaccacntccggnttcatctctccggtctcgtctntctccactcgcggctgtntagttccggcgggcttnttgagcgggtcgagccgggcgccgggcagccgctggccgccgcccacccccgccgcgcagcgcttccttgggcacaccgcgggcggcgcggggggctcgtccttcgctggtcgcggcgcgcagcagcaggcagcgccgggggtcgcggccggtgtacccggcgggtcctccccgcctagggggcagcgcaggggcggcgcgcggcacgagatacctcggggaagacgcccccacctccggcggtaccctcggcttctctggccgccgcctggcgcggcccctccacgcggctccaggcagcttccgtcgcgtccgcctctccgccctgaaaaacgtccccgactccagtcaccgtggccaccggcacctcgtcccctacccgcggcgcgtctgagacggaggagcgctccggctgcggctcggtctccggccaagaggcatgagcggcgggcgggggcggctctccccagccggcgggtggcccggccgccggctccccgggctgctgctgcggtggcggcgccggggtcccagcgggaccggccaggtagaggccggggcacgggtcgctcaggtagacttggcgggcctgcgcagcaccagcgagaccaggaggttcttatgcagcttgatgccgccgcgctggacccgcgagttgtagatcttgcccagagagatgctgacgatgcgatgagcctccagcttgaactccatctgcttcccctgcacagggccgtcggcgccggggtgacacgtttggaaattgggagggaacgggaggcgcaaacaagtccgccccctgggcacaccctcgatcacctaagactccgaagagaaacgactctggtgacgcgcgcgctgctctactaacctctccacacaagacaacttccccgtttcggatccagggaattccggacc

SEQ ID NO: 439665 - DNA, 1047 bp, Homo Sapiens
  misc_feature (25)..(26): n is a, c, g, or t
  misc_feature (49)..(49): n is a, c, g, or t
  misc_feature (74)..(74): n is a, c, g, or t
  misc_feature (76)..(76): n is a, c, g, or t
  misc_feature (83)..(83): n is a, c, g, or t
  misc_feature (102)..(104): n is a, c, g, or t
tgctcgcctcctccttcagcttttnnatcccctcctttttggccaccanggcctcctcggcctgctggggctgntntttgagntcttccggctgcattcccnnnttccgctcactgcccaccacgctgctcttgatgtggttgtcgtattcttggaagagctggtgataggccacctgcaactgggccagcttcctcttctcctccgaggcggccctggggctccatgcggagcgcggcctccacgctctggccccgcatgcgcagctggtccacctgcacgctgtgctgctgctgcagcgcctcgcgctcactctccagctgccgcgcctgctcgctggccgcccgggcccgaccctccagagcctggcattccttagtggcagcctccaagcgactctggctctcctgcagctccccgagcaaggacgtcacctgggctttcacagaggccttgtcctcagccatctgctgctggcatctcttcaggtgctccacctcccgcagagcctgctccttctgcctcttcagatcgagcttctccaggccgagtctctccaccagtttcctggcctcctggaacttgcacatgaggaactccttctcctccctctggctggcttggaaatgcagaagctcctcgcagcgctcccgcagaatctggttgctctgccggatggcatctcggagctcttgattctcctccaggcagcgctggagggtctcaggagcgccctgttctgaaggcaggtgcagcatggctggcttccccagaggagactcttcgcccagtacgtcctgatctgctgccgggccaccactgggctgcaccatctcacacagttggctcttccagaggtgcctattcatccaacagggcaagggctgtcagcagagtccgtcagacgtgagaagggtgggagcggcggactgtgaacgctggtagggccccggcgctccgagaaagtcccagtttcgcggtcgcccttccctaccacgccgacgcgtgggtcgacgatatcccgaaacccgggcgtaccagcgctgg

SEQ ID NO: 439666 - DNA, 479 bp, Homo Sapiens
gaggatccccttcctctcctcccacctcctccactgcggggtctgaccctactccttgtgtgaggactcctctagttcagagacatattctgctcacccaacttgactgcgctctatcgaggtcgttaaattcttcggaaatgcctcacatatagtttggcagctaggtatctgatttcatatgcctgtttgctcgttttgccagacaacatctgcctatcgtcatactgtttctgtgatctgagaatgaatgggctctcctggcacattagaggaatagcacggaggtcactatagctggagcagagtgagggaggggagcacagttggagaggaagggatggggaacccgatggtacagggccttgtaggccgttgtagggagattggcttttacgcagaaggccacggggatccctggtagggttctcagtagaggaggaatgtgatcggattactcttaccctatctttaccagt

SEQ ID NO: 439667 - DNA, 1543 bp, Homo Sapiens
  misc_feature (6)..(7): n is a, c, g, or t
  misc_feature (14)..(14): n is a, c, g, or t
  misc_feature (19)..(19): n is a, c, g, or t
  misc_feature (22)..(24): n is a, c, g, or t
  misc_feature (26)..(26): n is a, c, g, or t
  misc_feature (34)..(34): n is a, c, g, or t
  misc_feature (38)..(38): n is a, c, g, or t
  misc_feature (45)..(45): n is a, c, g, or t
  misc_feature (259)..(268): n is a, c, g, or t
atttgnntaaatgnttgcnctnnntnggccctgngggnggcagcntgagaacatgtgggtctccaaaccctgcgacgctgcggccctttaggtgatggattttaacactgaagacagtcgtggtcattcttgaagacagcttggggtccagctttggagcctgctttgacattcaccattgactccctgccccacgcctctcttgtactaattttttcccctgtgaggtagattatttatcggggaaaccagatagaannnnnnnnnncatttaagtttgctagtcctttgcaaacagactgacgctgagtgtcctgtctgagtcaataagtgcacttttaccttttaacctatgccctctacttgaacccgagcaaggtccagtccactggacagttgatgatagggtctgccgccccataccctctcctcttcccccttaggaatttgtgcagtactggaggggttgcggcaatgggaggcctgggtgggccgtgctgccttgatatggccaagggacccagtcaccacagtggagacccttgtctgcacctcagtaccgcatgtccaggagcacaagactggcccctgcccccctgaatcacagggggcacagctggctttcgcagggcttggcatcctcgggtttcagagccttgttgcaggtggcagaggcctggccggaggggtccctgcactctacagttcgcctctgccagccggccccgcaggtgctagagcactcagaccagtcccccagcacccactgtgcgtggagcagcggctggatgatgttggtggttgctctctctttgctgctctgcatgctaaagtccacgtcattaggaacaaagaaggtgtatttgacttttggggggaagacctcgccagggactgtcaggagctgcactgtcagaggctctggcaagggccggaagctctgcaggcgctccagggtggcgatggagccgctgtacttcaggatggtccccttcaccaagatgtcctgctctatggcagagatggccaggttgccgttgagcaggtactgcccatcagccgtcttcagcgccaggtagttcccatcgttctgcacacccgggtggctccgctgcttcacgtcaatattagtggcaccagctgggatggtgacaatgtcattgtagccataattggtgggggtgagggacccggagaccttcctgcaggagttgcctttgcccccacacaccccgcatttgtccagcttccgaggcgagtcccccacatggtcacagccgggcttgacacactggccacggacacagatggcccagtgtttctggcccacacagggtgccatcaatcaccttggcctcgaacactttgaactcgctcctcccccgggctcggcagaacaacttgcagcggtcccggggggacaccccagcatacttggggacccactgcaggagattcccgtccatgtcagtgtaattgtaggcattatacttctcacactgctgctccctgaagcttttcccgtcaggggggcattcctccg

SEQ ID NO: 439668 - DNA, 1801 bp, Homo Sapiens
gcggccgcggcgctgttgggccagcagggcagcaccgagcccgacttggtgccgcagtactgcgggggactgcgggcgccccagcccgacgggtcggcgtagtagccgagcgggcggccagtgcagcctgcagcctgcagcggcagcgccttcacgcccgccgccgcgtaagagagcagcgtggccgcgttgcccgcgaagtccgtggccgtgtcataggccgaggccgcgaagtccagccggttgttggccggcgtcacaaaccagcgttgcggcgagggcgcgcccgggtcctcggcctgctgcggcgacagcagcccgttggtgtgcggcacgctgcggtccgtacccggcccgggtggaagcgggccttggcgtagttgctcacgaactggtccctgcaggatagagccggccatggcgtagcgggccccgggcacgatctgcgagcgcggcgagtcgttgggcgaggtggtcaggcggtccatgtcacagccggtgtagatcgtgtcataattatcccgaaatccttttgcaaaagggttgtgatctattttcagttgtgtaatatccgtgttctggtaggcggtgacggcgatgaactgagtctcagggaaagtgaacgtctgcacgcggccgggctggctagtggtcctccgtgccgtcctcgttcacttccaccacatgcaggcggggctggtacttgtgcaaggactgtaaaaccaccatctgcccattgttatttgaagctcctttgttgttcgtaagttttaattttccaaaagagatttcttggcgcatccagtgagccccagtgttgggggaatccggatgcatatagacccgatttccttgcacattggtgtccgctttgccgcaaggaacccatttgcctccttgaaacctccagtgattgggatccgccaaaatcacatccacaaaaatattgtaatgagccgtgggatcgagaccagaaatgttaaaacttaaaaaaggaaacatgcgccttccctgtttggtgatgatcatctccgtttggtgccggtgaaatttcagccaaaggggcctgttgcacaggtacacctgtgctttgccgggcaccagccccggctgggtggaggagaactggtagaacggagctccttggtaggagtggccgtactgctgtgggtaggggtagccggccgtggggtatccctgcggcgaggagttggacaggaggctgttgtaggctccgttggtgatgaccgggtggtgggccatgtagcggctagggctgccgatggagaaggcggggtgcgccggtccgtgctggccggggtacgggaacatggcactgggagcagtggccgcagactgtggctggctggactgagagaggaggtagcgatctgcagcagagccatcgaaactgtgacgaagctcagagaccccgtccaagacaggagagagtttacttctctggacgtcccctggtgagtccttggagtcaggaaaattgtctgtatctgactgattcgtcatcccctggtaatttttttcaaaggtgaacttctctccaggttgtcagtggtcgagataatgggatgatcgtgcaagacaagctcggatccgcctgaatgtgggtagctgctgctcacattgagaaatttcttggagagcatgatagaaggagaaaggcagtgctccagctgcatagctctagaacctgaacactcgccctcccgtcctggtttttaaagtcctatttatcataaactagaaatccacagaccccctcactagacagaaagcacatccc

SEQ ID NO: 439669 - DNA, 1404 bp, Homo Sapiens
  misc_feature (1239)..(1248): n is a, c, g, or t
tggtcttggggggggccatatatggggcgagcgatggcggttatatataagaggcgcgacacccgtgtggtggcgcgcaaaatgtgttagggggtgaaaacgccgccttacgcggcctctccgggtaaagttttgtaacttttccccaaaaggggggattttgccttgggcccaatcccggggaaagccccaggtggtgggggggaattcccgggatggcaatataggacccgattttcccttgcaccatggtgtgtccgcttttgccgccaagggacccccatttgcctcctttgaaaccctcccagtgattggggattcgccaaaattcccatcccccaaaaaatattgtaatgagccgttgggatcgagaccaggaaatgttaaaacttaaaaaaggaaacatgcgccttccctgtttggtgatgatcatctccgtttggtgccggtgaaatttcagccaaaggggcctgttgcacaggtacacctgtgctttgccgggcaccagccccggctgggtggaggagaactggtagaacggagctccttggtaggagtggccgtactgctgtgggtaggggtagccggccgtggggtatccctgcggcgaggagttggacaggaggctgttgtaggctccgttggtgatgaccgggtggtgggccatgtagcggctagggctgccgatggagaaggcggggtgcgccggtccgtgctggccggggtacgggaacatggcactgggagcagtggccgcagactgtggctggctggactgagagaggaggtagcgatctgcagcagagccatcgaaactgtgacgaagctcagagaccccgtccaagacaggagagagtttacttctctggacgtcccctggtgagtccttggagtcaggaaaattgtctgtatctgactgattcgtcatccccctggtaatttttttcaaaggtgaacttctctccaggttgtcagtggtcgagataatgggatgatcgtgcaagacaagctcggatccgcctgaatgtgggtagctgctgctcacattgagaaatttcttggagagcatgatagaaggagaaaggcagtgctccagctgcatagctctagaacctgaacactcgccctcccgtccctggtttttaaagtcctatttatcataaactagaaatccacagaccccctcactagacagaaagcacttcaaccagcaaatgcttctcaaaggtttgatttacnnnnnnnnnnccctgggagaagagattggccaattgacactatgcagcaatcagaaaaggctcacttttgatcttgctgcttgtgcagccgatgaaacggctcctgccattggttagctgctgacagtaatttaattagatagacattaattaggataatcacctg

SEQ ID NO: 439670 - DNA, 1771 bp, Homo Sapiens
  misc_feature (284)..(284): n is a, c, g, or t
  misc_feature (405)..(405): n is a, c, g, or t
  misc_feature (966)..(974): n is a, c, g, or t
cggcacctcgcctcccgccgcgcaaaccccttctccccacgcgccgagtctcccatgacgcccgagccccccggccggcgacaatgaccacttccctgcaagatgggcagagcgccgcgaggcagggcggctgcccggggattcgccgctggccgcccaggtgtgtggcgctgcccaggggaggggcgacgcccacgacctggcgccggccccctggctgcacgcgcgagctcctgccccttccggacgggacccgcggctgtgctgcagacaggagaaaaaanaaagatcttgatgttccggaaatgccatctattccaaacccttttcctgagctatgctgttctccaattacatctgtgttgtcagcagacctatttcccaaagcaaattcaaggaaaaaanaggtgattaaagtatacagtgaagatgaaaccagcagggctttagatgtacccagtgacataacggctcgagatgtttgtcagctgttgatcctgaagaatcattacattgatgaccacagctggaccctttttgagcacctgcctcacataggtgtagaaagaacaatagaagaccacgaactggtgattgaagtgctatccaactgggggatagaagaagaaaacaaactatactttagaaaaaattatgccaaatatgagttctttaaaaacccaatgtatttttttccagagcatatggtatcttttgcaactgaaaccaatggtgaaatatcccccacacagattttgcagatgtttctgagttcaagcacatatcctgaaattcatggtttcttacatgcgaaagaacagggaaagaagtcttggaaaaaaatttacttttttctaagaagatctggtttatatttttctactaaaggaacatcaaaggaaccgcggcatttgcagtttttcagcgaatttggcaatagtgatatttatgtgtcactggcaggcnnnnnnnnncatggagcaccgactaactatggattctgctttaaggtgttaccttcaagatatgcattaacgataaacaatgtgctgtggccttctagcctaacaaagcgggagggccccgagacctgaaaatgctctgtgcagaagaagagcagagtaggacgtgctgggtgaccgcgattagattgcttaagtatggcatgcagctgtaccagaattatatgcatccatatcaaggtagaagtggctgcagttcacagagcatatcacctatgagaagtatatcagagaattccctggtagcaatggacttctcaggccagaaaagcagagttatagaaaatcccactgaagccctttcagttgcggttgaagaaggactcgcttggaggaaaaaaggatgtttacgcctgggcactcacggtagccccactgcctctttacagagctctgccacaaacatggctatccaccggtcccagccattggtttcacccacaaaatttctagagatgaggctcagcgattgattattcagcaaggacttgtggatggagttttcttggtacggggatggtcaagagtacccccaaaacttttcgtactgtcaatgagtcatggaacaaaaaaataaagcactttcaaaattattaccagttggaagatgcagggtgaatatggtccaccacacttggaatggagggccaacacaaggattaccggattcttaaaccagcttggtggggagtttttatcaaactcaatatagggccgtttcttcccttgcaagtgggaacaaatatttg

SEQ ID NO: 439671 - DNA, 1899 bp, Homo Sapiens
  misc_feature (17)..(17): n is a, c, g, or t
  misc_feature (32)..(32): n is a, c, g, or t
  misc_feature (50)..(50): n is a, c, g, or t
ggctgttacaaaaatanggacctcttactacnggaaatttcatttacccnggaaaattgtacagtgagcctcactacctggcaatgctacaatttaacttaactgaatggttacctcatctacttaacattcatagctaccttagttaagataagtcgaataagtatcttaaataaaaaaatttttatttaagaactgaaaaagacttttttgaagttaacattttagaaatatttaagcgtttatcataaacattcacatacatttatctctgtaaagtggcccaagaacagttatttcccttatttagaaaaaaattcaaagaaaatggctaattaaactttgattttattatgtacatggatactattaaaaaggtgaattcgtgaaattttaagattgtgtataacacataaaagtcaaacttctaatttggtaagtaaataatcctaaacttaacacagtggttctttaaaatgtttaaatatttgtcttagatgctgaatatagacaaagagaactgtcatcttaggagtaaacacactataactctgtaaaaagaaatcatagaaaagtaaggtagtatttctcaaataagtcctcccatgctaaaaccacagtgacgcgcagacactagcctagaacctattccagtactgcaagtactgacaggctgcaaacaccagtaacaacctgcctggagccttgaccttgaaaacaaatggctgttgtgaactgatgtgaccaaaccaagagatggttccttacaaaaacaaagcaaaacacaagatgaaaatcaagcagaaaaagaaaataatataaccttattttgagaacacgacttcatctcaaaggatactttttgtatattaatcctcacagattaataagagcacttaaaataattttgtgtagatccagaatacaacaggtgactaagttaatgactaacacaatttacagacttcaaaattttgaattccaaatttcacagcataacagatgactataatatactaccctaatcaactcttatttagtgtctatacagcatctacagagctcttcatccatcatatttctcctcttagactttctgtgttcatgactcattttcatccatttctgtcggagaactgctttgggaggagcagagcgagtaagtgccatactccggtatgggcctgtgtggtggccagttgttttcttgcaagagtgatcttggagataaaataaattgagtctcaaaaaattccaatgactcgccatcttccttctccatcagaaactgatactctccgaatctgaccatgcacctgtatggcaggtccattttatttaggtagcccagctctctgctgtccacgatcagattggtctttttactcatattttttatttcaaaggagagaactgagctgttgaattttttaaacagctgcagagaaaactgaactcgggaaacctgtttgtcctgaaaagtataatgacagatgttggaatttcggccaaatttcaccacttcgctggaagggagtttctctctgttaaaacttattgactgaaatattccacactgcaactggccaggatggtaaaccgtcatctggagacaagttactgtctcttctgtgtcagcatcttcaaaactggtcatgatgtgcacaaggcccacctggggctggggagtcagtgaactctcttcagctgttcggctctcccggctcagagcgaggggaatcgaggagactgggcgcaggatgggggtggacacccggccgctgctcctccgcgcgggtaagtgtgagccccggggtgcggggaaccgagccagggaccagtgaccgcgagccgccgatccttccgcgctcccgcgcgcgcggcctgccttcccactgg

SEQ ID NO: 439672 - DNA, 1782 bp, Homo Sapiens
  misc_feature (21)..(21): n is a, c, g, or t
  misc_feature (215)..(215): n is a, c, g, or t
  misc_feature (250)..(250): n is a, c, g, or t
gttacaatgcgaacctccgtncgtagaaaactggagacccccaatgcggagctgagggtgcttccaggcatctatttgcccaagggggtcacgcactcccaagtccactaggatcagttcctgtagttcccgatctcctagacctattaagagcctaccaagctgcaggatctgctcaggacgaaatccccggggggggacgccacaaactgttntgctttgcccatggctgcccgcagttcctcaggcnccaagtcctgggtctcctgcaaataatgtcaggcagtcctcaaagtctgagagctccatctctgcaatctgggttgcagaccaggctgctgggaatgtccctcgtacatctgcacaatttggcacaggttctggaagatcctcagcagctggtcgcaccacccctgctaccagggctgctttcttggcagcaagctgtggctccctacacagctgtccaactctgctctgctcccagctctgctgcttttctagaagccgctccagggtctctggacccaaggcctccctggggatcaaggaaattgcctcagtagacagagtgaatactaggcgtccagcttgctctacttcatcctggctccacaactctggtttcccaagaacagactcctgcaatagcagccatcccagctctgtggcaaatgtctctcctaggcagaagccttgcagctgactgagatgggacagcaggatctgtagggggatctgtcgtgtgctctctgtccccaggaatccaaccaaagggcctaaggtctccagcacttcccctgagactggagtctcctttggagccaggttttgtagtgccctctctgccagggctgcctggtggaggggggtcagtgccagcagctgctctggagctctttgcaccagctccaccaaccaacataatggattcattggatagtctgtccatcaactggatcggtaagtccaggagtagcttgctatccagcccgttcagttctggccctacagttgtccattctggttctggcattgccatcctccgctgtagctctgcccagatacaggccctcaggctccctcgaactctagtgggcagctgatagatcatgtgcaccacttcaaggaagtctaccatggagttgatctgctgcagaaactcacaggacatgcctcctgccagggtgcccagagcctgcagattcctgagggtaaggttggtgggtacttgcatcttcttccagagaaactgtgcatcgtgcctaggaaggagccgtccaagcagcaggacagcctgagcaggtgtaacactagttccctgcaggacaggaagcatggctctaagctggggctctgacagctcctgaaggaagcggaggcccagctgagagaagagaggggcccagacccgcagctcccgggggctcagcaccgctcctccagatgagcgcaacacacccagaagttcatatgccacctgcgtacctgctcctcaccatcctggacactctggtttaccaggtgcgcagcacatggcgggcatgccctggccccagacctgctgctggccagctatcctccagggcctggatctggtgagggctgagctgcaaaaagttctccagagggaggtgggggagcaggggcagcactgcccacagcagctcctggggccaggcaggcacttccccaaacagttcaggggccagcagtcgctttgccagagcctccttctgttcaggcctcatatcccgggaattccggaccggtaccagctgc

SEQ ID NO: 439673 - DNA, 1231 bp, Homo Sapiens
  misc_feature (1134)..(1170): n is a, c, g, or t
  misc_feature (1184)..(1184): n is a, c, g, or t
  misc_feature (1197)..(1197): n is a, c, g, or t
cccctttttggacaaagcatggtttaggggtgtagataatagggaggtttccccccacacaaaatacggcccacttaggaaggccctttttcgcgtcggccccggaatacggggtaattcttgtgggtaggggtttccacctttggggggcggggatatttcccctgagaaaaagcaatttgccataacctttttttcaaatgagggttcaatatttctcccccagttttgcgagtatccacgttcccctgcttctccctttaaccccggggtccacaatatttaggaaaattaagtactgccagatgtctgagctctttcaaatctcgacaaacagtgtagaaaactccaagaagaatgttaatgtaggcagcatagaaatcagctgaatactctggaggatgatcatgggacaggatcttttgaaggttgcctatgctgtaatcagggaaatataagacaaacggctcaaagcatccagtatttggacgaaacttttcccaaacaatttcactgagaaagagaacagtcacatttctgtcagccaattcttgtaatctaagaaatccaggcaaaagatttgcttccatatctcttagatactctgctttatctagaacaatatatacagtctgatctttaagattttcagctgtggttacttgtttaaacaagcgaacaaagtcattaaatgtttcacaggttatttcagtagaacatccatcctctgaagaactaagatgattcaatttgtttaaaatttgttccaaaagcagcctcaatgtaaagcattcaacacaattcacaaacacatgtgggagctctaaagttttcaacaacgtttgtgttacataggtctttccactagcagtatgtccataaataaaaatggatggaaagctgaaatgatgtctctctccaaacaaggactgcaagatggacacttgagactcgcgacaaagcaccacgttttccaagtggggcattctggcaggcaccaccgcagaggccagtgcagccagcccacaggacccttgcacaagacggagcctctcccgagtctggcggcccacgctcccgccggaaaccggacccgctctcgacgaattcgagctcggccgatttggcctgatnnnnnnnnnnnnnnnnnnnnnnnnnnnnnnnnnnnnncgccgccaccgcgnttacaccggtcgnccctatagtgagtcgtagtcattcactggaagtc

SEQ ID NO: 439674 - DNA, 1764 bp, Homo Sapiens
  misc_feature (1545)..(1545): n is a, c, g, or t
  misc_feature (1634)..(1634): n is a, c, g, or t
aattcccgggattgttgatgtgtgtttcacatttaatcataagaaaactcatggcagtaagcttccgcctcttttcctctgttggtattacccgtacatcagaaccgtccttctcccaggacaaaggacctctgctgctgatggtagtgggtatggcaggaactccagaggagccggtggctgtagtcttggtgggaggggtacaggtgcaatgtctcatctcaatgacagggtgggacacaccttcctcagtccacagccaggtgctcctttgtttccatggtgtcagccccaacactcagagatctcctgtgggtggggaaaactgatcatctgattttgtgactccatcaaaaggaaaggtcagactttcttacgaaggttaaaaaacaaaaccaagaatcctttaaaatggttcctttttgcatttctgacttgactctgtaatttgattgtagtcaagaggagatgttgtctgcatagaattcctgagcaagtgggaatcttcccagggaaggaagctctggggtaggaaagggatgacaatccgaggagacggggggcagggatggattcttggctgggtctctccttgcacaggttacttacctctcagaactccatctagaaaatggggatgctgatagaaaattatttcacaagcgttatctctttggcctcacctcaaccaggagcctggattagcttctaacatttccctgacagagccatggccttccttgggggaagttccttaaacaactgtcttcccatcataaattagcgttcacataattcaggttccctgtccctggtcttttgagtgtttctgttttcttgcaagtcctggacaaatctttagggggatccatagagaaggaagaattaaacccaagcgctacccagtgacttccaatagacatcattgaaaggtgtagcacaatttcctcagactacagatgtcagagctgggggccttgggggcagttcttccaactgttttcacctctcagcacaagcagaacaaaaataatactgattcatagcattagggcaacaggagaaggttgtctgtggccggggtaaccagttccccatggattgggagggatttacctgctccaagttctgccctggctcctcccacgctggggatctcagcacatggatggagttaggagaaaactgtgggtcacacagaaggcaggtaggcaggtagggagggaggcacccgtaagtaggtgaggggatcatttggaagctgtgattttctatggccaaagaggcagcacggcactgaagaaggtcccagcaacttccctccagccccttctctgtttccccctcctccttccccatatgactccctcctgaagggattttaattataaagtcgctgtttcaagaatagctaacatggggtgagccagttagctgtcaccattagctttcacatccttgcttcttctgcctggcggcgggagagggatccctcatgggctgtggtcctttcctcaccttctctctatgagagtgtgtgcattntcaacaccccccgatcccccattacccatgggcattccccactgcacccttcccaatctgagccctgagtcctggggccaccatatagnccttagctcaagtgtacagcccaggagaagccttcctcttctttaggagtaacttttgcacactaaggtgggggaagaacacacagacaatgggcttgtggagggtaaaggggaagggccccatgaggac

SEQ ID NO: 439675 - DNA, 1625 bp, Homo Sapiens
  misc_feature (380)..(380): n is a, c, g, or t
  misc_feature (386)..(386): n is a, c, g, or t
  misc_feature (406)..(406): n is a, c, g, or t
  misc_feature (408)..(408): n is a, c, g, or t
  misc_feature (410)..(410): n is a, c, g, or t
  misc_feature (630)..(648): n is a, c, g, or t
  misc_feature (750)..(758): n is a, c, g, or t
  misc_feature (860)..(860): n is a, c, g, or t
  misc_feature (1613)..(1613): n is a, c, g, or t
ggtctctcgctgagccatactcacccgggagagcaggaatgcggcggagacttggtagcggccaccgagccaattcggtgggaagaccgggggactttccgcggggcaggggcggtggctcacctccgggggtgctaggccgactctctagcgtgttggcgggcccgcgtcgcttttatgcgtgatgccggggacccccttgtaccgctctcggcggcgcatctcccagagcccttcaaggagctcgcgcgtccccgagcgactcccggacacctggcagattcgaaacttcagccacgagatgctttcctggactccctaaatacttaatcattaggcaaggcaatggtttgcaaggggggagcaaaaattataaaaanaaaaanggaaaggcctggaagcgaanangncaagggaagaagcttgggcagagtattcgagatgcgtccaggctgcacggtgcaggggtcgggtgcatcttagaacaggtggctcccccagcgtgaggctactgtgaacggcgctgaagagcagtattcatactgtgtgctgctgatttaatatatcaacatgcagagttgtgtaagtgagaaaagctacttgcataatatatatggtgattttaaaggnnnnnnnnnnnnnnnnnnnatacacacaccaaactggctgcggctggggagtgagactgagtagctagacaggtaggtagccttttattctttacttgaggcacatatgtatgcttgatannnnnnnnncttaaatgagcttgtattccttctataaataacttcaaaaggcagagttgtgcctcatattgcaggttaagcactgttccccaatctaactatataacccancccttcatggcgagtattttcacttactttcaagagaaaggtgaaagaagagacaaatgcaccggaccaaatgccaggaagataaatttaaagtggaatgaagaaagagctgtatgtgagtgaatgcctgggacaggccccccagtgttagctgtgagcctgtgctgcaccctctctggtgaacccggtcttcgtgtccaggaacccctggcacaaaaagtagcagctcctgttaggggcattggtcacctccttgggggagtgtgtccttcttttctctgctaatgtgttaccttcagtagcgacaatataaacagagaatttatgcatatccatgttcctggcgtttctacctgactttcctccaacctagtcattcttagcctgggatacacaacccccatccacccaggaatatagagatagaattcaggggtgctatgaatttggatggagaaaaattacatctttacttccactaacctttcatctaagcatagcgtttcctttatttatgaatgtgggtaataaactgtagtagtattagccgtggtggtgaatttgtcaccaatagaaatcatagatgcatgcatttcatgtcacagatgttgcagatcttttgaaaacatcatttacataccactttttagagattatcgtaataagtctagttatttaatgtgttaaatatgaagcacatgtattgctatattgtattttaagttattttaataactactaaatatagttggnttgttttctgtg

SEQ ID NO: 439676 - DNA, 881 bp, Homo Sapiens
  misc_feature (118)..(136): n is a, c, g, or t
  misc_feature (449)..(512): n is a, c, g, or t
  misc_feature (791)..(791): n is a, c, g, or t
  misc_feature (795)..(795): n is a, c, g, or t
  misc_feature (799)..(800): n is a, c, g, or t
  misc_feature (815)..(815): n is a, c, g, or t
  misc_feature (845)..(845): n is a, c, g, or t
cacaagcagcttcgcgttaactggagtgcctgggagtcgcgtgccaggagccgcacggccagggactgactgacagacagacacgcaccaccaccacaacacacgagacccgggcggnnnnnnnnnnnnnnnnnnngggctcttggcaaactcgccggtcgcagaggtcccccgcggagctgcgccacagtagcgccgggcttgcagctttcacgccgggcgaaggacccggcgctgcgctcgcagctgcgcggagattcccggcacaggccaaagtcacagcaacgctgaggcacagttatgagccaactaagatgttcgtcaaatccgagaccttggagttgaaggaggaagaggacgtgttagtgctgctcggatcggcctcccccgccttggcggccctgaccccgctgtcatccagcgccgacgaagaagaggaggaggagccnnnnnnnnnnnnnnnnnnnnnnnnnnnnnnnnnnnnnnnnnnnnnnnnnnnnnnnnnnnnnnnnggcgttgctgcggggtgcggagggctgccggcccgcacggctgctgggtctggtacacgattgcaaacggcgcccttcccgggcgcgggccgtctcccgaggcgccaagacggccgagacggtgcagcgcatcaagaagacccgtagactgaaggccaacaaccgcgagcgaaaccgcatgcacaacctcaacgcggcactggacgcgctgcgcgaggtgctccccacgttccccgaggacgccaagctcaccaagatcgagaccctgcgcttcgccanaaanaaanntgggcactcaccganaccctgcgcctggcggatcactgcgggggnggcggcgggggcctgccgggggcgctcttctccgag

SEQ ID NO: 439677 - DNA, 1525 bp, Homo Sapiens
atgaaaattagatagtttatttatagtttaatcacaagaacaactttcttgtttttcaagatgtaaatacatactagaataaactctgtagaatatacaaaaaatacatattttcccatgaaaaatttctttataataaatagaagggaacacgtgtgtggctgatccggataatgctccgtgtctgcttaggttttcagactgttgatttatttttaatctcttgaaagaatgggggagttccttctcccctaaaaggtcgaaataaataatacatgaggcaatcctccctcctgatttttcccttttcctccacatttttccttttgatagagagttcagcctaaatttccacgcttgcgttcaatcattacaaagcctacaaattatacaatgacttctaacctgcccctctaacaaaacaagtttttttccccttataaatcataggggacagatggcgaggtggggaagaaaagggaaagagaaggacaggtacaataggcattgtgacgaatctgggaaacagaacaaagtgcacatcagtgagggatgtttggtttgacgggtgaaattcccacagcctgcagacagcaatgggaataaagcagatgccagccattgcaaatctgtggataatattattaccagcaaaatcattcagatgctaagatacatttctttctactcgacattaacatctctatgtagaagcaaaggtgaagagatcacaggaaccagttgcattccccctgtgagattcacacgaactgcaccaagtccttcggcgttaaagagaaaggggaggagcgtcagtccgctctgcaaactctttagatatgccaccatcatctcttcccagggtctttttcgtctcaagaagcgcccccaaaacgccacccttggctttgacaataagctccatcacaccttcagtaaatcagagcccgtctgaatgaaggatacccaaagccaagaaatgcaagaaacaaccgaggaatcagaaaggctacacctgccctgtgaagtgagatggtttccagggcgtggaaaggaggggcaggggaagggaggagggctcgactggggacaggaaagggaacccactaaggcctggcgtgggtagcagaaatggcagctctagatacaatccctggctatggggaggtgaggtgcatagcggtgcttgtcgggaggtgggggctgccaatagtccatgtctgacccggccgggctggcgggcgataaagtgcagctgtagggggaggtggaattggaggacacggaggaggacggcgcggggctgttggtgcaactccacgtggaggcgggcgaggggctgtctccgctgctgctcagggcggcgctggcgcctcccgggctcagcaacactgcctcggagaagagcgcccccggcaggcccccgccgccgcccccgcagtgatccgccaggcgcagggtctcggtgagtgcccagatgtagttggggcgaagcgcagggtctcgatctgtgtagcttggcgtc

SEQ ID NO: 439678 - DNA, 1938 bp, Homo Sapiens
  misc_feature (41)..(41): n is a, c, g, or t
  misc_feature (1517)..(1603): n is a, c, g, or t
  misc_feature (1891)..(1891): n is a, c, g, or t
attttttttccccggcgacggcccaaaccgcccgctcaccnccctacgtagcgaggcctgggtggcgaattcggcacgaggtggagagtactcgggttcgtgaacttcccggaggcgcaatgagctgcattaacctgcccactgtgctgcctggctcccccagcaagacccgggggcagatccaggtgattctcgggccgatgttctcaggaaaaagcacagagttgatgagacgcgtccgtcgcttccagattgctcagtacaagtgcctggtgatcaagtatgccaaagacactcgctacagcagcagcttctgcacacatgaccggaacaccatggaggcgctgcccgcctgcctgctccgagacgtggcccaggaggccctgggcgtggctgtcataggcatcgacgaggggcagtttttccctgacatcgtggagttctgcgaggccatggccaacgccgggaagaccgtaattgtggctgcactggatgggaccttccagaggaagccatttggggccatcctgaacctggtgccgctggccgagagcgtggtgaagctgacggcggtgtgcatggagtgcttccgggaagccccctataccaagaggctcggcacagagaaggaggtcgaggtgattgggggagcagacaagtaccactccgtgtgtcggctctgctacttcaagaaggcctcaggccagcctgccgggccggacaacaaagagaactgcccagtgccaggaaagccaggggaagccgtggctgccaggaagctctttgccccacagcagattctgcaatgcagccctgccaactgagggacctgcgagggccgcccgctcccttcctgccactgccgcctactggacgctgccctgcatgctgcccagccactccaggaggaagtcgggaggcgtggagggtgaccacaccttggccttctgggaactctcctttgtgtggctgccccacctgccgcatgctccctcctctcctacccactggtctgcttaaagcttccctctcagctgctgggacgatcgcccaggctggagctggccccgcttggtggcctgggatctggcacactccctctccttggggtgagggacagagccccacgctgttgacatcagcctgcttcttcccctctgcggctttcactgctgagtttctgttctccctgggaagcctgtgccagcacctttgagccttggcccacactgaggcttaggcctctctgcctgggatgggctcccaccctcccctgaggatggcctggattcacgccctcttgtttccttttgggctcaaagcccttcctacctctggtgatggtttccacaggaacaacagcatctttcaccaagatgggtggcaccaaccttgctgggacttggatcccaggggcttatctcttcaagtgtggagagggcagggtccacgcctctgctgtagcttatgaaattaactaattgaaaattcaaacaaaccaaaccccattaataccnnnnnnnnnnnnnnnnnnnnnnnnnnnnnnnnnnnnnnnnnnnnnnnnnnnnnnnnnnnnnnnnnnnnnnnnnnnnnnnnnnnnnnnttataaaagggggcgttcccctatataccttcttttcggaggggcgccactatccccccttaccccccttttctttataaaaagagggcccccctatcggagttcctcctatacaccaggccccgcgggggcccgttccacataaatccctcggtggccaaccactccccctttatgcactctttgacgaaacccctttttccttttgcgcccccccgcctcccctagatatcactatctgcacccgactccgactcccgcaagccttacccccccaactttttatgncagccacgcgcgcgtcactatacccggccttttttcccctgctcaga

SEQ ID NO: 439679 - DNA, 1112 bp, Homo Sapiens
gcttccccccccaagggagaaggggaggtgtgccaagatccccaggccccaccaaggggggggcccagctccaagccttgggcggattgtccccagcaagctgagagggaaagctttaaagcagacccagtgggtaggaggaggagggaagcatgcggcaggtggggcagcccccacaaaggagagttcccagaaggcccaaggtgtggtcacccttcacgcctcccgacttcctcctggagtggctgggcagcatgcagggcagcgtccagtaggcggcagtggcaggaagggagcgggcggccctcgcaggtccctcagttggcagggctgcattgcagaatctgctgtggggcaaagagcttcctggcagccacggcttcccctggctttcctggcactgggcagttctctttgttgtccggcccggcaggctggcctgaggccttcttgaagtagcagagccgacacacggagtggtacttgtctgctcccccaatcacctcgacctccttctctgtgccgagcctcttggtataggcggcttcccggaagcactccatgcacaccgccgtcagcttcaccacgctctcggccagcggcaccaggttcaggatggccccaaatggcttcctctggaaggtcccatccagtgcagccacaattacggtcttcccggcgttggccatggcctcgcagaactccacgatgtcagggaaaaactgcccctcgtcgatgcctatgacagccacgcccagggcctcctgggccacgtctcggagcaggcaggcgggcagtgcctccatggtgttccggtcatgtgtgcagaagctgctgctgtagcgagtgtctttggcatacttgatcaccaggcacttgtactgagcaatctggaagcgacggacgcgtctcatcaactctgtgctttttcctgagaacatcggcccgagaatcacctggatctgcccccgggtcttgctgggggagccaggcagcacagtgggcaggttaatgcagctcattgcgcctccgggaagttcacgaacccgagtactctccaaggccgtcccgccctcgtgccgattcaacacccagcctcgtacctagcctaa

SEQ ID NO: 439680 - DNA, 1039 bp, Homo Sapiens
tcggagaagggaaacggcttaaaagccagacccacttgggttaggaagaaggagggaagccatgccggccaggtgggggcagccccccccaaagggggagttccccagaaaggccaaggtgtgggtcaccctccaacggcttcccggattccttcctgggagtggctgggccagcatgcagggccagcgtcccagtaggcggcagtgccaggaaggggagcgggcgggccctcgcagggtcccctcagttggcaggggctgcattgcagaatctgctgtggggcaaagagcttcctggcagccacggcttcccctggctttcctggcactgggcagttctctttgttgtccggcccggcaggctggcctgaggccttcttgaagtagcagagccgacacacggagtggtacttgtctgctcccccaatcacctcgacctccttctctgtgccgagcctcttggtataggcggcttcccggaagcactccatgcacaccgccgtcagcttcaccacgctctcggccagcggcaccaggttcaggatggccccaaatggcttcctctggaaggtcccatccagtgcagccacaattacggtcttcccggcgttggccatggcctcgcagaactccacgatgtcagggaaaaactgcccctcgtcgatgcctatgacagccacgcccagggcctcctgggccacgtctcggagcaggcaggcgggcagcgcctccatggtgttccggtcatgtgtgcagaagctgctgctgtagcgagtgtctttggcatacttgatcaccaggcacttgtactgagcaatctggaagcgacggacgcgtctcatcaactctgtgctttttcctgagaacatcggcccgagaatcacctggatctgcccccgggtcttgctgggggagccgggcagcacagtgggcaggttaatgcagctcattgcgcctccgggaagttcacgaacccgagtactctccaggccgtcccgccctcgtgccgaattcgccacccagtcctcgtacctagccg

SEQ ID NO: 439681 - DNA, 1658 bp, Homo Sapiens
  misc_feature (80)..(80): n is a, c, g, or t
  misc_feature (903)..(904): n is a, c, g, or t
  misc_feature (1392)..(1392): n is a, c, g, or t
  misc_feature (1526)..(1526): n is a, c, g, or t
tctctgaacaaatgttttgataaactgccctctcccctgaaactttcctgaaaacagacttcgctttaacgtagtttcgnaaatgtacaaaagagcaaaactgcccttctcggcgggacggccgcatgttacagaaaaggcttcgtctctgctgctgatgccaccacgagccctgcccagcgctcaccaggagggcgggctgcggcccccggggctctggggagggtctcactcagagggtaaagctccacagaagagtcaccccagagcacctgtcggagaccctgcgtcccttccctcagggggctgtgaaaacaccttgacgtgcttgtctctgtattttaaaaacacgctctcttcacctccagtgctgaaagctgctcagggcctctggatgcttagtttttgaaccttgtctgttcacagatatgattgaatttcatggcgtggtgagctttcacctgagtgcggcagttacggccccagtagcagtcaggacgggatgttacggccactggcaactcggaagcaggaatgttctgccgatactgataggtcagctcacggaagctgcgcaggccacagcagtaacacagaacggtgtctcccgtgactctgtaatcagacagcagaaacactccccgctggagagccacgaggctctcggtcaacatgtttttccatgtcaaacctctggttgccaggtaattctgtttataatgatgtcgcaggaaagcactgtctgcccgacactgaggataaacatatttcttttcattacagattcacaaaacggggccaggcagccgtagcagccggtccgggtgcagccccagtacaggtggcagaaaggctgcaggcagaccgcacactgctgaggggcgacacgcgggtcctgctcgnntccgctctccggtcgggcatgggctggaagcagcaggtgcacagggcgtggcttccttgcagagggcacacgtaatcctggactgtcgtcaggctgacggacgtggagggtgcatcccccagggcctgtggggctcctggctcgccctcgggtgctgggcagtggggagctgcgccgcctgccttctgtactcaggacactgccggcacacgacgtatggctggctgcaaggaagcacagggccgagctgtgtgcaggccccaagcctctcaggtagggccggtgcaacgcgggtccgcagccatcacagctcagctccaccgtcgctcagctgcttggtgtgaggggaagggccgggccccattcctgtccagcaccccagtgttagagagggaccagaacgagtcgaagggcaaggacacgccactctgcatccccagctcagcccccacgctttggagccccatccccagggtcactaggtcccnctgacgtgtgctcccaggagacgacgccagagcagggcaagggccagcacgtgcgcgcacgccccgtgctcctcaggacccgcctactctcccgttaaaagcagagcgcggtgggcaacgtactgggagccacnccaggcgcctgcaaagccccgaatcacttgtcttttccacacttcccttgtacttccaaaaacgagcagataaaaatgtcaactgtaaaaaaagaacctgtaggaaaaaatacacgaggctctcctctccat

SEQ ID NO: 439682 - DNA, 1120 bp, Homo Sapiens
  misc_feature (13)..(13): n is a, c, g, or t
  misc_feature (15)..(15): n is a, c, g, or t
  misc_feature (18)..(18): n is a, c, g, or t
  misc_feature (23)..(23): n is a, c, g, or t
  misc_feature (52)..(52): n is a, c, g, or t
  misc_feature (80)..(80): n is a, c, g, or t
  misc_feature (82)..(82): n is a, c, g, or t
  misc_feature (95)..(96): n is a, c, g, or t
  misc_feature (102)..(103): n is a, c, g, or t
  misc_feature (120)..(120): n is a, c, g, or t
  misc_feature (135)..(135): n is a, c, g, or t
  misc_feature (142)..(143): n is a, c, g, or t
  misc_feature (148)..(148): n is a, c, g, or t
  misc_feature (169)..(169): n is a, c, g, or t
  misc_feature (179)..(179): n is a, c, g, or t
  misc_feature (199)..(201): n is a, c, g, or t
  misc_feature (257)..(257): n is a, c, g, or t
  misc_feature (261)..(261): n is a, c, g, or t
  misc_feature (263)..(263): n is a, c, g, or t
  misc_feature (279)..(279): n is a, c, g, or t
  misc_feature (282)..(282): n is a, c, g, or t
  misc_feature (290)..(290): n is a, c, g, or t
  misc_feature (296)..(296): n is a, c, g, or t
  misc_feature (300)..(300): n is a, c, g, or t
  misc_feature (312)..(312): n is a, c, g, or t
  misc_feature (318)..(318): n is a, c, g, or t
  misc_feature (331)..(331): n is a, c, g, or t
  misc_feature (336)..(336): n is a, c, g, or t
  misc_feature (942)..(942): n is a, c, g, or t
  misc_feature (944)..(944): n is a, c, g, or t
  misc_feature (966)..(966): n is a, c, g, or t
  misc_feature (1012)..(1012): n is a, c, g, or t
  misc_feature (1020)..(1021): n is a, c, g, or t
  misc_feature (1033)..(1033): n is a, c, g, or t
  misc_feature (1046)..(1048): n is a, c, g, or t
  misc_feature (1053)..(1053): n is a, c, g, or t
  misc_feature (1059)..(1059): n is a, c, g, or t
  misc_feature (1078)..(1078): n is a, c, g, or t
  misc_feature (1088)..(1088): n is a, c, g, or t
  misc_feature (1099)..(1099): n is a, c, g, or t
  misc_feature (1104)..(1105): n is a, c, g, or t
  misc_feature (1112)..(1112): n is a, c, g, or t
taaattatattantngtntacantatgtgacatttaaatcttattagaaganaagcaccaaacctattaaaataaaaaananataaaaccccgtnnctttcnnagcagcaggatattgtntacgtcctgtaggcngtaaacnnatgcncccttctcctgaaacaatgtnttaaaaaaanttgcccttctcccttgaaannnttcctgaaaacagacttccgctttaactgtagtttcggaaaatgtacaaaagagcnaaantncccctctcggcggganggncgcatgtnacaganaggnttcgtctctgcngctgangccaccacgggcnctgcncagcgctcaccaggggggcgggctgcggcccccggggctctggggagggtctcactcagagggtaaagctccacagaagagtcaccccagagcacctgtcggagaccctgcgtcccttccctcagggggctgtgaaaacaccttgacgtgcttgtctctgtattttaaaaacacgctctcttcacctccagtgctgaaagctgctcagggcctctggatgcttagtttttgaaccttgtctgttcacagatatgattgaatttcatggcgtggtgagctttcacctgagtgcggcagttacggcccccagtagcagtcaggacgggatgttacggccactggcaactcggaagcaggaatgttctgccgatactgataggtcagctcacggaagctgcgcaggccacagcagtaacacagaacggtgtctcccgtgactctgtaatcagacagcagaaacactccccgctggagagccatgaggctctcggtcaacatgtttttccatgtcaaaacctctggttgccaggtaattcttcaggatgtctgactcgtagctgttgttgttcagcacgccgtccagacacttgtcacccaggttgagcncncaaacggggccaggcagccgtncagccggtccgggtgcagcccagtacaggtggcagaaggctgcagnagaccgcnnctgctgaggggngaacgcgggtctnnncgccncccccnccgtcgggatgggctgaanagcaggtganaggggtggctncttgnnagggaangtatcttg

SEQ ID NO: 439683 - DNA, 1788 bp, Homo Sapiens
ttcaaagttaaaattaaaaagtctttatccaagtcaccaatgaaacaggattctgattcattaatcatgtcttgcccacttttttcaacaaacctgacgtcctataatgagctatacagtgtgaggcatatttcatagcaacgttggttgattgccaaggagactctgccaccgttctggataagctcatgtttcccttttccttggctgctaatagaagggcaacttacagtgcagggtcaagagcaagaagctgggggagtagaggctatacatctagcctaataatagagatctgaggtggtcaccaggagactacgttcttttgattccattcctcagcagcaaaagtacttgagttcaaatgataaaacttgaagttgtaggcttggaagagtatcagctcagtatatccttccttgcataaatacaagggaaaggccaaggaataatcagcattaacctgccaggtccaagggtcttctatccctgacttcatctgagtcacaagatttctctaataagagaaactttgctactctgaggaaaattatcccttatgggagcccccagttcagaggtaagaacagttctttcacgtggaggtccaaaattctggacttctagaaacaagtgaagtgtgctaaagtctcctatttattgtttctcttccagtattgtgccatcgattcttgcataaaattctggaatgctggctcttcatggctttcctctgtaactctgtggtcaatgtcatcagtatcgctgtctgcttcctcatcctcttcatccaaggttcctcgagtcaggatcaaatcagaagggtgcagcacaggagataagctgtctttggcagtccctgcatccaaggctacagaacccatatcttttcgaaggcgttccagttgttctctctgctgttggctctctgcgttggccagtgattttttcagacgttcatattcaggacgatactccctttcatattcttcggcagcactggtaacttgcacaaagagttcatctaatccagtacccagaacagcagagacacccaccaccctgagtgagctgtaaaactcatctaacaccaggctcattgaacgagtcaggttactgacgtatgtagtctcttgattcaaggcatcttggaaagcctcaaaatcctgcatccattccactgcaaagctgtggtcaatgatgtcagttttattcatgaccacaatgaaaggcagcttggttttgtataagatgctgcaggcatagagcatgttggacatgaaggtcactgggttggtacttctcgatgtgtccattacatagatgacaactgttggaaatgaggatgcaagggcttcagtgataattgtcccagaagctgaccaggtgaatacctcaatctgtccaggtgtgtcaatcaacacatatttggacatgttctgggccttctcaataaatttcatcacctgatcaaatctggtagcaaagagattgagtgaggtcactatgccgccattgggtccaagtccatattgtttcattacttctttatactttacagtatcacgaatatcaatattggcaggaaagggaacttcatgtactgctggatccaggttgatcacatacggtggagtgccttgggcatgcaggtgtcctgtgagcctctgtacaaaagtggttttcccggatcccgccattcccaacaccaacagacacactgggtgccgcggacccccagaagcctggagctcagcggcagctgcggacgccgccatcttcctcctg

SEQ ID NO: 439684 - DNA, 532 bp, Homo Sapiens
tttattgtttctcttccagtattgtgccatcgattcttgcataaaattctggaatgctggctcttcatggctttcctctgtaactctgtggtcaatgtcatcagtatcgctgtctgcttcctcatcctcttcatccaaggttcctcgagtcaggatcaaatcagaagggtgcagcacaggagataagctgtctttggcagtccctgcatccaaggctacagaacccatatcttttcgaaggcgttccagttgttctctctgctgttggctctctgcgttggccagtgattttttcagacgttcatattcaggacgatactccctttcatattcttcggcagcactggtaacttgcacaaagagttcatctaatccagtacccagaacagcagagacacccaccaccctgagtgagctgtaaaactcatctaacaccaggctcattgaacgagtcaggttactgacgtatgtagtctcttgattcaaggcatcttcctcgtgccgaattcgccacccaggcctcgctacctag

SEQ ID NO: 439685 - DNA, 460 bp, Homo Sapiens
  misc_feature (434)..(434): n is a, c, g, or t
  misc_feature (446)..(446): n is a, c, g, or t
ggtattcacctggtcagcttctgggacaattatcactgaagcccttgcatcctcatttccaacagttgtcatctatgtaatggacacatcgagaagtaccaacccagtgaccttcatgtccaacatgctctatgcctgcagcatcttatacaaaaccaagctgcctttcattgtggtcatgaataaaactgacatcattgaccacagctttgcagtgggaatgggatgcaggattttgaggctttccaaggatgccttggaatcaaggggactacatacgtcagtaacctggactcgttcaatgaggctgggtgtttaggatgagtttttacagcttcacttcaggggttggtggggtgtctcttgctgttctgggggtacttgggatttagggtggaactcttttgttgcaagtttacccagtggcttgcccncagggattttgnaaggggagttttcc

SEQ ID NO: 439686 - DNA, 1588 bp, Homo Sapiens
  misc_feature (56)..(56): n is a, c, g, or t
  misc_feature (152)..(152): n is a, c, g, or t
  misc_feature (228)..(228): n is a, c, g, or t
  misc_feature (1487)..(1487): n is a, c, g, or t
catgctgccccagatgtctttattgaggcctcctcatttgacccaaaatacattancaagtgattgctgagatacagtcccaaacacagtattctcccttccttctggccaaggacaggacagtcagaaagatacaggattagagagagtgngggaaagctgtgcatagatgaagggaacagaacagagatggggcccatatatatggctagaggagaatcacaaganagagtatggagagtgatggaagagacacataatagatacaagtaagttatgggataagaaacagaagtcagataagagagagctggcctggtgtctagggaaaagtagctcatttgctcatcaaatgagggggatcagtgtctcagcacccagcatattgaccccagattagctctatggcagagaataacctagtctccctggaggaactcagggaaggacaagggaaggcaggagagagcatgaaaagaccagtggggctgaaagatggttgccatagcaactagtcatcatcatcatcgtcatcgtcctctgtgttgatctcgccctccaggacatcctccagccagttcctccagctcctcagcagaaggcaggtcctcctcatcgtccatttccatccatacgctatccgcatcagtaacattgacgactcctatttgtggggctgacaagtcgatgtcaaacgtcttctcccagtatgggaccagcagggggaagtcatcagggtcaatccagatgatgctaagatctgggttttcagtgttatcttgggccacagccttgagagtctctaagaactcgaaaccatcaggatcagcttcctctgcgaaggccacaatgtggattccatccatatcatcctcccaggtctcatacatactctccggcttcagtttcctcagggttgatctcctgtgctcctccacgaagttgacaatctcctcttcgctattgggcttgtctgggatggtcacaggctcttccatgaaggcctcgtagaaatcaatctcattcagcttcagggtcagcttctttgccaccttgctgtcgaaggtggcgaagaaggggatgtatggatgaaactcctcagctgcatcctcgaaggctttgtaatgctctgagtctttgctcttgaagtagccaatgagtttgatctcatcctcaatattctcaaacgcctgcagctctcgttcaccttcaatcaattccacagggtcctctaggacatcaagcagaaactccacgatggtgtcagcagaaaactcgccatcgtactcaatgacttcatctcccttgaatacatacatgctgtccacttcagttaggcctagtttcttggccacagctgcatccttctcagagtctaccagcccgaagccaacacccttgtcttctaggacttgggctgctaactggagggaaggattatgattaaaattagcccctggaatttttattatcccctattctccctntcatgctttcaagttgggtcagttgaggtgcgggagatataagagttgaccttgaccctttgctaagatccagaatatcccccaaattccctacagccaca

SEQ ID NO: 439687 - DNA, 1937 bp, Homo Sapiens
  misc_feature (47)..(47): n is a, c, g, or t
  misc_feature (73)..(73): n is a, c, g, or t
  misc_feature (121)..(121): n is a, c, g, or t
  misc_feature (133)..(133): n is a, c, g, or t
  misc_feature (182)..(182): n is a, c, g, or t
  misc_feature (184)..(185): n is a, c, g, or t
  misc_feature (194)..(194): n is a, c, g, or t
  misc_feature (201)..(201): n is a, c, g, or t
  misc_feature (253)..(253): n is a, c, g, or t
  misc_feature (266)..(266): n is a, c, g, or t
gcagagggcttctcttcatatcaagggtatgggtaaacaagaaaggnaagaatgtttcactgagacaggacanaccaccaagtccaaatgagaagacaagcagagacgtagtgtcagaccnggagggttagancttgctagtgtagagggcaataatccacttgggcacacggggggtggtngnntggttggtngtcagcnagcccaggccggacacgtgtgagagaacagagctcaaagacaaatagtcttngacggggcggccnaaaacatcccgaaggccatagcgtcgagcaaggtcacaggatggcagcaccttaccactcaggctcaggatattgggatctgcgggcacacagacaggtggagatggcaggcaggggagtatgcggagtgacaaggtttgggcccagttggacagggcactgctgagagccctggagctcaggatccctggagagctctttctcttgggccttggactttttccacacttcccaggagcctgctcctaaggctctcagacctcaaactgggaatgctgccccctctgggcctcacaaagcagagaaaagaatgacatgttcctcaaccaactcccgagccagatctgggcactggatgctaccgcactacacatcctccatgccctttcttattaccagctgcccccaaacttcacctgttgccaaagccaccacacatttgccactcaattctgtggtttccgcagatgagaaggctgatttgaaactgcttcaacacaggatcctgcaggacctcctcctttgccatatgctatttcagcagttctgtctgcacaatccccggccacagagacacacagctgaccccatggcgccgcagctcgtgggcacagtcagcagccagcttgtcacactgtggagaggcggaaggcagggtaagagccacctagccatgtcactttcctgccctgccctctctgcttctactgtgaatgctccacccaccctgtccttcccaggagccccaaggtctcagctgcccacgctccccagtgtgatgcctactttagccaaccaagaggagcacaagcaaaggaactgtccatggatgaggcagaggaggagctgataggagccagccttaccattttgaccactggggattgtacctcctgagctataggtaacatcactgtcttttacctcctcagctcttatgccactgggtcctcaccgcaagctttgcccacaccataggggacattgaacagtatacgtgcaggcttcctggggaggagatgaccacgatgagcccctggccagctggtaccatcagccgtgccccatacactgagcaaaagtagtggcctctgaggtccgacgttgttgatatcatcccacatggaggcaggggtttcccagaatgccttattcctggtgttcaggatcgtctggacccctgcataagcattgttgaccagcacatctagacgcccttgctgttcccgatccacttgctcaaacaggcttcgcacttcactctcctggcttgaatcgcacaccacaggcacacattggcccccgagggattgtgcctcctgagcaacaacgcgaagggtgtccagatggcggccagtgatgtaaactgtggcgcctgctttgcagagctgcaaggcaatgccacggccaatacccctggaggcaccagtcaccacacacacttggccattcatgggagctgccatgactcacaggcaaaggaggcaggtctgccacctgcgctgccgctgaggtctgcagattgcggggctgcggtggaagtctgggttctcgcccagattgagccggcgacgtggaggcagtgttcaaggattgattctgtagtaggacccggggcgattctgtgctgaggtagaggggcagagtcccaggccaaagttagaacctgcg

SEQ ID NO: 439688 - DNA, 1355 bp, Homo Sapiens
  misc_feature (2)..(2): n is a, c, g, or t
  misc_feature (29)..(29): n is a, c, g, or t
  misc_feature (40)..(40): n is a, c, g, or t
  misc_feature (46)..(46): n is a, c, g, or t
  misc_feature (59)..(59): n is a, c, g, or t
  misc_feature (70)..(70): n is a, c, g, or t
  misc_feature (81)..(81): n is a, c, g, or t
  misc_feature (127)..(127): n is a, c, g, or t
  misc_feature (142)..(142): n is a, c, g, or t
  misc_feature (144)..(144): n is a, c, g, or t
  misc_feature (207)..(207): n is a, c, g, or t
  misc_feature (224)..(224): n is a, c, g, or t
  misc_feature (240)..(240): n is a, c, g, or t
  misc_feature (245)..(246): n is a, c, g, or t
  misc_feature (248)..(248): n is a, c, g, or t
  misc_feature (279)..(279): n is a, c, g, or t
gnataaagaaggacaaggaaaaacaaggnacaaagaaggnacctangcgcaccccaganctcaccacggncacacagcagncgccttctcttcatatcacgggtatgcctaaacaagacacgctgcngtttcactgagacangncaaaccaccaagtccaaatgagaagacaagcagagacgtagtgtcagagcaggggggttagancttgctagtgtagaggntaataatccacttggncacanngnggaaggtgggcaggtaggttgtcagctagcncaggccggacacgtgtgagagaacagagctcaaagacgaatagtcttggacggggcggccgtccacatcccgaaggccatagcgtcgagcaaggtcacaggatggcagcaccttaccactcaggctcaggatattgggatctgttgccaaagccaccacacatttgccactcaattctgtggtttccgcagatgagaaggctgatttgaactgcttcaacacaggatcctgcaggacctcctcctttgccatatgctccttcagcagttctgtctgcacaatccccggccacagagacacacagctgaccccatggcgccgcagctcgtgggcacagtcagcagccagcttgtcacacgcagctttgcccacaccataggggacattgaacatatactgcaggcttcctggggaggagatgaccacgatgagcccctggccagctggtaccatcagccgtgccccatacactgagcaaaagtagtggcctctgagtccgacgttgttgatatcatcccacatggaggcaggggtttcccagaatgccttattcctggtgttcaggatcgtctggacccctgcataagcattgttgaccagcacatctagacgcccttgctgttcccgatccacttgctcaaacaggcttcgcacttcactctcctggcttgaatcgcacaccacaggcacacattggcccccgagggattgtgcctcctgagcaacaacgcgaagggtgtccagatggcggccagtgatgtaaactgtggcgcctgctttgcagagctgcaaggcaatgccacggccaatacccctggaggcaccagtcaccacacacacttggccattcatgggagctgccatgactcacaggcaaaggaggcaggtctgccacctgcgctgccgctgaggtctgcagattgcggggctgcggtggaagtctgggttctcgcccagattgagccggcgacgtggaggcagtgttcaaggattgattctgtagtaggacccggggcgattctgtgctgaggtagaggggcagagtcccaggccaaagttagaacctgcggatgggg

SEQ ID NO: 439689 - DNA, 955 bp, Homo Sapiens
cacattgaaagagaaatgagacttttattagctccaagagcatttttcaatactaaggcaaaaagtaaaaagaaggacaaggaaaaccaaggcacaaagaagggacctaggcgcaccccagaactcaccacggacacacagcagagggcttctcttcatatcaagggtatgggtaaacaagaaaggctgctgtttcactgagacaggacgaaccaccaagtccaaatgagaagacaagcagagacgtagtgtcagaccaggagggttagaacttgctagtgtagagggcaataatccacttgggcacacggaggaaggagggcaggtaggaggccagccagcccaggccggacacgtgtgagagaacagagctcaaagacaaatagtcttggacggggcggccgtccacatcccgaaggccatagcgtcgagcaaggtcacaggatggcagcaccttaccactcaggctcaggatattgggatctgttgccaaagccaccacacatttgccactcaattctgtggtttctgcagatgagaaggctgatttgaactgcttcaacacaggatcctgcaggacctcctcctttgccatatgctccttcagcagttctgtctgcacaatccccggccacagagacacacagctgaccccatggcgccgcagctcgtgggcacagtcagcagccagcttgtcacactgtggagaggcggaaggcagggtaagagccacctagccatgtcactttcctgccctgccctctctgcttctactgtgaatgctccacccaccctgtccttcccaggagccccaaggtctcagctgcccacgctccccagtgtgatgcctactctagccaaccaagaggagcacaagcaaaggaactgtccatggatgaggcagaggaggagctgagaggagccagcatcccgggaatccggaccggtccagcct

SEQ ID NO: 439690 - DNA, 373 bp, Homo Sapiens
  misc_feature (20)..(20): n is a, c, g, or t
  misc_feature (27)..(27): n is a, c, g, or t
  misc_feature (47)..(47): n is a, c, g, or t
ggtatctccccttaaacagnattaaangaaaaataatgtgtgtcccnatgctcagccctgcacctgccacagtaagcacctggtgagtgggagtatctgatcttgttattgaggatgcagaggccgactcccctgttctctgcttccttcgccctccccttgccaacctgcttcaacacaggatcctgcaggacctcctcctttgccatatgctccttcagcagttctgtctgcacaatccccggccacagagacacacagctgaccccatggcgccgcagctcgtgggcacagtcagcagccagcttgtcacactgtggagaggcggaaggcagggtaagagccacctagccatgtcactttcctgccctgc

SEQ ID NO: 439691 - DNA, 463 bp, Homo Sapiens
  misc_feature (284)..(284): n is a, c, g, or t
  misc_feature (448)..(448): n is a, c, g, or t
ttttttttgaaagagaaatgagacttttattagctccaagagcatttttcaatactaaggcaaaaagtaaaaagaaggacaaggaaaaccaaggcacaaagaagggacctaggcgcaccccagaactcaccacggacacacagcagagggcttctcttcatatcaagggtatgggtaaacaagaaaggctgctgtttcactgagacaggacgaaccaccaagtccaaatgagaagacaagcagagacgtagtgtcagaccagggagggttagaacttgctagtntagagggcaataatccacttgggcacacggagggaaggagggcaggtagggaggccagccagcccaggcccggacacgttttgaggaggaacagagtttcaaaggacaatttagtttttggacgggggcggccttccaccttcccggaggcctttagccttcgnaccaaggttcacagg

SEQ ID NO: 439692 - DNA, 1957 bp, Homo Sapiens
  misc_feature (20)..(20): n is a, c, g, or t
  misc_feature (27)..(27): n is a, c, g, or t
  misc_feature (29)..(29): n is a, c, g, or t
  misc_feature (36)..(37): n is a, c, g, or t
  misc_feature (41)..(41): n is a, c, g, or t
  misc_feature (55)..(55): n is a, c, g, or t
  misc_feature (59)..(59): n is a, c, g, or t
  misc_feature (78)..(78): n is a, c, g, or t
  misc_feature (86)..(86): n is a, c, g, or t
  misc_feature (90)..(90): n is a, c, g, or t
  misc_feature (108)..(108): n is a, c, g, or t
  misc_feature (166)..(166): n is a, c, g, or t
  misc_feature (179)..(180): n is a, c, g, or t
  misc_feature (185)..(186): n is a, c, g, or t
  misc_feature (192)..(193): n is a, c, g, or t
  misc_feature (255)..(255): n is a, c, g, or t
  misc_feature (276)..(277): n is a, c, g, or t
  misc_feature (282)..(282): n is a, c, g, or t
  misc_feature (286)..(286): n is a, c, g, or t
  misc_feature (308)..(308): n is a, c, g, or t
  misc_feature (376)..(376): n is a, c, g, or t
  misc_feature (382)..(382): n is a, c, g, or t
  misc_feature (391)..(391): n is a, c, g, or t
  misc_feature (1882)..(1882): n is a, c, g, or t
  misc_feature (1923)..(1923): n is a, c, g, or t
ttcactgtgaaggaatctcngcccaancnaaatttnncggnttatgagtccggancctnagaaaaaaacatttagaanctattctntttnaaagcctaacatcattgnttgcatcaaagagttattcagatgtgatgaccaaaacaaaactgcagacaagccccanggtttttttgttnntattnnttttanngattaaggtgtttatcactactccagttgggtaaaccacattgaagaatctgactgcaggtntttagattcagccaaatgctnnccatnaatnttgctctaaaaaaatatgaaanattttaatacttcagccatgctcagaacgctgcagtctaaggatgaacttcaacttgcccatgccaanttaggncgacaggancagaactaaggagctatgacgtctaaaagaatcagagaatctggcttaagacgaagagagcttctgttccccaaaactaaactgtctagtttttaaatccacccttaaccgttcaagaaactgaaaaagtcaacttgtttttaaaataccacacaggtatgcaatcttccatgatttgttttgcatctcagctagcacagggaaacccttgaaaaacctagctgtcagaagtttttcctgagggaaatcattacgcttctactgctgagcttcatgtttattctgtgcgtcggggaaaggagaaagcaatgggacagagaagggaaaagttgcgactgggtgacgaattcattaggtgcatttgaaagtaaatgcaatggaaaaaagtaacaaatgctaaagttttctaaaagtttaatgaagccaataaggcatataaattgtgttctggcagacattaagacctgctttctcttaccaaagaaaatggcacgttttatcaaaatttgacaattcagagtaaagggtactgagattaagcttcagagcaccaacttaaacaaaacaaccaaaaaattgttatccaacgtggaaagaggagcaagaaccaaggcataaaggggaattaaatatgtgttcctccatctcaaaatccttttaggaataggagttctggccacttgtgagcaacacattgcaccaccaaaccccaattccagaatctaaatttacgatagaaaaacaaaggtaactccaaacgcatgtcttgtatattccaaagggaagcttgaaagtattcataatacataggcttgtctgtttcaggtaaaatgacagattgctataattcttcctgctattatagtcaaacaaaaaatgacccactttcgcaaaaagtttagaaatctctcactttcattcctagttttagtatggaattcacttttttaaataagggctacatctataatgaatacagaacttcaattcacacaacatttcctaacattcccattcacatccccacccagtcaatgaatgaacatttatggttaactcagcaaagtttcttcacagaaagatattattaaatggctgaagaaattgcaaactttaacaaagtgctgtgagtaattactggaaaaacccttacactgatttgcaatggtcttttaaggataaaaataggaagtaactgatactggactacaagtttgcaaggaaacatttttcactgtcctacttgatatataatataataatatgatagaataaattacagtacctggcaggctgacatcagttcttcatcaaaaaaaacactatcattcagttcaggatattaaaaatgaagatgaaacatgctctaaaacattgtagctacaagaggtcttatatttactcaaaagaggaatcctattggagaactttttatttaggtctacctaacagctagagaatctccatgcgattccatcttttccagaatgnagattcccaactggactttttaggagagggatggagggacngggagagttggggttttgccattttaagttgcca

SEQ ID NO: 439693 - DNA, 1257 bp, Homo Sapiens
  misc_feature (26)..(26): n is a, c, g, or t
  misc_feature (40)..(40): n is a, c, g, or t
  misc_feature (477)..(489): n is a, c, g, or t
  misc_feature (1129)..(1129): n is a, c, g, or t
  misc_feature (1136)..(1136): n is a, c, g, or t
  misc_feature (1208)..(1208): n is a, c, g, or t
aggtttttccaagggtttccccccgngcccaacccgagangcccaaaaccaaatccagggaaagatgggcaaacccgtgtggtaattttaaaaaaaccaagttggaccttttccagttccctgaaacgggttaaagggtggatttaaaaaacctagaccagtttaagttttggggggaaacagaagcctcctcctccgtccttaaagcccagattcctcctgattccttttagaaccgtccatagctcccttagttcctgctccctgtccgcccctaacttggcatgggtcaagttgaagttccatcccttagactgtcagcgttcctgagcatggctgaagtattaaaatgtttcatattttttagagcaaaattgatggaaagcatttggctgaatctaaagacctgcagtcagattcttcaatgtggtttacccaactggagtagtgataaacaccttaatcataaaatgaatnnnnnnnnnnnnnccatggggcttgtctgcagttttgttttggtcatcacatctgaataactttttgatgcaatcaaatgaagtttaggcttttaaaaaagaattagctttctaaatgttttttttctaagggctactggaactcattaaactcgaataattgtggctttgggcctgaagatttccattcaacagtgaaaactggctaacttcctttatagtgagagggatggccaacatccaacccagagggctagtcagcctcagaggccagtgcaagacgccaagagatgattttgaaatggggccataagtttagaaaattatgaacagaatgattgcgtttttggcctggctactacctctagtggtgactacgtcagcagattaatctcattgcattttactttatgtagtatgttgtaacctggtgcttcattcattagattggtgactgaggtatttagtcatggtgaggatgggaatcttcagagatacattctggatttgtggaataaagtgactagaaaggttcttccagagcaaccccttgtttaaagttataagtgtttatggtacctgctaccccttctggaaaagttgtcgctttgatggtttagatgaccttaccccataggccagcttctagcctncctttgnaatatttgaggtgtgtgatgttttaagtgggggcagcatttgagagaacgagcagcccgagcacccagctgnctgtcaaaccgtgtgttgtgctgttgggttgatgggatgagattccagg

SEQ ID NO: 439694 - DNA, 457 bp, Homo Sapiens
  misc_feature (392)..(392): n is a, c, g, or t
  misc_feature (411)..(411): n is a, c, g, or t
attactcacagcactttgttaaagtttgcaatttcttcagccatttaataatatctttctgtgaagaaactttgctgagttaaccataaatgttcattcattgactgggtgggatgtgaatggaatgttagaaatgttgtgtgaattgaagttctgtattcattatagatgtagcccttatttaaaaaagtgaattccatactaaaactagggaatgaaagtgagagatttctaaacttttgcggaaagtggggtcattttttgtttgactataataggcagggaaggaattataggcaatctgtcattttacctggaaacaggacaagcctatggtattatggaattactttccaggcttccctttgggggttataccaggacatgcgttnggggagttaccctttgttntttcccatccgtaaatttaggatccggggatggggggttcggtggg

SEQ ID NO: 439695 - DNA, 453 bp, Homo Sapiens
  misc_feature (411)..(411): n is a, c, g, or t
  misc_feature (434)..(434): n is a, c, g, or t
attcattttatgattaaggtgtttatcactactccagttgggtaaaccacattgaagaatctgactgcaggtctttagattcagccaaatgctttccatcaattttgctctaaaaaatattaaacattttaatacttcagccatgctcagaacgctgcagtctaaggatgaacttcaacttgcccatgccaagttagggcgacaggagcagaactaaggagctatgacgtctaaaagattcagagaatctgggcttaagacgaagagagcttctgttccccaaaactaaactgtctaggtttttaaatccacccttaaccgtttcaaggaactgaaaaaggtcaacttgttttttaaaataccccacagggtttggcaatcttccatggatttggttttgcatctcggctnggccaggggggacccttggaaancctgggctgtcaggaggtt

SEQ ID NO: 439696 - DNA, 1698 bp, Homo Sapiens
  misc_feature (180)..(181): n is a, c, g, or t
  misc_feature (234)..(234): n is a, c, g, or t
  misc_feature (245)..(245): n is a, c, g, or t
  misc_feature (283)..(283): n is a, c, g, or t
  misc_feature (295)..(295): n is a, c, g, or t
  misc_feature (363)..(363): n is a, c, g, or t
  misc_feature (1148)..(1148): n is a, c, g, or t
  misc_feature (1319)..(1321): n is a, c, g, or t
  misc_feature (1375)..(1375): n is a, c, g, or t
  misc_feature (1423)..(1423): n is a, c, g, or t
  misc_feature (1437)..(1437): n is a, c, g, or t
  misc_feature (1448)..(1448): n is a, c, g, or t
  misc_feature (1617)..(1617): n is a, c, g, or t
  misc_feature (1640)..(1640): n is a, c, g, or t
  misc_feature (1660)..(1660): n is a, c, g, or t
  misc_feature (1671)..(1671): n is a, c, g, or t
  misc_feature (1678)..(1678): n is a, c, g, or t
ccccaccaccttttcaccgctcatctgggtggtcctggcggccagcttgcagcttcttccaaagggtaatgtttccggccgggcttttccagaagggcgggggcccgcgtttgggactcaaagcccaaactgggaacccggtggaggatgtggttacttgcttcgtcctgggtcagcacnncgatgggagtgcccggtggggcggaccgttcccgtcccggggtacggggtctnctgccccgtgnaagggcacctcgagccgccgcgcgtcagcctcacccangcctccccttcngggccggtgcacccggcgttccggagagaggcccgggaggcctgcgtgggcggacgggcgcggggagnccgggggcagcgggatctccaggagtttcccgggcctctgccgcggtggtgttggtcggcgggggacggaggccagtgagtgggcgcgcacttggacgtatgtgggtgcactggtagggtgcctctgtggagctgtatattccagatactccttcagcttgtcggagactttgaagccatccttgcactcgttttagaggttggcatctcccggtgctcttggacacctgtattcgggccacacccgctgtgtcctcttcacagccccaggagaaggccacctcccatggcggggttcgcggcgggaccagggactgtcggtactttctctagggtctccctccttcccgggaaaccagttccagccccactgctaggcactgcttaaccagagctgtgcccccgtgctatgggctggggctgaggaccacgggcctcttttccatcagctttcctgccctgttaggaccaagccgggccctgctcttcccactgaggatgtgcaggtggggagggggcagagactccagaatcagcccctttggtcaagattttgaggggaggaaggcacctcaccgtccgtatcatgccacagacatgtgaaagtgtccttagtgactatctctagggataactgctcctccttgtcgtgcgctctttcattgttgtgcttaacagccccctttgccggcaagaaacttcctctgaatctaacctcagtacctcctgctgcggtacaggagcatttcccccttctcttaatgagtggaatcccagccagcctngctccgccttcttctgcccctactacaaccctctcttttagactctgctaagagacctttcctaagtcggtgttctctggtattttcctagtctccatactctgcttctccttagactccacaccagctgaagggaggggaagggcaggtgcagaagcaggatgggcgggnnnaccagagagcaccaaggaggggccaggccgtccaggagggcacattgcctcccncctctgctaagccagccagccgcagtcacacaatcaccaaatgggagnacagaaatgaccgngaagactgtcncgtcccagaccctcattttaccaacagggaaacacacccatgaggggtgatctcaagagagctcagggacatggcgacgaggaggcctgggtttcaggccgattctgaaggcactagcaaaagacttcccctcagggctggtttcagtaatgaaacagagggttggacnaagtgggctgtggtccgacctgncctgctgggctgtggctcgnagatgctgtcngcagggntctcgcttacctcagcattc

SEQ ID NO: 439697 - DNA, 1856 bp, Homo Sapiens
  misc_feature (46)..(46): n is a, c, g, or t
  misc_feature (57)..(57): n is a, c, g, or t
  misc_feature (63)..(63): n is a, c, g, or t
  misc_feature (67)..(67): n is a, c, g, or t
  misc_feature (75)..(75): n is a, c, g, or t
attttttgatgtataaggaaaaggggttggttgaggaaagggttangaaggaagagnttatgntgtntttttttntcagagttaataaataatctgtatttacaatcttacagtcacgaagactctcaacaaagatgacatggatagtctttacgcttcttcctgttccatgaataatccttcagccagatcttccagaataagtaaaaaataaatattttacatcgtaaagcatttaaaaaaaatctacattccaaaagagagaattagaaaactccatgataattcaggaaaaaagagaaaaggaatgttttagttaggttgataataattttgtgccattgtaaccataaaaatataagcacggctgcccctcctttgggaggcagctggtgctcactgagatggtaggttttcctattttcctgctacatctgcacaagctacatctagaatgaagccaccaatttcaatgtgaccaggcaatggcagccagcactgccttacactggtttgattctgattccctaattctggccactgcaggtgatgagtaagggtggggatcagggaggaagtccagaagccagtctttgtctccctttcctgcttctatttaagtgcctatttacatgggttaatcagctaacgccagtcagcatcatgaaatccagcaatagtctttcaatcccctgaaaatgacttagtaccgaacatgtaacagttcctccatattttcttcatacaatcgtctcgggtatgcgccctccccttagtgctttggcctctgctccccgtgttcctgaaggaggatgtcagggtggttttgtttgctaattctagtgagtcctcccttctctgacatgcctgaaaatgcttttgagtccactgctcagagatggcctcacaatagcaccctgctctgtgacaaaggcagagtggaatgggcaccttcccaactgaagcaagtagatgctttttcaaaaggaaaccaaagcaattgtttatatgcttggaagatgtcttattcattggaggctgaatgctgagtctgtttttgaaaactgcattttcttgaggcaggtcgcacgttctaggagtccacactgatgcaagcacagaaaagaaggaagccaaggagaagtgatcctgggggttttctcaagcccatagttccagaaggtgcaataccagcattggtttatgatcagtctttcaatcaacaatttgatgattagggatctctacattcgtatttcaggtcagagaagaacaccatttcttgagagaagacaaacaaccctagtctaccaccagcataggttttatcatagatgggtcctgagtcagccatgattttcttcccttcatacatcaccactctaatgaaacccgtctttggcctgtggctgagacgccatctgtaggcggtgaaatctttccagcctatgtgacgagggtcatgccacagggtgcgcacctggccaggggtgtttcctgtgtgccacagggcgttccgcaggtgctcgccaggccctgtggtggagtttacaactttcacagaaaggcccgagtatccctgagccctcgtggggttggtgtcccagtaggactgggtgacttgcttccacatcacaacataaaagcggctgctggactggtagccaaagacaaatccagcatagtcatcgtccctttcggtgttgatgaagaaggtgccactgaagtccacagcattaaactcatcataacctacagcgagtccaggatcacagttgacagtctggacgagttctttaccctgatggcgtacaacccagttagggtcattttgggatccgcgggaattccggacc

SEQ ID NO: 439698 - DNA, 966 bp, Homo Sapiens
  misc_feature (5)..(5): n is a, c, g, or t
  misc_feature (7)..(7): n is a, c, g, or t
  misc_feature (14)..(14): n is a, c, g, or t
  misc_feature (25)..(25): n is a, c, g, or t
  misc_feature (28)..(28): n is a, c, g, or t
  misc_feature (30)..(30): n is a, c, g, or t
  misc_feature (39)..(39): n is a, c, g, or t
  misc_feature (45)..(45): n is a, c, g, or t
  misc_feature (50)..(51): n is a, c, g, or t
  misc_feature (55)..(56): n is a, c, g, or t
  misc_feature (60)..(60): n is a, c, g, or t
  misc_feature (62)..(62): n is a, c, g, or t
  misc_feature (86)..(86): n is a, c, g, or t
  misc_feature (90)..(90): n is a, c, g, or t
  misc_feature (304)..(305): n is a, c, g, or t
  misc_feature (330)..(331): n is a, c, g, or t
  misc_feature (366)..(366): n is a, c, g, or t
  misc_feature (369)..(370): n is a, c, g, or t
  misc_feature (373)..(373): n is a, c, g, or t
  misc_feature (378)..(378): n is a, c, g, or t
  misc_feature (380)..(380): n is a, c, g, or t
  misc_feature (382)..(382): n is a, c, g, or t
  misc_feature (385)..(385): n is a, c, g, or t
  misc_feature (419)..(420): n is a, c, g, or t
  misc_feature (422)..(422): n is a, c, g, or t
  misc_feature (425)..(425): n is a, c, g, or t
  misc_feature (446)..(446): n is a, c, g, or t
  misc_feature (460)..(460): n is a, c, g, or t
  misc_feature (464)..(464): n is a, c, g, or t
  misc_feature (469)..(469): n is a, c, g, or t
  misc_feature (471)..(471): n is a, c, g, or t
  misc_feature (473)..(473): n is a, c, g, or t
  misc_feature (476)..(477): n is a, c, g, or t
  misc_feature (489)..(491): n is a, c, g, or t
  misc_feature (504)..(504): n is a, c, g, or t
  misc_feature (513)..(513): n is a, c, g, or t
  misc_feature (517)..(517): n is a, c, g, or t
  misc_feature (521)..(523): n is a, c, g, or t
  misc_feature (538)..(538): n is a, c, g, or t
  misc_feature (562)..(562): n is a, c, g, or t
  misc_feature (564)..(564): n is a, c, g, or t
  misc_feature (566)..(566): n is a, c, g, or t
  misc_feature (569)..(570): n is a, c, g, or t
  misc_feature (581)..(583): n is a, c, g, or t
  misc_feature (585)..(585): n is a, c, g, or t
  misc_feature (591)..(591): n is a, c, g, or t
  misc_feature (594)..(594): n is a, c, g, or t
  misc_feature (600)..(601): n is a, c, g, or t
  misc_feature (608)..(608): n is a, c, g, or t
  misc_feature (613)..(613): n is a, c, g, or t
  misc_feature (621)..(621): n is a, c, g, or t
  misc_feature (627)..(629): n is a, c, g, or t
  misc_feature (635)..(635): n is a, c, g, or t
  misc_feature (646)..(646): n is a, c, g, or t
  misc_feature (653)..(653): n is a, c, g, or t
  misc_feature (661)..(662): n is a, c, g, or t
  misc_feature (665)..(665): n is a, c, g, or t
  misc_feature (669)..(669): n is a, c, g, or t
  misc_feature (672)..(672): n is a, c, g, or t
  misc_feature (674)..(674): n is a, c, g, or t
  misc_feature (678)..(678): n is a, c, g, or t
  misc_feature (685)..(685): n is a, c, g, or t
  misc_feature (687)..(714): n is a, c, g, or t
  misc_feature (722)..(722): n is a, c, g, or t
  misc_feature (727)..(727): n is a, c, g, or t
  misc_feature (761)..(761): n is a, c, g, or t
  misc_feature (776)..(777): n is a, c, g, or t
  misc_feature (796)..(796): n is a, c, g, or t
  misc_feature (801)..(801): n is a, c, g, or t
  misc_feature (812)..(818): n is a, c, g, or t
  misc_feature (822)..(822): n is a, c, g, or t
  misc_feature (846)..(849): n is a, c, g, or t
  misc_feature (853)..(853): n is a, c, g, or t
  misc_feature (861)..(861): n is a, c, g, or t
  misc_feature (870)..(870): n is a, c, g, or t
  misc_feature (872)..(872): n is a, c, g, or t
  misc_feature (884)..(884): n is a, c, g, or t
  misc_feature (889)..(889): n is a, c, g, or t
  misc_feature (897)..(897): n is a, c, g, or t
  misc_feature (902)..(902): n is a, c, g, or t
  misc_feature (908)..(910): n is a, c, g, or t
  misc_feature (914)..(914): n is a, c, g, or t
  misc_feature (917)..(918): n is a, c, g, or t
  misc_feature (920)..(921): n is a, c, g, or t
  misc_feature (932)..(932): n is a, c, g, or t
  misc_feature (946)..(946): n is a, c, g, or t
agaantngggaagncatgcgcctangcntntatgccacncgtccnaaagnngagnnctancncttcttttcttttttcttggtttnattnaagccacaaccacatacaacacaaagagaaaaagaaatgcaaaaatctctgcgtgcagggacaaagaggcctttaaccatggtgcttgttaatgctttctgaagctttaccagctgaaagttgggactctggagagcggaggagagagaggcagaagaacctggcctgagaaggttggtccagcctgtttagctctggatgttgctgtgcacgnngacccagacacatcgcactgtggannatttcattttgtaacaaatgaacgatatgtagccnccnngcnccccncncnccngcgcccccccgggagaatgtcagctcatgtacgnncnganccaaccctgccatagaaagtncccgaaagtgtttnaccnccccnancnccnnaccccccccacnnnaaaatggagtttngaacaccgncccncaannncccctcagtatgctnaaatatgtacctaatattggatgncncnccnncaaatagatgnnncngcctcnacnccccanntcccccnccccntcctgccnaaggcnnnatgccncgccccacgcnagtcttnattttcannaangtgncancncagncccaaangnnnnnnnnnnnnnnnnnnnnnnnnnnnngtctttgntgccngaaaaaattgttgtcccggatttttgttaatatncatttttgttacccnnttttaaaagcaaatgcacnggatnccagtaaaaannnnnnnaatngcttcagaattaaaactatgaaannnncacngctccccngacagagcncntgccgcagcccnaggcnaaaaagcncatanccgatnnntttnggnntnntttgttgggcngtgcctgataagcntcaaagctgctttattcaat

SEQ ID NO: 439699 - DNA, 1304 bp, Homo Sapiens
  misc_feature (479)..(497): n is a, c, g, or t
  misc_feature (649)..(660): n is a, c, g, or t
tttttcctaaaatgagtatttgctggtcatgatggatagtctaatgtgacagagatgattatccctttaaaccagtgttctaaacaaaggtgagcgctgttccaggaacccaaaaacaaacttggcacttccttcctaagaactgaaatacctgaccagtcacactgtattagagatacagtaggtttgtaattgtcattaattgataacaactagcaaatcaaagtgagagaagactgaagtagaagaagcaacttcactttgcagttattcacttctctgtaaatcatgagaaagtgcatataaccttgcctccccctcccaccaccccacttgatacatcccttcactacattccccctccctagattcaagaagttcacaattctttatgaaataaacattgccaggtaccgtattttaagagtcttaaaacaacattgttggactcagcaatactttgtcatattcatatatcnnnnnnnnnnnnnnnnnnnattgaataaagcagctttgaagcttatcaggcactgcccaacaaaacagtccaaaaaaaatctgttatgaactttttaaccttgggctaacagccaagtactctgtacaagaaaaactgtaaaatatttcatagttttaattctgaagccannnnnnnnnnnnactggcatcctgtacatttacttttaaaaaaggataacaaaaatgaatattaacaaaaatccgggacaacaatattttcaagcaacaaaaactggggtggggaagcttattctgaaggtacatttaaaactgaaataacaacttaatgaaaattaagaattgcatagcgctgtgaatttagccttcagcaaaacaaaacagaagctatttggtattgatacaaatccatctatttgatagttagtcatccaatattatgtacatattttatatactgaatgtcattttaagtcctgttttccaaactccatttttctgttgctgggtttttgttttttgacaagttaaacactttctggcactttctatgacagaatttcttctgaacatacatgaactgacattctcccaaagcgtccctttgtgagtgacgtgcctttctgctacatatcgttcattttgttacgaaatgaaataatccacaggtgcgatgtgtgtgggtgcaccgtgcgcagcaacatccaggcttaaccaggcttgaccaaaccttctcatgccagtggtcttctgcctctctctctccgctctcagagcccaactttagctggtaagctcagaagcattacaagcacatggtaaagggc

SEQ ID NO: 439700 - DNA, 658 bp, Homo Sapiens
  misc_feature (43)..(43): n is a, c, g, or t
  misc_feature (46)..(46): n is a, c, g, or t
  misc_feature (62)..(124): n is a, c, g, or t
  misc_feature (177)..(178): n is a, c, g, or t
  misc_feature (180)..(180): n is a, c, g, or t
  misc_feature (237)..(266): n is a, c, g, or t
gagacaggttctcatgctgtcacccaggccggtgtgcagtggnaantcttggctcactgcannnnnnnnnnnnnnnnnnnnnnnnnnnnnnnnnnnnnnnnnnnnnnnnnnnnnnnnnnnnnnngtacaagccacaacgcccggctaatttttatatattttttggtagagacggannantccacgttgcccaggctagtctcgaactcctgagttcaagccatcttcccgtctcannnnnnnnnnnnnnnnnnnnnnnnnnnnnngtgtgagccaccatgcccagcctaaaaaagggagaaatttctaggtgcatactgcctgctggactgtatagcccattacaacatctggtcactaagaacctcctattaattccttaacttgcattctcaggatcaagacaaaaaatatgagcaagcaaaaacttatcatcaagcaaaaaggtatctatctattaaaatagctagatatttcccaaacacccctcctaggatatctgctgccaataaaaagtttggggctagtgaaaactcttggcattaaataaaagtaggaatctatttcattggctttctctgtggctcaaactatggccatggaaaattatgctctggatataattgtgaatatagaggtctttaaactgtgtcattga

SEQ ID NO: 439701 - DNA, 438 bp, Homo Sapiens
tccacactgggcaacagaatgagatcctgtctcttaaagaaaaaaaataaactcaagaatgatttttctaaaaatatgagtgagaatggatatggaatatatcctaattaataaagagctcacacagatttgccaggtttactaataatagaaatgccatttatgctgtagaattctccagtttaagtgtagacaactcctattttacaaatttgtagaaattatttaactagaagcttcctggcaaatagtccctttagctacttctccagtgcagtataaattgtaacataaaactttatgtgatataggaatagtgtcaatgacacagtttaaagacctctatattcacaattatatccagagcataattttccatggccatagtttgagccacagagactagcctgggcaacgtgatgagactccgtctctacc

SEQ ID NO: 439702 - DNA, 1728 bp, Homo Sapiens
aggctggtactggtctgggatgtatgggatcgctgggacccgggctggaaggcagggcatcagctatggaacaacctgggcaggatcccacctcagacgacgtcatggactcgttcctggaaaagttccagagccagccttaccgtggcggctttcatgaggaccagtgggagaaggaatttgaaaaggtccccctatttatgacgagagcgccatcagaaattgatcccagggagaatcctgacttggcttgtctccagtcaattatttttgatgaggagcgttctccagaagaacaggccaagacctataaagatgagggcaatgattactttaaagaaaaagactacaagaaagctgtaatttcatacactgaaggcttaaagaagaaatgtgcagatcctgatttgaatgctgtcctttataccaaccgggcagcagcacagtactatctgggcaattttcgttctgctctcaatgatgtgacagctgccagaaagctaaaaccctgccacctcaaagcaataataagaggtgccttatgccatctggaactgaaacactttgccgaggccgtgaactggtgtgatgagggactgcaaatagatgccaaagagaagaagcttctggaaatgagggctaaagcagacaagctgaagcgaattgaacagagggatgtgaggaaagccaacttgaaagaaaagaaggagaggaatcagaatgaggctttactccaggccatcaaggtctactttgaggatgaggacagggcagaactataccgggtgcctgccaagagcaccttgctacaggttctacagcaccagaggtactttgtaaaagccctgacaccagcatttttggtctgtgtaggatcctctcctttttgcaagaattttctccgggggagaaaggtgtaccagatacgatgactaagccagggcccctggatctcctcccttaccctcctctgctgggaacctagcacacctgaatcagctggacatactgctggagtccagtgctttctttccgtcaccctggggatagtccttcctggcatcgtggtgggggaggagcctctggcttccctaaactgcagcctctctggctggtcttcactttcctcagttgatataaaactctgggtcttggccatgatgtccttggactccatcgctaaagggaccatctgctgcagttaccacagcaactgacctgagcggcaccctggtctgtggagatggactcaggatccagtgacatgattctgaacttttgtggagtttgacaccttagagaagctacccctcaaactgcacatctacacacaaacaaacaatgcataggattccaaggctttaaagctgagagaccctggcctcaagttatttcatgcgcacagagggaagccatgtggggttgctgaagatgccttgaggtgaaatgggggcaggaaagccacatcttgctctgcatttataaagaccgtacaaactgagatccttggtacccctaaaaagattgccaattttcttcatctttgccatatggaggactgtgacagactttggacagtggcctcttgagttcctctgcagttttgacatttaggattttgtgtcttttaaactggaaaatcttctagcatgttgggttgttacagagtatatttttgtctgcagctgtttgttgccccattcctaagaggagtttatccatcctgaa

SEQ ID NO: 439703 - DNA, 953 bp, Homo Sapiens
cggggctcccatggaaacccagcgttaattccgacggggaaaactcgggcacagaaagggccacaggccaagcaaacctgcccgggcaatatagactcacccgggcctccagtgggggttccccaggtctgagccaacccccgaaaggctccccttagaccttctggagccgaaatcttcaatcgtcacagcagcttctgagagcctgatattcctagcccttgatggcctggagtaaagcctcattcgtgattcctctcgttcttttctttcaagttggctttccctcacatccctctggttcaatttcgcttcagcttgtctgctttagccctcatttccagaagcttcttctctttggcatctatttgcagtccctcatcacaccagttcacggcctcggcaaagtgtttcagttccagatggcataaggcacctcttattattgctttgaggtggcagggttttagctttctggcagctgtcacatcattgagagcagaacgaaaattgcccagatagtactgtgctgctgcccggttggtataaaggacagcattcaaatcaggatctgcacatttcttctttaagccttcagtgtatgaaattacagctttcttgtagtctttttctttaaagtaatcattgccctcatctttatatgtcttggcctgttcttctggagaacgctcctcatcaaaaataattgactggagacaagccaagtcaggattctccctgggatcaatttctgatggcgctctcgtcataaatagggggaccttttcaaattccttctcccactggtcctcatgaaagccgccacggtaaggctggctctggaacttttccaggaacgagtccatgacgtcgtctgaggtgggatcctgcccaggttgttccatagctgatgcctgccttccagcccgggtcccagcgccgtgaagcccgct

SEQ ID NO: 439704 - DNA, 2659 bp, Homo Sapiens
  misc_feature (1874)..(1921): n is a, c, g, or t
  misc_feature (2078)..(2087): n is a, c, g, or t
  misc_feature (2476)..(2476): n is a, c, g, or t
  misc_feature (2624)..(2624): n is a, c, g, or t
  misc_feature (2638)..(2638): n is a, c, g, or t
ggctccggctgctctaccacttctctgacctcatgtactcatcctggagactgctgaaccttagccccaacaaccagaacagcacatcccattataatgctggaacttggggcattgtacagggacaacttcggcctttgttagccccaagagtctacactctgccaatggtgcgctccataggaaaaaccatggttcaaggcaaaaactatggacctcagataactgtaaagaggatatcaaccagaggacggaagtgtaagcctatttttgtccaaatagcgagacaagtagttaagctgaatgcttcagacctccgcctgccttcccgagcgtggaaggttaagctggttggagaaggggctgatgatgctggaggagtgtttgatgacaccatcacagagatgtgccaggaacttgaaactggtattgttgaccttcttataccctctcccaatgccaccgcagaagtgggttacaatagggacaggttcctttttaacccttctgcctgcctcgatgaacacttaatgcagtttaagtttttaggaattttaatgggggttgccattcgcacaaagaagcctctggacctccacttggcccctctggtgtggaagcagctgtgctgtgtcccactcaccctagaggacctggaggaggtggatctgctctacgtgcagactctcaacagcattcttcacattgaagacagtgggattaccgaggagagtttccatgagatgattcctcttgattcttttgttggccagagtgctgatggcaaaatggttcctataatccctggtggaaatagtatcccactcacattttccaacaggaaggaatatgtggagagggccattgaatatcgacttcatgagatggacagacaggtggctgcagtccgagaagggatgtcctggattgttcctgtgccgctgctgtccctcctcacagcaaaacaactggagcagatggtgtgtgggatgcccgagatctctgtggaagtcttgaagaaagtggtgcggtaccgtgaggtggatgagcagcatcagctggtgcagtggttctggcacacgctggaagagttctccaatgaggagcgggtgcttttcatgaggtttgtgtcaggaagatctcgactaccagccaacactgctgacatttctcagagatttcaaatcatgaaggttgataggccttacgacagtctgcctacctcacagacctgcttcttccagctgaggctgcccccgtactccagccagctggtcatggccgagcgcctgcgctatgccatcaacaactgccgctcaatcgacatggacaactacatgctctcgagaaacgtggacaacgccgagggctccgacactgactactgaccgtgcgggtgctctcaccctcccttctctccctcaataatgctcacttctgatttgatgttgatatacttttatggtaactacatagatgttataagaacataaaccaacattataaacaatggccacatttagttactctaaatgtaacaaagaaattagatgtttttatttttctgtgattgtacaaaaacaacaaaaacgaagtgctctcagtcaggtttttccctccatatttttggtcacttttgataagtttgcatgaaaccattttggtgcatttttagttgggaatggtacatttttgtaaatccacccagtgaacatgaaattgtacattgtgtataattgttcattagaaaggacagttttacatgaatattcatatatttattttgttttaatttgaattgcctgttcagggttccttatgcagagaaataaagcagattcaggaacaaccaaacaaccaaaccacaaccaggnnnnnnnnnnnnnnnnnnnnnnnnnnnnnnnnnnnnnnnnnnnnnnnngccttggtcggccgcctccgccccctcaaaacatttttctaaacacctttctgttggggcggcggggcgccccaaaaggaaaagggaaacttgggccataagctggttccctaaaagaaatcctgggccatgaaaaaagggcttgggatttcccccnnnnnnnnnncccccccgggggaaacccaagcttttttgaaacaaattcccgatgggagtttcggagggtcattaccgggattttatcaaacgggggtgcccaaggggaggcttcgaatataaaaatttaagcccccccggccgttggcccattcatatgggaaatagaggtggtgtaaatattaaataaaagcgattttctgcccggaacgtgggaagacgcccccccaccaaacgcgggtttggaataaacctttgaaattcgcccggggggaggaatataagaacaccatttgtgtcgcccttggcggacaaataaacatatatttcgccccacgtgcgagagaaacaaaccggcggggcgccgtacacacagacattcgttctccgactttattntgggcccacacacctctattataatactatacacacgacgtgtgctgtgaagagatacactcccaccacccgaggggagtatcgcgccctgtggcaaacacacacaaacacactactatattctctctacacataagatcaccccttnttatatagagagangaaacatatggagccgcgccg

SEQ ID NO: 439705 - DNA, 1685 bp, Homo Sapiens
  misc_feature (641)..(662): n is a, c, g, or t
  misc_feature (665)..(669): n is a, c, g, or t
  misc_feature (671)..(672): n is a, c, g, or t
  misc_feature (1130)..(1130): n is a, c, g, or t
  misc_feature (1604)..(1614): n is a, c, g, or t
tggatgttcagtcctatccataagggagctgcaaaaaaatcaaacaatagaatgtcagtcttttcctatccacgaaacaacgttatctgcctttctgggatatccatggataacaaacatagaaaaataattctttagataagatcaaaataactggaggttaccaggtgggtaagctgcctggctcagagcaggctgtttcagaggcatggccacagctacttgcaaagactgaggtagcacagagatgaggtggtgactgtgtggaggccagaaccagaccacacacatgctgttctgaatggatttaataatctaggtttaatcaaagcaatttgcatttggattttggaatgaccactccttgctaaggaagctatgtacttcatgctgtggaaactggcaaatacagaatgtagcttgtttgttttcttagccttgaagatgaccaggtagagagacagagtgagaccaacagtttttctgatttccctgctcctcctattccttcctaaaaatcagactcattgtgaccagtagtcttgaggactcaagctgaatgatagagaaggcagctcagacagaaaagaaaaaaagtacagaatttgagaagatcggagatgaagaaaacgtacaaaatnnnnnnnnnnnnnnnnnnnnnnatnnnnngnnatatctatgtacaacatggctgggacagttgaagaaactatacaatggtgttcagcattttccccttcccagatggactttaaggatgacagcatgaggaaatggagcaagaaacacaaaaattatatacaattacaagtgacagtcaaggagtttggggaccagggagtccagggatcctgctctctccattccttcctcaccaactttctcctatccaatttgaatgacagcctgaacactgaatggccagtcaggagaaaggcatatacacacctcatccccccacatgcacatcagcaagtctatcagtcattctcattgggccaaatgtttggcatatcagaatttgtgatgtgagagggcaagaggattacagaatcttgctctcttgagcattagttctcaccctggtcctctctgtcataactagcaagttgcgttcaataaaattctangccaagctggtggtaaactagattgaagaatgctggtcaacctgcaacccctttcctccacctgttccatgagtcaagcatggctacctctcctcatgataaaagagctgggttgctgagttctggggatgcagagatttctcagtcttcctcctctccctccctaaccactttccccagcttcctccaaggtgaatcatcttctaagaacctgttcctccagccctgcaggagtacctccgccccaggggctagctcagtttacccttctttctttttccctaaccatatacctggcatcagactgcatcttgaacatgggtcaccacatgtgcttgactgagcatgtttccctaggcctgcagttccgttggcagaagagcttttttaacagcttagggcccaaaggtagccttggaaaaggtggccctggtcaaaaggcaaggagccttccatgggctgctccctaaagannnnnnnnnnngaccctcaagaactgtgaattttataagggttccttggcccgaatttaaaatcccccaaacctcatttact

SEQ ID NO: 439706 - DNA, 441 bp, Homo Sapiens
  misc_feature (287)..(287): n is a, c, g, or t
  misc_feature (332)..(332): n is a, c, g, or t
  misc_feature (339)..(339): n is a, c, g, or t
  misc_feature (346)..(346): n is a, c, g, or t
  misc_feature (384)..(384): n is a, c, g, or t
  misc_feature (395)..(395): n is a, c, g, or t
  misc_feature (415)..(415): n is a, c, g, or t
ccatgacatatctatgtacaacatggctgggacagttgaagaaactatacaatggtgttcagcattttccccttcccagatggactttaaggatgacagcatgaggaaatggagcaagaaacacaaaaattatatacaattacaagtgacagtcaaggagtttggggaccagggagtccagggatcctgctctctccattccttcctcaccaactttctcctatccaatttgaatgacagcctgaacactgaatgggccagtcagggggaaagggcatattacacancttcattccccccacatggcacattcaggcaagtcttatcagttnatttctnattgggnccaaatgttttgggcattttcaggatttagtggttgtngaggaggggcnaggagggtttacaggattcntagctcttttaggggctttagttttt

SEQ ID NO: 439707 - DNA, 535 bp, Homo Sapiens
aaaaacgttgagaaggagagtgttttcccgtagcgctccaatgcaccttgcaaatcccaaaatgaacatccttcctccccccacaaggaagagccaaactgggtcaaagccgccgagatcggtgatggaagagatgttggacagaactcctttttcattccatgcccacagtccaattccaagaaatgttattcccaaaaaccaaaatatgacattgaagccaaatatgaagtatttgatgcaacaactgacttcaggacccttgtagtgcttcccggacatcctctgggttcatgaagacacttgccccggcagcccgagtttggagctccgaagcaccgttgctcggagcagcccggcggggagcaggagctcagggacaccgcacggggtggccgcgagaaagcagggaagccgcgcgctgcaagctcaagcctcgccgacgctagccccgaacacaaagcgagcgcccgcgtccgtgcgccaggcggtcggtccgtcggttcgtccccgggcttcgggcaaaggcggccgc

SEQ ID NO: 439708 - DNA, 672 bp, Homo Sapiens
cacagataataacttgagaaggagagtgttatcctgtagcgctccaatgcaccctgcaaatcccataatgtacatcactcctcccaccacaaggaagagccaaactgggtcaaagccgccgagatcggtgatggaagagatgttggacagaactcctttttcattccatgcccacagtccaattccaagaaatgttattcccaaaaaccaaaatatgacattgaagccaaatatgaagtatttgatgcaacaactgacttcaggacccttgtagtgcttcccggacatcctctgggttcatgaagacacttgccccggcagcccgagtttggagctccgaagcaccgttgctcggagcagcccggcggggagcaggagctcagggacaccgcacggggccgcggcgctggcggcctgggctcagccgcgcggggaccgaccggcggagagcggctcccgcacctccagcccctcgcgcgccgaggccgccggagccggggtggccgcgagaaagcagggaagccgcgcgctgcaagctcaagcctcgccgacgctagccccgaacacaaagcgagcgcccgcgtccgtgcgccaggcggtcggtccgtcggttcgtccccgggcttcgggcaaaggcggccgcggcagatgctggtggagacgccgctcgct

SEQ ID NO: 439709 - DNA, 2481 bp, Homo Sapiens
  misc_feature (641)..(641): n is a, c, g, or t
  misc_feature (646)..(646): n is a, c, g, or t
  misc_feature (778)..(778): n is a, c, g, or t
  misc_feature (920)..(921): n is a, c, g, or t
  misc_feature (1285)..(1331): n is a, c, g, or t
taccatacttttacacagggccaaaacacaaaatgttaaaagcacacaaacaaaaatgaatgagataatccccccaaacgtcaagttacataagaaaataggaagaaaaaaagttgacatagtatcttttaaaatatatcaaatcttaactgacttaaaaaatgatataaagtgcttgggccatgatacccacccagattctcattatcaacggatttatcttttccccctcccttccacccaaatttaattcagttttccttaagaaaaagtacagcatccctatattaataagaaatgaaaacagtgagtacaactgatatagatccattgacttttattacaaatgtacttgatcacttggcttcaaaaagtttaaaatcaataccctattttctgtatgccagtacaaagcaaactgttttacataattaaatacctaaaaatttgacaaaaatattaaaatttgatgaaaaacaattatataaaatccttaatctctctcttcaaaaaaggaggcagtcttcccactcctattatacaatattaataatattcaccatttttagaataggtagctaaattatatctttctgttagcatacaaaacttagactaatatatttgtatatactccagtnaagtntgtaaataccatctgattgcaatataatcaactatctttaattgaatcctaatttacacttatttaataatttgcatagtttgaaagggataaaggttattctacaactaattatcataggctattacagtnctacttttcaaggcaataagtatttgctcccaaatgaagtatatgtcttctttaggcaggggttaaaattactagcagctttctctattacctgaaaaatcaaattggaagttatccactctctctagatgttaaggcctgnnaaaacataatatactttccgcttggaatcaaatttcaccccctgcatgggtcaactagaaagtgagactttcaaggttttttatttccctgttggttttggtttctactctccatggctttttgagaagctggaaaacagtttgtcttttctgactagcattgtctttttttccatttggcaaatattcatctacctccaatctgtatctagtagaggaaaagccgacatggcttttcttatgaacttcctttgttgtcaaaggcatgtataatgatttctacagttctggttagttaactttagctccctctgtggctggatgactgctgcttctaacatcagcatgataaataggaggcacnnnnnnnnnnnnnnnnnnnnnnnnnnnnnnnnnnnnnnnnnnnnnnncaactccaaacacacacacatacataagcatttcaaatctggtggctgatctctggattaaattacttgacagtgtctctcattttaaagaacgtcaatattgcaatgcagttcaagttttcttttatacttaggcaaataatacagtttaaccaagctcttggaccttaattgtaagacaaagcagatcaataaaaataaggcatacttctcaggaattaagttttgtttgcttgtttttggcacatttgatcatactgtcttctatgaataacacatatggtcaaatataccatttccttatttgtttcagcataaacagggtttaccaactagtaaaataaaaacaaggaaaaattccaacataaaacactgatatatagaaactaggtaaagtaccgagcacctgggagggaagggtagggaaaggatgcaacagaagagggaagacaaggtttgggagggtgcttggggaggtaaagtgagatgcttaaaaaaagagcatctttacagtcacttagtcttttctatgatcactttttaagtcttaaaagatctgcatgtggatttctttttaaacccactgaccataaatcagacactggtttcaaaatcgtagttagattgtattaaactgttttagtgtaaagacaattaattgcacaatacatgtgcttcttgagccggtgggattccaagcagaatctgaagtctatagataagaaaggcttcactttaggtaactctggccctaaagaaaacctcatgaaagaactcgcatctcaaagaaaggacactttgcctaagtttgctgtgtttttgttgacttgcactacttattgctggctactatgaaacagtgatctaggagtactccaacaacctgtagtacaaggcttaactttaagaagctatagtaaacaagagacaaaatcaaagcaattctctttcctaattagtaacagcacagagaatgcagtcttttccatatcacagttaaagtacagtgaacaaaacagctcaacaaaccttaagacaaaaagtgcaggttattaatgtttacatgcagttgataagcattccaaatgtcacattatgcactgtaaaagctcaactttactatatggaaataagaaaaatgcacctctgg

SEQ ID NO: 439710 - DNA, 2723 bp, Homo Sapiens
  misc_feature (182)..(182): n is a, c, g, or t
  misc_feature (220)..(475): n is a, c, g, or t
attctccacgttgcgctttccgtcaagtttaatgggggctcattaggttcgattagtgtttaggcacttgacccggcatttgacgtgagtcacgtttcataatagtgacttcatgtccaagttggacaacactcaccttatccggtctattctttgattataagggattttgcgattcggcntatggttaaaaatgagctatttacaaaaatttacgcgnnnnnnnnnnnnnnnnnnnnnnnnnnnnnnnnnnnnnnnnnnnnnnnnnnnnnnnnnnnnnnnnnnnnnnnnnnnnnnnnnnnnnnnnnnnnnnnnnnnnnnnnnnnnnnnnnnnnnnnnnnnnnnnnnnnnnnnnnnnnnnnnnnnnnnnnnnnnnnnnnnnnnnnnnnnnnnnnnnnnnnnnnnnnnnnnnnnnnnnnnnnnnnnnnnnnnnnnnnnnnnnnnnnnnnnnnnnnnnnnnnnnnnnnnnnnnnnnttaaatgtgcatttctttaatttttaaaaatatacacaggaaaagccatgtgttttacataggaatacacacattaacaaagcatttcttatagttttccaaaactctattatatcagtccgaaatttataaattaaatatatcagaattcttaaagttaaaatgaattccctgaaactactggatatgctactttttccaaaatcaaatgaacagaggatatggatgtggtttgtgttaaataaggtttattgttagctttattgcctatagtctataagatgcaactttactgtgcctttgcaaacaggatacatttcttaaaaaattgatcaaaattttccatacatatagctctatatgatagattacagtgcaacactattctcgttacataattatagaaatactatagaacccaagagcacggggtaagcaaaataaatacaatcctgagccatctgaacaagatgatttgatgaatcctttagtgtaagtttagaaaacacagagaaggaaaaaaatacatgcatactgcagtcatgagcaaaatacatcaaacacctgttccttgctaggtgcaggtgggggcaatggtgaacttcagacacatgcacagtcagtcacactcccattttcttttgcttcccttcccgccccaacacagttcattccggccccttcccaaaacaaagatcaggcactaattcttagtgaaccgcacaactgccttgctggagaaggttaagtgactgctaaagtaagagtgtatgtaggtcctcacccataacatgaaacaaagcatgtgctgtaagccaattccagctgcttttgcctctttggaagtaaatgaagcatatgcccactacagcttgaaactgcagtggaaatgtcttgaaaacaaaattttgtttctcttgctatgtcttgaagtaaaatcaacagtggaaaattcatcctaaaactgcctcatctgctattaaaatacatttgtcattctatttttggtatctattcaattatagttcattaagaacggttcatgaagcttgtacctgcttatggtaaacatcagtgtaccacacaaaacctgccacacctagacaggcttatgaaacaccaaatcttctatgtgttccttgctaacattccctcaagaccacagcattctagtgttaccagagataaagtacgtatagttaagtgatgaaagaaaggtatttggtttgtgtcgtcaccttatacatcctagtgatgaaactaaccaaactatgcctccatgccttccctgaaaataacctgagtcggctgacgaaacagactgagcagcgtggctctcagtccactttatcagaggttgagctggaaaaccagagggctaatgtagtctaccagcagcttgtgcggataaccaagagttcttggctgttgcagtatccactgtcccaaaggctaagccactgaggtggaaatcaatcgcagcataaagaagactgaacttaagctgcataacctgcgagactacctggagaggacaaaagaggatcaggatcctcatttcccacaaaatgtggtgtgggttttagtgtctctatgcattagctgctacagagaagttaacatttacttcatagctttcttattttcaattaaatgctcacactcaaaaaatacacaccctatgaatatgaggtggctcttttcttcaaattttttaaaataaagaggcaccaatacccgttcatttatgtattagaagtctcgtataatcaccaataaaacagaaatagcatctgtgatcacacaacggagaaaaaagatcaagagacaaccttagccactgtaaaactgtacttgaacactcagatgctctggctaagtcagaatctaaagatttgctaataaggttttattggtttagcatagtcccatggcctttgtctataactgatatgtggaaacggttcccaaggaaatttaagaaaccattctgaaattctgcctttgatgtacattataattaaatgtgactgttataaacgttgcctctatcatattatcttttgtaaagtggaggcaaagagagacaaaaagcatcctcctggactgctgacatgcagaaagcatcagcgatgatagggttgtgacagcatttatggagtttctagggcaggggggacagaatgctgtatctcagcatctttggttaaggtctggcctctttaaatccacctctccctcacattta

SEQ ID NO: 439711 - DNA, 450 bp, Homo Sapiens
aaatgtgcatttctttaatttttaaaaatatacacaggaaaagccatgtgttttacataggaatacacacattaacaaagcatttcttatagttttccaaaactctattatatcagtccgaaatttataaattaaatatatcagaattcttaaagttaaaatgaattccctgaaactactggatatgctactttttccaaaatcaaatgaacagaggatatgggatgtggtttgtgttaaataaggtttattgttagctttattgcctatagtctataaggatggcaactttactgtggcctttgcaaacagggatacatttcttaaaaaattgatcaaaattttccatacatataggctctatatggatagggttacaggtggcaacactatttctcgttacataattttagggaatactattgggacccaggggccgggggtaaggca

SEQ ID NO: 439712 - DNA, 1065 bp, Homo Sapiens
  misc_feature (39)..(39): n is a, c, g, or t
  misc_feature (851)..(851): n is a, c, g, or t
  misc_feature (981)..(982): n is a, c, g, or t
  misc_feature (990)..(990): n is a, c, g, or t
  misc_feature (996)..(997): n is a, c, g, or t
  misc_feature (1004)..(1004): n is a, c, g, or t
  misc_feature (1011)..(1011): n is a, c, g, or t
  misc_feature (1020)..(1020): n is a, c, g, or t
  misc_feature (1025)..(1025): n is a, c, g, or t
  misc_feature (1028)..(1028): n is a, c, g, or t
  misc_feature (1043)..(1043): n is a, c, g, or t
  misc_feature (1049)..(1049): n is a, c, g, or t
cagccatgagcagctttactgcttatttatacaggatgngggagccacacccacttcctgggacatcacacccgtactgaagtccaaaaacatcatccctcccgtctttccactgacaagtccccatcccctacaagccccaaggaacctgaaagtgctgctggcagccgccagcatgacgaatccacagccttaaagcccacctgcctcactgtcgcccttccatttagctcggcctcatccttgacctctgtcccccaccttgaggaaactcgaggacttcttcccaggcagctgctccaggacacattccagttggggatgtctccccttattccctctgggtgcagaccatctctaagacttgtttccagatgccatcagcatctcctctccttgcctaccttttctctgttctcggggcgagttcctcactgactcccaggtcctgcccaactaaagcacctgggcctgtcatctatggggcctttaacaatgactccttgtgtttttctactccacccttcaatctcctgtggttgccgaagccagggtacctgtgtgaggagacggcttttggcaagcagtccaggggtctagatttcagagatgaccacctttcattacccctaattcccaccactgttcccatcgttttaagtcggacttcaaaccaattacctatgccgtcctttttccctcccctcacaggaggcaatactgcccctgaggagtcgtctcagtcagtgcaagaggcccggtcaggctccttctgggtgtctgtggtcacctgaaaccctccggggaacagattccgggccttctgggttcccactgttgtctggggctanaggcaggactggagccgtcacttgaccaggatggcttctcctcatcaggcgagggtggctgtgaggggctggagcagggcctggacaggatggaggctgcagctcaccccacggctctgctgctgctgcnntggtgaantggtgnngtagatnaatgganatcactcgnagaanaantctgggagtgggcanctttgncccagtgctctgggga

SEQ ID NO: 439713 - DNA, 1259 bp, Homo Sapiens
  misc_feature (635)..(653): n is a, c, g, or t
tctctgttgccatggtgattagataaaattcacgccaagtctccagggaaggatggaattatttcagacagtttctcacccctctcaagctacttctctctgtaacatgcctgggcaccatctcggggcttggacaggaagacaggcaagagaagaaggcaccagctcttttggggaagccttggggcgagcagaggaaagcgctcatcttttatttatgctcttagtgccaagtatgcctgaagctgccgagccagcaacacatcctgaaaacccacagcctcctcagtaacccagaaagccacctgggggaaaaaatggaggctcagggggtgaaaggcaaagtgcccttggtcaaggtcaaggcaacaggagttgcagatattgacccagggccttggctttaccctctcccaagtggagttgagcagggaaagaggttttccttgaaaagtgagagactcagctccccacaccaggtctatgtctggatccacttttcatcagggcttccctaggccgagattctcataggcgctaattaccaatggatgtaatttgttaaaaggattttcataaagggaattattgacctaattgttatttaacaccaccaattcacaaacctcagctcnnnnnnnnnnnnnnnnnnncacttcaatgtttcagagtatactgcagaaggcagggtctctctccctagaacaagccttctcatttctgtcaaaagtcccaattcccagggatgggagaaaggagccccgactccaggaggcctcttgcacggaagtctcagggaactgaactcaatgcctgtgaaagcgtatagtggctcattaataaagccatatctgatcagggaggcggagtgctttttcagccaaagcccagtggggggaacgataatatattttttatttactcaggctactcatcttagggtctcattaaaaatcccaccaatagagagggaggggctggggaacacacaatttttaagtgtacctcacatcacatcattctacgcaaaggtgagttaagagagagccttggtggtcaggagaggagccatatccccctaagaagctaaaccagaaccccccaggtcagtgcactttcagataggggactagcgggtctcggataaagagtaatcttgagtatcctaaaagtctccttgggtgtgggtggaatctggcctatcacaggggtcctgggaaaaatgggttgaagaagattttatgttgtaaaggtctgta

SEQ ID NO: 439714 - DNA, 1525 bp, Homo Sapiens
  misc_feature (470)..(507): n is a, c, g, or t
ctgcctaatccatttattagttgatggacatttggtggctttgagctcctgaactcatgtagtcctcctacctcagcctcccaagtaggtaggaatatagatgtgtgccactatgtctggctatcacataaatgtctttatatggatgtatattcctttgcttctgggtaaatgcctgcaaatgaaatggctgatcatatcataggttgtatgttttaactttttaagaaactgccaaacttttccaaagtggttatattgttcaacattcctaccagcagtgtatggaagtttcagttcctccatatcctcaccaacacttagtatggttagtctttttaattttagaccttctaataggtgtgtactgattcctcattatggttacaatttgcatttctctaatgacattgagcatcttttcatgagcttattgccatccatgtatcttctttgttcaaccgttgaannnnnnnnnnnnnnnnnnnnnnnnnnnnnnnnnnnnnngttactgatactattaatatcctttattctggatacaaatctttttcatatttatgtttgcaaagattttttcttgctctttgacttgtcttttttataacagtgagttttgaagagaagtttttcatttcaatgaagttcagtttatccatttgttctttatgcttttaaatattttttctgcattttcttcaggaagtttcatagtttcagggtttatatttatactgatgatttatgtaaatttttatatatgatatggaggtatacatctgagtttattattttcaagcaccagtagttgaaaaggctatctttcttcacactgcagtgcctttgggactttgtcaaaagtcagttgtccatatatgtgggggtttccccacctggagtttatattctgttgcattgatctgtttgtctgctttatgccaatacctcttttgattacataaactttataataattcttgaaatcaggtagtgttaatccttcaactttattttcaagagttgttttggctattctaggccctttttatttcaatatgagttttagcatcagtttgtcagtttctcccaaaaattctgctggatttgtggttgggattgctgtgaatgtgtagattaacgggaaaatttacatcttaacaatgttgagtctttcaatctatgatagaagtgatctctctttaggccttctttaatttctctcagcaaaatttcatattttttgttgtataggtctttcacatgttttgtcagatttatctctaagaagttaatatttgttgatgctactttaaagggtattaaacctttgaaaatagtctgcgatggctcatattttggattcccctccctgcaacttggcaaactttatttccttttagaaccttattattttttcatttgggtttccttaaaagattgttttgcccctttctcaccctcgctataacatcctccctgaggccacgccgtgcggcttcctgcccgtgatccccaccccttttgg

SEQ ID NO: 439715 - DNA, 694 bp, Homo Sapiens
  misc_feature (541)..(541): n is a, c, g, or t
  misc_feature (570)..(571): n is a, c, g, or t
  misc_feature (635)..(635): n is a, c, g, or t
  misc_feature (647)..(647): n is a, c, g, or t
  misc_feature (662)..(662): n is a, c, g, or t
  misc_feature (671)..(671): n is a, c, g, or t
  misc_feature (685)..(685): n is a, c, g, or t
cttctcatatttttatttaacatccacaatgtgatttaagatgtaatcaacataaagcttgattgcattattttgcatgctgttttccaaatccagcttcgtgtcacacctacagcacatctcactcaagctggccacatccccgccatccagacgtaaaacagtcacaagacagggcaggcagggccgcggaggaggctggctggggccatcacggagtgcccatcctgcactgtggttcccagcaagtttctttctcctggcaagaagcctgtcccaggctggcaggggacagcgtgaggtgcagcctatggactgggaaaggggtgtggaagggccacacctaagtcctaaaatccaggcccaaaagtggcccaactcacttctctgactttaatcacacagccatacctggtggcaaaggagtattggaaatggagttcaggctgggtagccacgagcccaggaagaggggagaacagacttggagagggcaggagtctctggccaccaggggctaaagagcctttcgatgaggccntactgtggggtcctgggctcacgacccannggtgggtggcctaaaggtgccctctgccacgggcttagccaccccaacaagaggatggggtttncgtgcccaccgngacgtgcctgtagcncttggtgancgagaatttaacantgtttttgt

SEQ ID NO: 439716 - DNA, 888 bp, Homo Sapiens
ttttttttctgtacaggctcatataatagaggggacttttattattttttcagagaattcggatagccatagattatacagagccatttctcagcactcttttccttccacttaagaagctggaatacaacatgatgaggatgatgccaaaacaagactgctggttcatatcatctagggtacaaatacacacttaatcacttgacactttactgaatgcaaagcaagatttagcatctttgccctcgttgtacagagctgaagcaggagaccagggaggggaggactgcatggttttccttggcaggggagttgtgcaccctgcagtcctgtggtgttgtgggaagatcagcccatgttctgtcggttcccatagcccctaggatgggtgtccttccagtcatcccactcccgggctctgtggagtgtttgttcatcatcctcttcctccttttcttcttgttcttcctgttgctgagctgcttttctgaattcctctggtgctgccttggctattccctgatccggtaatgctccatatttccgatgttgctcataccagtcactcaccgtcatagttggcagacttggataaccagctccaaatactttggcttgagccatgttccgagtgagaatgaagggtttcactggaggcctctcctggcgagatgagttagaagttgatgcctctcttgaagagtctctttctctcaggatctttatttcctggtcaatgctctcaatctcttctaagctgatatcaatccacctctgaaggtgaagaagataatattcacgaacacgctcatcatctgcttgaccactttccacagcagatttcattgcagacaacctatgctccaactccttcttctgcttgtatct

SEQ ID NO: 439717 - DNA, 1155 bp, Homo Sapiens
  misc_feature (66)..(66): n is a, c, g, or t
  misc_feature (82)..(83): n is a, c, g, or t
  misc_feature (101)..(101): n is a, c, g, or t
  misc_feature (1073)..(1109): n is a, c, g, or t
ccattaacccccctaagggatggggtggtcccttcccagtcaattcccccatttcccggggttttnggtgagtgttgtcatnncatcctctttctctcctntttcttctgtttcttcccgttgctgaagctgcttttctgaattcctcttggtgctgccttggctattccctgatccggtaatgctccatatttccgatgttgctcataccagtcactcaccgtcatagttggcagacttggataaccagctccaaatactttggcttgagccatgttccgagtgagaatgaagggtttcactggaggcctctcctggcgagatgagttagaagttgatgcctctcttgaagagtctctttctctcaggatctttatttcctggtcaatgctctcaatctcttctaagctgatatcaatccacctctgaaggtgaagaagataatattcacgaacacgctcatcatctgcttgaccactttccacagcagatttcattgcagacaacctatgctccaactccttcttctgcttgtatctctgtattttagcctgtctttgagatgccatagcaacgagactaggataagccatggaggaattggcagtgtgattttcagcagagttgttcatggttttgggcagctcaaactctgccacatgatagcaatggcactgagttaagtagtttataaagtgttctcgagcccgctgcaaatgatctagacgcttgctggggttgacttgtttcatggtgagggctccttgaaacgctggcaccaaaaggtacttcaggtcggtggaagcaatctcttccaaatcttcatttcggctgaacaagtcgagctgcgataacatttcggcagccttctcaaggaggtccaagcccttgaacaccttctcctggactatccgggaaccggcgggttcagtcgccacttctacttcgtccagtaactgtctaccagtttcgaacagctcggggagccgcggcagctgtaactcgtcctcagcagccatcttggggagagagccgctctcgacgaattcgagctcggccgatttggcctgatnnnnnnnnnnnnnnnnnnnnnnnnnnnnnnnnnnnnncgccgccccgcgtgagctccgttcccctatagtgatctatacatct

SEQ ID NO: 439718 - DNA, 882 bp, Homo Sapiens
  misc_feature (84)..(84): n is a, c, g, or t
  misc_feature (155)..(155): n is a, c, g, or t
tccatcggaaataaaagggcccagagcttctgctggaagggatgcctggggcttcacattatgaccctgagaacagattgaccnccaagatctcctttccggggaatgaattccgaaacatctcgtacagtgcaaggagttttactattaacccnctggataagaaaattgatgtcttcaagtttaactcctcaaagcttcgtgttaataagctgattctccagctatgtatcgggaaccatgatctatttatgaggagaaggaaagccgattctttggaagttcagcagatgaaagcccaggccagggaggagaaggctagaaagcagatggagcggcagcgcctcgctcgagagaagcagatgagggaggaggctgaacgcacgagggatgagttggagaggaggctgctgcagatgaaagaagaagcaacaatggccaacgaagcactgatgcggtctgaggagacagctgacctgttggctgaaaaggcccagatcaccgaggaggaggcaaaacttctggcccagaaggccgcagaggctgagcaggaaatgcagcgcatcaaggccacagcgattcgcacggaggaggagaagcgcctgatggagcagaaggtgctggaagccgaggtgctggcactgaagatggctgaggagtcagagaggagggccaaagaggcagatcagctgaagcaggacctgcaggaagcacgcgaggcggagcgaagagccaagcagaagctcctggagattgccaccaagcccacgtacccgcccatgaacccaatttcagcaccgttgccttctgacataccaagcttcaacctcattggtgacagccgtccttcgactcaaagatactgacatgaagcggcttccc

SEQ ID NO: 439719 - DNA, 1194 bp, Homo Sapiens
  misc_feature (511)..(511): n is a, c, g, or t
  misc_feature (520)..(755): n is a, c, g, or t
  misc_feature (774)..(788): n is a, c, g, or t
acagagggtggcataatctgtcctaattttaagggatcactggctaaccagggtggcgttagaacaaagtaggacgcagtaacagtggaagcaaggagacccgctggagaagtgctcctggtggtggtggagctggaagaaatgagcggcttaaactaaggcagtgccataggaaagtagaattaaggagcttggaatgtcaaacgtaggactgacaagtctaatcaggaggaatcaaagataactcatattttctatattgggtgattgggtgattaaattaggtctttaaatgttgaatttgacttgcctataagaaatagctgtgaaaatgtctcagactcttgaaaatataaatgaaaagctaaggagagatctaggctccttctaacagttttgaagacagttaaaaccttgaaagtgcatgagaggattcccagggcagaggctcctcacctccttcaagtcttcatgagctataagagtatgcctcttggggccgggcgcggtnaataacacnnnnnnnnnnnnnnnnnnnnnnnnnnnnnnnnnnnnnnnnnnnnnnnnnnnnnnnnnnnnnnnnnnnnnnnnnnnnnnnnnnnnnnnnnnnnnnnnnnnnnnnnnnnnnnnnnnnnnnnnnnnnnnnnnnnnnnnnnnnnnnnnnnnnnnnnnnnnnnnnnnnnnnnnnnnnnnnnnnnnnnnnnnnnnnnnnnnnnnnnnnnnnnnnnnnnnnnnnnnnnnnnnnnnnnnnnnnnagaccgagactctgtctcnnnnnnnnnnnnnnngagtacacctctgcctgcaaaatgttacattccatatcagagcgttcttcagcttccaaaagtatttccagagacctctacctgtttgggtgccagtaagcctcccctgggaaggtgcctgcattttggtagtcttctggggacatcagcttaccccgtcctgagatagcagtgaacagagttttcaacaagctagctttcaattaacatcaaaattcagcattaaagttcttttatctcatttgttctgttttaaaatagttgagatgaggtacatcagtgtttatccagtttataatcttttgtagactgttgtgcttgtttgcttacgcctgttttgttctgtgctttttttaggttttgtgttcagtagttcttgaccagctctgtgtgcttctttgtgtcc

SEQ ID NO: 439720 - DNA, 2260 bp, Homo Sapiens
  misc_feature (7)..(7): n is a, c, g, or t
  misc_feature (9)..(9): n is a, c, g, or t
  misc_feature (29)..(30): n is a, c, g, or t
  misc_feature (32)..(32): n is a, c, g, or t
  misc_feature (43)..(43): n is a, c, g, or t
  misc_feature (50)..(50): n is a, c, g, or t
  misc_feature (71)..(127): n is a, c, g, or t
  misc_feature (129)..(132): n is a, c, g, or t
  misc_feature (175)..(176): n is a, c, g, or t
  misc_feature (191)..(193): n is a, c, g, or t
  misc_feature (208)..(208): n is a, c, g, or t
  misc_feature (217)..(217): n is a, c, g, or t
  misc_feature (219)..(220): n is a, c, g, or t
  misc_feature (222)..(222): n is a, c, g, or t
  misc_feature (224)..(224): n is a, c, g, or t
  misc_feature (227)..(228): n is a, c, g, or t
  misc_feature (230)..(231): n is a, c, g, or t
  misc_feature (241)..(241): n is a, c, g, or t
  misc_feature (283)..(283): n is a, c, g, or t
  misc_feature (299)..(299): n is a, c, g, or t
  misc_feature (305)..(305): n is a, c, g, or t
  misc_feature (314)..(314): n is a, c, g, or t
  misc_feature (413)..(413): n is a, c, g, or t
  misc_feature (422)..(422): n is a, c, g, or t
  misc_feature (491)..(491): n is a, c, g, or t
  misc_feature (562)..(562): n is a, c, g, or t
  misc_feature (1490)..(1650): n is a, c, g, or t
  misc_feature (1738)..(1844): n is a, c, g, or t
  misc_feature (1946)..(2064): n is a, c, g, or t
ttaacantnttcaaaaaaatctttatctnnanattttattatnaaagtanaaaaaaaatgaatttaaaaannnnnnnnnnnnnnnnnnnnnnnnnnnnnnnnnnnnnnnnnnnnnnnnnnnnnnnnntnnnntgccattccttcttggccttcattaacttaacctagggttatnnttcccactgggaagnnnggggatagataagtnatataatananntntnggnngnnaatgggattnacaattaccttcattattctaatagtttcagtgaggatttcnatactcaccgactggnctttcnttcctgctncttttattcttaattttgattcattttgggagtgtggtgattaatttttttccagaaagggcaaatgagcagtacattgtatatcacagaatgcctgtnacctttacnatttggatgagtagagaaatcttgggctacaaaactacagacattgctccattccagatggcatttaanatgtgtagaagaggatcttcagtcttgtgacttttaaaattttttagatcaaccatgtttcttctattaanacgagttattgtttattgggaacttctatttagtcaagggataaatctctgtaatcagcctttttgatctgcaccttttctcttactatatttgtcggagggtgctttttatcttttgctctggtgctttttgttcatcctaactttatttaagctgcagagaatcctttaaaagaaagcttttaaagcacaatatataacatttgatgaaagcagttctgatctggataatgaacaaaaagtgggggaacttccctccatcttcgctttgtggactcatgagaacccacaggattctgaaaagtagttcagtattcactgttcatcatggattcaattttctttagtgctatgactatttactatttctgactcaaatattaatttagcttctccctttcttttctcactcttattttcctgccctcttgccatcataataccctgctgcaccatagggggagcaaaagcagatattttctaatattttttgttctataagcactggaagaacaaagtccttctttctaaatgcttcaggacattgttcttctctcattctgcagaactgtctgtttcaccagcctcatgctgatttttgctttattcactaagaaagaaaaactttaattgaagtataagataaataaaaaatgcatactccatagagtacagctcaaaaacgatcagttatccccatcctggtcaagaaaaacaagaccaccagcacaccataactccctttgtgaactcccccattccattctgctcaaagatatgttttgcttgtttttgaactctgtaactgggaatcctacagcacatcttttgttggctggttgcttttgttcaacattatgtttgtgagattccttcaaatcattataagtgtagcaagttagctcatttccttgctatagagtgtcannnnnnnnnnnnnnnnnnnnnnnnnnnnnnnnnnnnnnnnnnnnnnnnnnnnnnnnnnnnnnnnnnnnnnnnnnnnnnnnnnnnnnnnnnnnnnnnnnnnnnnnnnnnnnnnnnnnnnnnnnnnnnnnnnnnnnnnnnnnnnnnnnnnnnnnnnnnnnnnncaactttagtagatactgtcaaacattttcccaagcggttgagccaatttgcatcagcagttcttgttgcttcacactgtcaccagtnnnnnnnnnnnnnnnnnnnnnnnnnnnnnnnnnnnnnnnnnnnnnnnnnnnnnnnnnnnnnnnnnnnnnnnnnnnnnnnnnnnnnnnnnnnnnnnnnnnnnnnnnnngagttttaaaagattcttaagcttatattaactatcaaattaaaaagaatattttaatatttctttacaaaatgaatctatccactactcctgtcccctgcnnnnnnnnnnnnnnnnnnnnnnnnnnnnnnnnnnnnnnnnnnnnnnnnnnnnnnnnnnnnnnnnnnnnnnnnnnnnnnnnnnnnnnnnnnnnnnnnnnnnnnnnnnnnnnnnnnnnnnntttcacaatgagtttatctaggccaattgcagagaactgtcagactctgaatactgctttcagctcttccacagcttacttaagtaagtgctgatataatatccagcaggtggtcaaaggtgttagactcatttcatttccccaggaaatcccaggaggtccatcagatctagggtagaagagggtaagggacttc

SEQ ID NO: 439721 - DNA, 1871 bp, Homo Sapiens
  misc_feature (53)..(53): n is a, c, g, or t
  misc_feature (1782)..(1782): n is a, c, g, or t
  misc_feature (1860)..(1860): n is a, c, g, or t
gactcttcccaaaaacttttttaaagcttgagagctgagacttcagcatgagnatggagtgtgacagcttggtctgctctggcatcagaagggagggaaagtgagtccttggaggtcttcatactccaggagagatcccaagagaccatgcaagagtggcaaccaggcctctgtttgaccctcttgcggcatcttggtgctaagtggggtgaagggagagaacacacactctgcctggtccccgccgggctctgcaccccggtgtcctcttcccccacccatgcctcccagcagaaaactgtttcccatcagcagctgcagaatgagatcatgtctggcctgttgcaagaaccagaatgaaggatggagcagaagttggattggggcggcaagaagggagtaagcagcctcaggccagcacgccttacagcctggggaggagggaaaggagaggtctccctccctcttttctgagcgttgtgtttcccttcttctctcattgggagagggatgggatgatggcgagagaaggtgtcatagacgggaacccaagccggtgggaaggagagctgtgggcttggggggcgggggagagggagaattggcaataggatgccatctccatccatagagccagggacggactcctgtcctgtaactccattcctcaccccactagccctgggagcaaatcttagttcactgtgatccactgagcaagtcactaaactttcccaaggctcagtttccttatctgtgaaacagacaggctgacccctaacagagatgtagtgcaggcagtcagagaggtgagggaggcaaaggcacggcgcaaggcacacgggaacgcaggcgcttaactgtccacaccacgcggcgctctcccaaccccggcctggcgcgctcaccggttctcagccaccaggatctgctccagcaggcgcgcggcctgcacacgcgtctccaactccggcgcctgcagcagccgcaacagcaggtcgaggccgccatcgaggcggatggcgtcgcacagaccctgggctacctcgcggcccacggccggcagcagccaggcctcctccaccagttggaagacctcggccaggccggcgcccacggcccgcgcgccgcccgcctgcttcagcgcggacaaggcctgctgcagctccggcagcgcgcgctccagggcgtcctgcacctcggtgcctgcccccggcgacacttcgcggggcccgcggccacccgcagcccaccatgggcccgtgccaccgcccccatctggcccaggcaccgccagccgctcggcgcccggccgtgggcccgacatggcgaagaagcgacacagcttgtaggcggagagaagcagcgtcaggaccatgggcgcggggccgcgggggacatccccggcctggaggcggggccacgcggagagacccgggttttgggaaaagagggacccgagaggggtcggggaaagaagatggagggggaggaatggagagaagggtaccaggcaagggtgccggtcagaagtttgggggaggagtgtcggcaggatcgggggagcggttggcaaaggtgatgcaggcccagatgcagggagtgggcgaaaggagagagcgagcaggcgagggatggctccggacgccgtagggtagaggaggcggcggctggaacaaagcgtggcctgggcacgggctcggctgagctgggagatgctcggcagcagccacgccccggaggagcagcggtccccgggccgacgccccgcctctgggtccngcggggctcctccagcctcctgcagccacgccccggaggagcagcggtccccgggccgacgccccgcctctgggtccngcggggcatcc

SEQ ID NO: 439722 - DNA, 1138 bp, Homo Sapiens
  misc_feature (11)..(11): n is a, c, g, or t
  misc_feature (14)..(14): n is a, c, g, or t
  misc_feature (649)..(689): n is a, c, g, or t
  misc_feature (795)..(852): n is a, c, g, or t
  misc_feature (985)..(985): n is a, c, g, or t
  misc_feature (996)..(996): n is a, c, g, or t
  misc_feature (1062)..(1062): n is a, c, g, or t
  misc_feature (1074)..(1074): n is a, c, g, or t
  misc_feature (1080)..(1080): n is a, c, g, or t
  misc_feature (1082)..(1082): n is a, c, g, or t
  misc_feature (1098)..(1099): n is a, c, g, or t
  misc_feature (1108)..(1108): n is a, c, g, or t
  misc_feature (1116)..(1117): n is a, c, g, or t
  misc_feature (1119)..(1119): n is a, c, g, or t
  misc_feature (1124)..(1124): n is a, c, g, or t
tcaccaggtanttnttttcttttcgaaaatggcagggaaaacccccccaacccactcctttcacacttgtgagagctgcatgagctgaaagtgacttttccaaaaacttttttaagcttgagaagctggagacttcagcatgagactggagtgtgacagcttggtctgctttggcatcagaagggagggaaagtgagtccttgggggttttcatactccaggagagatcccaagagacatgcaagagtggcaaccaggcctttgtttgacccttttgcggcattttggtgctaagtggggtgaagggagagaacacacactttgcctggtccccgccgggctttgcaccccggtgtccttttcccccacccatgcctcccagcagaaaactgtttcccatcagcagctgcagaatgagatcatgtctggcctgttgcaagaaccagaatgaaggatggagcagaagttggattggggcggcaagaagggagtaagcagcctcaggccagcacgccttacagcctggggaggagggaaaggagaggtctccctccctcttttctgagcgttgtgtttcccttcttctctcattgggagagggatgggatgatggcgagagaaggtgtcatagacgggaacccaagccggnnnnnnnnnnnnnnnnnnnnnnnnnnnnnnnnnnnnnnnnngaattggcaataggatgccatctccatccatagagccagggacggactcctgtcctgtaactccattcctcaccccactagccctgggagcaaatcttagttcacnnnnnnnnnnnnnnnnnnnnnnnnnnnnnnnnnnnnnnnnnnnnnnnnnnnnnnnnnncagacaggctgacccctaacagagatgtagtgcaggcagtcagagaggtgagggaggcaaaggcacggcgcaaggcacacgggaacgcaggcgcttaactgtccacaccacgcggcgctctcccaaccccggncctggcgcgcncaccggttctcagccaccaggatctgctccagcaggcgcgcggcctgcacacgcgtctccaactcnggcgcctgcagnagcggnanagcaggtcgaggcgcnnccggggggntgggtcgnnanacccnggctactcgcggcc

SEQ ID NO: 439723 - DNA, 1372 bp, Homo Sapiens
  misc_feature (8)..(8): n is a, c, g, or t
  misc_feature (18)..(20): n is a, c, g, or t
  misc_feature (41)..(41): n is a, c, g, or t
  misc_feature (47)..(47): n is a, c, g, or t
  misc_feature (62)..(62): n is a, c, g, or t
  misc_feature (73)..(73): n is a, c, g, or t
  misc_feature (157)..(157): n is a, c, g, or t
  misc_feature (171)..(171): n is a, c, g, or t
  misc_feature (198)..(198): n is a, c, g, or t
  misc_feature (226)..(226): n is a, c, g, or t
  misc_feature (231)..(231): n is a, c, g, or t
  misc_feature (243)..(243): n is a, c, g, or t
  misc_feature (291)..(291): n is a, c, g, or t
  misc_feature (382)..(382): n is a, c, g, or t
  misc_feature (434)..(434): n is a, c, g, or t
  misc_feature (482)..(482): n is a, c, g, or t
  misc_feature (589)..(620): n is a, c, g, or t
  misc_feature (666)..(666): n is a, c, g, or t
  misc_feature (885)..(885): n is a, c, g, or t
ttgcattnacttggttcnnngcagcctttgccttttgggtncaagtnattcttgtatctcancctcctgattngctgagattatagaaatgcgctaccatgcctgtgataatttttgtatttttagtagatatgtggtttcaccatgctggccaggntggtccccaatttntcgcctcaagtgatctttttgccttancctcccagagtgctaggattacaggtgngagtnaatgtgcccggnctggatcttttattgtttgtatttctgttcatttcttccctaagaaancccacgtttttgtgggcaggacctggaatcctattcagttatacagccccgcttcgtccactgctccccttcagagtctagtgccctgganatcataggtattcagtacctcttgctggcttagggacaggaggatgcctganggccagggtgttcctctgaagcagtggtggctgagctttttgaatatntgcattgtgctaagggttaaatacccaggcagtactggtggggaagggccccagaagcaggcccagactcaggtattgttaaagcagagtcatctttgctctgaagnnnnnnnnnnnnnnnnnnnnnnnnnnnnnnnnaattgggggaaaccttgtcctaattggcatctttattgtggcaggnataggccaggcagggctgggggagtgtgaagtctgtgaagggaggtggcctgggggcccccccacacaatgcctgattgtgcaggcataggtatgaacacattgcagcctgtgtgcacccacagggtgaccacgagcaaggcctggggacgaggactacgaggcctgcagctgggtcctctttttttccctcctcacccccacccagtacccacgtganttggggcacatcccagtaacaagcagtccttgtggaagagccttcatgaagacctttgctgggagtggcgggcagggatctgcggggagcgttgctggttcaagctggggctttcctattggatgatgtcctgtgaagggtagatcctggagggacagacaggtgtctgatctttggcaggcagggatgtctcatttgtgcattataggcattcagtgcctcttgctggcttaggcttcataatggctcatttgtacatcatagcctttagtacctcttgctgatttggttaacccagttgttttaccacgatattggattctcatgccatttctttcaggaagatcgggagatcattcggtgatgggaccgggacgcttgtctttttttcaacccggtagcccaatctggaagtggagtcaccacagtgatccattgtgttttactgtttgcaatttattaggtgccctttaaatccaggtatggg

SEQ ID NO: 439724 - DNA, 926 bp, Homo Sapiens
  misc_feature (6)..(6): n is a, c, g, or t
  misc_feature (8)..(8): n is a, c, g, or t
  misc_feature (38)..(38): n is a, c, g, or t
  misc_feature (44)..(44): n is a, c, g, or t
  misc_feature (47)..(47): n is a, c, g, or t
  misc_feature (56)..(57): n is a, c, g, or t
  misc_feature (67)..(67): n is a, c, g, or t
  misc_feature (76)..(76): n is a, c, g, or t
  misc_feature (86)..(87): n is a, c, g, or t
  misc_feature (91)..(92): n is a, c, g, or t
  misc_feature (97)..(97): n is a, c, g, or t
  misc_feature (148)..(148): n is a, c, g, or t
  misc_feature (150)..(150): n is a, c, g, or t
  misc_feature (153)..(154): n is a, c, g, or t
  misc_feature (158)..(158): n is a, c, g, or t
  misc_feature (167)..(167): n is a, c, g, or t
  misc_feature (309)..(309): n is a, c, g, or t
  misc_feature (311)..(311): n is a, c, g, or t
  misc_feature (314)..(314): n is a, c, g, or t
  misc_feature (317)..(317): n is a, c, g, or t
  misc_feature (320)..(320): n is a, c, g, or t
  misc_feature (333)..(333): n is a, c, g, or t
  misc_feature (344)..(344): n is a, c, g, or t
  misc_feature (347)..(348): n is a, c, g, or t
  misc_feature (350)..(350): n is a, c, g, or t
  misc_feature (354)..(354): n is a, c, g, or t
  misc_feature (358)..(358): n is a, c, g, or t
  misc_feature (367)..(367): n is a, c, g, or t
  misc_feature (395)..(395): n is a, c, g, or t
tgagtntngtttttctaatgatatatactcttttattntcaaanttntcttgtttnnttggtaattnatatcattnctctaccagnntttnnttgtnaatctggatcttcaaaggtccataattcattcccaaattatcttatacctnanggnnaggnctgatactnctgtgtaggatgaaatggcatggagatggagtaatttgcagagaatgtatacagagaaagcacctcccacaataacaattacctgtgcagaaaaatttccttttgttcacttcttgctaaccacatatcaccataacatatnanganggnggnaaacctacctctntgcatatagcngcnntntgtncttnatccatgcncgtttctgttaccacatcagtgagtgancccccagcaaggtattccatgaccacaaacaattcatctcctaccaggtaactaaaaatacaacataccaaatacagtcacacttttatttttcctaaacacatggtattctatgttgaagaattcaaatattaaacaccctaacaataaaactagagctggtagcttgagagttaggaagaaaactggaaagctgctacgtaacagcacagaaaaataactgaagttatgatcctgaatcattttaaagttacagtttgcccacaactgtagtttgagtatgcacatagctcattctgattaaaataaccctacaatatagaaattactagtcctgttttagagataaacagacaaaggcttggagaggtgaagtgactcatccaagggcacacagctattaataggaagtgacagaaccagaatatgaagccaaggatcaacgattccgaagcccctggcttatcttaaccaccacactatgctgacttgaaatgttattttaaaaagcagggaactgtacctgaaaag

SEQ ID NO: 439725 - DNA, 1398 bp, Homo Sapiens
cgtcgcggacagcaggtgagtcgggttgcgtcgcggacgagcgggttacagccggagggagtgggacgcacaggggagcgatcgggggagcgtagctcgggggggtgcagacgttcgcgcaggctcctccaagcttcctattcctgacaggactactggggatgacaggctaccgggccaaccgcgaccggggaacccctcacgcgcgccgatcattcgggggctcagcacgcgccccgtgcgctgagtcccctgtcatgagtggctccattgcgaggcgtttcgggccacgaagcaggaccgggggccgcactccgggtccccgccctgccctcgccgacctcccgcgcgtggaagggggacggcggcggcggagctccccgccacggagaaccccgaaatggtcatttcgaacgagaggagtgtggcctggggtgtctggtttaacagccccccgcgccgaaaggctgttcgccgaggaggggccgccggggagggagcccgagcgcggcggggcgagaccggtccccgcccggcgttgcccggcccgagggacggcggcgcccccaggaccctccccagcgcggccccagctcgctccgggaccgcggggccaggccgggcgggagcgcggggacgtacagcgggggcccggcccgggcggtcttcctccctcccgggccggcctgcgccggcggcggcggccccagtctccgggctgctgaggggcgcccggccgcttccacggcctcccctccgccctgcggtcccgccgcctccggggcctcctgggaccctggccctcgccgggcaggacgccgccagcgctgaaggcgcagcccggaggccgcgcggatgcagatctgtggatccagcgtagcatctgtagcagctgggacatcattccaggttttgggcccggtgtgttggcaacaactggatctgaagatgacagtcagggtgctttggggtggtctcagcctgctccgagtgctgtggtgcctccttccgcagacgggctatgtgcacccagatgagttcttccagtcccctgaggtgatggcaggtaaaactccgcatgtgtggctgagacaagctgcagcagagtctgcttgagaagctgacgggagactttgtggggagggagtagcatgtctgggtagatgagtagtaaatccacaagcagagcagcagcctctctctctggggtaagaacttggaagtggggacttcatatctccttcccgagtggtgacactgaccttctgggtaatgctaataaaccaccagtctctttgatgtatccctgcttggaccaacaatacaggtcattcagaattagagctgtgtggacttcccatggaacacttttttagagtaggcttccccagtgttggc

SEQ ID NO: 439726 - DNA, 752 bp, Homo Sapiens
cggcctagagcacccattgagttcttccgtccccttggtgatggcaggtaaaactccgcatgtgtggctgagacaagctgcagcagagtctgcttgagaagctgacgggagactttgtggggagggagtagcatgtctgggtagatgagtagtaaatccacaagcagagcagcagcctctctctctggggtaagaacttggaagtggggacttcatatcctccttcccgagtggtgacactgaccttctgggtaatgctaataaaccaccagtctctttgatgtatccctgcttggaccaacaatacaggtcattcagaatgagagctgtgttggacttcccatgggaacacttttattagagttaggcttccccagtgtttggcaagagcttccatagggctgtgatctgagatcatgaaacttctcttctgtagattcaagagaggggtaagggaacccagacctgggacactcactcatctgttaggcggtgtgggacacatcatgaggctggttgcctggcccataccgtgtcgcccaaaggccttgaggcctttcagatgtgatgggcatgtggggtcatactgatagtttaagaccgttgcttgagctccagtcatcaagagtacaggcaggctttggcggcaacaaaggagaagggcgttgcctgggtgtttgaggggatatgggcgagggtgggtgctagatggctttgagtatgaccccgcgcgatacgtgcgcgtggggcca

SEQ ID NO: 439727 - DNA, 1445 bp, Homo Sapiens
  misc_feature (883)..(883): n is a, c, g, or t
  misc_feature (900)..(900): n is a, c, g, or t
  misc_feature (942)..(942): n is a, c, g, or t
  misc_feature (998)..(1044): n is a, c, g, or t
cggcatttactaaacagctaagtaccttctatgagcaaggcactgtacaagagctgttggggataccaaaataatacaatctacgatctactaaagttacaagccggacagtatggtgactggatgttcagaaaagaaaccagatgacattattatggtacaccaaaaaagccccccaaaaaccgtactcaactgtcacattcttatggaatacaatttttacagattgtatacaatttgcatgtgaaattctgcttactttttgactaggtatgccactaatgggtatgtttaataaagatattttatacttcagatgtacagaccaggtccggttaattttagccaacaatgtattgttgaaaaagacgctgatattttactgcggcaaaccaccattaacataaattttaaccacagtttgagtattttattaggaataagccttgaaacttgaataggactagtattcctaacaatttaccgtttcataataaaggctgtctcactcttaagtggaaaacgtattatgtcctacttttataaactttggttgaactaaataaaacagcaacatgtacccaacgtttttagactgttttattcagtaccataaacattcactaaactatacagagctaaaatcatgcaaaagattgcaaaacaaactgccttgggaaatttccagtctaagctaaatggaccaagtataggattgaattttaagaagttggtgggaagattccagctcttgtactcacaggtaaggtcctaggattctatttgttgaagtgtctgcagaccctctccctacagcaggggcgtggagcaaatgtgcattcaggaagtgcttattagtccccccaaaacctttttcgtgacnacagacggatggaggcntcagacgactccggcagtaggaccctgaaccaaatgcctgantgcgctcgaaaggctcgtctcgcaggagctggcgagtggcacgggcttcggtggcnnnnnnnnnnnnnnnnnnnnnnnnnnnnnnnnnnnnnnnnnnnnnnnagttccgtgcccagggcactctgtggctcgattcatgtccccgccctcccacctgagcacactgggcagagactgcggcatcgggccagtcgcgcctcctcgtccgccctgggcaggtcgctgggccccaggccgctttctacagctcctttaataaaatggacagcaggggtcctaaccagacgtgggcatcaagacaaaggaggcggccagacgcgcttgagggcctgctcgctagctcccgcccccccattccgcggtcacccggggacagaggccaggccggactgggtggagttgggactcatacgtctgcgtccaggaaggcgccgggcgagccccagctagacgtgacgggcggggccgaacacggcagcggaccagaggcccgcggatcccgg

SEQ ID NO: 439728 - DNA, 935 bp, Homo Sapiens
  misc_feature (483)..(525): n is a, c, g, or t
ttttttttgtaataaatattctgtttattctccttccccttccctaggaaatgggcacacagtggttcaggggccagctttggctgacgctgcagcgaagactagttagacacttggaagaactgggaggcacaagggtttggactcagggtgtcacaggttgtcccctctgaggacaggctccccccggaaggaatgcagagaataatgaaggatgagatgcccaagtacatctaggacagcattctttcttaaagggagtctcctattttacaaaactgccctccccaagttatggcaggggggcatttagggtagggggacaataagacaagggaggagacatcaggaaaggaccagggctttggagtctgggatcagggtattataagaaatgagggctgatggggaacccccagaaaggggccccaaagagtgacctccaaaacaaaaccctttgcttcctccccaaactaaacctgnnnnnnnnnnnnnnnnnnnnnnnnnnnnnnnnnnnnnnnnnnnacctggtgccagaggcacagacaggtgccgaacatgcacgtggaaccacaggttgtacagactacagtgtaaatggcgcctctggagttgtgtgtgaggaacctcctggagggcaactgtccttcaagcccaggctcccaaggtcccctctgcactcctccttagcccctccaacccagcagccctgatgcaagtgggctacctggacctggctagacagaaaaccaaatggaccaaggtcaaggacatagagctcagacctgtgcctgctgtgggccatggagagcttggggctcttcagttggtaacagcaggttgttacagggcttagcctccatcctgcccctacctggtctgagccactggcccctgccagcctggtcctgtggggagcaagcctgacctgtaag

SEQ ID NO: 439729 - DNA, 1057 bp, Homo Sapiens
  misc_feature (30)..(30): n is a, c, g, or t
  misc_feature (36)..(36): n is a, c, g, or t
  misc_feature (52)..(52): n is a, c, g, or t
  misc_feature (96)..(96): n is a, c, g, or t
  misc_feature (104)..(104): n is a, c, g, or t
  misc_feature (196)..(196): n is a, c, g, or t
  misc_feature (248)..(248): n is a, c, g, or t
  misc_feature (433)..(433): n is a, c, g, or t
  misc_feature (522)..(531): n is a, c, g, or t
  misc_feature (582)..(646): n is a, c, g, or t
  misc_feature (649)..(663): n is a, c, g, or t
  misc_feature (681)..(742): n is a, c, g, or t
cgagaagcagcgagcgcgcgaatcgagacnagcatnccgacctacaaacggngatgtgggctaggttatgctcgactacagaggcgtggtgatatnagagagangcgcggctgcctcgtcaatcgtcagaaggcgcgagggagagacgaggtgaatgcggagatattagggcatacaggcgcgatataggggcgantcgaggtgataggccaaaccggagtgaagacgcgtgcgagataataataganagtgcggatagcgagatcggcggagcgggaatgagggcgcaggtggtatatgtggagtagacaacgcgggtagggatgttagggcaagggggtacaacaaagtgggaaagaaggtttgctaaaacaaaacgggacggggtgtgcccccacggggggagtattggtgttggttgagggggagaggnagcgcaagcggaagacaggggagagaacggggaaagtgtggtgaggggaacaggacagaaaggggcgcgaatggtaggggatataaacnnnnnnnnnncggcgcggcgcccgcaacggggaaggtgaatagagggaagatctggagaannnnnnnnnnnnnnnnnnnnnnnnnnnnnnnnnnnnnnnnnnnnnnnnnnnnnnnnnnnnnnnnnaannnnnnnnnnnnnnnaaagaaggaggggaaacnnnnnnnnnnnnnnnnnnnnnnnnnnnnnnnnnnnnnnnnnnnnnnnnnnnnnnnnnnnnnnaagcggagggggaatgggtagtggaggattgggtggggggggttatatacattttattgaaaaaaaattttacagcaaaatattttggcaaactgtaaaagtatacataagtgcaaatatatcctccttttaaaatacaagcaaagtgtgagtatacacggtcataaaaatatctttaaaatatggtggtagaaaacaaccttgtaaaaacgttgtattgtcacaatactgaaaaccacttttttaaactagacacattgtttttaaataattccttaataatgcccctttggcacctgaatccaaatgcactgt

SEQ ID NO: 439730 - DNA, 1049 bp, Homo Sapiens
  misc_feature (1024)..(1024): n is a, c, g, or t
  misc_feature (1045)..(1045): n is a, c, g, or t
ttttttaagtcagagttgccctttatttttagattcttaaatattctagaatgaggtaaaacgagcctgccagtacaaagtgaaaattctacatggtgcatctttggcgcttcatgcatgattatttcaatgaacctcttcctggtcactcttaagatagatctgagtttttgactcgccagtcaagggctttggcgacactcaatgacataatattcttggaaaaagcagtagcatttctgacttttcatattcagctcggaggtgtattgtctcgggctcctgtgcagtcgagcgccacggctgctcatcggatgatccaggatgggtccttggcaattttcgggttctcgggtccgaggatggccaggccgtgtgtgcttttcccagtgccgaggtacctatcgctcacggccaggagcttgtcgtggctgacagcaaagagctgctctctgtgggcctgcttcatctcatccgagaggccgtacaagaagtggtccattcctttgtctgaaggagcgacaggagcatctacggttgagaagacagaaagtttggcttcgtcgatgtcttgctgtgtgaattttccagacttagcccagtcgacagccttcccaaaagactggagcgtctctattgtatttgggtccctgtaagagtaaagggtgaaaatcccatttgtggctgagttttgcgcctccaccataagcaccggctttttctggaatttgtggcctgatcctgggtccgtgtaggggacagttcggatgcattcacccacgtaattcaccgggaagggcatcaggaagtgagtcttcatctgccagggcttgaaggtgggttccatgaccagcttcctaatgacctgggagccatggggaacgtgggcatctccaccagagctgctgggcacaggtttctcgaccgtgtgtgggcgcacaggcctccgttcctttttactccgaccgatgcttctaaggaatcttcgaccgctttttctgtctgaggcatctgctgaggagtngcattcactgaacaccatttnacaa

SEQ ID NO: 439731 - DNA, 1195 bp, Homo Sapiens
taccttatcgcttcacgggccaggaagcttgtcgtggctgacagcaaagagctgctctctgtgggcctgtttcatctcatccgagaggccgtacaagaagtggtccattcctttgtctgagggagcgacaggagcatctacggttgagaagacagaaagtttggcttcgtcgatgtcttgctgtgtgaattttccagacttagcccagtcgacagccttcccaaaagactggagcgtctctattgtatttgggtccctgtaagagtaaagggtgaaaatcccattgtggctgagttttgcgcctccaccataagcaccgcctttttctcgaatttctgtatgcaagaatttggcagtcatcaaacgtgcaaggattttaagactggcatgatctgggtccgtgtaggggacagttcggatgcattcacccacgtaattcaccgggaagggcatcaggaagtgagtcttcatctgccagggcttgaaggtgggttccatgaccagcttcctaatgacctgggagccatggggaacgtgggcatctccaccagagctgctgggcacaggtttctcgaccgtgtgtgggcgcacaggcctccgttcctttttactccgaccgatgcttctaaggaagtcttcgaccgctttttctgtctgaggcatctgctgaggagtcgcattcactgaacacctcatattatcaccatttaacaagtgtttcttgatacgtgggagcttcctcaggatgggtttgatatctgtcatttctgcaatcctcttcatcagccgcacctgatccatcccgctgaaggtctcctgcaggtcccctgcgggcgtgagggtccggcctgccctgatggatgcgtacaggtgcccagagtcaggaattccattggcgagctcctgggcggtcatcttcaccagcaccttgaagtgctcttcttcttcaaagcacgggttgttaaatatttcactccatagctgcatcatgtctggcaggtttcgatccaggcagagagaggagaaaagcacaccctgctcgtaggtgtccatgtgtgagtcgtcggggagcacgtggggagaagcactcatccctccggtcttcaattctatctgctgagcctgctcccggtagtcaagaaggccgcagcccagcttggtgaggacgctgcagaagaggggcacatagggcctc

SEQ ID NO: 439732 - DNA, 489 bp, Homo Sapiens
  misc_feature (469)..(469): n is a, c, g, or t
cggtgttatggtggaggcgcaaaactcagccacaatgggattttcaccctttactcttacagggacccaaatacaatagagacgctccagtcttttgggaaggctgtcgactgggctaagtctggaaaattcacacagcaagacatcgacgaagccaaactttctgtcttctcaaccgtagatgctcctgtcgctccttcagacaaaggtattttgagtataacagtgagaatctcaacccacaggctcacagatgacgttgctgttttccaagttcccggcatgcatgggcaggtagcaccagcttctggtcctgccattccttgcttgtgattacgatttccacgtcttgacaccctaaacacgctttcctgaacatccggggcgaggaggagttgcttcctgttcatttgttttaacttgacctgaggacccagtggggccaacccatgggcagtgttccggggtnttttagggtgggagggagga

SEQ ID NO: 439733 - DNA, 901 bp, Homo Sapiens
  misc_feature (426)..(445): n is a, c, g, or t
  misc_feature (468)..(515): n is a, c, g, or t
  misc_feature (532)..(708): n is a, c, g, or t
tttttgaaggtcatggggcacaaggtctgcaattcttttaatggtgatgacagtaacgtaagtctgatacacaagcattatgtattcaacacactgatacctgatagcatgtcaggaaaaaagaataggcaatgcagtttaaggggggaaaaactgagaagtcataactactccaaagatgtgcaggaaaccacaaaagacatggacctgcttctactataaaaagaaaatgaagcacttctctggggttgctataccaactgtttcagcccattgtagtcttgcctctttcagggctttagccactatttcatttcatggaaaagcagacatctcctaacaaacagagtgacatttaccaaaataaagagggcttctcagtgagaagcttaataaagaaaaatatttacctatgctttgcacaannnnnnnnnnnnnnnnnnnngagacggtgtctcgctctgtcgnnnnnnnnnnnnnnnnnnnnnnnnnnnnnnnnnnnnnnnnnnnnnnnngggcccgggttcacgcnnnnnnnnnnnnnnnnnnnnnnnnnnnnnnnnnnnnnnnnnnnnnnnnnnnnnnnnnnnnnnnnnnnnnnnnnnnnnnnnnnnnnnnnnnnnnnnnnnnnnnnnnnnnnnnnnnnnnnnnnnnnnnnnnnnnnnnnnnnnnnnnnnnnnnnnnnnnnnnnnnnnnnnnnnnnnnnnntgagccaccgtgcctgccctgttttgggccaatttcaaagccattatcttttttcaactgcgggcacttaactacagggcttggcagtcaagtttttgccgcaaatgctttttggattgcattgatacttggcattataatcccccctcgttattttttttagacattaaatttccttttaccgaacctctgg

SEQ ID NO: 439734 - DNA, 3040 bp, Homo Sapiens
  misc_feature (840)..(840): n is a, c, g, or t
  misc_feature (922)..(922): n is a, c, g, or t
  misc_feature (1865)..(1914): n is a, c, g, or t
  misc_feature (2512)..(2538): n is a, c, g, or t
tttcttttttttgtcgctgcattttaataaacatagcacacaatgtgttgctacacaaacaccattcataaacctgagtcacaggtttcagatgggagctggggacgtgtataaatagcctgtgtatgttaaacagtagaaaagaaaagaagtttggggaataaggtcaaaatcattgtgcccaatttaaacatcataaaaatctcagccttgtcattatttacaacccccagcataactcccacccaaaagagaatgccaaacggaaaattctaaataagatgatgtcctcacgtcgacctaaacagtacaaatgatgcagcatcataaaacaaagttataattatgttgtctcacttcctggctgccggatgcccacggtacagagcagccactccacaggattttctgagctctgagctgtctggggtttttgttagaacatagctttgactagcattgaccaattgatttgcatttaaagactctgtgatggtttgaggtggcaaaagaagaatacaacttgtgtggtggagaactaacaccttgatcatgttgccaacgtttcaaaaatgcatttttcctatattcacccctcctcagctgagaatagcccagcaggctcaaggctggttgcagctgaagacaaatcccacacaccctccagcccctcccatttgagaaaaagggcatggccatggcttggaagaaaggcaacaagagtcttgggcagccaagacattctcgaggctttcaacaggtccctgcagacttggccttgactctgggtcattctgttccttagcaagcaccttgtggccttccagcctccgctcccanggaactcatttgaacttgcaaggtgctgttcaatgaagtggattcaggaagcagcaattctctctcaggagaggtctagtgntttcgtcacctactcccccacaccactgatgctcagaagggctctaggaccccgtgtgtggaattcgaatgccaaagattgacaaacagggtgacacagacacgcagggttaactcggctcccagctgctgcgtgattccagctcccattcagtctgactgcctgccgggtctatttctcacgtatcctcattctggtccctcctccagtcaccagcagaaatgcacctctccgtctcaggcctctcccatctcagtctctgatgatgtgcatggtctttgcgttaagagctcactaaagtgtagatcatgcagtaaaggtagtagaagaaggagaggagatagaaggccagcttacaccaggcctccttctgacagtaactcaaagtgtcggcattcatgaccaccggtgggtcgtaggctagttctgagctatctgctggacagtggaaatacctccagaagtgatagaaaagtagagggacattcagccccagcgtgagccactcttgcgcacacaggaacataatgcagaagaggctatggatggagtattctggcagcaccagctttcgcagaaggaagcagatgcgctcgatgttcctcaaccgttccctcgcatgaacaggattgcactggtctatggggctcttaaaatctgtccttaactcatcaaaggcaattatgtgccagatggcgaagaagatgagcgcagcgcacagcaccagagacagcatgtagcagaacgcagcgaaagtgaaggccatggccggcggaccccaatcccaccacacacgccaagaagcccctaggagcccgatgcctccctagaggaccgcactccctccaaggagccgcgtctgcacgctcctctccaggctagtgcccaggagggcgcacagctagcgaagcgactcgagggtcagcgaataagcgctggattnnnnnnnnnnnnnnnnnnnnnnnnnnnnnnnnnnnnnnnnnnnnnnnnnntgtgtgtcgagagtcgctggagggaaccgtccgcaaatcgaagaagaaaccaaatcagcagcgaacacctgcaaattagtgccaagctgtgagcccctcgagaccaacacgacaagcgatgcgacgactccacggaggtcctagggaggaggtcccattcgccccaggaagagctgtgtgcttttctcccttagaccgctgaggagagacgagcgctccgctcgggaccctctcgtgcctccggggcgcaaacggataggtgtccagcgaggtgcccgagcggcctccgagctcctcccaaatcccagagccggggcagcgctctttcccgagagaagggagtctttaggtagccgggaggaggtaggtccccgttggtcctgcgccccagacgcggcttccagcgcagccgtgcgctccgaggcgcgcccgtccccaaccgtgactccggccagccggcctccgcaacccaagtgtcccggaaaccgggggtcggaccggggcgagcactggctccacccaacgggccaactccagcccgggtggctgcagcagtgggtttcaggccaaacgctgtagctcgctccacctgctgctnnnnnnnnnnnnnnnnnnnnnnnnnnntttgccactgcgagaactgtagcggtgcgacccgggattccctcctctcggcgccccaccctcgactcctgttccgctgagcgcgccctccccggcgggcggagactgcagcgccgggggctgaggaaaggtgggtggcgaagcgccgccgggcgcttggtggccgctgccgccgccactgcagctgtgcacgcccgcctctcggaggaaacttgaagccagcagtacaggcagggctggagaccgagcggagccatccgaccttgggactagggaaacgtggacttggtgggctattctgcgctgaagaggcagcaacgagggctcggtggtattggtgttggtcctagtggaattgtcaagaggatgcttttgaagtggcccagcatcttggaagttcaccatgcttgctttgcaagagattcctgacgctgcagtgaaagaggtccagtcattccagagagaacttcagtttcagacaagtcatcaaatccaaaagagg

SEQ ID NO: 439735 - DNA, 1613 bp, Homo Sapiens
ttttttttgaaaccaccatagagaatttatttttttctcaggtgaagtcagtaactaattcttcctattcccgttggacacaaggagtctgtgagggggtgtgaaggaaggaggctgcggctgcgtcctggactccgtcctgcggtagggagtccagcagggatggctcagcctccgcacctggtgtgcagccggatctccatcctgaggaaggccttgaggttctcatcagccacgtgctcctccagggcagccagggcccgctccccaccgtcctggaagtgctgcagcagcctgtccgcgtactccacccacacgcagttggggcagccactcatgcagcagtttgtgggcggctggagctcaggtggcagcgatgccttgggcggcctggtgccgtccgcacctgcttgggagcccacctctacgtggtctgtcccgaattttctgcgcccatcaggggcttgcgctccgggatggtgcctttgaagaaagctgccacctccaggaagcctctggcagcagtccgggctggagaaccggcgagccccctgaggatgcagacaaacatgtgactctccaggaagctggtgaggcccggtctacccccagcagtgaggacatttcagctctcctgtcattgggcaactggctccatgtcctcagctttttcacttcctgtgactttagacatgttatttcacctctctagactcagtttccccactgtgcaatggaagtcatgggtatgacacggtgtgattcacaagaagtgccaggatcagggcctggcgccgggtgtgcactcaagcacatggtggggggtgggggaggcactcgacacctccagctaagatggctgctctgtggacaccagtatgcgagaggtgtaaccctgtaagctcctggccagcccagcacctctaccagtataaccaagccccaccacctctgagggaccaaccggaagaatcgcaccaccctttatccaagtttccctgtcacaaagcccaggcctctcaggcccctctcatcccagcgtgaatgtcctataggcagtcttccgtcgctgccctgctctatctacccaggatcacggactgacacgctaccaacttcacttatttaactagtcctgcgaggggcatcatccgctccatgtccacggccagtccccagagcccaggagggctcgcacacaggcgctcggcagatactgagaaacaggaaagtggccgttcaccgggctgcttcctctcccaaggctaagcggcccctccacagattccggggcggggactcggtaagagccgatggaggagaggagcgaggggtccttcggcggcggccagcgcgcgatcctcccggctccgtccccacatgcgggtggaggggccggggctcctcccggtacgtgcgggcccccggacagcggcctctcggacgtgcccttcggcgctgccaagacccgtcctggtacttgccgagccacggaccgcggcggctaccgcccggcctccctcgaccaccctccgcagcagcatcgcccgcggacgggatccggcaacccctgaccgtgagcggcgggcgctccggccaatcccggacctccc

SEQ ID NO: 439736 - DNA, 1257 bp, Homo Sapiens
  misc_feature (227)..(227): n is a, c, g, or t
tgtgtgacgcacactcagctttgggccgggcgcgggcctattttccgccgcttaaatccaccgtccccccctgcggagggttccgggacgcccctgtcccacgactttggggggcgggccttacccttttcaagtgcccaggcttggggcaagagaatcgggtggggaacccggcgccacttggaagggggccgcgccactggtgaaaagccccgtatttgttaagnttgtgaaaaaaccaaccccctttcccgaggaggaaagatgttacttccattcttgtttctctcttggtaaaaaggcccatcagatggggctgagtagaccgaaggccacttgtgcaaagccaacacagagactgcttcttagtgaagattgcattttaatgctctgacaactcccatttcttcattgtcagaataacctggatagaggccaaagcttaaaacaatttgtacatatgtaaaaagaaaagaaaaatgagaaacctaaattgccgtaagagttcagggcagcagagcagatctttctggatttggcaccagagtccctgagcctggggatgggcccgggggtcaggtccttgtttgcagagggagtctgagggccagctccgtcagatgagtcatgtctggttgtttgctttgcttcttgatgtattctagcgttttcaccatggtcctggtgtctgcacagccgtgcctctgtgccaggtgccacaggttgacggagagctggttgagcttgttgttgcgtaggtccccatgggccaagatgctgttaaagaaggaaaggcccaacgagctctggcgcttcagggcctcgtccttggccagggttttcagatgctctaggatctgagccatcaccgtctcacacagcttgttgttttctgccaggaacttggagtctcccccgtagaggctgtcgttggagtccactttgtctatgtggtaaaggtacgtttcctggctcatggcggagaggagatgcaggacgcaggtgtagatgcggattttttcatcgctggtgtcctcccaggtgtagtcctgaatcacgttgagaaagctttgaacaagaaacaggaccccatgttcaggatgatccggaactattaattaagttgaaaagaaaattggcgagggatttcacgaaggaacgattcccatggcccgcatcttcccatcaatatttatacatttttgggaaacttccggaaacaggggctataaggggctcttgaaaaaagctttacct

SEQ ID NO: 439737 - DNA, 1290 bp, Homo Sapiens
  misc_feature (128)..(128): n is a, c, g, or t
  misc_feature (633)..(634): n is a, c, g, or t
atccttgactcctctttctttaacgctcttcattcaacccatcagaaaattctgtgagttgaatcttcaaaatatatcttttctcatcatctccactgctaccacttagtccaattcaccattctctnacttggcttcctgaacacttgcatcccccacagtttattatcctccagatagcagccaaatgactgtattaaaacataaatcagattatgctgtttctcagttctaaagtcttcaaaggcttcccatttctctcagaatagatccaagttcataccatggtttgcctcaagccatcctggattccttgccagtccatgcatatgcccacacatgctttcacctcggggactttttcttctgctaagatgcttgctttctccaggtatcaatagggtccacttcctgacttcttttaggtctctgttcaaattgcatcttatcagagggatgttccttgattaccctctataaaatagctccccacttcttatagatattcacttttggatggattatattttattatgcttttccccctctttgctaatctgaagttgcatgctctgcttctgttcttttagttctgaaagatacaacatacgttctttaaaaactttattaaannacaatattaatacagaaaattacacatatatatatagagagaactatcttgatgaatcttcaaaattaaacatacctgtgtaaccacctcgtggattaagaacagaaattatagcattccagaagccaccggagccccccaacttccagtcactaccctaaaaagggttacttctaacaccatagattaatttcacctgcttttgtacttttaaataatggaatcacactgtgtgtattcttctatgtcaggcttcttctgctcaaaactatgtttgtgagcttcattaatattgtgtgtagttgtttattattcattgctgtgtatacttgattatgtgaatataccgatatttatttacccattctactgctgacaggctgctatgaacattctagtatatgtcttttagggaacatatttatgcatttctgttgagtatatacccaggggcaggattgctgggtcatattattcagcttcagtagatactgccaaatacttttccaaaacagttgtatgtaccaatgtatagtctcactagcagtatctgaaaaatctagttcttaattttaatctatgttaatgtatcattttttctttatgtttagtactttctatagcatgtaataaatctgtgcctatattaaggttgt

SEQ ID NO: 439738 - DNA, 913 bp, Homo Sapiens
  misc_feature (301)..(301): n is a, c, g, or t
  misc_feature (484)..(495): n is a, c, g, or t
aggttcccttgggttttccccggcacaccacttttgtgatggtccccttttacaggagtgaacaaacgttcccgctggaaggggccaattgcccttgtggcattgaagggcaacaccgctgggttaataaagttcgcaaacaagcgggtttaccccccgatttgcaaaagggccctcctccctttgtgttctatacattgtgaatcttcccgtctgaagaacgcccagcctgcccagacaaagccccgccttccccaaagcagaggggctgtctgtgtctccagaaaggggacatcggggnggaggggggctcagaaaggagaagggctgtgatctccggtcccttcccccatcatccttccttagactgatgctttgactgaatcatcactagctatggcattaaaaggcctctcttctcatctggtgccaaaggttccgttgcagctttttacaaccatccggtgtggtttggaggatttgnnnnnnnnnnnncccaacagaaaagaacagccattagaagaaggctcccattttctgatgttccgccccactgtgaagagtgtgctcgttttaaattcatgttgattcttgtaagcactggactgtcttcatcaagtatttccctacagaactcctcaagaaaacagagatcatttggctagagattgtctgagtgactccaagctactcactgtattggacgggagtagtaatttattttaaagataaagtgactaagtggggaaatttataaagctaaatattatatattttatttttcatacatgtttgaagtgcaaatctgtggatattccatttgtaggaccaagtcgacatgcccatcctgacattgtatgctacgagaactcttctgatgatggaatttcgattaaagtgcactgaaagatga

SEQ ID NO: 439739 - DNA, 405 bp, Homo Sapiens
  misc_feature (265)..(327): n is a, c, g, or t
ctaatatacaaacttttattcaaagttaattcaagaaagacatgttttggtcatttttaaagtgagattaattgaagatctcagaaaaactgtatctgatcaacacacatggctactcacagaaagttctctcttctgttaatagcagctaaatttatacacacagaaaaaattccgaagaccatgcaaattcaattgaattccatacatttattatattcatcaaaaacctgcattaatgttcatgccaaagtgttaatttaannnnnnnnnnnnnnnnnnnnnnnnnnnnnnnnnnnnnnnnnnnnnnnnnnnnnnnnnnnnnnngcataatttatattgtattttaaaaagtttggcatcacacatattcaagtgtgttacactaggtccattcctcagaag

SEQ ID NO: 439740 - DNA, 849 bp, Homo Sapiens
taggcatttaatttaacttattaaactgaaataggatgttattctgaactcttaattgtgtagcctttagctattttattttaaatcaaagacggagcttcccagcaccataatgaacatcagaagaaaagcccagtgcccgcactcagcacagtccagtcgaaccacaaaaaaatctttatcaaagatcttcactttgggttccaaattactcaagacacgtcagtattgggcattattggaatttaaataacaaacacttttcaaatgacttgggaaggaggagaggaaagatcactgctgcttaatacattttattcaggtctgtcattacacttgcgtgagcattcatgggtgaggttttatttgcaggaggagaaggtcttccagaagaagttcctgcagggcattctgtcccggcgcgcggattgctgggggggtgcgccttcctgccgcctggccacctcccgagcttcctctcctatgaggggcccggcactggcctgggaggtccactcaaaccaccaagcgaggaaagtcaggaggctgcttttccttattcctgccgcttcctgcatatgctgtagaaggctgcactttccaagcggcgagggactttaattctcactttccaccactccagcctctgctggctgccttgaatttttgcttccatcctctgacttctttttcttctgtgcttttcgttctaggttaatctgagcaatctcttcacttttgtctgtgatgtattttagcagtgaattactcctcctggctaagagcttcacatcttcagtgttaattgtggttcttttcgcatgtcttgcaaacatttcaaggtctttg

SEQ ID NO: 439741 - DNA, 842 bp, Homo Sapiens
  misc_feature (295)..(312): n is a, c, g, or t
gaaaagctaaataaatatagctttattcatctttcagagattgccatttagcctagaaaattacatcaaaagatgaactgatttttgcttgaaaaagtcaaccatgtttaattgctcacacaattttaattacaacagatgtaatttctaatatataccattcgatcacacaccatttttatgttctggagtgagacctgggagtattttgcttaagactttctcattctctaaaactagctttggcagttaacaatgtggagaattcagcacaaaaagcaccctagcccagccnnnnnnnnnnnnnnnnnnaaatctctatttaacccttcaaagtttcctttgcagccatatgcatttctaggtggctctacctgtagaaggctgcactttccaagcggcgagggactttaattctcactttccaccactccagcctctgctggctgccttgaatttttgcttccatcctctgacttctttttcttctgtgcttttcgttctaggttaatctgagcaatctcttcacttttgtctgtgatgtattttagcagtgaattactcctcctggctaagagcttcacatcttcagtgttaattgtggttcttttcgcatgtctgcagaaagggcagaagcaagtcaccaaaatgtttggtattatttaaagttttgatgaaacacagaagttcacggtcagacttcaaactagcagggatctctaagtagcccatccttttagataaagggcattaagcaaaagtgacacaaaaattagtgaagttcctaagaccccaattaagtaaagagatggagaatgcggaggcccatctctccacctccg

SEQ ID NO: 439742 - DNA, 676 bp, Homo Sapiens
gtgtagcctttagctattttattttaaatcaaagacagagcttcccagcaccataatgaacatcagaagaaaagcccagtgcccgcactcagcacagtccagtcgaaccacaaaaaaatctttatcaaagatcttcactttgggttccaaattactcaagacacgtcagtattgggcattattggaatttaaataacaaacacttttcaaatgacttgggaaggaggagaggaaagatcactgctgcttaatacattttattcaggtctgtcattacacttgcgtgagcattcatgggtgaggttttatttgcaggaggagaaggtcttccagaagaagttcctgcagggcattctgtcccggcgcgcggattgctgggggggtgcgccttcctgccgcctggccacctcccgagcttcctctcctatgaggggcccggcactggcctgggaggtccactcaaaccaccaagcgaggaaagtcaggaggctgcttttccttattcctgccgcttcctgcatatgctcgctgtctcggccggtggggccaccctccaggggcagggcagcggtggccgtggccccggagagcagcagcagcaggaggccgggggacaatggcatcttgtgggctgactggagcttctctcccaccctgctgctgctcttccttcctg

SEQ ID NO: 439743 - DNA, 1151 bp, Homo Sapiens
agcctcgctcagcagctcgtagagggatgagcgagcggcgggtgcgtttgtattggctgagttagaagtagttcgtttccgatctgatctgacgcaaggggcacgctcgtggggctgtcgctgagggggcgaggggtggcgctcactaggaagcgccccgacgggccgcgccgcttacgccgcacacgtcggagaaaccccctcacgcaagcccagtcagcgtttgcgtgggccagcccgtggggcgttcccgcgggggcattcacctgtagtagggccggcccgttcccagccggggggggaagtaaatttggggctttcccaccagccaggcctttccagggggcactgaaattttgtctgccttcctcagacttcttcttcttcggggctgtccgttgtaggtgaattgaaccattttttcaccgtgtccggggacgattcaggcagggaattactcctcctggctacgagcttcacatcttcagtgctaatggtggttcttctcgcatgtcgtgttcttgcaacttttctgaaggttggaacttctcaaaagacaaggggcagggtagacagctgctgcagtgtaactttgtagagaggaaactcccgcgtctggagctcattcccgcgtttcttcagtccgtcctctttaaggtcgccactccgggtcttgcttttaagcctcttcacggcaacgttctcagcctctgacgccccatatgcccggcgctgatgaaaggaacgaatgggatgcccgcagctaccctgacaagtgattattcttatgacgattttgcagagaagaaaattgcgtctgggccgagtcgatacgatcacaagttggcggggcagagatttgaacccccatcttagggacgagcttttggcctgattggtccgcaccgcgtccctgcatcagtaacgaggggtcgacgcctccagggccagcgttccagagctccggcccgaaccgcccaccgcgtacgggcgtcacctggaatgtctaatgccgacgttgtaccctcacgaaaaccccatctgagaaggggaaaccgaggattcatcgcaaggccagaaggtggcctctcgccgccggaccccggcgcccgcacgctcccctagaaccgcatcccgggaattccggaccg

SEQ ID NO: 439744 - DNA, 956 bp, Homo Sapiens
  misc_feature (870)..(906): n is a, c, g, or t
tggttctttcgcaatgtcctgcaaaccattgcaaggtctttggcaaaatttgccacactgtcggaaaggtcagctccgaaatgccggcaatggtctgtttgctgaactgcatctctttgtccaatgcaacttcctcgcaaagacaaccccacagtatagtgaactgctgcctttagcctcgtgttcttgcaacttttctgaaggtttgaacttctcaaaagacaaggggcagggtagacagctgctgcagtgtaactttgtagagaggaaactcccgcgtctggagctcattcccgcgtttcttcagtccgtcctctttaaggtcgccactccgggtcttgcttttaagcctcttcacggcaacgttctcagcctctgacgccccatatgcccggcgctgatgaaaggaacgaatgggatgcccgcagctaccctgacaagtgattattcttatgacgattttgcagagaagaaaattgcgtctgggccgagtcgatacgatcacaagttggcggggcagagattcgaacccacatctaaggacgagctctgggcctgactggtccgcaccgcgtccctgcatcagtaacgaggggtcgacgcctccagggccagcgttccagagctccggcccgaaccgcccaccgcgtacgggcgtcacctggaatgtctaatgccgacgttgtaccctcacgaaaaccccatctgagaaggggaaaccgaggattcatcgcaaggccagaaggtggcctctcgtcgccggaccccggcgcccgcacgctcccctagaaccgcttcctccccagccagcgcaggccagggtcccgccccgctctcgacgaattcgagctcggccgatttggcctgatnnnnnnnnnnnnnnnnnnnnnnnnnnnnnnnnnnnnncggccgccaccgcgttgagctccggtcgccctatagtgagtctatacatt

SEQ ID NO: 439745 - DNA, 1587 bp, Homo Sapiens
  misc_feature (1498)..(1535): n is a, c, g, or t
atttctgtgtcgtctctctgcctcctctcgcgccggcggcgatgcgtcgtgtgtcttgcacgtcctgttcggtgtgtttgtgtcctcggtggtcttcctctctgtggtgtggggctcccttatgtgtccgccgctcgcgtgtggggggctctccccagctctccgtgcggcaccgtgttctctccgcctcgtcgtgtttgtttctcgcgccctgctcgtcggcgttgtatcgcgctcctgcattggtgcgccctgtttctatgtcggtgtgctctgctatttgtggcctcccctgtgtggtttactttttgcgcgcgcctctttttgtcttcttttgtgtctcggagttgctgggtctccttgtttttgccgccgtgtgtgggcgtgtgtgctgtgcgttgctttttgtgttttcaaaacagatatagctggtttattttggaaacaagtctcatccagaaatgttatttactgcatttaaaaaccatggaaggcgatttgcatggttcctccccacgccctcactcccaccaagtacagctttaccacccaaggtcctttcaggaccccaggcctggcggctgtaggagagagcagtgaatcctaagggcaagagaatggcgtccacttgccagagtttctcagagcagagccagctgctcctccagacaggccggtgaggctactcgacaccctcacaaaggggaaaccctgaaggaagtacttcagggggtgcctgcccgatgcgggaggttttgggctagccctccccagatccccggcctgaggggcctcctccagctgcagaagtcaagctgccaaactgccaaagtattcctgcagctccagcagggcccggaagcgatgggagacagcgttcttctccgccttaggcatctctgcgtacgtctgctcatatccatcaggctgaaagcaggggtcccagccaaagtcctggcagcctctgggtgccacgatccggcccgaggtccggcccctgaacaggcgcacgggctggcttgggtccccggtgctgagtgcaaacgtgcagagcgcataggctgacttgtcctcgaacccggccaggagctggtggagaccttcaggctttaacttctccagaaaccactttatgtaggggccggggagccctccaagggcattgaagcacagacaagtgtcctcaaccagcacgggcccctgtacctggcgaactgcctcctgacatttctgtatggaaatctcatccggctccccctggtactccggcaggtcaattttctgtgccaccaaagtgcatggaaacttatctcctagaatctgaacgacctcctccagcttcttggcgttccccgttacaaacacgatcttcttccccaccaatgaggccgccatggtgatccccggttacccagctgagccaccgaaaactccttggcgtccagtgacagaaaactccgctctcgacgaattcgagctcggccgatttggcctgatnnnnnnnnnnnnnnnnnnnnnnnnnnnnnnnnnnnnnncggccgccaccgcggtagaactccagttcgccctatagtagtcgtatacatc

SEQ ID NO: 439746 - DNA, 938 bp, Homo Sapiens
ttaccacccaggtccttcaggccccagcctgcgctggtagagagacagtaatctaaggcaaagtatggctccacttgccagatttcgcagacagagccactgcctcctcgagacagcccgtgagtctactcgacaccctcactaaggggtaaacctgaaggaagtattccaggggtccctgcccgatcggaagttttgggctagccctccccagatccccggcctgaggggcctcctccagctgcagaagtcaagctgcccaactgtccaaagtactcctgcagctccagcagggcccggaagcgatgggagacagcgttcttctccgccttaggcattctctgcgtacgtctgctcatatccatcaggctgaaagccaggggtcccagccaaaagtcctgcagcctctgggtgccacgatccggcccgagttccggcccctgaacaggcgcacgggctggcttgggtccccggtgctgagtgcaaacgtgcagagcgcataggctgacttgtcctcgaacccggccaggagctggtggagaccttcaggctttaacttctccagaaaccactttatgtaggggccggggagccctccaagggcattgaagcacagacaagtgtcctcaaccagcacgggcccctgtacctggcgaactgcctcctgacatttctgtatggaaatctcatccggctccccctggtactccggcaggtcaattttctgtgccaccaaagtgcatggaaacttatctcctagaatctgaacgacctcctccagcttcttggcgttccccgttacaaacacgatcttcttccccaccattgaggccgccatggtgatccccggttacccagctgagccaccgaaaactccttggcgtccagcctcgtgccgaattcagccacccaggcctcgctacctagaccgtatgtca

SEQ ID NO: 439747 - DNA, 966 bp, Homo Sapiens
  misc_feature (358)..(358): n is a, c, g, or t
caaaacagatatagctggtttattttggaaacaagtctcatccagaaatgttatttactgcatttaaaaaccatggaaggcgatttgcatggttcctccccacgccctcactcccaccaagtacagctttaccacccaaggtcctttcaggacccaggcctggcggctgtaggagagagcagtgaatcctaagggcaagagaatggcgtccacttgccagagtttctcagagcagagccagctgctcctccagacaggccggtgaggttacttgggcacccttcaccaaaagggggaaacccttgaaggaagtactttgggggggtgcctgcccggatgcgggaggtttttggggctnagccctcccccagattccccgggcctgagggggccttcttcccagctgcagaaagttcaagctgccaaactgccaaagtactcgtgcagctccagcaggccccggaagcgatgggagacagcgttcttctccgccttaggcatctatgcgtacgtctgctcatatccatcaggctgaaagcaggggtcccagccaaagtcctggcagcctctgggtgccacgatccggcccgaggtccggcccctgaacaggcgcacgggctggcttgggtccccggtgctgagtgcaaacgtgcagagcgcataggctgacttgtcctcgaacccggccaggagctggtggagaccttcaggctttaacttctccagaaaccactttatgtaggggccggggagccctccaagggcattgaagcacagacaagtgtcctcaaccagcacgggcccctgtacggtcaattttctgtgccaccaaagtgcatggaaacttatctcctagaatctgaacgacctcctccagcttcttggcgttccccgttacaaacacgatcttcttccccaccaatgaggccgccatgggatccccgcctcgtgccgaattcgccaccc

SEQ ID NO: 439748 - DNA, 848 bp, Homo Sapiens
  misc_feature (36)..(36): n is a, c, g, or t
  misc_feature (52)..(52): n is a, c, g, or t
  misc_feature (64)..(64): n is a, c, g, or t
  misc_feature (127)..(128): n is a, c, g, or t
  misc_feature (359)..(359): n is a, c, g, or t
taggctgcccaattcaggaaggaaggtactcctttnctggattttccattgnctggcattttgnaatattaaggctccaccttttccaggaacagcctcagcactgtctaccattcctctgaccttnntgcctcacttctttttatataacccttttctgctgataaatgcgaacagctatggcagtgatgcaaagcaagataaaattcacaccagctatcagacgtagagagagaaaagaaatataaagtcagatttttctgtccaaatagaaactgtgctgacttcattgcttaataagtcatcatacgactattttccactttaagcatctactacatataaattggaaatataanaacttcaggtatttctggctcaagcagtattattgtatgttgagtttatttctgagttctatcagccttgtgggttcacctacatttattatgaatgcatattatatcggatttacttggtgcatttatatttaacacaaggtattaactatatgtctctaggaccatgtggccatgtggccacttcatattagttttaattattttgaaattatggagtagtagcaacatcataaaatgattaaactgttttgtgattaaatatgtaaacattttaatgaaattgttattcaattgttatactgctgaacagcagaaatgggttatgtaaataaatcattctgaccaataacacatatacaaatatgcctaaattatttctatatgaggaatgttgttttaacacttctagttgtaaatacaaattctaagtactgcgattcttaactatgtcaatggttaccaacgctggcattatattaggtcagt

SEQ ID NO: 439749 - DNA, 1076 bp, Homo Sapiens
aatacaaacaaagcaaagacagcaaaacatttttcaagactattgatgtattgtattgaatataatacagagaaaggcaaaggggctttattatgcttgtggccactgaagatgcaaacaccggccacacaggatctgagaagcatttccaggtctatgaataacaccacgaggagacaaaagcaaacacagcaaatgttctcaaataaagcaaggacattatagtccaaatttaatttttacctctaacaaaacttatgtattacatggttaagagaccaaggctacagttttcacatgtaaaaactgtagccatttaagcaggttaaacttgttttagatcataccagaacagttgaaaattaacagcaatatctaatttcttgttccatagaatgaatgctatgagaaatatatcactggatgaggcttcctggagccaccccaagcctgtacatggcaagatggcagtgctgcaagcccactgcctgtacattcagtgtaagagcattcgtttttccattgagaacccctggctattaaaacaaactatcataattttatgttaaatcatagctgccaatcagaagaagtactctttctgattttcattgactgcattttgtatattaagctcacttttcagaacagcctcagcactgtctacattctctgacctttttgcctcacttcttttatataaccttttctgctgataaatgcgaacagctatggcagtgatgcaaagcaagataaaaatcacaacagctatcagacctccaattactgcagagtcacttttgattgcattagcaaggggctctctgtcatctattgttccagaatgatctgcaaacgagtgtgtcctttcccttgatgtggcatcagtgccaggctgggccatacagctggactcagtcacgtgtcctgtaacagtgacagggtctgggtggctggggtgcagagctgccttcagaggggccacgtggctgagctgcactgcagagaggcagcctgtgaagccctgcgcacctgccagtgcagtatcctgatcccgaaaattccggaccggtcca

SEQ ID NO: 439750 - DNA, 1630 bp, Homo Sapiens
  misc_feature (63)..(63): n is a, c, g, or t
  misc_feature (71)..(83): n is a, c, g, or t
  misc_feature (85)..(190): n is a, c, g, or t
ttcaggtggtttttatgctttagcttccctagtagctgggaccgcagtgcttgcaaccaagcntggttaannnnnnnnnnnnngnnnnnnnnnnnnnnnnnnnnnnnnnnnnnnnnnnnnnnnnnnnnnnnnnnnnnnnnnnnnnnnnnnnnnnnnnnnnnnnnnnnnnnnnnnnnnnnnnnnnnnnnnnggatgagccaccatgcctggcctctgggtgaggtttttaaaagacaaaacaaaacttaatgcattcctgcttgagaagcttctgccaccctcctctgcggcatgatggcctccaccatggcactgggtgtcccatctttcttatccacagtggtgacgccaggtctggggagatcgctagaggcacagccccactggaagctgtgccatccacatgacatgagtggggtttggggactgatacgttgctccggaaagtgcaggggctttgggagtggcacagggatgaaaggagagagaatatgggaaggggatgcaatggagaaagctgagaggaggtggccttggagacggagggaacacatgtatagaggaccccctcaaactccaggaagtcagacttcacatgcaaatatcttcaccctgaatttcccttctctttttcagagatggtcccctcacctcctccaattctctctgggtaaatactgctgtcacctgctgtttgtgtgtgcgtgttcatttgggggaacctaggtccaggcagtgtctggaacatgtgaaggagttgctcctccttctccacactcaggagcaggaaacttaccttttagatgggtacagagacaggtaagcgtttttgcaggaagccagagccagccaatgccagcagcagaggaattcagacagggttttgatcacgataagaaggaccatggagagtttgaaagacccccaagatttagaacgtaaaaacatgatagccaccgtgcaagagggtctgcctgtcttagggatatggataggtagagaatgaagaggaagtgctcagaggttcctactattgtgcagaaaggaaaccatggagcttcatgcaaagaggcagccctcccagcctaggggggcttcatgtagccttggcttcctgaacattcttgaagcctcctgaaatgttcagaaaacaaccaatttagccaaaggttaaattgaagcccacaaatttatataaagcttgatcaaatagcagaacatcaagtcttaggccccacacagaaggtacgtcatcacaagagagtttgtggcttttacagcagcccccaaatttagaaaccatccaaacctttccctccagagcagggcgctctgggcctagctcagaggacatgctcctgaggctagctatttttctgctactactctggctaagagagacatgtaagggctggatgtaaactcccagagggcacctcctgggctagagaagatgcagcatgagctcaggtgggaagcaaggtctgtgttgagatactgaatacaggaccaagaatacagaactggaggactatgggtgaagaaggtgcagaccaggctgtattatggaagtggtttccatccctctctccatccatgtgcacttgcccactttccagctgtatgatct

SEQ ID NO: 439751 - DNA, 841 bp, Homo Sapiens
  misc_feature (226)..(288): n is a, c, g, or t
  misc_feature (626)..(626): n is a, c, g, or t
  misc_feature (641)..(641): n is a, c, g, or t
  misc_feature (704)..(704): n is a, c, g, or t
  misc_feature (707)..(707): n is a, c, g, or t
  misc_feature (717)..(717): n is a, c, g, or t
  misc_feature (729)..(729): n is a, c, g, or t
  misc_feature (732)..(732): n is a, c, g, or t
  misc_feature (736)..(736): n is a, c, g, or t
  misc_feature (738)..(738): n is a, c, g, or t
  misc_feature (744)..(744): n is a, c, g, or t
  misc_feature (772)..(772): n is a, c, g, or t
  misc_feature (774)..(774): n is a, c, g, or t
  misc_feature (785)..(785): n is a, c, g, or t
  misc_feature (791)..(791): n is a, c, g, or t
  misc_feature (793)..(793): n is a, c, g, or t
  misc_feature (796)..(796): n is a, c, g, or t
  misc_feature (807)..(807): n is a, c, g, or t
  misc_feature (809)..(809): n is a, c, g, or t
  misc_feature (815)..(817): n is a, c, g, or t
  misc_feature (824)..(824): n is a, c, g, or t
  misc_feature (827)..(827): n is a, c, g, or t
  misc_feature (830)..(830): n is a, c, g, or t
gcggccgccgcatctggtgcaccacgccgctaaccaccacccgggacccggggcatggcggagcgcggcggctgcagcgcacctcccaccctccatgggagcgtccaacggcggcttgctctactcgcagcccagcttcacggtgaacggcatgctgggcgccggcgggcagccggccgggctgcaccaccacggcctgcgggacgcgcacgacgagccacaccannnnnnnnnnnnnnnnnnnnnnnnnnnnnnnnnnnnnnnnnnnnnnnnnnnnnnnnnnnnnnngcagggtccgcctggccacccaggcgcgcaccacgacccgcactcggacgaggacacgccgacgtcggacgacctggagcagttcgccaagcagttcaagcagcggcggatcaaactgggctttacgcaggcggacgtggggttggctctgggcaccctgtatggcaacgtgttctcgcagaccaccatctgcacggttcgaggccctgcagctgagcttcaagaacatgtgcaagctgaagcctttgttgaacaagtgtctggaggaggcggactcgtgctcgggcagccccacgagcatcgaccagatcgcggcgcaggggcgcaagcgcaagaancggacctctatcgangtgagcgtcaagggcgcgctggagagccacttcctcaagtgccccaagccctccgcgcagganatnaccaacctgngccgacagcctncanctcnanaaagangtggtgcgggtctggttctgcaatcggngncaaaagggganggcatnangcngcccgggatcnancacagnnnccgaggnggntantcgcggggggg

SEQ ID NO: 439752 - DNA, 545 bp, Homo Sapiens
  misc_feature (492)..(492): n is a, c, g, or t
tttttttgtcttcgattacagaaccagacacgcaccacttccttctccaactggaggctgtctgccagcgaggagatctcctgcgcggcaggcttgggacacttgaggaaatgcgtctccagtacgcccttgacactcacctcgatggaggtccgcttcttgcgcttgcggccctgtgtagcgatcttgtcaatgctggtcgggctccctgtggacgaatccgcctcctccagccacttgttcagcaggggcttcagcttgcacatatttttgaagctcagctgcaaggcctcgaacctgcagatggtggtctgcgagaacacgttaccatacagtgtgcccagcgccaaccccacgtcggcctgcgtgaagcccaacttgattcttctttgtttgaattgtttggcgaactgttccaactcatcagaggtttgcgtctcctcgtcggagtgatcctggcaatggtgcgagcccagttcgccgtgatccggnggctctcggagcaccgggtgcaggctctgtgcagaggcggcagctggaggtgg

SEQ ID NO: 439753 - DNA, 1466 bp, Homo Sapiens
  misc_feature (1244)..(1244): n is a, c, g, or t
  misc_feature (1295)..(1295): n is a, c, g, or t
  misc_feature (1353)..(1353): n is a, c, g, or t
  misc_feature (1359)..(1359): n is a, c, g, or t
  misc_feature (1365)..(1365): n is a, c, g, or t
  misc_feature (1371)..(1371): n is a, c, g, or t
  misc_feature (1441)..(1441): n is a, c, g, or t
ttctggataagataaaatgcattttaatagtttgaagtgccatgaggtgtctgcatggcactgcagcctgggtgagggaggacagggtcatcatacaaagtaggcggccagggctgacatcttgtccttgggccgtctggggttgggcttcccagggggcctcctggcccggccccgccctcgaccctgccttctccctggtccaccgcggtgcatggggtggcaggaggccgcatgcttcagctccaccagctcctggaagacggggtcacaaaagacgcagcccatgtgctgcgtctcatcgcccgggagtggggacttggccttgttgaagtccacatcaagcaaggcggcctcacagacactgcaggtgtcggcggacacccgcacgcggtgggcgttctcgaagcagtgcgctaccacgttgcacttgttgcaggccaccttccacttggggcccgaggtggggtccagcaccagcaccccgctctcacattccacgcactggccgatgcccagcatgctcagcgagtgctggcaggaggggtgcgtacactcgttgcagcccatgcctttcttcatgtctcggaagggtgggtggttgtagcagtaggggcacagcgggtagctcttgccccgagagcctgatgaccacaggaccagctcgaagtcatccagagggcagcggagctccttgtagagcttgatggtgccgttctgggggagcgtgtaggtctcatcgcagtgggagcagtgcaggcggcttggcttggcctggatgtacttcatgaagcggtggcacttcccacagcgtgagatgggcttgcctgtggccgccaggggcgagaaagacacctccatcaactcatccatgccagcaatggagtcgacaaagtagtggaacttcctcttgaacacgtccagggtgtggcccaggacctggcggtagtcggccttgccctgggcgatcaggttcagctgcttctccactgcactgcggatggtgggggagcaccagctctgcatcaatcttatattagccgtgcaccatgacgatgccgaggttggtaggcttgagccggcgcccgctctcaccgtgacatatttgcgctggcagatgtggttatatgcacagggatgctggattccgagccgatcgcatgcttctccatgaacgggaagagcctcggtccttcgtcaggtagacgaggagggttccgtctgctttctcaagaatgttcacntcgcgcccagagtaaggctttaccacgcctggacaatgtgcaagtctttcntcagaggcaccccttgcagagctatacctccggaatgcctgtgagaggacgatctccncggacnggaganaagtcncgcccatattctaagggaagagcgcctgcggatacttctatcatgttgtccctgcgaatatatgtgtggnatgtttattaagcgacgcggacccc

SEQ ID NO: 439754 - DNA, 848 bp, Homo Sapiens
cttggtagggaggacagggtcatcatcgaagtaggcgccaggctgacatcttgtcctgggccgttctgggtttggctttccccaggggccctccctgcccggccccggccctcgacccctgccttctccctggtccactcctggtgcatgggttgccaggagcccgcatgcttcagctccaccagctcctggaagacggggtcacaaaagacgcagcccatgtgctgcgtctcatcgccggggagtggggacttggccttgttgaagtccacatcaagcaaggcggcctcacagacactgcaggtgtcggcggacacccgcacgcggtgggcgttctcgaagcagtgcgctaccacgttgcacttgttgcaggccaccttccacttggggcccgaggtggggtccagcaccagcaccccgctctcacattgccacgcactggccgatgcccagcatgctcagcgagtgctggcaggaggggtgcgtacactcgttgcagcccatgcctggcgggagaagggagccctgtaaaggcacgcccactgtgcccacctgccctctgctgcctgctcccaatgcctcaagctcctggatccctcgtcccagcagaaggaactcttcttggccttgctcttggggacagccttgctcatgtttcggctcctggctgccattacccctgttttctgcttacctgaaacctcctcaactttcaaggcccctcgctggcaccatcccagtgggtttcagctgactccatcccccctttgctttgctgccagcttgttactggtaatgccacatgaccctcatgtcactgcggacgccgtggtcgacgatatccgcga

SEQ ID NO: 439755 - DNA, 1700 bp, Homo Sapiens
ccaagttttccaaagagtataagcccgcccccgtcaggaaggggggggtttttttctttctcaagaatatccccttgcccccagggaaggcatcccccgcctgcaaggtggacaggctctccccaagggcaccgttttgccagggcattccttcctaaaacctggttaaaggacggtctttccggaggcaggtgaagagctcgggcccaaattctgaaggagattggtgctctgcaggtacttgcagtcagtggctgacccgtggcgatagaagtgtctggtgaatgtactcataagagccgccacgcgtcaaccccctaattcggcctctgtggcagacttcatgggggtgatggggggatggtcgccggcgtcatggcctttccgcgggccggttgataccttctgctaacaaccgcttcaccgtgttggcccagtaggggtggttggcctgctgccgcagagagcccttcaggtcaaagttctcagggtagtgggtggtctctgtccgtgggtagctgatgtagccttgcgtgtagagccgctcagccgtctgcatggcgtgctgcggccccatgcccagagaagagctggccacacgcagcatctccacagtgttcagggccaggggcctctgcttggccttttctttcctgcttgtggcctccacctgggcttccttctccagctttgtcatgtttaaaaacatctgtgcgatctcccggtcaaacactcttactcggtccccagtccaaaaggagagatctgtctttgtcagtgttaaccttggcctgcagcacccagtaggtctctggtttgaaggactggattttatcatgtctctccacacagaatcccagggttggagtctgacacggcccaaaggagatgagagagctgtctaaatcaccgtatttcccctggaaatatttagtctgaaacctggtgaatgcacagccgattcgcaggtccagctcctggcgagcatccactgagagcgcctcgttgtggtcaggctcgcctaggcaggccatggcattacagatgtctgtgtccgtgatggagctaaacctggcccggaacacggtcttctcgccaccatgggccttgttcatgacgggcagaacagcatcaagaacctcaaagcagatgttctccccctccttgtcgcagtccagccacagcacgatgtagtcgcagcctctgccctccacctgcaggaacttcaccatgttcagcttggggttagcttctttcttctccgtgggagcttggctgaacagttctgcggggtccactttgtcccatttgttgtattttcccaggaaatccagggtcatcacgtgaccacagacagacgtcatcttgaagcgcactggctggccagcaaaggtcccagtgtactcgtggactgagcaggccccgttcagccctttgtgtgaggacaggctccctctagagaggattttggcaattgactgtgccaaggacggcttttcagcaaccatgagcacagtcttcatcttgtctcggtccttcacactccaggttcggggcactggcaatgaaaaagtttagactccactcttccgcagcacagcactattaccaatgctgactcccacagccgcaccgcggatccagctccggtccttgttcccggggcatcccgggaattccggaccggtaccagcctgctt

SEQ ID NO: 439756 - DNA, 824 bp, Homo Sapiens
gactctaactatagctgggtctatatgtagctgaggatataggtgtggtgaatccggcttcgagtggttgccgcacccggggaacaaggaccggagactgtgatcctgcaggtgctgctgtggctctttagggtgagatctgctgtaccagtctcacaggagtcagcattggtaatagtgctgtgctgcggaagagtggagtctaacacttttatcattgccagtgccccgaaactggagtgtgaaggaccgagacaaaatgaagactgtgctcatggttgctgaaaagccgtccttggcacagtcaattgccaaaatcctctctagagggagcctgtcctcacacaaagggctgaacggggcctgctcagtccacgagtacactgggacctttgctggccagccagatgcgcttcaagatgacgtctgtctgtggtcacgtgatgaccctggatttcctgggaaaatacaacaaatgggacaaagtggaccccgacagaactgttcagccaagctcccacggagaagcacagaagctaagcccaagctgaacatggtgaagttcctgcaggtggagggcagaggctgcgactacatcgtgctgtggctggactgcgacaggagggggagaacatctgctttgaggttaacactgacaaaagacagatctctcctttggacttatgaccgagtaagagtgtttgaccgggagatcgcacagatgttttaaacatgaacaagtgggaaggaagccagtggagcccccaccggaaaaaggcagcaaggctgcctgaccggggatctgttggccaccctggctggcc

SEQ ID NO: 439757 - DNA, 967 bp, Homo Sapiens
  misc_feature (41)..(77): n is a, c, g, or t
tgactagtctatagggccctcggttatcgcggtggcggcgnnnnnnnnnnnnnnnnnnnnnnnnnnnnnnnnnnnnnatcaggccaaatcggccgagctcgaattcgtcgagagcgggatttgcgtcccggaagcggcggtggcggccgcggcgtaggcggaggagattttcggacctgcgacttccgaacaaccctggcaggaggagcggcgttcagccgggggaggcctgaagaaacgctccggggcccagtggctctacccctgctcctgcccgaccctgccgcctccctcacggagccagcggccgggtaggatgcagacatcagaacgtgaggggagtgggccggagctgagccccagcgtgatgcccgaggctcccctggagtctccaccttttcctaccaagtccccagcgtttgaccttttcaacttggttctctcctacaagaggctggagatctacctggaacccttgaaggatgcaggtgatggtgttcgatacttgctcaggtggcagatgcctttgtgttccttgctgacctgcctgggcctcaacgtcttgttcctcactttgaatgagggtgcatggtactcagtaggtgccctgatgatttcagtgcccgccctgctgggctaccttcaggaggtttgccgggcacggctgcctgattccgagctgatgcggaggaagtatcatagcgtgaggcaggaggacctgcagagagttcgcctgtctcgtcccgaggccgtggctgaggtgaagagcttcttgatccagctggaggccttcctgagccgcctgtgctgcacatgtgaagccgcctaccgcgtgctgcactgggagaaccccgtcgtgtcctcacagttctatggggctcttctgggcacagtctgcatgctgtatttgctgccactctgctggggttctcacccttttaaacagcacgctctttctggggaactg

SEQ ID NO: 439758 - DNA, 1071 bp, Homo Sapiens
  misc_feature (945)..(945): n is a, c, g, or t
  misc_feature (953)..(953): n is a, c, g, or t
  misc_feature (961)..(961): n is a, c, g, or t
  misc_feature (965)..(965): n is a, c, g, or t
  misc_feature (973)..(973): n is a, c, g, or t
  misc_feature (978)..(978): n is a, c, g, or t
  misc_feature (992)..(993): n is a, c, g, or t
  misc_feature (995)..(995): n is a, c, g, or t
  misc_feature (1021)..(1022): n is a, c, g, or t
  misc_feature (1030)..(1030): n is a, c, g, or t
  misc_feature (1038)..(1038): n is a, c, g, or t
  misc_feature (1041)..(1041): n is a, c, g, or t
  misc_feature (1061)..(1061): n is a, c, g, or t
  misc_feature (1066)..(1066): n is a, c, g, or t
gttccccttcctttttccctctctcccttctcttccgctggtaccggtccggaattcccgggatgggcgccgcagcgggagcgggagccggagctgcgaggcgcggcgcagagctggggctgcgcggggccgggcgagcgggaccaggcgggagccatggaccgctagggcccggcctagccccgcgatgccgccggcgagtggccccagcgtcctcgcgcggctgttgccgctgctggggctgctgctcggcagcgcctcccgggctcccggcaagtcgccgccggagccccccagcccgcaggagatcctgatcaaggtgcaggtgtatgtgagcggggagctggtgcccctggcccgggcctcagtggatgtgtttgggaaccggactctgctggcagctggcaccacagactcagagggtgtggccaccctgcccctcagttatcgcttgggcacctgggtgctggtcactgctgcccgccctggcttcctcaccaactctgtgccctggcgtgttgacaagctgcccttgtatgcgtctgtcagcctctacctgctccctgagcggccggccacgctcatcctctatgaggacctggtgcacattctcctaggctctcccggtgcccgctcccagcccttggtgcagttccagcgccgggctgcccgcctgcctgtcagctccacctacagccagctctgggcgtcacttacgcctgccagcacccagcaggaaatgcgggctttccctgccttcctgggcactgaggcctccagctcaggcaatggctcctggctggagctgatgcccctgactgctgtgagcgtgcacctgctgacaggtaatgggacagaggtgccgctctcaggccccattcacctgtccctgcccgtgccctccgagactcgtgccctcaccgtgggcaccagcatttcagcctngagatttnaccccaanagtngggctgtnggtgngcaatggcactggnngnatcccgaaggaaaggcggcagctctnntggacttngtctcccncanctgggtactgggtggcgccntggcntcccc

SEQ ID NO: 439759 - DNA, 906 bp, Homo Sapiens
gccgagctggtccaccgactgcgacagcaggaagtcgggggtcttgccctcggccgcccccttgtggcccaggtagtggtcgaagggcggcggcggcgagggcggctcgtgcaggaaggccgcagcccccgagggcccccgccggtgctcctctaggccgggctccagcccgccggggccctcggccgagcgagcgcccttgagcccggcgctctcgcccccgcgggcacccgaaggctcggcggccgggcggctggcagagcgcggcttggtgcggaagaagtcatcccgggaggaggccaagtcccgggagctggagaaggccgagtggagggggcctggaggcggagcctcggggtcccccgacggggcgggttccaggggtcccccacagatgaggtggagctgggacatcgaggtggcctggtctcgtttgttaccgtcagagggccccgagagctgcagcttgcggtgctgttgcctcggcttcaggcagcgcctccggcagtagtagatgagcagacacagcaggataagcaccagcagggccagggctgccaggatggtgagcaagaagatggtgtggtaggtgccgatgtcctggatgcccgacgtgatggtgaccagcccagccgtgggggaggccatggcggccacccagtaccccagctggggggagacgaaggtccagtagagctgccggccttccttccggattacaccagtgccattgcgcacccacagcccactcttggggtcaaatctccaggctggaattgctggtgcccacggtgagggcacgagtctcggagggcacgggcagggacaggtgaatggggcctgagagcggcacctctgtcccattacctgtcagcaggtgcacgctcacagcagccaggggcatca

SEQ ID NO: 439760 - DNA, 830 bp, Homo Sapiens
ttcccttcccgcgttccccgggagaaacatggccgggagcagcgaggaggcgccagactacgggcgaggcgtcgtgattatggatgattggccagggtatgacttgaatttattcacgtacccacagcactattatggagacttggagtatgtcctcatccctcatggtatcattgtggacagaattgagcggctggccaaggatattatgaaagacataggatatagtgacatcatggtcctgtgtgtgcttaaaggaggttacaaattctgtgctgatctcgtagaacaccttaagaacatcagccgaaattcagatcgatttgtctcaatgaaggttgatttcatcagactaaaaagttacaggaatgaccagtccatgggtgagatgcagataatcggaggcgatgatctttcaacgctggctggaaagaatgttctcattgttgaggatgttgtcggaactgggaggaccatgaaagcactactcagcaatatagagaaatacaagcccaacatgattaaggtagccagtttgttggtgaagagaacatccagaagtgacggctttagacctgactatgctggatttgagattccaaacttatttgtggtgggatatgccttagattacaatgaatacttcagagatctgaatcacatatgcgtcatcaatgagcacggtaaagaaaaatatcgagtctaaagacatgaattctcaccactaaagtcccagatagcatcatatttacgcctgtacttgggaagccagctgtcaagtttgttccccccaggcatcttcactcagcaggatataagaggataaatca

SEQ ID NO: 439761 - DNA, 2432 bp, Homo Sapiens
  misc_feature (125)..(125): n is a, c, g, or t
  misc_feature (583)..(583): n is a, c, g, or t
  misc_feature (629)..(629): n is a, c, g, or t
  misc_feature (690)..(690): n is a, c, g, or t
  misc_feature (710)..(710): n is a, c, g, or t
  misc_feature (712)..(714): n is a, c, g, or t
  misc_feature (736)..(736): n is a, c, g, or t
gcagctcgcagctcgcagcccgcagcccgcagaggacgcccagagcggcgagcaggcgggcagacggaccgacggactcgcgccgcgtccacctgtcggccgggcccagccgagcgcgcaggggncacgccgcgcgcgcggagcagccgtgcccgccgcccgggccccgcgccagggcgcacacgctcccgcccccctacccggcccgggcgggagtttgcacctctccctgcccgggtgctcgagctgccgttgcaaagccaactttggaaaaagttttttgggggagacttgggccttgaggtgcccagctccgcgctttccgattttgggggcctttccagaaaatgttgcaaaaaagctaagccggcgggcagaggaaaacgcctgtagccggcgagtgaagacgaaccatcgactgccgtgttccttttcctcttggaggttggagtcccctgggcgcccccacacggctagacgcctcggctggttcgcgacgcagccccccggccgtggatgctcactcgggctcgggatccgcccaggtagcggcctcggacccaggtcctgcgcccaggtcctnccctgccccccagcgacggagccggggccgggggcggcggcgccgnggggccatgcgggtgagccgcggctgcagaggcctgagcgcctgatcgccgcggtcccganccgagcccacccccctcccnannnaccaacctggccgcgggggggngcgctcgatctacgcgtccggggcccgcggggcgggcccggagtcggcatgaatcgctgctgggcgctcttcctgtctctctgctgctacctgcgtctggtcagcgccgagggggaccccattcccgaggagctttatgagatgctgagtgaccactcgatccgctcctttgatgatctccaacgcctgctgcacggagaccccggagaggaagatggggccgagttggacctgaacatgacccgctcccactctggaggcgagctggagagcttggctcgtggaagaaggagcctgggttccctgaccattgctgagccggccatgatcgccgagtgcaagacgcgcaccgaggtgttcgagatctcccggcgcctcatagaccgcaccaacgccaacttcctggtgtggccgccctgtgtggaggtgcagcgctgctccggctgctgcaacaaccgcaacgtgcagtgccgccccacccaggtgcagctgcgacctgtccaggtgagaaagatcgagattgtgcggaagaagccaatctttaagaaggccacggtgacgctggaagaccacctggcatgcaagtgtgagacagtggcagctgcacggcctgtgacccgaagcccggggggttcccaggagcagcgagccaaaacgccccaaactcgggtgaccattcggacggtgcgagtccgccggccccccaagggcaagcaccggaaattcaagcacacgcatgacaagacggcactgaaggagacccttggagcctaggggcatcggcaggagagtgtgtgggcagggttatttaatatggtatttgctgtattgcccccatggggtccttggagtgataatattgtttccctcgtccgtctgtctcgatgcctgattcggacggccaatggtgcttcccccacccctccacgtgtccgtccacccttccatcagcgggtctcctcccagcggcctccggcgtcttgcccagcagctcaagaagaaaaagaaggactgaactccatcgccatcttcttcccttaactccaagaacttgggataagagtgtgagagagactgatggggtcgctctttgggggaaacgggctccttcccctgcacctggcctgggccacacctgagcgctgtggactgtcctgaggagccctgaggacctctcagcatagcctgcctgatccctgaacccctggccagctctgaggggaggcacctccaggcaggccaggctgcctcggactccatggctaagaccacagacgggcacacagactggagaaaacccctcccacggtgcccaaacaccagtcacctcgtctccctggtgcctctgtgcacaatggcttcttttcgttttcgttttgaagacgtggactcctcttggtgggtgtggccagcacaccaagtggctgggtgccctctcaggtgggttagagatggagtttgctgttgaggtggctgtagatcgtgacctgggtatcccctgcctcctgccaccctttctccccaactccatctgattcaccttttcctcggttccttcatttcttacctccaccttgatttcctctgtcctggccttaatttgcccaccaggggctttgaacccctattaggcccaaagatccgagactccttttggggagagcactcgggccggcccaggggccttctttatttt

SEQ ID NO: 439762 - DNA, 1493 bp, Homo Sapiens
  misc_feature (107)..(107): n is a, c, g, or t
  misc_feature (118)..(118): n is a, c, g, or t
  misc_feature (124)..(136): n is a, c, g, or t
  misc_feature (1027)..(1028): n is a, c, g, or t
  misc_feature (1031)..(1032): n is a, c, g, or t
  misc_feature (1035)..(1036): n is a, c, g, or t
  misc_feature (1038)..(1038): n is a, c, g, or t
  misc_feature (1040)..(1040): n is a, c, g, or t
  misc_feature (1048)..(1048): n is a, c, g, or t
  misc_feature (1050)..(1050): n is a, c, g, or t
  misc_feature (1068)..(1069): n is a, c, g, or t
  misc_feature (1072)..(1072): n is a, c, g, or t
  misc_feature (1075)..(1075): n is a, c, g, or t
  misc_feature (1135)..(1135): n is a, c, g, or t
  misc_feature (1158)..(1159): n is a, c, g, or t
  misc_feature (1222)..(1289): n is a, c, g, or t
  misc_feature (1294)..(1294): n is a, c, g, or t
  misc_feature (1372)..(1372): n is a, c, g, or t
  misc_feature (1377)..(1377): n is a, c, g, or t
  misc_feature (1395)..(1395): n is a, c, g, or t
  misc_feature (1419)..(1419): n is a, c, g, or t
  misc_feature (1438)..(1439): n is a, c, g, or t
  misc_feature (1442)..(1442): n is a, c, g, or t
  misc_feature (1444)..(1444): n is a, c, g, or t
  misc_feature (1450)..(1450): n is a, c, g, or t
ccccaccaatatgggcaaaaatgccttcaaaattaaaagctccgatccccccagctgaagaacttgttctttttcaaatgaaatactcccccctcccctgggcaacntagagcctttncagggnnnnnnnnnnnnnccaaacgccccccattattatttttaaaagataaccaaggaccttaggaccccagccaggacagagcttcccaagacagcacaggtcccttttcctccaggcagcctaccctgcttgccaggcctgcctgtctcccaccttggacaggagccccaggggcacgggtggtcaggtccacgaaccacaaagtcaaagcaagctgcatccagtccccgttctactgcctagctttatgtgaccctggacaatccccttagccacaccgagtccttacctctgaaacggtgataaaaattctcacctcctagagttactatgaagattaactgagatcatgcacacacagcaacgtagaatgaaactagcacatggtaaactctcaatctacgttagctaattattatcgtaaaattctgtggcacagtccgtactaaatacatatttatttttctttaataatatgtgaatggattcctaagattcattcctagaggcttttgtcttgttcatctcaagaagtcttgttcttcaagatgctcagcatcttgaccaaagcctggcacaagttatgtacccagctaatactcattaatccaagcaatgcttctccaagctgcctcagggacctgtgtcccagtgctttccctggcttagacagcttggtggtatttaagtcttctgaatggcaaacggctgaggtcatgtgtactgttctaagtaaagcagagggaactggagtgggcagtagagggtagggaggagtggtaaagagagagctcgtagctccagggatccccccaggcagaggctgtgtgcacctgtccctcttcttgcagggatcccgccggcctgacaggcccccacctcaccttggaggcggcccagtccatnnagnnttnngnanaagggttnangttgataaggagaagggnntgnagnatgtgagggttgtttagaggaaaatggaggttaggatgtagggcggcctggtggtgttgngatggcgaataatggttttgagnngaaagtgttgaaggagtggaggaaggatttgagaaaggtgatggatggaggggtagatgtagnnnnnnnnnnnnnnnnnnnnnnnnnnnnnnnnnnnnnnnnnnnnnnnnnnnnnnnnnnnnnnnnnnnnatgtngtggatgtggtggtagttgaagagggggttgtaggaggttttgtggttcatggggatgtgatggtaggtgaggatganagggnggtttgggttgggagtgngagagagggtgaggtgaagagagngatgtaaagtgtggatgtnntgntngtgganatgaaagtgttggaggaggggggtgatggtgtggggtttgtgg

SEQ ID NO: 439763 - DNA, 920 bp, Homo Sapiens
  misc_feature (37)..(38): n is a, c, g, or t
  misc_feature (42)..(43): n is a, c, g, or t
  misc_feature (66)..(66): n is a, c, g, or t
  misc_feature (365)..(366): n is a, c, g, or t
  misc_feature (370)..(370): n is a, c, g, or t
  misc_feature (372)..(372): n is a, c, g, or t
  misc_feature (374)..(374): n is a, c, g, or t
  misc_feature (378)..(378): n is a, c, g, or t
  misc_feature (380)..(380): n is a, c, g, or t
  misc_feature (382)..(382): n is a, c, g, or t
  misc_feature (384)..(384): n is a, c, g, or t
  misc_feature (386)..(386): n is a, c, g, or t
  misc_feature (388)..(388): n is a, c, g, or t
  misc_feature (390)..(390): n is a, c, g, or t
ttcgacacccaagataacatgggctgggggctgggannaggnnaaaacgtcagttgttcaaaatanacatccttttacttgcaacaggggcacagtgatcaacatgcacagttccgagattcgctggtttattctattgggataaaatactcctgttatctttaaagtttcagagtgttgtgccttcaggtaagagaattctataaaaaggtttggtcacacatcatgctggaccccgagaccaggcagcggtcttgtgtgttttacttctattaaatgtgtcttttgttgcatagccctatgggttaatgacatccacacactgtacacacctgtacaggcactgcatctccctgtgacacagnnatanananacanananananananatcacacacgatttctttgaggagaatcatggggtagaagccaaaaatccaacacagatcatctgtaatttcagaacacggaggacacaccaccatcaactgctctaaatgctccctttcttcaccaaacaagggacctcccagcatcttgtgcaccttggacagtgtcctgagcatggtctttctctcctgagcgtggccatgggggtcagacctcacttgactgcctgctccctgtgtctggcgccaggacagtgctgggcatcaggtgcccggcctcagtggcaggagccgtgtcctccctcggtcacttgctctgagtttcattccagctggggcttcctccctcctgccctgacggccccacatccaagcccccagccaatgtcttcctccttcctaccagcctttgcctctcttctgctgtatgtggaaggaaacctatttcacataccacagagtgtgccctgagaatcatatgcagaacagcccgctctcgacgaattcgagctcggccgatttggcctgat

SEQ ID NO: 439764 - DNA, 1234 bp, Homo Sapiens
  misc_feature (124)..(146): n is a, c, g, or t
  misc_feature (789)..(871): n is a, c, g, or t
aacacttcttaaatataaagttttgcaacaaacctttgatttatatcaaatataattaaaaattaacaaatgaatacattgtatcaaaaagtacgaagatatacattatcatgcacatacttgnnnnnnnnnnnnnnnnnnnnnnngttacatgcacacataacttgttcaaactacagccactgcttgactggttccagatgcagacaactgggtgatgcacttcaaatttggcagctcactatgagattcaggggacatatatgatagccggagaagacacagtgagaaacaaaacccaaagtcaggaaaacaagacataatgtctcctttccccgctccctgtagttttcatcaattccaatgcctagaagagtctagacaagccagctaggctgtgtgggtttagaaaagtggattctcgacccaacactgcctggggaaatggctgtggttctgcatggaatggacacattcgacacccaagataacatgggctgggggctggggaacaagagacaaaacgtcagtgtccacaatacacatccttctactttgcaacaggagcacagtgatcacatgcacagtccgagattcctggtttattctattggaataaaatactctgttatctctaaagtttcagagtgttgtgccttcaggtaaggaaattctataaaaaggtttggtcacaatcatgctgaaccccgagaccaggcagcggtcttgtgtgttttacttctattaaatgtgtcttttgttgcatagccctatgggttaatgacatcnnnnnnnnnnnnnnnnnnnnnnnnnnnnnnnnnnnnnnnnnnnnnnnnnnnnnnnnnnnnnnnnnnnnnnnnnnnnnnnnnnnatttctttgaggagaatcatggggtagaagccaagaatccaacacagatcatctggaatttcagaacacggaggacacaccaccatcaactgctctaaatgctccctttcttcaccaaacaagggacctcccagcatcttgtgcaccttggacagtgtcctgagcatggtctttctctcctgagcgtggccatgggggtcagacctcacttgactgcctgctccctgtgtctggcgccaggacagtgctgggcatcaggtgcccggcctcagtggcaggagccgtgtcctccctcggttcacttgctctgagtttcattccagctggggcttcctccctcctgccctgacggccccacacgct

SEQ ID NO: 439765 - DNA, 991 bp, Homo Sapiens
  misc_feature (78)..(87): n is a, c, g, or t
attcataaaccactaaacccctcccatgcacttttcttgcaaatcagatatttgtataaacaaacaaaaataggaagnnnnnnnnnngaaaggatattgttcaaatggaacttactttttaagtgatggagacatgcacttgggggtgggtgggtgtgagttttcatttgtgttttgaaatcccaaattaatgagcatgataaactgttattgctggcactggctttaccccaagtggccaagtggcactgtctgactctctgagtccttgctgggtccccccaaccttcccctaacccccaccctttccctttccattgacttgggacagcccttgtcgatgtgccaatcacagtgggaagggggagaaggggggaggtcacagtgcatggggttcaaggtcacagtgggcggagcaagggggatcacagtgcaagtaagtcaggtcgttccctctgctcaagtccagctgtctgccacggcagtgcaacccgtggcggacgacccaggaggcggtgacggcagcaacggcggcatcttttcttgcctgcatttatctgcgctgtttgaagccttgagacccatcaggacccaaaggctgtctgatcacattattgggctgcctgctgtcttcgggttgggagatcctggttggcctgtcgaggatgggtttctcctgctcctcctcggggctggcgctgcccaggatccgcttccgggcctcggcgtactcggcctctcgctgtgctagggacttgactggaagggtgggcctgctggtggagttggggctgctgaccacaccgttgctggtgggcctcttgaggatgcggatctgtggagggggccccgcgggaaggctatcgtcctgaatcacaatgggcactttgggaggagatttggatttcctgcccgctgtctgccgcctcttcccagctctcagcgacctcctcatcttccatcttactcgccgctttccctcctcccccac

SEQ ID NO: 439766 - DNA, 777 bp, Homo Sapiens
ctttccccttacccccacctttttccctttccattgacttgggaacagcccttggtcgattgtgccaaatcacagtgggaagggggagaaaggggggaggtcacagtgcatggggttcaaggtcacagtggtcggagcaaggggggatcacagtgcaagtaagtcaggtcgttccctctgctcaagtccagctgtctgccacggcagtgcaacccgtggcggacgacccaggaggcggtgacggcagcaacggcggcatcttttcttgcctgcatttatctgcgctgtttgaagccttgagacccatcaggacccaaaggctgtctgatcacattattgggctgcctgctgtcttcgggttgggagatcctggttggcctgtcgaggatgggtttctcctgctcctcctcggggctggcgctgcccaggatccgcttccgggcctcggcgtactcggcctctcgctgtgctagggacttgactggaagggtgggcctgctggtggagttggggctgctgaccacaccgttgctggtgggcctcttgaggatgcggatctgtggagggggccccgcgggaaggctatcgtcctgaatcacaatgggcactttgggaggagatttggatttcctctctttttgtgtgatcttcagttttttttccaaccgtctgtctatttccccgctgtctgccgcctcttcccagctctcagcgacctcctcatcttccatcttactcgccgctttccctcctcccccaccccctccccgcgatccg

SEQ ID NO: 439767 - DNA, 586 bp, Homo Sapiens
ttcgcagcctgcaacggagagctcactaacattatttcttgggctgcttttacaggcagaattgatctattcggggaaaaaaagcaagccccttaatttcaaatattgtgtggagtttatcagagagcagaggtgggctttaagaggctcactagtggtttctggtggttgctataacgagccagaattggggtagattttggtggaggggaaaaaacacacaagaaaagacagaatccagagtagcggagactttgtgcccccgttggagagatggttgagtcctcgtcaaggttgctgtggtatcccagaaacaccattcactccgagctgtgaccgcgcaccaacaacagcaacaactccactgcgccgggctgaggagcaggaattaggagctcgcgaataatatgaaagggatccgcaaaggggaaagccgagcaaaggaatccaaaccctgggagcctggcaagcgaagatgcgctaaatgtggccgcctagacttcatcctgatgaagaaaatggggattaaaagtggatttacgttttggaacctcgtctttttattgacggtgtcttgtgtgaaagg

SEQ ID NO: 439768 - DNA, 2150 bp, Homo Sapiens
  misc_feature (73)..(97): n is a, c, g, or t
  misc_feature (1263)..(1263): n is a, c, g, or t
gggggcgaacaattttgtggggttgggcccccaaatttccccaagaaggtcttttgaaaaatgggtttccccnnnnnnnnnnnnnnnnnnnnnnnnntttagggaaagttggaaagttaaaagaatgtttccccaaggggccccgtggggaaaaccccgcggaaaggaatggccgaaacaaaaagtgtggcccccttgccttggcagggaaaacttacctaaggctttggcccccaggaaaagcccaagttcaggggttgggcccaccaggggtaaaggcccaccagggaaagcccccagcaaggttcttaggctacccacaggaccccaagttggccagggcccttatcttggtgggctggtgttgtggggaagggtgtcaccccggaggggccaaaggaagcccgatcccctgggaacctctggggtacaggacccacaggcccccagtaacatccctccataggaagggctgcgggggccaggggccccagtaggcaagtatgaaaagccccacagggaataggggggacacatggccccaggcagggactgggaccaggggcccagccagtccaccctgtggagccagtcctaaggtcacagcaagttccaccatcaagcagcattcttgccatccaattgtcccttgagtctagactctcatttcttccttcttcactgccacagagaaaggataacaaacagcacttccccatggcagatgcttcacagtccaagactcggggccttgaatggtgagtcacaaactttgcaaaacgcgtgggccatgacagccccagaggccaacagcaggtccacggccgagccacaggagtcctgtggcacaggagtcagggcccaaggagcacacgtttcagataggccagggtggtggcgttggccagcatctcgatgtgctcgctgcctggcagctcctgcagcaacacttggtgctcctggcggctctgccaggcctggcactgcagggcactcttcaagttcacagtaccatcgccgtcaccaaagcagattttagggtcacggtcagggaagctctcatagtagaaggagtctggtgtggggacgccagtgccatagaggcagtgcagctgcacgccaggtggcatcgtggcttccaccagccctttctgtgtcctgccgcatgagccagccatcttcaaagccgatgtcctggaagaacttgcggtagtcccgcagtgtgtagttgattgtgggtgtctgcacgaacaccttctcagngtgaccatgtgtagttgtagggcagcagccagctggtggagacagctgaccgctgctgctcccggatcttcaggggcccgatgactgggatccggttgttgtctcctgaagccaggacgcgcagggtcttggccacgcccccccagggcgcacccagtgacacgaaggcccggatatacttgtccttccaggcctgcggctgccgctgcagaaagtagagcgtgtacatgttgcccatactgtgggcaaccagcaccacggggcccccatacagctggtacatctcctcgatcatctcgcggagggccaggaagtagggcccgttttcatttggggctcggcgccagtcatagggagcccctcggacatcctcaccccgtgtgtagccccagcccacaaggctctccaccatggtgtggaaataggaacccacgctgcttttgctggggtccaggaactccagtgagaaggtcttcccaaagccagggacacgtacatccacaccatcaggaaactgggtggccctggatgttttgttgtaaaccagcctgatattgtcaatccagcagtcaatgatgacaggcagcagcagttccaggttcagccagattgtgaagtagctttcggtcttcttggagcagaggtagtgcaccactgtcggcttgtccagcttggcttccagttggttacccaaatcaccagggaccagcaccactggggggtgacgtccggccgggagcgctgggtccgcgagcagcattagcagcagcaagaggaacaggaggccatccgggagcagccccacacggtaggggcggaggtggaggcccatggtgtacgacggtcgccgcaggtccgggatgcaggttcagctctctgggatcccg

SEQ ID NO: 439769 - DNA, 1058 bp, Homo Sapiens
  misc_feature (189)..(189): n is a, c, g, or t
aacttaatgaaacccaagttgttttccctaacccattactgggaatttttttcccacgtattcccttgtatttcccaataaccaacatgcttttttgtttcttttcgaaataataatttgcttaattttaccaattccagaaaaaagaaaccaagttaacttttttctaaggagaaatgcccttctatnaaccacattggttgaaaattgcaaatattctggctcatttaaaataagctccagtcttgattttaaataccatcaataaaggaggaattattttcacatatatgtaaattcattattttaactcagacgtaaatatatctccctcaggatcaatttaaaactgaagtcatttgccagcaggtttaagagccagctccttccctacccagtacagtcagcaaagcacactcatgaaaccgggtgaagaagtgcaggtgagaagcacaggctctcagcagacatggagggacccagagagaagtggccaggctgcttggaagtatatgcccttagagtctaatgttctggactgcagttaccttccaaaggagattctgactctctaggtggatgtaaaaacttgtaaatcaatcaagtaaaacctgtcttggaatataggaaatttaagattagcaggttggctcatacaaatcagtgtgcccagataggcagtgtccaggaacgaggaaaacgggccagctcattcttcctaaaggcccatggaaaagcagagaaattcagggaggccaagaatggctatgaaatctacaaaaaggaaaggcattagtggcccacaatggagaaacagcagggacaggaagtgaaggttaccattaacatattcagtctgtttgtaccagggaggctctggaatttattttcaacactccatgcttgaactgaaatgcctctcaacactttgcttaaactttaaaaacacagaatacagaaacagtggctctgtgttatctctgaagcacaaataagtaaattaaatttttataagctatcaatcaaaacctgcatctcagatactaacattaccttga

SEQ ID NO: 439770 - DNA, 295 bp, Homo Sapiens
  misc_feature (207)..(217): n is a, c, g, or t
tctcctggtaattcttacatgcagacaagtttgagaatcactgatttaggttgtttccaatttttccactattaccagcaacattgcaataactgttatttgcatgtctctctgtgcccaggatcaacaatttctttaggagctacacttaggagaggaatcgatgctttggagctcataggcatcttcaatctccagagtatttcnnnnnnnnnnnatttgatgcactgtttattaacaaaatcaacattgtccttggatgtccataacactggttataaaacagggataataa

SEQ ID NO: 439771 - DNA, 1555 bp, Homo Sapiens
ccccctcttttgttcattcgtgtcttcgtgcttctgtctcttgtctggtatcttttttgtggttccatctggggaggtgctcactcaatgtttattgaacagcgaatacagaaaagacagtccctggagctctatatgtggaaagtagcccttctggacagaaagaatattcgtggtccatgtggtttgagtctgttaagaaggacactaaggcacatggctggtgatctttgcgtcatagacacgggtgagctcatggtggaactcctccttgtctgtaggtttccaggctgggcacagaggtgagggcagaatgttgggggtcccagtggatctccccacaacttcctccagggcaggatttccacccaggcccaggctgcccgttcctctccttctccgccagtctgcgctgcggctgccacggctcacaccagagggatggggtaggaggcgcaggcagccaggccacacatgttctttccgcgctcgatgaggaagtacccgttcattccccactggggaccccaagagtttttcacgatccagtaagggatcccatttttttctccatacccaacagccagtactgcatggtttactttatctggagttttatggcaggaagtactggagtagatgcccgttctatacatcatgaagtcctgagtcacctcaaaggcaaagctcacagggttgtagagggccacagcctccaccatcgcttcctcgtcatagattgtgatgttggctacatccttgacaaagccgatggcctttccaggttggaacttgcaataaccatccttgccctggtaggggtaggtgtcttcacccatgatccccttgttgtacaggatatactcgaaagcctggctggggagacccccttggcagccgtgattattgaagtcctgggcgcagtccaccagctgctgttccgccaaggacagcatctttccggttgcgatggcgatcgcagactccagggccccagtggtggagaaagtccagcaactgccgcaggcaccctgatttttcacaggtgagacaaaatttccttttttccgccagtccacggaaggtgggtagggaccagtacctcgaaggtagttacttttggtggctgagcaattctgaggctctgaccagagatacttgtgttttatttcagcaaagctcatgtctgaaaattggttcagtgccattttaaatgtgtggttcccattgttgtgggcgtttatcttcctccagttgctggcaaacgtctgcagcctgtggtggtactcctccgtactgtaggtcttacggtgcttagacatccatgacttgaagtgaaacttctctaaggagttcacgcacagttcggcggcaccgcagacggggactcccaggagccaggccccggcgcagagcagcggcagcgtggcccacatcgcagcgctggcggcttggctcttgcgctcagggtccgcggaggtggcggcccagagcgtcaactgggagcgcggggggggcggcacgagcgtggaggagcggcgggatccggagaatt

SEQ ID NO: 439772 - DNA, 488 bp, Homo Sapiens
  misc_feature (18)..(18): n is a, c, g, or t
  misc_feature (65)..(65): n is a, c, g, or t
  misc_feature (93)..(93): n is a, c, g, or t
  misc_feature (127)..(127): n is a, c, g, or t
  misc_feature (220)..(220): n is a, c, g, or t
cccctggtaaggggtaangtgtccttcaacccccatgaaacccccttgttggttaacaggaatanaactccgaaaaaccctggcctggggaanaccccccttgggcaagcccgtgaattattgaaantccctgggcgcaagtcccacccagctgcctgttcccgcccaaggaacagcatctttcccggttgcgaatggcgaatcgcagactccccagggnccccagtggtggagaaagtcccagctaatctccgcaggcaccctgatttttcacaggtgagacaaaatttccttttttccgccagtccacggaaggtgggtagggaccagtacctcgaaggtagttacttttggtggctgagcaattctgaggctctgaccagagatacttgtgttttatttcagcaaagctcatgtctgaaaattggttcagtgccattttaaatgtgtggttcccattgttgtgggcgtttatcttcctccagttg

SEQ ID NO: 439773 - DNA, 852 bp, Homo Sapiens
ttttttttacacagcaattatttttatgtaacaactctaaaaagttcttgacaagttattatgagaaacatttcatctaggagtgatttctaaggcagcatttgagtttccataaaaacagaaccttctgtctcagaaggtatatcaataagaggaccagaatcttctatttccaagtgcattggtttctcctgttcacaactcaggtttgaactgtcgttcatttgaatctcttcctcttccaattccaaagatttatctggggctgaagctaccacttcttcgtcttcattttcatgtagaaagttacaaatcatgttgggtcgataggagaaatcattatcctttatttgcagccattccaccccacctatgttttcttctccttccttcttctctgtcaggagagttcttgtcatgctgagcttcttcattgtatggcatttatattttagcactgttttattattgccttctgtatcagcatgttcaacattttcttcaaatataacacaggtccctagagtgtcttcatactccccagcaaagacacagctgtccacttgcagaatgggcctctcagtgtcaatgcccaaaaccttgcatttattttcacattttgagaggaagtctgaatcaataattcctgataattccaccagaaccaactgctcctcctcttcctcgtcttctccgtcctctggactccgctcgtccgccgccgccgccatggtcccgcggcgcctcgccttctagtcactggccacgcccgcccggagccgccatcttgagtacgggcttcagctccgaggcgaagcaggttattgggttcctgccgctccgctcctcccc

SEQ ID NO: 439774 - DNA, 1369 bp, Homo Sapiens
  misc_feature (53)..(53): n is a, c, g, or t
  misc_feature (1128)..(1138): n is a, c, g, or t
aatcaactctgctgttgttgctgcttcttagcaaaactggtaaaaacaaaatngtaatcattgaacatagcactctggcaatcaagacgcttaaaaccttcaatctttttggggcgaagcaagccttgtgcgacatttagacctctgattaacaaccaaggtggtcacaaattttcctggcttgaagacttctacaactttcctgatcaggtcatcataggaggtctgacttaagtttgtttcaaagctaacataagaaaattctggttctggagtgatgtgaatagtccaataagttccatccgatttcattccattcatcgaatacccacaaggattgaacattgtggcatcaatgacagaacctggtatcaggtcacgaattccactctcacgagtgacatcctttgcagtaacaccatctttcatgtagaactggtccataactgctgggtcaagctcactcatcagaatttccaaggtttgatctggctgactgattacccgactctctgggaaatccagagtatataagtaccaacagtcagaattcatacgtcccatacaatatgctgctccatttgggaaaattgcattaagaaactctatttcttcctggaaattccggtgtgggtacccttggtgagaaggcttcatgaaattcttacgagaataaaagaagctttgaattgagtcaaacccactgtaatccctagcaagcttcaacaggggaaccagtgctttcagcaagagggtggtaccacatgtcttccaaatgaaacgtctcttggagacaaacatgctactctcactgagtacataagcttcctgcttgtcagtttttgtcacacttatgattgaacattgcacatccttcaaaagtatgtcccactcagatcttgggatagtgcgaagatccccagatccttggtttgcgtcgggctgctgccgggagaacccaacctccagcagcttctcggtcccttcgaaaaaatgtgcagcttccatcaccgtgagactagcgaacaacccacaaccacagaaaatcaactaaattaaacctcttctcccgccgctgccgccgccgctgcggattgttccagctgtgttactaaagttcaggttccnnnnnnnnnnngctataattttatattaactttttttaaaaaaaggactaataaaattttcccggctttgtgtgagcgaaagttgaacgtgagtcttttggaaatagaggcagatacagttcagtctcttgtattccgctgctttcccgttagagagagtagagcgagcgctagctaatgtcgccggccatactgtgtaagcccgctctcgacgaattcgagctcggccgatttggcctgat

SEQ ID NO: 439775 - DNA, 987 bp, Homo Sapiens
  misc_feature (185)..(185): n is a, c, g, or t
gtacctgcttcatcagcttcctcatggccttgtaattgtgatgctgaaagtctagagggtcagaggatcccgacgcaggggcctcaaggaataggtcattggggtctgagactgggcaggccaggatctctgcccggaggcaaggcgcgcctccctggagccaggtctggggcagcaggcgaatngaagcgggccacctggggctccggcaggaggttcagcactggagtttctgggtctgaattggcaggaaatactgcgtccatcccactgctgtggttcctacttccccaccaggtccgactgtcattgctgaactggaccttgtatgatgtgacccagtcatacctccagacagagttcctgccctgtgtgataacacccgagaagcgggtggggtgcccagcgtccacctgaaaccatggatcggcgtcctgctcctcagcacaccaggctccatcatatagatcgccgtcctccaggcctgactgaatgttgagccgtcctcggtgtggtccaagaccaaaggactggctgctggatgcctcaagccggctatctgaaactcgcagggactccagacccaaaggaggacagcctgtttcttgtttctcagcggggtcgagggtccctgctggagtgggggtcacaaggggcccggcagtcaccagtggggtggggcgagttagagttagcttcttccgcttcttcataatgacctttttcttcttgatgactcgaatccggacatgctgttctgaggtcccgttagctgtctccgccggcggctgtgccgggctgctatgcagggccggggtcgagcctgggaccttggtggtcccgggctgcgcgaggcccagcaccgagttcctgggcgcccccagagccgggccgacggccggcgcgaaggcggccagggcgagcaggagcccccacatggcggggattgagtgccagggcgcgcgggctacggcgggtggcgggtcg

SEQ ID NO: 439776 - DNA, 1157 bp, Homo Sapiens
  misc_feature (915)..(936): n is a, c, g, or t
  misc_feature (1022)..(1022): n is a, c, g, or t
  misc_feature (1048)..(1048): n is a, c, g, or t
  misc_feature (1060)..(1060): n is a, c, g, or t
  misc_feature (1066)..(1066): n is a, c, g, or t
  misc_feature (1098)..(1098): n is a, c, g, or t
  misc_feature (1110)..(1110): n is a, c, g, or t
ccaccgcagcaggtcacagcccctcgaggcgacagcggccccgccgcaccagagcagtggtacaggcatggatgggaagaaatgcagcgtatggatgttcctacctcttgtatttactttgtttacttcagctggattgtggatagtatacttcatagctgtggaagatgacaaaattttaccattaaattcagctgaaaggaaacctggtgtgaagcatgcaccatatataagcattgcaggtgatgatcctcctgcaagctgtgtgtttagtcaagttatgaacatggcagccttcctagcccttgtggtagctgttctgcgcttcatacaactgaaaccgaaggttttaaacccgtggctgaatattagtggattggtggctctgtgtctggcttccttcggaatgaccttacttggtaatttttcatgctcacaaattgtatgaagtaaatccataacgtcggaacttccttgacctttggatttggcacattgacctgctggatccaggctgcgctgacactcaaggtcaacatcaagaatgaaggacggagagttggaattccacgggttattctgtcggcatctatcactctctgtgtggtcctctacttcatcctcatggcccaaagcatccacatgtatgcagccagggtccagtggggcctggtcatgtgcttcctgtcttattttggcacctttgccgtggagttccggcattaccgctatgagattgtttgctctgagtaccaggagaatttcctaagcttctcagaaagcctgtcagaagcttctgaatatcagactgaccaggtgtaaaccatcagtttttccttgctggtgaggtgggtgtgacagtgggggaggggccagtaggacacactcacaggacttgacatagaacctcatttnnnnnnnnnnnnnnnnnnnnnnttcatggccacatttgccaaatgagctttttcagggcgagttatttcttttaatggaaaaagcacaagcccttatgtgtcggaatncacgctgtttccacttggaaattttntgcacggccggngcaggnggtttgtgccttgttcccttttttattccgtnccctttcccggnattccttctttttccctttttttccactgttttcaggtaccctaccc

SEQ ID NO: 439777 - DNA, 1721 bp, Homo Sapiens
agcgggctggcgcggtgccggtggggtggcctggagcggcgtgcgtaatgtcggcactttgctggggccgcggagcggcggggctcaaacgagccctacggccttgcggccgcccgggactccccggcaaagaagggaccgccggtggcgtctgcggccccaggaggagctcgtccgccagcccccaggagcaagaccaagaccgcaggaaggactggggccacgtggagctgctggaggtgctccaggcgcgggtgcggcagctgcaggctgagagcgtgtcggaggtggtggtgaacagggtggatgtggcgcggctcccagaatgtggcagtggagatggtagcctccagccacccaggaaggtccagatgggggccaaggatgccaccccggtgccctgtggccgctgggcaaagatactggagaaggataagcggacccagcagatgcgtatgcagcggttgaaggcgaagctgcagatgccattccagagcggggagttcaaggcgctgaccaggcgcctgcaggtggagccccggctcctgagcaagcagatggccgggtgcctggaggactgcacgcgccaggcccccgagagcccctgggaggagcagctggcccggctgctgcaggaggcccctgggaacgctgagcctcgatgtggagcaggccccgtcggggcagcactcgcaggcccaggtctcaggtcagcagcagaggctcctggccttcttcaagtgctgcctgctcactgaccagctgcccctcgcccaccacctgctggtcgtccaccacggccagcggcagaagcggaagctgctcacgctggacatgtacaacgccgtgatgcttggctgggcgcggcagggtgccttcaaggagctggtatatgtgttattcatggtgaaggatgccggcttgaccccggacctgctgtcctatgcggctgccctccagtgcatggggaggcaggaccaggacgccgggaccatcgaaaggtgtctggaacagatgagccaggaggggctgaagctgcaggcactcttcaccgccgttctgctgtctgaggaggatcgggccactgttctgaaggccgtgcacaaggtgaagcccaccttcagcctcccgccgcagctgccgcccccggtcaacacctccaagctgctcagggacgtgtatgccaaggatgggcgtgtgtcctacccgaagctgcacctgcccttgaagaccctgcagtgcctctttgagaagcagctccacatggagctggccagcagggtgtgcgtggtgtccgtggagaagcccacgttgccaagcaaggaggtcaagcacgcgcggaagaccctgaagaccctgcgggaccaatgggagaaagcactgtgccgggcgctgcgggagaccaagaaccgcctagagcgcgaggtgtacgagggccggttctcactttaccccttcctgtgcctgctggacgagcgcgaggtggtgcggatgctcctgcaggtcctgcaggcgctgcccgcccaaggtgagtccttcaccaccctggcccgggagctgagtgcgcgcactttcagccggcacgtggtgcagaggcagcgggtcagtggccaggtgcaggcgctgcagaaccactacaggaagtacctctgcttgctggcctccgacgccgaggtgaggctcgcaccccctctcctcctggctggggccagtggtgggtg

SEQ ID NO: 439778 - DNA, 1125 bp, Homo Sapiens
  misc_feature (10)..(10): n is a, c, g, or t
  misc_feature (13)..(13): n is a, c, g, or t
  misc_feature (28)..(28): n is a, c, g, or t
  misc_feature (37)..(37): n is a, c, g, or t
  misc_feature (68)..(68): n is a, c, g, or t
  misc_feature (76)..(76): n is a, c, g, or t
ccccaacccnatnagccacatccccccncccccacantttcctcctttgagcggggggcactgggtancccccctnccaaaatctagtgcctgcttgggtatgatggtctctctcagcgtcagtcctcatgccgggcttgctccttcctcgccccattcctgtctccttccaagccctcaccgtggccatctgaaaaactcatgtccagtgtcctaaattgtctcatcctccctctccccgtgcctctgcaccccaagggaggaagtaggggttgtctcccccctccaatttccacttcacataatggaacagcttttggccttttccttcttgaaggtagaagagatgagttcagagcgactggggaggtggagcagtcgtttggagaggcttcggacagggctcttctggggcagtgggctaggcttgttcagacacagcatggatgccgtccgaaagatgctgtggatgctcttttctgaggtgaaagctgagccttccaggtagatttctgcacccagctgctttgctattgcacaaccctgctcataggagatgggcgcctgcttctggtgggacagctccatcagagtactcaggtctgttcgcaggtctgtcttgcagccaatgagcaaaacgcgggtgctgggacaataatctaggatttctgtcctccacttcttgagtgcgctgtccactgtctctggacggctgatgtcaaaacatagtaatactgcatccgagtcgctgtagcagagtggacggacattatcgtagtagggagatcctgaggtatcccagagactaagctccaccctctgttcctctgtctccaaacaggctgtgtaattttcgaacacggtgggcacataggtctctggatagcaatccttcgctaacacttgcaacatcgcggtcttcccacactgcacgtccccgaccagaacgagcttacatctggccacgactggctggggggcccgtctctccttcatggttgcagtgtccgcgggacttgaacttcgattcagaagggagggttgcgccaggtgcgtctcagcacgccaatcaagccagattccctgccatcccgggaattccggacccggtaccagcctgctttt

SEQ ID NO: 439779 - DNA, 1652 bp, Homo Sapiens
  misc_feature (91)..(104): n is a, c, g, or t
  misc_feature (1198)..(1198): n is a, c, g, or t
acggagccaaattctttatatgtattatatttttcattaataaataggttttcttcattaaacacagaacatataacagattgaaacactnnnnnnnnnnnnnnaattccaaagacaagagtctataaaacaaatgccagctgtactaccctaagggcagaaaaagtctggtgacccccacccagccctgcccctgcagcaccaccacccccacactctgcaagagaagggggtctggggcttctcccttggaccctggggacttaggtgagaagcatgtgaatgtatgatgtcacctctccatgaggcatgggctatgcaaagatgaggtttccttctcattggctctgaccagctcctgcacttccgattgcagttacgaagcacctgggctaagcccccaagggagctgccgctccacttccccactctccgttgctgcctccttagaggggaagggaagggctcagggacccctcccatcccctgacctgcatggaaacgctgtgtggaagaggcatgaagctgaaggtgaggctgctgtaggcccccaagcccatgaggccagcatgccccccgtcccccacagctttccttcctctggagcggggggggcactggggtagtcgccccctccaaaatctagtgcctggcttggggtatgatggttctctctcagcgtcaggtcctcatgccgggcctggctccttcctcgccccattcctgtctccttccaagccctcaccgtggccatctgaaaaactcatgtccagtgtcctaaattgtctcatcctccctctccccgtgcctctgcaccccaagggaggaagtagggggttgtctcccccctccaatttccacttcacataatggaacagcttttggccttttccttcttgaaggtagaagagatgagttcagagcgactggggaggtggagcagtcgtttggagaggcttcggacagggctcttctggggcagtgggctaggcttgttcagacacagcatggatgccgtccgaaagatgctgtggatgctcttttctgaggtgaaagctgagccttccaggtagatttctggacccagctgctttgctattgcacaaccctgctcataggagatgggcgcctgcttctggtgggacagctccatcagagtactcaggtctgttcgcaggtctgtcttgcagccaatgancaaaacgcgggtgctgggacaataatctaggatttctgtcctccacttcttgagtgcgctgtccactgtctctggacggctgatgtcaaaacatagtaatactgcatccgagtcgctgtagcagagtggacggacattatcgtagtagggagatcctgaggtatcccagagactaagctccaccctctgttcctctgtctccaaacaggctgtgtaattttcgaacacggtgggcacataggtctctggatagcaatccttcgctaacacttgcaacatcgcggtcttcccacactgcacgtccccgaccagaacgagcttacatctggccacgactggctggggggcccgtctctccttcatggttgcagtgtccgcgggacttgaacttcgattcagaagggagggttgcgccaggtgcgtctcagcacgccaatcaagccagattccctgc

SEQ ID NO: 439780 - DNA, 419 bp, Homo Sapiens
  misc_feature (78)..(91): n is a, c, g, or t
  misc_feature (187)..(187): n is a, c, g, or t
  misc_feature (215)..(215): n is a, c, g, or t
ctttatatgtattatatttttcattaataaataggttttcttcattaaacacagaacatataacagattgaaacactnnnnnnnnnnnnnnaattccaaagacaagagtctataaaacaaatgccagctgtactaccctaagggcagaaaaagtctggtgacccccacccagccctgcccctgcagncaccaccacccccacactctgcaagagnaagggggtctggggcttctcccttggaccctggggacttaggtgagaagcatgtgaatgtatgatgtcacctctccatgagggcatgggctatgcaaaggatgaggtttccttctcattgggctctgaccagctcctgcacttccgaattgcagttacggaaggcacctggggctaaaggcccccaagggagtttgccgttcca

SEQ ID NO: 439781 - DNA, 473 bp, Homo Sapiens
  misc_feature (434)..(434): n is a, c, g, or t
  misc_feature (454)..(454): n is a, c, g, or t
ggagggaatctggcttgattggcgtgctgagacgacctggcgcaaccctcccttctgaatcgaagttcaagtcccgcggacactgcaaccatgaaggagagacgggccccccagccagtcgtggccagatgtaagctcgttctggtcggggacgtgcagtgtgggaagaccgcgatgttgcaagtgttagcgaaggattgctatccagagacctatgtgcccaccgtgttcgaaaattacacagcctgtttggagacagaggaacagagggtggagcttagtctctgggatacctcaggatcttccctactacgataatgtccgtccactctgctacagcgacttcggatgcagtattactatgttttgacatcagccgtccagagacagtgggacagcgcattcaagaagttggaaggacagaaatcctaggntttttgttcccagcacccgngtttttgcttcattgggtt

SEQ ID NO: 439782 - DNA, 775 bp, Homo Sapiens
  misc_feature (773)..(773): n is a, c, g, or t
caggaaagagagagggagtggaacaaagacagataaatgggatgatcttgaaggcggggacaccacagccacaaacctgcatcccacgcatctgcctgcccttctgccatccgagcgccctgactgcgccacactgcaggccatggagaatgagctgccagtcccacatacatctagcagtgcctgtgccaccagcagtaccagcggggccagtagcagcagtggctgcaacaacagcagcagtggtggaagtggccgccccaccgggccccagatttctgtgtacagtggtattccagaccggcagaccgtgcaggtgatccagcaggccctgcacagacagcccagcacggccgctcagtacctgcagcagatgtacgccgcccagcagcagcacctcatgctgcagaccgcggcgctccagcagcagcacctcagcagcgcccagctccagagcctggcagccgtacagcaggcaagcctggtatccaatagacaaggaagcacttcaggcagcaatgtgtctgcgcaggccccggcccagtcatcttcgatcaacctggcagcctccccagcagcagcccagctcctcaaccgggcccagagtgtgaactctgcagtagtcctcaggcatcgctcagcaggctgtgctcttgggcaacacgtcttccccagccctgactgcaagccaagcacagatgtatctgagggcacagatgctcatcttcacgcccacggccaccgtcgctactgtgcagcctgagctcggcacngg

SEQ ID NO: 439783 - DNA, 1965 bp, Homo Sapiens
  misc_feature (72)..(72): n is a, c, g, or t
  misc_feature (215)..(215): n is a, c, g, or t
  misc_feature (979)..(979): n is a, c, g, or t
  misc_feature (1388)..(1396): n is a, c, g, or t
  misc_feature (1451)..(1451): n is a, c, g, or t
  misc_feature (1814)..(1822): n is a, c, g, or t
tttccccttgttaatgcaaaaaaataaaaggagtggttaataatggcttttccacataatcctggggttttntttcctccagggtgggtgaattaaagtgtgggccataatacttccacagtcatcactttcacaataaggctttctttccaaagagttctctgaagtaaggcattatactttctttttaaaaaattccatacattcatagtttnttctttgcagtgtaaattcactggtgttcagtaaaggaatgagtggtaattaaatgaattttcatattcataggggttgtcaagagtgtgtgtcctctgatgtttagcaaggtttgagctccagctgaaggatttgttgcataccttacatacatagggtttctctccagtatgagttctctgatgtagaatgagggaaaagctccggctgaaggctttatcacattcagcacacgcatagggtttctctccagtgtgactcttcgtatgttgaataagggatgcatgccaagtgaaaactttaccacattcatcacattcatagagcttttctccagcatgaattctctgatgtttaataaggaatgagtgacaacggaaagctttcctacattcattacattcatacggggttttggttgtatggatgctctgatgtcgagtaaggtgtgagaaacggcgaaatgccttcccacattcaatgcattcataaggtttctctccagtatgtgtaatctggtggcgaatgagttctgagccactgctaaatgctttaccacatttcctacatatatattgtttctttcctatgtgaattctttgatgtcgagtgaggttggaggcacggctaaaggcctttccacactcagtacattcataaggtttctccccagtgtgcgttctctggtgttcaataagaaatgaaaggtaactgaatgttttattacagtccttacactcatggggtttctttccagtatgtntcatttggtgtttcacaaggtttgaaatctggctaaaggttttgccacattccttacatgcatatggtttctctccagtatgagtcctctggtgtaacaccagggaaaagcgtcgaccaaaagtttttccacattcatggcatccatagggcctctccacagtactgatattcatatgttgagccagggcttcttgatgagagactgttactttcctaatacatccctgattttcttgcagcatctcagtatgatccttgcatttccagcctcctttaaaactggaatacacagggccttgacttagaattctttccatgatcaaatactgggatgagtcatcataaatgacattttttggtgaaaagtctttgatctcaccacttgactctgaaactgaaagataccnnnnnnnnngtgaatgtttctttttcctgtattgaataaaataaggccatttctcccttctttngcaacagaatgaagtttcaaaaaatcttatcaatagcagctttcacagctgtgactgaaatctgagtagtatgcccagaacttcagaaaagatcaaacagagatagacatataggtaaataaagagaaagtgtaaacgtaagtaattgaaagagcagggaaaatagagctatcaggaaatatttgtgaaggataggttgctagtcttcttcaccaccatttaaacggtatttactgccagaattatctaaaaatggcaatttcataatgctgctactaaacactaagtgttcgtcagattgcacaaagacattagattctgttcacttagtgcctctggaacatcttataataatctaaatgnnnnnnnnngccggttttcttctgaaacaccttgccctatgatacctaccaacctcctacccttcctgaaactacgtactgacacgctcactactttggtactaacttattgtcttttctgggaacctatttgagggtggaatgtgggagga

SEQ ID NO: 439784 - DNA, 969 bp, Homo Sapiens
  misc_feature (31)..(31): n is a, c, g, or t
  misc_feature (793)..(793): n is a, c, g, or t
  misc_feature (957)..(957): n is a, c, g, or t
tgtcgagtgaggttggaggcacggctaaagncctttccacactcagtacattcataaggtttctcccccagtgtgcgttctctggtgttcaataagaaatgaaaggtaactgaatgttttattacagtccttacactcatggggtttctttccagtatgtatcatttggtgtttcacaaggtttgaaatctggctaaaggttttgccacattccttacatgcatatggtttctctccagtatgagtcctctggtgtaacaccagggaaaagcgtcgaccaaaagtttttccacattcatggcatccatagggcctctccacagtactgatattcatatgttgagccagggcttcttgatgagagactgttactttcctaatacatccctgattttcttgcagcatctcagtatgatccttgcatttccagcctcctttaaaactggaatacacagggccttgacttagaattctttccatgatcaaatactgggatgagtcatcataaatgacattttttggtgaaaagtctttgatctcaccacttgactctgaaactgaaaacagatctcttttcacttcccttttcccccagcccagggttctttcccttgctccaataaggaaaccacatctggcttagaaatggaaagacccagtgagaccagatggccatagttctccaacattacacatctgtacaaatctctttgagcaggctgaagccatttccactcctcctgggagaagtctatggccacatctctgaatgtcactgacccctgagacatangctcacagaagggaaggaggagatcagaaaagtgtaaaatggcagacctaacagtggccacagaaggatgcgtttccgtggtgctttccgccaggtgggcgtagcgttccagggctccggaccgagtcaccgcccggggccatccggcgcagaccgggagggcncctttcgatccc

SEQ ID NO: 439785 - DNA, 915 bp, Homo Sapiens
  misc_feature (756)..(756): n is a, c, g, or t
  misc_feature (771)..(771): n is a, c, g, or t
  misc_feature (792)..(792): n is a, c, g, or t
  misc_feature (847)..(847): n is a, c, g, or t
  misc_feature (862)..(862): n is a, c, g, or t
  misc_feature (865)..(865): n is a, c, g, or t
  misc_feature (872)..(873): n is a, c, g, or t
  misc_feature (883)..(883): n is a, c, g, or t
  misc_feature (886)..(886): n is a, c, g, or t
  misc_feature (892)..(892): n is a, c, g, or t
  misc_feature (895)..(895): n is a, c, g, or t
  misc_feature (897)..(897): n is a, c, g, or t
  misc_feature (903)..(903): n is a, c, g, or t
  misc_feature (907)..(907): n is a, c, g, or t
  misc_feature (912)..(912): n is a, c, g, or t
ccagctcgttttcttcgcgggtgcactcttcgccgcgctgcttgtgctcaccgtctacgacgaggacgtgctagccgtggagcacgtgctcaccgccatgaccgcgctcggggtcaccgccaccgtcgccaggtctttcattccggaagagcagtgccagggtcgtgcgccgcagctcctgctgcagacagccctggcccacatgcactacctcccggaggagcccggccccggcggcagggaccgcgcctaccggcagatggcgcactgctgcagtaccgagcggtctccctcctggaggagctcctgtccccgctcctcaccccgctgtttctgcttttctggttccgccctcgtgccctggagattatcgacttttttcatcacttcactgtggatgtggctggggttggggacatctgttcctttgcccttatggatgtgaagcgccacggacaccctcagtggctctcggcgggacagactgaggcctcgctgtctcagcgtgcggaggacggcaagactgagctttctttgatgcggttctccctggcgcatccactctggcgccccccagggcacagctctaagtttcttgggcacctctggggccgagtacaacaagatgcagctgcctgggggtgccacctcggctcgcggcccctccaccccggggggtgctcagcaactgcacctcgcccctgcctgaggccttcctggccaacctcttcgtgcaccctctcctgcctccgaganatctgagcccgacanccccctgtccagctgcggcanagccagcctccttgcttcatttcccgaattgccaggacccagctctgtgtcccangaggactgggggcanaantggccannccaaaaattnttntgccgnatnanttcatntatntactncac

SEQ ID NO: 439786 - DNA, 1436 bp, Homo Sapiens
  misc_feature (144)..(222): n is a, c, g, or t
  misc_feature (1189)..(1251): n is a, c, g, or t
accgataccttcccagttccaaagcccaagaagctgggactgtgagatccacgttcccaaggctccccggtgctttccagcagcactcagggttggcaagagctggcttcagtatactgttatttcaggaatgaggcccgcacnnnnnnnnnnnnnnnnnnnnnnnnnnnnnnnnnnnnnnnnnnnnnnnnnnnnnnnnnnnnnnnnnnnnnnnnnnnnnnntagacgcccacccttattttccctccaatgtcaacaagcaaaacgaaaatatttccagggtgatcgctcgcagctacccgcttccaattcggattagaagctgaggctggagcggcgaggagaaaacgacatcgagtcaccccgcgcgtgacacgctctggagcaggagagaaggaaaaggaagagacacacgtatatagcatgtgttacctgatttatttcgagattgtttggtactgttttctctctgggcacctctcatttcggaaggccatcagaggcgcccactactgagcgggccccggccgccgcagcagcacccggagccccagtcccggtttccccgcggtgccggagcccggagctcgccgccgcccaggcctcaggaatcgagtaagtaacccctgtttggccccgcgctcctctgcccacttcctcctcctcatctcatcgctcccaaagctctcccacaccctcctcccccgaagtaaaggacacccccgcacacacgccagcggtgggccttatctccccccttatccaaagctgcgctagactattacctacaaagggcacaattttcctgctggctcagaaatgccagacactggcctgcaaggccgaactcggaaaagtagtgcctcgcctctacctcctccatttcctgccctctcgcatcctctccctgcactcccactcttcccactaccaccaccacccccgctttcaaaaataaaattggatacaaactttaatcactaaggacaaatattgacgcttaaacgaaaatgacccagtacaatgaggaggaagccggaaatgtgagctattggccctaggaggggaatttcggtggagcggagccggcggggtggagggggtggcgggggcgcagggaagggctgcggcaccgcgtgctcccgccggcgtatccctacgcggctccgcgggcctcggaccccgaggnnnnnnnnnnnnnnnnnnnnnnnnnnnnnnnnnnnnnnnnnnnnnnnnnnnnnnnnnnnnnnntgggcccggcccctccgattggtcgacggcgagagagacgctcccgcacgccgccagctctgattggcccagcggtaggaaaggttaaaccaaaaattttttttacagccctagtgtgcgcctgtagctcggaaaattaattgtggctatagccgcctcgatcgctgtctccccagcctcgccga

SEQ ID NO: 439787 - DNA, 824 bp, Homo Sapiens
  misc_feature (12)..(13): n is a, c, g, or t
  misc_feature (19)..(19): n is a, c, g, or t
  misc_feature (21)..(21): n is a, c, g, or t
  misc_feature (29)..(29): n is a, c, g, or t
  misc_feature (36)..(36): n is a, c, g, or t
  misc_feature (55)..(56): n is a, c, g, or t
  misc_feature (60)..(60): n is a, c, g, or t
  misc_feature (62)..(62): n is a, c, g, or t
  misc_feature (64)..(64): n is a, c, g, or t
  misc_feature (76)..(76): n is a, c, g, or t
  misc_feature (82)..(82): n is a, c, g, or t
  misc_feature (90)..(90): n is a, c, g, or t
  misc_feature (93)..(93): n is a, c, g, or t
  misc_feature (132)..(133): n is a, c, g, or t
  misc_feature (137)..(137): n is a, c, g, or t
  misc_feature (139)..(139): n is a, c, g, or t
  misc_feature (451)..(451): n is a, c, g, or t
  misc_feature (604)..(682): n is a, c, g, or t
tgcagccagttnngcattntngccgcagnaaatttncctttgtagttatagtctnngcantntngataaggggganataagncccaccgntgngtgtgtgcgggggtgtcctttacttcgggggaggagggnntggnanagctttgggagcgatgagatgaggaggaggaagtgggcagaggagcgcggggccaaacaggggttacttactcgattcctgaggcctgggcggcggcgagctccgggctccggcaccgcggggaaaccgggactggggctccgggtgctgctgcggcggccggggccgctcagtagtgggcgcctctgatggccttccgaaatgagaggtgcccagagagaaaacagtaccaaacaatctcgaaataaatcaggtaacacatgctatatacgtgtgtctcttccttttccttctctcctgctccagagcgtnctcacgcgcggggtgactcgatgtcgttttctcctcgccgctccagcctcagcttctaatccgaattggaagcgggtagctgcgagcgatcaccctggaaatattttcgttttgcttgttgacattggagggaaaataagggtgggcgtctannnnnnnnnnnnnnnnnnnnnnnnnnnnnnnnnnnnnnnnnnnnnnnnnnnnnnnnnnnnnnnnnnnnnnnnnnnnnnngtgcgggcctcattcctgaaataacagtatactgaagccagctcttgccaaccctgagtgctgctggaaagcaccggggagccttgggaacgtggatctcacagtcccagcttcttgggctttggaactgggaaggttcggt

SEQ ID NO: 439788 - DNA, 1008 bp, Homo Sapiens
  misc_feature (753)..(762): n is a, c, g, or t
  misc_feature (996)..(996): n is a, c, g, or t
cttaatttgaacggggtgtctgtatgggaagatgggatccagtagagattccagaggccagaaatggaggaaggagaagcgaggcactactttttcggaatctgcactttccggcccagtttctggcaatttctgacccagccaggaaaattgtgcccttttgtaggtaataagtctagctcagctttggataaggggcgagataagccccaccgctggcgttgtttccgggggtgtccctttactttcgggtgatggaggttttgtgaagactttgggagcgatgagatgaggaggaggaagtgggcagaggagcgcggggccaatacaggggttacttactcgattcctgaggcctgggcggcggcgagctccgggctccggcaccgcgtggaaaccgggactggggctccgggtgctgctgcggcgtccggggccgctcagtagtgggcgcctctgatggccttccgaaatgagaggtgcccagagagtataacagtacccagaccatcgtcgaaagtaaatcaggtaacacatgctatatacgtgtgtctcttccttttccttctctcctgctccagagcgtcgctcacgcgcggggtgactcgatgtcgttttctcctcgccgctccagcctcagcttctaagtccgaattggaagcgggtagctgcgagcgatcacgctggaaatattttcgttttgcttgttgacattggagggaaaataagggtgggcgtctatttctttccggnnnnnnnnnnaagccttcctattttcactcctttttttttcctttccgtttctcaaatgcttttattttgtgcgggcctcattcctgaaataacagtatactgaagccagctcttgccaaccctgagtgctgctggaaagcaccggggagccttgggaacgtggatctcacagtcccagcttcttgggctttggaactgggaaggttcgctgacgcgctggtcgacgatatccaaactcgtggnccgtaccgcctt

SEQ ID NO: 439789 - DNA, 804 bp, Homo Sapiens
  misc_feature (26)..(26): n is a, c, g, or t
  misc_feature (28)..(28): n is a, c, g, or t
  misc_feature (99)..(99): n is a, c, g, or t
  misc_feature (592)..(604): n is a, c, g, or t
  misc_feature (619)..(647): n is a, c, g, or t
agttctgggtgtggcccggccatctngntttcacgcgcttctgggtggtcctgatgcttgcttgggtttgagagccgctactctaggctaggatgaganactccaccaggggcctctctgcctacaccctcctttttaccattccatagtcacagcaataattacattcatgtgtcctggccctcctggggaatccagggtagaccctctgggtgacagcttctccatacaggatcctaacccataagcatgtgctagaattctgcctggaagggctgtcagtccccacggctgggttcttgcacatgcctccctcattctgcagaaaactggagccccacctgcgtgtccctgcccccaagggccctgccggtttcctgtgacccagcagtgacagtggccctaagggcgagtgcccaggtcccctgcataccaggaggtcactttgcagcatgaggaggtctgcagactccagtcccttgcccaggcttccattccttccttacaagcgtgtgaccattccagcacgagtcccttgccctcgacagagaggtcgttgtccctctggagggggaaggaccatcactttccnnnnnnnnnnnnncccacagctgctttnnnnnnnnnnnnnnnnnnnnnnnnnnnnnctgtgtactgctcttatcagactccacaaacattctaggccttgacttctggcataggtagggtcagtgacataactgacagtcatgtgagccatgcccctctccagacgcagggccagcccagcctgcgaacactctgcacctttcttttttgttg

SEQ ID NO: 439790 - DNA, 1098 bp, Homo Sapiens
  misc_feature (306)..(605): n is a, c, g, or t
ccgggatgtccctgcagggtttcctctgtgtcacaggcagcagacagggctgtgactccttacggaggctcttgcctgtccccagggtctgaaggattgttaggtgtccctggggggccagccatggagaatgggagcagggcagtccgggactgtttggggagctctgagccagcagggtggggctgagggggcaccttgagtgtcttgagggccatgaactttgggtcccatgatgggcaggcccatgagtggggccccaccccaagattttcttctcctgaaagcttttagaacttaactgcnnnnnnnnnnnnnnnnnnnnnnnnnnnnnnnnnnnnnnnnnnnnnnnnnnnnnnnnnnnnnnnnnnnnnnnnnnnnnnnnnnnnnnnnnnnnnnnnnnnnnnnnnnnnnnnnnnnnnnnnnnnnnnnnnnnnnnnnnnnnnnnnnnnnnnnnnnnnnnnnnnnnnnnnnnnnnnnnnnnnnnnnnnnnnnnnnnnnnnnnnnnnnnnnnnnnnnnnnnnnnnnnnnnnnnnnnnnnnnnnnnnnnnnnnnnnnnnnnnnnnnnnnnnnnnnnnnnnnnnnnnnnnnnnnnnnnnnnnnnnccgggggtggagctgcactcagcagttggccttcctgatcgcagggacccccagtggctgcagtcctaagccctgcaggccacagggacacatgccctggaggggccgggagcgccgctgtaggtcccgctgccatcctggcctgacccaccagggcctggcagtggggtgtaggttggagaacccatggagtgcttgacaaagaagagccatccaatacagaggtgccccctccgcccccaggcccagagactgtggctcaagccttggcccagggattctagcggatccactgctcctgggggagaaggagagcttcactgtttctcacttgtccccatgaaccacatccgtatgatgctggcgttgtggccctcagagtctgtgaacactcttgttccaccttgctctgagggagcatggacattaggggaactgaaggtggggctcatccaccccctgcatgaaggcgcctttacggttgttaaaaaga

SEQ ID NO: 439791 - DNA, 1449 bp, Homo Sapiens
  misc_feature (109)..(127): n is a, c, g, or t
  misc_feature (141)..(166): n is a, c, g, or t
  misc_feature (169)..(257): n is a, c, g, or t
  misc_feature (544)..(836): n is a, c, g, or t
  misc_feature (1074)..(1129): n is a, c, g, or t
gcccccgggttttctttttgggaaacaacattttggccccctgttttccctttcccttttgggggggcccccgcccccacaaaaaaaagggtttataaaaatctttttnnnnnnnnnnnnnnnnnnnccccacattttttnnnnnnnnnnnnnnnnnnnnnnnnnnggnnnnnnnnnnnnnnnnnnnnnnnnnnnnnnnnnnnnnnnnnnnnnnnnnnnnnnnnnnnnnnnnnnnnnnnnnnnnnnnnnnnnnnnnngcgctcaccaaagcctcagagttttattatcaggagctcacattcaggtacagattcctatgaagtttgcctcacctggagggaagagggagagagcagggctggctgagatggggctgccagaggcatggtctccagctgggtaagcgggattctgagagcccctggtgcacacggagcctcctggcacacacaggattgtctcaaacacagaggacctctggcacactcaagggcactgaatctagcaatgagtctgcacttctgttatgagagtgggtttttcnnnnnnnnnnnnnnnnnnnnnnnnnnnnnnnnnnnnnnnnnnnnnnnnnnnnnnnnnnnnnnnnnnnnnnnnnnnnnnnnnnnnnnnnnnnnnnnnnnnnnnnnnnnnnnnnnnnnnnnnnnnnnnnnnnnnnnnnnnnnnnnnnnnnnnnnnnnnnnnnnnnnnnnnnnnnnnnnnnnnnnnnnnnnnnnnnnnnnnnnnnnnnnnnnnnnnnnnnnnnnnnnnnnnnnnnnnnnnnnnnnnnnnnnnnnnnnnnnnnnnnnnnnnnnnnnnnnnnnnnnnnnnnnnnnnnngagagagtgggtttttctcaggtcttctcggtgcccaattccaaatgtgtgcctgtctcttctgcaggagcaggtctgcttttcaagagtccaagcccgcttgtgtttttgtggccacaggagaggaggggccggcttttaaatacaagcctactcctgtcagttggaccagaacaaagacctactggccagaagcacatgagaggtgagagtcgcccttctgctttgttcggcatcnnnnnnnnnnnnnnnnnnnnnnnnnnnnnnnnnnnnnnnnnnnnnnnnnnnnnnnnagcacacctgtgcacgtacatgtgcctgtgtcggtgtccatgtatatggcttgcatgtgtgtgcttgtgcacacgcaggagtgtatgtgtgtgccatgtgagtgcctgtgtacatgtgcaagagtgggctcaggtgtatccacatgttcatggtatacctcggccggtcctagacctagtatcagactctgctgctcctcactggcataaaggcagaccctgaactgggcatggggacacagatgggtaacacgcaaaccacagggccctgatccgggggatgctggccaagccacgggcagtgcaatgcagtatggccc

SEQ ID NO: 439792 - DNA, 705 bp, Homo Sapiens
  misc_feature (134)..(189): n is a, c, g, or t
  misc_feature (230)..(300): n is a, c, g, or t
  misc_feature (533)..(545): n is a, c, g, or t
  misc_feature (548)..(653): n is a, c, g, or t
agcggtgtccccatgcccagttcagggtctgcctttatgccagtgaggagcagcagagtctgatactaggtctaggaccggccgaggtataccatgaacatgtggatacacctgagcccactcttgcacatgtnnnnnnnnnnnnnnnnnnnnnnnnnnnnnnnnnnnnnnnnnnnnnnnnnnnnnnnntgcaagccatatacatggacaccgacacaggcacatgtacnnnnnnnnnnnnnnnnnnnnnnnnnnnnnnnnnnnnnnnnnnnnnnnnnnnnnnnnnnnnnnnnnnnnnnngatgccgaacaaggcagaagggcgactctcacctctcatgtgcttctggccagtaggtctttgttctggtccaacgacaggagtaggcttgtatttaaaagcggcccctcctctcctgtggccacagaacacaggcgtgcttggactcttgacaagcagacctgctcctgcagaggagacagccacatttggaattgggcaccgagaagacctgagaaaaacccactctctcnnnnnnnnnnnnnggnnnnnnnnnnnnnnnnnnnnnnnnnnnnnnnnnnnnnnnnnnnnnnnnnnnnnnnnnnnnnnnnnnnnnnnnnnnnnnnnnnnnnnnnnnnnnnnnnnnnnnnnnnttagcggggattacaggcgtgtgccaccaatgcccagctaattcggggtcgg

SEQ ID NO: 439793 - DNA, 1636 bp, Homo Sapiens
  misc_feature (1507)..(1507): n is a, c, g, or t
atgtgccacctcccttcctccctccctctctccactgccacctcccttgtccccagttccttcccctcctccatgccagggagggcagccccagggaagcctcctcaagggctcttgtcccggtggaagggactgtctgtccgtcccgcttgttcccgttttgtagatgaggaagtcagggctcccagacgggcctggtgaattggctggccagctggggtggaggatcagtcacactgctgagtgtaggaggccaggagcttggggcttcgtggggggcttcagggagagggtgggggctttgagaaaggaacccgtgggaagaaggagcacgcctgggctgggccccagggagggttcccagcagcaggagttaggggcctgcgcttgccatttccccatcctttctgcgtgaagatatttaggaaacctcagactctctgactgcagggacaggggcccttccaaagagcaggactctgatgatccaggaggggaactggccttgaagacccagttcatgtggttctttgtgaggcagagcggggtctaagactcgggtctctggcctcccagccaggccagagccccaactgctcagcttgggggagagcccacccggaggctggcctgcatctgtgtcccacgtcctgctcaggatgagtttttcccaggcgggagggaagtattcacaaaatgttgccatccaaggtctgggtttgtgatgatgatgagcatggtggagctgggctgtggtctggggcaggccagcagggcagacaccaggaaaagagggcagggggggccacagggagggaggggagatggaggccggtggagcgagggatgtgtgggtgcacgccctggacctctgcggggaggctcctgccttgggccggaacaaggtcacacctgggcttgcctgcctctgttggagaatctcctctgaagctgtttctgggaagtagcacaatgggtctgctccttcctgggagggcacagcaggtgcagctaaccctctgttggagcttatggccttccagtagcaaaacacagaggtctggcatgaaggcaagaaagcctggttggtggggaaacctcgtcacgggtcccggccttgcttttccccgcggcaggaagagtctctctctgcccaccaaagaatccctcacctgggctcccctcctgaggcagtgcaggaggcctgtgggagcagcctgtgtccaggctggggagcccgtgtctgggtaggtctgggaaaagggctgtcaggggagcgaggagggtgggagtaaagagacctgcttgggaaggccaggcctggatcgtccccgggaggcagctggggcagcagcagtggggagtatcaggctggccgagagtcacccatgttctcaactggaagttggtcgcctgccccactccctcctggaaatgtaacagcggggtgaacagaagtgcagagacggaaaggagaggaaaggagacctagagctgacaactcggntgtgacagtgctgaggccgggatggcatcaggaatttaaggacaccatggacaggtcctagcttataaggggccctagtgcaaggaagggataagacacatgctccctagtgactggcgccttgcagaa

SEQ ID NO: 439794 - DNA, 924 bp, Homo Sapiens
  misc_feature (56)..(56): n is a, c, g, or t
tgttttaattttataagagaagtggaagttaatttcaatatgatggtatcatcttnttccccgctttgtcagagggaccacccagaatcattttttacaaggcatatacaacaattcatctggtgctgtgccctaaaatcaggtaatctgattagttctagactaccgggtttccatgcgctcctcttggctttggtggcatggctcaattcccagcggaatactttttcatgcactgtctgcaactcaactacagcaggcttaaagaccatgcagattaacactgtagcaaattgttttgatatttaacagacataaaaaggtcatttcctgatatgaaattctgaaaatctgcataaatatttttgtgtaaaattaaattagttatgtatttttttcaaactagaacttgaagtatcaagaatgcccacataattcatatacacatatatatagagagagagggtttttcattatgctaaaagtcttgatagtcaaattatattctgtgccatacatttatttaaccagtatttatttggcattaggttaactgtgtatggattagtctttattggtgcttgtgtatcatgcaaacatagttctagtattcctgtttactaatcttgtcatgtggcaatacttagatgattttgctctctaacagtgtgaattaaagagtataaatactttatacatggtcacatttacaaacgtttgccaataaccacttcacaatctttatggtgtgaattataatatccggaatctgcagaaacaattcctataaagcaatgtcagatgtaaactttcttaaatgtgcctaacacagttctcctttgagtaatgatgagttttggcacacatacactgctctatttttctatgttctaacaatttccacaacttttacaggaaattagc

SEQ ID NO: 439795 - DNA, 1912 bp, Homo Sapiens
  misc_feature (45)..(45): n is a, c, g, or t
  misc_feature (107)..(107): n is a, c, g, or t
  misc_feature (175)..(183): n is a, c, g, or t
  misc_feature (278)..(278): n is a, c, g, or t
  misc_feature (1409)..(1417): n is a, c, g, or t
  misc_feature (1676)..(1676): n is a, c, g, or t
  misc_feature (1681)..(1682): n is a, c, g, or t
  misc_feature (1804)..(1804): n is a, c, g, or t
tggaaatctactaacacgtccaatacaacaatacgcaagcccatngtaattcccatatgtcctttagacaaagttttcaacaatcctcaggaaaaaatatgaaaganaacaacgcggtataggataggtttattttattctattagagtttctctttattatgagatcatgtccnnnnnnnnnctcggcattaaaatgttttttacctcatgaaataatttgtaagtagaaggtacctggctttgttttggttcattttgaaccagtcttatttgccnaaataagaagacagcaatcaagtttctataccaaatatttgttgatattttatttatccatatcacccagtgatttaaaggactcaagaaagttccctttgtcctaaaatgcacctctgcacacaaagagtaggcaattactcttccaacaagtagacctccataagaattagatcattacattttgacacaaggaaatgtaagttttcccaccctcttgctgtatcactcacaagaacaataatatcactgtaaaacagacccaaacacacagtactgtaaatatgcaaaaagtctagtcaaagaaactatattggtgacaataacaattgtaattaatgacagttacttcagtaacggtaaaagtagccaaattcttatcaaggttatttatggctagtctctagtatcatccacaataaaaatggtttatatttattaagctccaaatagggtagggtgggagaagagagaaaaggagggaaaaagttaataataacttaataaaaactctattatgtaactaaagtttgtcactagcattgacaaaactgcaaaatattcttggtagttgaaaatgacacaaacttcatgcaggacacccatctcccaacaaaaaatacatctgtgcttacctctggtaatctgtatgcttttatgcaagggttaaaatgtagaagggcattacaacatagcataaacaaagaggtttttaagtcaggtggtcttaaattccctcattcaagacctagatctaccctttactttctgtatgtgaccttgcacaagtcattcaaccacttcaagccccactagactgtcagctccacaggagcaaagaccacttctgcctgactcactactataaaccgtggcccacagcacggagaaatcagtttcttcctgtataaaataaagatattaacagtatttatctcgaagcgttaactagataaatgggatattatatatataaagtctggcgcagtgcctgattatggtaaatgctcagtaagttaaccgtttgacattaactaccagccatcaaacatgaaagtaatgtttaaagactttcaaacaccaacatgcaaagcctttacccactaagtataaattcctcgattaaaaaannnnnnnnnccacagaatacctgcgaagtttctaaaccactgggttgggattctaataatagctgaaccctgaatggtgggttatagagtcaagctattaaaagacattcagtagactccaagtgctcctacttcaaaaaataggccataggcagaggccccactggcttcccagtctccccttgggacgtccctaggctgccagggaacccccctcctccgcgcttagggggaggagagagaaagcctcggaggcgggggccggggntgggnnaaagcgagcatccctgcgcctctcgcccagacccaccttgagcaggatggacggcggcagctggttgatgtctggggtttcggggggcggctccctgtgacagtcgcaggggttttcggggnactcccgacagtccgcgtcgccacattcatgctgctgctgggcggacaagggggcggtgcccccggctcggacagcgtccccgccagcttcggtgggggcacttcgga

SEQ ID NO: 439796 - DNA, 1108 bp, Homo Sapiens
tactattttcctcactttttatttcctctgtgttttcacagattccctgcacagggtcttaggtaaggggcatagaaccaggggccacctcaagacctgggaacatggactgaacacagacaaacgggacaggggcagaggtgatgcagggacagtggagaactgaaaggacagtctgaaaggggtgacgggaggaccacagagaacactgaggatcacggataaacatgacaaggccaccatgggtgacccatgggaaacatggtggccctgtagttccactccacccattcctacctgacaaatatccctgagagcagcctcccttctgctcaggttgggccggaccctgacccctgaccctccccaacatggcccttattacactgttgtcacatttgtcccctctgccaaatcacatccatccaccacccaacgcccacttaattctccattgaccaggcctgacctgggagccatgacctgggaagctacacttagccacaggagtgtcatctcctgaagtgacctcaagggatgcaccatctcatccctctgcccccaagttctgctcaaatccctgccgtggccggtggctcactagctccaagcagccgaagctccgtctcacaagcgcggttcctggagctcctggggcccggggcacattccatgcgctgggggctggggcagccgaggctggcggccattctgctagtcgccccgaggcagccctatgcaggcccctgccgccgctaccgatgaccctgaccagtcaccccctcctctcggggcccgggagactcgcctggggttgtaatggaagaaggtaaataaaatgccagcgatcgtgatccgggggctcatcctgcgggccggcccaggtcacgggagaggcgctgtgcccgccagggccaggagggtcgcctgcgctgaggggcgggggccacggccgcagaccacccgggccccgctcagtacccggccatagggggacacggagaagcttcctggggaccatttccgaaagaggaatggacttcctcagcctcggggaccggccatccaggcagggagggccgccgagtcggatcgcgttcccgatccc

SEQ ID NO: 439797 - DNA, 2089 bp, Homo Sapiens
gcaccagtgaattttcataaaacaggtttgttattttcccctcattttctataattgtaattcttatctgccatactgttaccatttcttcctctctataatcaggactggacagcccatgtaacactgttcaatttgtaaacaaaaaattaaagctcggaacacatacaggttatcttttacattttcattctacagcgcatcaggtatatttataaagcttttgctcttctcaacacactacaaaaatatataaaaaccacatttgtttttagccagcaaatattaataaaacaaatatcttgtaactggaatattttagagaccacatattttaattacatcctcttgactaaatcgccttcttcataaatccatatatgtatccagtgcatatttattagtttacatgcccatatttactatgaatgagtcaatcattttaggttcttcaagtgaaagtgcttctgacaacaaactattcctataatagccctaaatccccaaaaaagttgttttaaacctgtgtagaacgatgcatagctatttctaaaaagtaagactacacaccaaaacatgctttgtcaggaaaactaatccatgcacttgaatataccccaaatatcttatttttaataaaggtagaccaacttaaacattgtctagaattaagctatactattaaattacttgattccagaaagcgtcaaaaatcatttggcagaaacttaaaaaagaaaatacttacttcttgtcccttacttcaaaaaaggactggttggaccaatgtgatcaatataactgcatatatgttaatctaccttaacatttccatcgattagcacttgatcgttacaaagccttgtatgcaattttcttgcaaaggcttccccccgaaagatgtaagcacaaaacactaggcagacactctttaaagttttatttcactaacttcagaccaaattcccacaactgtgttctggtcaatttactatccttgcttggcttccccaaatggtagtaccaaaagatttgtggggtagggagaagagaccactttaagaagcactgcatttactcatcttccacaaggcaacagagttgggcatctgattgttcaacaaaacaaagctttaatagcatccaggagggcagacaggcaaaccacgctgtagacactcttctatttgtcaaaatcagaccagagaaaacctactccacacagatataataggtattgatattcatcttttctttttctgttgccgcaacatttttcttcttttaatgatcatatcatgtagtttctcaagtccttcctttaggccatctcctatgattgcacaggtaggctgcaaatgccaaggagttgatgagctcagttcacccattgctaacaatttctcaatttctgaaagtgacaatgagttcctcaaatcttgtttgttagcaactataagtacagggactccctgattttctgatatcctagttattttgtgaagttcagttttggcttcttccatcctttcgacatcaacagagtccacaacaaatacaatgccatctgtgcatctggtatatgacttccacagtggccttaatttctcctgaccacctacatcccagaagtgaaaagtgactgttttagaatttcccaaggttaccttaattttctcagtgttaaatcctttggtaggtacggtatttacaaattcattgaactgcagcctgtataagacagttgtctttccagcacagtccaaacccagaataacaatgtggaaagactgaaatgaaggcaggttggacaggatagaagtctggtctgacagcccattccccatttccaggtgcaaataaatgtcccaaattgaaatgcttttctcttcttggtttagaacttctcttggtagctgatccagctataagactgctgactaaccgtccttccctcttcttcattcagcgtctctcccagccgctggggaggcgcgctgatacctgttcctggcaccagggaggcgtgggcgatggcagaggactgggcgcctggcgggcgccgcgcgccaggctgccctaacggtgc

SEQ ID NO: 439798 - DNA, 1050 bp, Homo Sapiens
  misc_feature (97)..(97): n is a, c, g, or t
  misc_feature (135)..(135): n is a, c, g, or t
  misc_feature (140)..(141): n is a, c, g, or t
  misc_feature (280)..(280): n is a, c, g, or t
aggccttccccccaaaatgggtagtacccaaaagattttgtggggtaggggagaaggagaccccctttaagaagcgcatggcatttactccatcttnccacaaagccaacagagttggggcatctgattggtcancaaanncaaagctttaatagcatccaggagggcagacaggcaaaccacgctgtagacactcttctatttgtcaaaatcagaccagagaaaacctactccacacagatataataggtattgatattcatcttttctttttctgtgnccgcaacattttcttctttttaatgatcatatcatgtagtttctcaagtccttcctttaggccatctcctatgattgcacaggtaggctgcaaatgccaaggagttgatgagctcagttcacccattgctaacaatttctcaatttctgaaagtgacaatgagttcctcaaatcttgtttgttagcaactataagtacagggactccctgattttctgatatcctagttattttgtgaagttcagttttggcttcttccatcctttcgacatcaacagagtccacaacaaatacaatgccatctgtgcatctggtatatgacttccacagtggccttaatttctcctgaccacctacatcccagaagtgaaaagtgactgttttagaatttcccaaggttaccttaattttctcagtgttaaatcctttggtaggtacggtatttacaaattcattgaactgcagcctgtataagacagttgtctttccagcacagtccaaacccagaataacaatgtggaaagactgaaatgaaggcaggttggacaggatagaagtctggtctgacagcccattccccatttccaggtgcaaataaatgtcccaaattgaaatgcttttctcttcttggtttagaacttctcttggtagctgatccagctataagactgctcccgatctggagtctgggtccaaatgagaaagcattggcaggcgtttctacgcagggataagcacccttccagcttagctctccaagcagctctccc

SEQ ID NO: 439799 - DNA, 2957 bp, Homo Sapiens
  misc_feature (1775)..(1775): n is a, c, g, or t
  misc_feature (1777)..(1777): n is a, c, g, or t
  misc_feature (1780)..(1780): n is a, c, g, or t
  misc_feature (1803)..(1803): n is a, c, g, or t
  misc_feature (1816)..(1816): n is a, c, g, or t
  misc_feature (1821)..(1821): n is a, c, g, or t
  misc_feature (1838)..(1838): n is a, c, g, or t
  misc_feature (1840)..(1840): n is a, c, g, or t
  misc_feature (1850)..(1850): n is a, c, g, or t
  misc_feature (1853)..(1853): n is a, c, g, or t
cgctgggagcagatgagtttattgggcacatccctcactgaagggcttgggtttggtccccagcagtgcctgttctggggccaggccttccagtcgtgtgcccaggctgtggtcctcaggaggccctgtcttggagctcaggcacaggtctgggtgcatactcctcgctgggggtgctggccggagccttaggcaagcttcaccagggcggcccagggcttcagcagccctcgtccgcacctcgggggccgggtccttcagcaggatctggagcgccgcaatgagctggtccaggtccacctgcggctgctgcctggggctccgagtgcagcaccaggaacccggtgaacaggggtgcagcagctcggacgttctcccagctgctcttgaagtagaacaggcaggtggtcaggagaaggcccagcaggtctgggaaatggtgcatcaggtgcttgcaggtggtgttgaggaactccccgaagtgcagggctcggccctcctgcaggtgtttctggaaagcagctgagagctcctcacatgccagattggggccacacatgcgcagggcaaacctgcaggcgctggccacagtggcctgagggtcctgcaggtgcagcagcaggggcgccagcccgcccaccacctggtccaggaagacgtcctcacagtctccgtggcagaccttgttaaggtgcccaaagaggcggatagatgccgtccggaactccatcttctcactgtcgaagaaaggccggatgcggatggccacgtgcagcagccctgagcgcaggtcccaggactccaccaggtgcaccagcctcgcaaggcccagcatggcctccagggccactgggctgtgaagggttgtccccgtcgtccagcccgccaatcatggctgtgaggagctgggggccgtgggttcgcaccttgtcagggcagccggaaggccaggttggccaggccgcggagcaccagcctccgcacgctggcgcatgtgtccttctggcgagccgccaggctctccagcagcgagtccaagagcatgaggtcgttggccacgttgctgttcagcagctcggccaggaaggcggtggtggtcaccctctggttctcatacgcactgctgtgtgtgcatgccagcgtcttcagcaccagggggagtcggggccctgcgtgctcagccatggccctggccaccttggtggccccctcctcatgccccgccgaggtcctgagcagttcccagcctccctccaggtccatgcgctgtaccacatcctcgctgccgctgcggagtagcatggaccgcagggtgtccactgcagagctgcagggttccaggttcctggtggctagggctggactggcacccctcctttcctgggcctgcaggttccggggcagctggacacccacggtgcagctgacgcgcagcagaagcaccacaaacagctgggggtagagctcgagcaccgcgggccccgctgcaggcgtggacatgacctcaaacagtgcacaggtagccgagagaggcagcagcgtggccacgcggtctggggtgcggcccagcaggaaggcccggctctccttgaaagggacgtccctactcatcttctccagcagcagccccaggacctgggcagttaggcgaggctccaccgccagcgcccgccacagcatgcaggtgtggctgtccaagggcaaggggctgcccaggaggctggacacccacggctgcgcagtgctgggtggccaggaggtacacgctgtgctgngnggncggcaggacgtgctctccctggncctcctgaagctnggggngcaggacgctcacgatntngggcaccttntcntggagcacaccgccccgctcctgcagcaggcagttgatcatgacggtagctgctcgggagcagttcttttcgggtctcccagggcctcaaacatggttagcaagaggctgatgagctggtctggggggaggcgcttggcaataatctggcctacactgtggcaggtgtggaagagaatggcggggtcagggtgcacgaggccgtccttgaggctgaggagccgctccgccacgtcatcgcggtagtcccgggagaagccctcatagccgagctggaggtacagcagggagtagacacagtccacggcctcctggcgggtggcaggccacaggtccgcacaccgtggggagaagaggccgatgagaaggcccaggttgtggaagggcaccagggcgctgacacgcaggtgctccaggaagtagcgcagcaggagggcgctcaggcccagggcccgcgcccgctcggtgacctcttgtgtgtacttgatccatgggctcaggtgctcaatcatgatctgcaggccttgtggggtcatgttccgctgtcaggaggctcgtcagcagatcctcatagggcgtgcagtgtctccagatacagggacttctgtcagcctccgtcctcctccttgggctcaggcagcagggccataatgtctgtgcaggcagccatggatcacatccgcccgggcctgctcgtccagcgctggctccacggagaccaagtaagtgcaggtgagcatggctttcttccgaataggtgtcctcaaggagtccgggggctctgccctgatgaactccatcatctgtgccaccagctctgctttccgggtgaagtggaaggagccagcctgggtgctgctgcagatggcgcggctgaccatgcacacactctggacaaggcacagcttcagggctgggtccttggtgctgaagtgctggcagatgttccggaggatgtctgactctaccttggccagcaccagctcccggggggcccgggccgccacgtgcccatagcacaggatcagagcactcttcaccttctccacttcgttctcacttcgatccttaaaaactgttgagaatgccgacgcgtggtcgacat

SEQ ID NO: 439800 - DNA, 1135 bp, Homo Sapiens
tgagaacataattttttattcatatagatagaggagtgttaagcaccctcttctagtgcaaaaacacttaatgcaaaaaacaacagagaaaaatccattcagtccaattcactaagactagcctaaagccttaggagcagtgctctgttgcttctctaatcccctgaccatggttcagttatatagaggaggacttagaaaacaaatcgatcacatttttcagtctagtctgatacatagtgtattacaggtccagccttatattgtagcacaactaagataaaggaaccaataatgagagtcacataagaaaacacattttctatgttccatttcaatgggaagtcagatattctaagcaagcaagggattctcagtcaggaaaaccaggttctgtcacaactattaccagttagtctttataagaaatgttattttatgaccatgctgcttatatcaccagctatacaagaaaattagcttgccatccctacatccaaagttttccagaagaattaacagatttaaaacttatttgttaaataccatacagtagtgtatatattatttatagcctcttaattaaataaatctaaatttaaaccatctatggagcccagtaagataatatttattaattttaaaacatacatacatgcagcaagcccactgctccccaccagtacatacacatattccctattagtgtgtgactaaatcatatccttgcaagagaaactaaataaccttaaacttaaaaaaaggatcattttggttcaatatctattattgttgattatgtaatcttgttgattacatcaacaagaatcactgaaaccaatttgcagaatctttttctagtagttctgccacagttctaatcagatatgatcctcaagtcataacttggacttatggtaaatattttttagttccttaattctaaagttcacaaagtgttttaataggcaaaagatatcaaaagctagtataaaaactgcaaggcaattgatcctagaacctcaaccattgagctgatattctcacactgatctttacataaaaatagtattgaaataagccgaagcgccatttggctttaagtattacctgtttgccatgctgcagaatctat

SEQ ID NO: 439801 - DNA, 884 bp, Homo Sapiens
agaattctgtaagtacccaatttattaataaaacaatatagcttaaatatttatgattttttcagtcatacaattttaccatcattcccaaaatgttgtgcatttggtgacatgtatttgcaagattaggatctataattgtaactgtggaaatcatagaaggcattttatttgcttgttaatactgctcccctcttcaaacaaacaacaaattttgccttgtgatttacttcttcatctctctgaccaaaaataaactccactttgtgccttttatgcttgcaaaaacacttgcctgtttccctgcaagaagattatacaagttaaacattcgtccttttggttccagactggccagcttatattgaaacaaaacacctcgaccccagacaataattccaggcatttctgcttatagaatttgttctcagaagtgatagaaaggaggcaagaaattcccacactaagctcaaaggtcaatttagtggaccagatatcgggagctgtactgcatagccatttgccatgtgtaagtttctattgttgtggttccagtgaagacgctttgagatcacttctagggattgacaccatccatgcagtggtgtgtgatgccacttttaagagggcagggactggccaggaggagcactttctagtcttatctaaggaagaggtgtgagtataaagcagcgagactgatttggggtgtgcagcttttggagtcagtctcattactttctactgtcaccttttgaaacaggcaggacttttgtgctactgtcagggagaggtgcccttctcaagccaaactagaagccccgctggtttttgatggtctccatcttgacacccttaaagtctagaatcctcacttcttcttg

SEQ ID NO: 439802 - DNA, 303 bp, Homo Sapiens
cttatggattctttattgaatcacaaacaactcagggcatcaggccccagcagctgcattagaacccatctgggattgtgaggggactggagagggaggggggagaagacccgctctccctagcttttcactatatagagtaaaaacatcagaaatcaccccaagagaaaggacataccaaatgcccaccagaagggccagggactgcaagccaccctgagcgcaggagggtgtggtgaagggtggtatggccccgaaatttgtgtgtgtcccccactccccctgcaaattcacattggaatt

SEQ ID NO: 439803 - DNA, 1489 bp, Homo Sapiens
  misc_feature (1079)..(1079): n is a, c, g, or t
  misc_feature (1176)..(1176): n is a, c, g, or t
  misc_feature (1382)..(1421): n is a, c, g, or t
cttaggtgccaatcactgtttaattctttactaggggaataattactaatagcaaacctattggagattcagacatagcaaacttagaaggataaaattctaaagaagaataaagtgttcaaatggaaacaaggagaagtgcatccctgacggactccatcagttctagagtgtgattagagcaaccaaagcaaagaaagcgaatctctcattacttaggattacaccaatgtgttatctgttaactaaataatctgtgactacatgctcatgaattacagggcattagaaagaaatattagaacaaggtcaagtgcatgaattatcaaaaactctatcctttaactacaaatcaacaagcatttgtccaatcatttgtatcacagaaattagacaagttcccaaagtagtataaagttaaagaaacaagtataataataccatcctaacaatccttttatttaaacattaactacctttacatatggattactctgaagcaaaaatgcagggaacttggagtgtaaggtattcattttttctccagtttaacataaaggcaacacattcctcagctataacttgacgaagaggaatatcaggaagcctcatttccagatagcctcgtactctacttataaggtcggatggcggtctctctcctgcctgccctgttccagcttcgtgtgtatgaatattcaaaagcaccatcttattcagcatgacctgacgaagcttcggtgagaactctgttaccaacttccaaacaagcagcaaagagctgtttagcatgggaaaagtccttaacagtactgcagtgcaaacctttggccataagaatataaaccaaatctcttgttaaattgtctttaattcccaggataacaccactatagacagaagggtacttcccactaaaagaaacaaaaaaatacatatatatatgcacacatagaggaagccaaatctagataagaatctttcaacaatcttcaatcgcatttaaaacaaataactcacgggtcgtctcttaaagagaaaggaaaatgacagccataatataacactaacgaaaatgnaacacattcgctacattcaacaagtaataaataatggactgggattactattaggaaaaaaaaggcacacaaagactaggagtttttatatatattnaaggtaaagtactattatgctactactgtcattttgcaaatgagaaaactgcaacacaaagaagttaaataacttgttcaagattatacggctatttaagtatgaagctggcattcaagcttaagcacgcggttagtcccagaatcccctatcataactatcatgctatacttgttcatcttaaaaatttttggtttgttcttgannnnnnnnnnnnnnnnnnnnnnnnnnnnnnnnnnnnnnnnaagtatgtagttagttacgagcattaccatattgctttaatttctcctgtatctgtcgattacttccc

SEQ ID NO: 439804 - DNA, 1418 bp, Homo Sapiens
  misc_feature (1136)..(1136): n is a, c, g, or t
  misc_feature (1185)..(1185): n is a, c, g, or t
  misc_feature (1209)..(1209): n is a, c, g, or t
  misc_feature (1217)..(1217): n is a, c, g, or t
  misc_feature (1244)..(1244): n is a, c, g, or t
  misc_feature (1285)..(1285): n is a, c, g, or t
gccaccgcgcccggcctcattttactttttatcttctggatatgtataatctttttcagccatcctcagctattaattcgacttagaaatgagaggtttccggttgtgttatttaaatccttcccagttgagaagcgcccatctcaagaatgaaaaggaaacctttttgcttagctctttccactctatgttttataaacacaataaattatagtgataatagaaaattcagtttgagataaggtagtagtcaatttatgaatgcaaagaatatttggatgtttataaggaaattataatagttttctaaactcaaggaaatggggcccagagcattgacccaaattgtattgcataatggggagagctacttttggaaggaagatgatgtgaagtatgtgactatcacttttatttcaccagttatgttcctatggtactcccactttctaaaggaaggcatgaggaataggacaaggcatctgacaagtaaatctacaaaaatcccataagtgactttgagacgtcactgagttcattcataccggtgttcaggacgttttaaactagctcagtcatctatttttaaagatgtccaaaacaaagaacctttacaaatttcctacatactagataaaattgagcaaaatttatcatggagaattatgagagtggctaagtatgggaatgaaacaactgcatttattgtgataaattaaggcattggattactggtaaaacaaaaggaattctgaaaagatttgtagtaaatgttaaatggcagcataaacattcccaaacatacatactatgtcttcaatgttttatgtacttttgaaaaatcaggcacttgaaaataactatgaagttatattccgagaaccttacactcgctggaaattcaacgttcaagagttagcaaggtacttctttgtttttctagttcctcattatgtatcctgctattttcaggtatttcagaccgaacaaaagaatcttttcaggctggaaatggacatggtagttttcaggccagaaatgaagaaacattcatggtgtctcaagagaaaaaatccaccgaatgaaagaaacgtatgaacacgatgttacttttcacagtgtgcttcatgcagaanagcccagcagaatgaacagaaaccaggacaggaattatgcattgccttncaacaatgccagatacttgaattnctacacanagtttccaaaccccggagggcccacgntggatttacaaatgagagctcctatcacagaaagggcgggntggaaccatggatttttaaaggctattttaacgccaggcagaattttccttaggcaagttttaacttaagttttgggaattttttggggcgatttaaaccaaaactccaattccaggtaaatagctgaactca

SEQ ID NO: 439805 - DNA, 708 bp, Homo Sapiens
ctggtttctgttcattctgcttggcttttctgcatgaagcacactgtgaaaagtaacatcgtgttcataccgtttctttcattcggtggattttgttctccttgagacaccattgaatgtttcttcttgctaactcttgaccgttgaatcttccagcgagtgtccaaggttctcggaatataaccgttcataggtatattttcaaggtgccatgaactgcatagggcttcatttcccaggcgtggaggttggtattatcaataataatgggggatatgccattcctcattgcttttcttgctcttttttggttccattcatgagcttcctccaggaagtcaggattgaactcataggcaccatcttccctgaagaaaaaatcatccgtgctgaaaatcagggccctgggaaagtcatgctgcaattgtctggccagtgtagttttcccggagcccgggaggcctcgcaggaggtagaggtgtttcctaaagctgtggcggcgaggaggtgtcccccgcgggggcggccggggcggccgctgccgctgctgctgctgctggggctggaggctcagcctcccaaaagattgaaggaaactgtcctccatgggcaggagggctggctgcgagagccccgggttccctttactgaagtcacggtcttggccaaagctgttgtttttgtgactctccggccatgtgatccgct

SEQ ID NO: 439806 - DNA, 1871 bp, Homo Sapiens
  misc_feature (1817)..(1817): n is a, c, g, or t
ggcatttaggtaattaaatttttttattgttgaaccaaaaaaagatccaatgacaaatccatataaatgtgataccatttacaatttttaataaccataaaagcaccattatataagacacttaaaataatttttcacagaacattagaaagaagctgttggccaacaagaaatagagcatacgtcctctgtggtcttgtctatcatgatctcacattaaatctgattccaacctgttggaaattaatttggattcataaattcagcatcagtataagaagacattccagagttgtgaggacttgattgtcttaatgccacataaaacatcaactgctcattttgtaatgagcatggcttttatatatccctgtatgacctatatcctggggtgcctaatttcttgcactcccaaacatttgagctgccgactaattacacatgttaataggcataattttagaagtcgtttattccttttaaaagttagtgttttatgaaggcaggcttattttatttacactattagcacaacagccaaaagttattcaggtttaatcctgctgaataaagtagtaaaaacacaaggcgtgactttaaataatgacactgatttccctcagtagctcctgtagctattaaggatttgacagcatttttaacaatgatacatcattaaaataaagaaataacttcccaaagtgtctactttgaaggacaatgttcccttagatgtatgctttctggcatattaacattaaaggaaaatcagtatcataagagtcgcacatctcacatttttagatacatagattatcaaagtagcaatggcactttgataagtagcaatgcccccccaccacttctctccaccttcccaactttaccgatggagatgaatttcctgaaaaaataaatagatcacttcagagcaaatggtactgaagcttatatataatataaacactttatttcatctatgaacctatgtaaatatattcttgggtgtgttctcaagttttggtttcaaattcttaccctagagaaagagactgtttactcaaatctgcagaattcccagcatcagaccatgcatatagaagcactttaacaaattttggtgaagaaagtgaatataatgactttgctcagaaacttttgagttcagctatttacactggaattggagctctgactaaaatgcaacaaaaaataacaaaaactgaagtagaaactgacttaggaaaattctgcctggctgtaagataggcctctaatatccatggtgacaaccgccccttctgtgataggagctctcatttgtaaatccaccgtgggccctccggtttggaaactctgtgtaggaattccagtatctggcattgttggaaggcaatgcattattcctgtcctggtttctgttcattctgcttggcttttctgcatgaagcacactgtgaaaagtaacatcgtgttcataccgttctttcattcggtggattttttctcttgagacaccatgaatgtttcttctacatggaaaaaaaatgcatttagttaaggcaggataccacaatgagttacttatattttacaagtcctctagtattgcagatattgcagtccctgttctcaggacctagctctggcaaaagcataacaaacatcttgttcagcagttctctttcagcctccactcatgtttttcatgctgccctgcacacccgcaaaccaccctgaggctagcaaggactaaagcttcagaaatgctttgtttctggtcctctcaattacgtgcttcaagacataaaagaacnccatgagatttttaaaaaatcatacatttgcctgttaatgtcatgcatatatct

SEQ ID NO: 439807 - DNA, 908 bp, Homo Sapiens
  misc_feature (30)..(30): n is a, c, g, or t
gatgggcttttttccagatcttcgcgccgngagccggggacggccaaacctgccggcatgcgataaaggccggggaaatgtctagctggggccgcgctgagccgaggtgcggacccgctttgtgtgcgcgtttgtttgtctccgctggggtccgaaccgctgccgcgacccccgaggaggcggggcctccgcgcgcccggctccgcctggtgagggtttcacggcctctgctgccgccgccgccgccctcgtttgttccgttagatcgcgcagccccgaccgctgcacccggatcctagcaagccgggcgaggctgcccgggagccctcgatggccttcatttcacccaagcccgcttcttgctttccccggcgcttcccctcttttcctggttaacagcttatgggcggggagctcggcaaaactcagactaaaaacagaaaaagagaaaagaaaggacaaattcgatacacccgcgtcggtcctccagagtttgtgaaggggtgtaaacatgtcggagtctggggagatgagtgaatttggctacatcatggaattgatagctaaaggcaaggcttcagcaatgggcctgcagcaaacccatgagcattcccggttgacttctaaaggtggagaggcccgctgtccctttgaaatctctgaggttggaaagcagtctctcccaagaagaacttaggacaattcctctctctgttttgtgggggttggagggggagagttggtctggagtaggctcctaaccatttcaacgtaagcttatttcctaccactctcctcaggctcaaatcctgccccgccccgcagccccagcactagcccatttaagacccctgttttgtgtgtgattatacaggatttgaacactgaatattaaccatggaatagca

SEQ ID NO: 439808 - DNA, 728 bp, Homo Sapiens
cccctctctggtggtgggctggtctgcggtggtgggcttggtggcggtggtgttgtggtttgatgtgtttgtttttctttaaggtttttaaaatgcttcgccacttgttatttcctgtttgggagaagtctgtcgctgtggcaagttccgtcgtcttcccacagccctgtctgcagcggtagcctcgtctccaatccggcatcttgcctttagctatcaattccatgatgtagccaaattcactcatctccccagactccgacatgtttacaccccttcacaaactctggaggaccgacgcgggtgtatcgaatttgtcctttcttttctctttttctgtttttagtctgagttttgccgagctccccgcccataagctgttaaccaggaaaagaggggaagcgccggggaaagcaagaagcgggcttgggtgaaatgaaggccatcgagggctcccgggcagcctcgcccggcttgctaggatccgggtgcagcggtcggggctgcgcgatctaacggaacaaacgagggcggcggcggcggcagcagaggccgtgaaaccctcaccaggcggagccgggcgcgcggaggccccgcctcctcgggggtcgcggcagcggttcggaccgcagcggagacaaacaaacgcgcacacaaagcgggtccgcactcggctcagcgcggccccagctagacattccccggcctttatcgcatgccggatcccc

SEQ ID NO: 439809 - DNA, 890 bp, Homo Sapiens
  misc_feature (619)..(844): n is a, c, g, or t
ctttaatataaataaaaatttaagtaattttatactaagaacaataaatccaggggaaattcatacgtttcttgcagacaaaaactgagcatttgcaattaggaagtcttcacttgaaatttagaagtgtgtactctaggcatgaagaaagtgactctcagacaggaggccagagatacaagaaagatcaaaaagcataagagtaataaatatcttagtaaatctaaacaaacatttttataaaacagtaatcattttcataggctttaaagcatattaatatatatgtcaatgatagcacgtaagtcagaaggatgaatggagtttctgtaaggtacttgtgaggacagtaaagacacatagcttttcagagtctaaagttaatcagtatgtgtgtcataatagcagatagaagaaatagaggtaatagcttgtgaaataacatagaggatgaaataagggaaaatatgaaatccaaaaggagaaaagcccagaaacacatagttcacagattaagtagaaaacaacgtgatggatataaatccaaatatatcattagctacattaaatgtaagatgaattaagccccaattagtttgagtggcctactgaatttttnnnnnnnnnnnnnnnnnnnnnnnnnnnnnnnnnnnnnnnnnnnnnnnnnnnnnnnnnnnnnnnnnnnnnnnnnnnnnnnnnnnnnnnnnnnnnnnnnnnnnnnnnnnnnnnnnnnnnnnnnnnnnnnnnnnnnnnnnnnnnnnnnnnnnnnnnnnnnnnnnnnnnnnnnnnnnnnnnnnnnnnnnnnnnnnnnnnnnnnnnnnnnnnnnnnnnnnnnnnnnnnnnngagtgggaggtttgcaagtgagcttgaatttgccaccaactacatt

SEQ ID NO: 439810 - DNA, 1866 bp, Homo Sapiens
  misc_feature (647)..(647): n is a, c, g, or t
ttttttttggatttaacaaagctgatttctttcctgcaggaattccgaaagcctttgacatatattatatacaatgcgtctccaaaaaaagaaatacaaacagcggttcctaaacatatttggccatggggcccttttgaaattgagtaacctaccaataccttgctgtacagagtttgtgaaatgccaaactagaagtgactatcattgcacttcggatcctatgtcattgatctgttgattctctctggttcccaacagatccataaaaaggaaacggcattcctggtgggaggccagagagatcaaacagtggtggaacagaatgggtacaggagccctaacctgaccctttccttgggaagtccagggcctctttctcctttgtaaactagtctttattcctacaataacctgtgatctgcccttggctgtccaaataagaataatgctctgagtatgagtggcattacaagggcccccctgtttctgtcgtgttctgaaagaccccacttgtcatacagggtctggtttctttcttggccttaggaccccactagtggccgagtgtgatgggggcctttgcctgcctggtctaagggcgggtcttgagcgtggatggaactagcgtgggcaggtggcgagtncccctggctgggatttttctctttttgtttgtttgcaaaacactgttaaaagattattgcctcctatattgctgaggtctgactacagtgtctgcgtttgatggaggtggggcaaggcctagagggggcctttgcccaaaggtgagccaaacactagtaagaatgtgaaaactagccactcgcagacatctcacttggttatctggcaggtaagcaggcacgtgggtaggcagagggtgtgatgcccatcgctcaggcctgttttgaggaacctggaggctctcaaaggcccacctcacagtcagacaatgctggaatgtcacggtgaaggaaaatgggaacaaatatagataatcggttcctgggtcaaaggcatttagaaagtatgttctcaggccctccattctgttcccatcaggaaccaaggctgagaaggaagatgaggcaggagggggacgagtgtagcagagcactcttcccctcccagcctggatggcgttagtcagagaacaggctggcaaaagacttcctcaggttgcggatggtttcagccttggcctcgtcttcacttggggtcccacgctgggaggtgtcggatgtgctgaggctgttagtcagggactgagattctgttgagatagcggatgggcgtggtgctgggcattcttggactcttcaccctgctgggaggtactacggccctgcacagggggccggggctgtgaggcgagggtggcacctggcttggaggccctggtttggggagcttgccactggatgcccgggatagctgcggagagcctggtgacctttgctgctgtggagactccggactgggggctcaggggctgctggaccttgtggggagagcctctgttgggaggggcttccagatctctggggctgaggagactgagcttggcgagggcctccttgcggaggtgggcgtggctggggctggcctagctgaggccccagctgggcttgacctaggggatttcgctgatttaatctgtggagcccaaggtctgaggggggagggcgctgtgcctcctggcatcgggagctggctcattttggagacaacaaggtcggccatcagctgtctgtcctcttccacatgctctccaatcagcggcattgagctgtccattacctgtggggaggaagggagagctgagggacccccatgccaggagagatggcggttgggcatcac

SEQ ID NO: 439811 - DNA, 760 bp, Homo Sapiens
atcaggccaaatcggccgagctcgaattcgtcgagagcggacttttgggatgtgatgcccaaccgccatctctcctggcatgggggtccctcagctctcccttcctccccacaggtaatggacagctcaatgccgctgattggagagcatgtggaagaggacagacagctgatggccgaccttgttgtctccaaaatgagccagctcccgatgccaggaggcacagcgccctcccccctcagaccttgggaggccctcgccaagctcagtctcctcagccccagagatctggaagcccctcccaacagaggctctccccacaaggccagcagcccctgagcccccagtccggatctccacagcagcaaaggtcaccaggctctccgcagctatcccgggcatccagtggcagctccccaaaccaggcctccaagccaggtgccaccctcgcctcacagccccggccccctgtgcagggccgtagtacctcccagcagggtgaagagtccaagaagccagcaccagcccatccgcatctcaagtctgttgcctccccatcctatgactgagcctcctgaggcagggcctgaatcatattcgtcttacaccccatgtccccctagcacaggggaagtgctcagacaagcagttgctacaggctggcactttaggacgcactcagaatggcatctgccattcacaaagatggcactcacagaatccaaaagcgggtgggggacagaatcagcgcgtagaagaa

SEQ ID NO: 439812 - DNA, 1168 bp, Homo Sapiens
  misc_feature (95)..(213): n is a, c, g, or t
  misc_feature (368)..(368): n is a, c, g, or t
  misc_feature (764)..(764): n is a, c, g, or t
  misc_feature (780)..(780): n is a, c, g, or t
  misc_feature (792)..(792): n is a, c, g, or t
  misc_feature (797)..(797): n is a, c, g, or t
  misc_feature (800)..(800): n is a, c, g, or t
  misc_feature (806)..(806): n is a, c, g, or t
  misc_feature (809)..(810): n is a, c, g, or t
  misc_feature (843)..(843): n is a, c, g, or t
  misc_feature (880)..(880): n is a, c, g, or t
  misc_feature (898)..(898): n is a, c, g, or t
  misc_feature (928)..(928): n is a, c, g, or t
  misc_feature (942)..(943): n is a, c, g, or t
  misc_feature (947)..(947): n is a, c, g, or t
  misc_feature (965)..(965): n is a, c, g, or t
  misc_feature (975)..(975): n is a, c, g, or t
  misc_feature (985)..(985): n is a, c, g, or t
  misc_feature (987)..(987): n is a, c, g, or t
  misc_feature (992)..(992): n is a, c, g, or t
  misc_feature (997)..(997): n is a, c, g, or t
  misc_feature (999)..(999): n is a, c, g, or t
  misc_feature (1004)..(1004): n is a, c, g, or t
  misc_feature (1010)..(1011): n is a, c, g, or t
  misc_feature (1013)..(1013): n is a, c, g, or t
  misc_feature (1015)..(1015): n is a, c, g, or t
  misc_feature (1019)..(1019): n is a, c, g, or t
  misc_feature (1023)..(1023): n is a, c, g, or t
  misc_feature (1026)..(1026): n is a, c, g, or t
  misc_feature (1030)..(1030): n is a, c, g, or t
  misc_feature (1034)..(1034): n is a, c, g, or t
  misc_feature (1044)..(1044): n is a, c, g, or t
  misc_feature (1051)..(1051): n is a, c, g, or t
  misc_feature (1072)..(1073): n is a, c, g, or t
  misc_feature (1076)..(1076): n is a, c, g, or t
  misc_feature (1079)..(1079): n is a, c, g, or t
  misc_feature (1081)..(1081): n is a, c, g, or t
  misc_feature (1085)..(1085): n is a, c, g, or t
  misc_feature (1094)..(1096): n is a, c, g, or t
  misc_feature (1100)..(1101): n is a, c, g, or t
  misc_feature (1104)..(1104): n is a, c, g, or t
  misc_feature (1111)..(1111): n is a, c, g, or t
  misc_feature (1114)..(1114): n is a, c, g, or t
  misc_feature (1118)..(1118): n is a, c, g, or t
  misc_feature (1121)..(1122): n is a, c, g, or t
  misc_feature (1124)..(1124): n is a, c, g, or t
  misc_feature (1130)..(1130): n is a, c, g, or t
  misc_feature (1137)..(1138): n is a, c, g, or t
  misc_feature (1140)..(1140): n is a, c, g, or t
  misc_feature (1142)..(1144): n is a, c, g, or t
  misc_feature (1152)..(1153): n is a, c, g, or t
  misc_feature (1161)..(1161): n is a, c, g, or t
  misc_feature (1164)..(1164): n is a, c, g, or t
gggggatccacagccccggtccgggcccgggttttcttgggaacccgtttggccctgtttcccttcctttggggggcccgcgcccaaagcatggnnnnnnnnnnnnnnnnnnnnnnnnnnnnnnnnnnnnnnnnnnnnnnnnnnnnnnnnnnnnnnnnnnnnnnnnnnnnnnnnnnnnnnnnnnnnnnnnnnnnnnnnnnnnnnnnnnnnnnnaacttttaacaaacttttattaacaaacctcgcgtagagccaactctaacccgactaacagcaaaaacagcattgctaacaagatcaaggatggaggtgcagacccaataaagaccgtctcttaaaaaaaggactgggaaaaatatatatatatntatctgcatgagtacttcttaaaaaactaaaactttccagtgttgcaggaaaaaatatcccaaagtgatttcagtcggttaaaaaaaacagtacttggcagtctgtgctgccttaaaaaccccaactggacataaccctaggagaaaatcaccccaccccataaagacaaaattcccttttctcctcttccttgttcaaattccactgcttattccaccaacacccaaggaataacaagacccagcttacttctctcggtctcttatctgataaagctcacagcaatcttaacctctactacaatcagtgaaattgagccctaatttcgtgtgtgccagattcgtgtgaaagttgcaaaacatccttaggcggcgtgtgtgtgcctgattgactcntttcaaatgatcaaanggtggcagctgnaactngcnagaganttnncattgccttgcccttgcaatgcttgcagacaanggggaccttttcttaagcaaaaaacacccccaacatnctgtcaactgaaagtctnaaccagtgcaaaaaccaagtgagcagcagngcgccaaaactganngctnctgcctgcaatgctgcanatgctccccntgctttcacnantaaangcaangngcgcntaaagnncncnaaantgcnttntttncacntcatctgctnttctgcnatattttaggccgcagccatnnttnctncncaancactttttnnncaanngcngcctttnttntttnttnntngctaangctgccnntncnnnccagcctnncttcattnctncttt

SEQ ID NO: 439813 - DNA, 1609 bp, Homo Sapiens
  misc_feature (528)..(576): n is a, c, g, or t
  misc_feature (1563)..(1563): n is a, c, g, or t
  misc_feature (1566)..(1567): n is a, c, g, or t
gcctctcgcgggaatttccactttcctttgcggcgccggtgggagggccgcaggaaacaaggttcagctcaatggggaaaaagaacgcagacaaatacaactaccgcggttaagcttaggggctgaggaacaagctgcagcctcaccggaagttttccaagccccctgggcaggttgtgaaagtctgtggatgacttcgcgctgctgacgaagcggcaagcggatgggtatactgctttccgggaaggggaatgggtagtggtggagggggccggctttgcaaaacttgggacacgggcctaaaggtgcctcctgctgctgctgctgctggtctttgccaccgccgccgccgcccccgtggtccttggtgcccacgccgccgccttgttcgtcttggggacttatatcagcgctgtgaagtctcttggggcagcggaaacgcagatgcgccacataggggaactcaaactggaaacgttggctgcattccaggcatgtgtaaggggacgaccctgcttagtgagcaannnnnnnnnnnnnnnnnnnnnnnnnnnnnnnnnnnnnnnnnnnnnnnnntgattactcagcatcgcccccaagccagtttgccaccatccccttgacaaatccaccttcatttctcagggcctgagtgcctgagaaaagaatgaccaacctgatctcactttccctcctgatttggagggaatacagcaaacaagcaagtttcctcgctttatcctcacctatctgtttaacttcattccagactacatctcagaatcttcctatgagacacccgaagggaagaaaaggcgccaacgcgccgggtgagcccctgccgctccctgcgtctctccccccgctagttaagggcccacacgccggtcgcgagccaacctaccattcattttgttgtgggatctagaggggcagagcaagagtaactcagtcagttctttcccgtaccaaactagtaactcctcgtctttggcatatctgcggagagagcggtagaacagctgtccgttttttatgtaggcttcaaggttctgctcttccttatctctggccgattggaccaaccgcagccacatgagaccttctgaggaaccatttgctgctgaggtgtctacccgaaagatatacggtactgttctcttgtcagtagacttgagagctatgaaagctatgctgtcatatagggaagtatggctcaggacacagggaccaaatatagcattctcagggatgtcgcaggtggtgtaaacgctggtaaaaatatctgtcagacattgttggacagccttggcatctccatcccagatgcctcgctggatgccagtatcctccatcacaggaataaggtcagtatagaatctcccaaataaggccacctggaaccgggaagatgcaatcgagtgtttccttttgcctattgtatcagtgtatttccatgtcaagaggtgttggtgttgccgccttttaggctcttcctgaagagataagagagagatggagagatggggagaaaaagattgggggggtggagggagggagggnggnngagagacggagaaacggagagagttgtacagatggacccgat

SEQ ID NO: 439814 - DNA, 921 bp, Homo Sapiens
ctcgagccggctgggcagcgggcccccaggccgcggggccagcagcttctcggcgcccaccggtgacgcggccgcgggcgtggaggagccgccgccgccgccagcgtcctggtcctcggaggcgactcccgcgccgtcggctgtcccctcctcctgcaggctggccgcgcgggcagccttcttcacctccacgaaggcgctgcgcttcgcctcgcccgtctcgggacttggcggcgcgaagaggcggccgttctcttccaggccgaagtagctgcccgaggctcggtactgctgcggtgtgcacaccagatcctccttggaggccgggaggggccgctctacgaagcggccccggccccctaccagaccagcgccaccgccgccctccgccgcctcctccgggaatttcctctttcctttgccgccgcccgtggcgatgccgtcgggactcagctccgcctcctggtggccgccgccgccggcgctgccggtaccgctgctgaggctctgggctgggggagcagctgctgcctccccgggagttttccagctccctggccaggttgtggaagtctgtggatggcttcgcgctgctgccgccggcggcagcggatgggttgctgctttccggggagggggatgggtagtggtggagggggccggctttgcaaaacttgggacccgggcctaaaggtgcctcctgctgctgctgctgctggtctttgccgaccgcgccgccggcccgtggtccttggtgcccacgccgcggcttgttcgtgcttgggggacttatatcagcgctgtgaagtctcattgggggcagcggaaacgcagatgcggcacataggggaatcaaatggaaaggttggtggattcaggcatgtgtagggggagaccattcatgtggtgtgggactagaag

SEQ ID NO: 439815 - DNA, 769 bp, Homo Sapiens
cccttggtgcccacgtcctccgccttgttcgtcttggggacttatatcagcgctgtgaagtttcttgggtcatcggttacgcagatgcgccacataggggaactcacactggaatcgttgtctggcattccaggcatgtgtaaggggacgacccattcatgttttttgtgggatctagaggggcagagcaagagtaactcagtcagttctttcccgtaccaaactagtaactcctcgtctttggcaatcctgcggagagagcggtagaacagctgtccgttttttatgtaggcttcaaggttctgctcttccttatctctggccgattggaccaaccgcagccacatgagaccttctgaggaaccatttgctgctgaggtgtctacccgaaagatatacggtactgttctcttgtcagtagacttgagagctatgaaagctatgctgtcatatagggaagtatggctcaggacacagggaccaaatatagcattctcagggatgtcgcaggtggtgtaaacgctggtaaaaatatctgtcagacattgttggacagccttggcatctccatcccagatgcctcgctggatgccagtatcctccatcacaggaataaggtcagtatagaatctcccaaataaggccacctggaaccgggaagatgcaatcgagtgtttccttttgcctattgtatcagtgtatttccatgtcaagaggtgttggtgttgccgccttttaggctcttcctgaagagataagagagagatgg

SEQ ID NO: 439816 - DNA, 1324 bp, Homo Sapiens
  misc_feature (1)..(3): n is a, c, g, or t
  misc_feature (5)..(8): n is a, c, g, or t
  misc_feature (10)..(13): n is a, c, g, or t
  misc_feature (18)..(18): n is a, c, g, or t
  misc_feature (20)..(22): n is a, c, g, or t
  misc_feature (24)..(25): n is a, c, g, or t
  misc_feature (68)..(68): n is a, c, g, or t
  misc_feature (77)..(77): n is a, c, g, or t
  misc_feature (1063)..(1063): n is a, c, g, or t
nnnannnntnnnnaaaanannnanncccccaaatcaggacactcagggaaaaagataccaaataattnagacttggngtgcttcttattcaactgcatgaggtaatgtgattagtattaagaatgagattatgttcataatctggaagcagaggattatgcacaagtgattcttgaaaactgtctatacctataaagctctactctgaaaggtagaactatatttggcccaagtcaagagataggagataataggctaaatcctaaaagaacttttgattaattggttattataaagataattattatgaaatataatagtctttgaataaattttggatgaaaatactaattttgaagaagccaggccttaaaataattttatttggaacaaatgcagattttttttcttcctgaaaatgaatatttctctgggtccacgtttaatgtaattatttctctttctttttctcatttaatgaagatagtgaattgctagtctctagaaattctatacagttttacagttcaaatagcctttttgtaatgttttaaaaaattactgcgtcattggatttggaaaacagtgacccaccttctccatgtacaaaaacagcagataggaattgccaaattttcactttggtaaaatcacagaaacagatacattataatacattcaatctgttcattgtaatttttttcccacagattcaagaatggctttgtttaaattgccaaacccagagagcaatatcaggacagcttggagacatacgcaaaatgccacctgcaccatcaggacccaaagcatctcctatgcctgttcctacagaatcatcatctcagaaaacagcagtgcctccccaagtaaaattagtgaaaaagcaagaacaagaagtaaaaacggaagctgaaaaagtcattctggaaaaagtaaaggaaacactatcaatggaaaaaattcctcctatggtaaccacagatcaaaaacaagaagagagttaactagagaaagacaaagcttcagctcttcaagaaaaaaagcccactcccttgagaanaaaaactaatcccctgaaagaagaaaagataacgttctgaagaaaaaaagcccactcctagaaagaaaaaagccaaccccttgaagaacaaaagctacttccaagaggcaaaaaacttaggccccagagaaacagaaacctgaatttacttaaatcttcaagtccaaattgctgaaagaaaagcttgaaggcagagtggctccaaagaagggtgcagaagggaaacacccccggccagatggggaggtgtaccattctgcc

SEQ ID NO: 439817 - DNA, 1404 bp, Homo Sapiens
  misc_feature (1251)..(1251): n is a, c, g, or t
  misc_feature (1285)..(1285): n is a, c, g, or t
  misc_feature (1298)..(1298): n is a, c, g, or t
  misc_feature (1302)..(1302): n is a, c, g, or t
  misc_feature (1307)..(1307): n is a, c, g, or t
  misc_feature (1316)..(1316): n is a, c, g, or t
  misc_feature (1329)..(1329): n is a, c, g, or t
  misc_feature (1331)..(1331): n is a, c, g, or t
  misc_feature (1336)..(1336): n is a, c, g, or t
  misc_feature (1349)..(1349): n is a, c, g, or t
  misc_feature (1360)..(1360): n is a, c, g, or t
  misc_feature (1362)..(1362): n is a, c, g, or t
  misc_feature (1372)..(1373): n is a, c, g, or t
  misc_feature (1375)..(1377): n is a, c, g, or t
  misc_feature (1381)..(1381): n is a, c, g, or t
  misc_feature (1383)..(1383): n is a, c, g, or t
  misc_feature (1396)..(1396): n is a, c, g, or t
ccttctttccaggcatcctccgctctcagcagagctgcttctgcccacccatccctctactatagcactgagccctgtttgcccgtgtcagaatccctcacccacatgtttagcttggtatccgagtttgggaggccggcaatgactttcaacatgaattgctccatctacccatccatgcatttggcctacttatcttgaccccgtgcttttggccttttcttctcctgaaagcaaaccctttcattttgggtgggctgtgtagcgccatgggctgtggttatgaagcaaacaccctttcttgtagctgcctcctccggggttactgccctgagcacgtcccagctggatctcgtctgccactgtcacccatagcttcttccccatggtgctttccatgtgtcacacaccacgactgtgacccagggtcggggtcaagagtagcctggggccaagccctcccacccatgagcggagaagtcctccccaggcctcaccttgcctggcgcatggtccctcccatgagctttgctttcagcctttcagcttcctccacagggtggcagtggttgtaactcatccattcatcccttcatcccttcattcattcactcacagccaacagacgtttttaaaaaattagccagtgctatactagagctggctcccaaggacccgctgccgcattgccttttgaaacaaaacaatgaacacgttggtaaaggggccgtgcttgtgtgtcggtgacaaggcgagatccctgagtcaggtcaggcttgtagattcgagttctgttgcgagtttgattgcccctctgactttgtcccctgtacaactaggttgattaggaatcagccaactgtgttccctgggtgctcagaaatcacagcccatatcctcgagaggccaaaatgagagccagggggttcccaagatgagtggctgcttctggccgggagcaggcttttcaagtccattagaacactctggcctttcctggaggtgatcttggaagccattcctgccccttttcaagaggcagttaatgcccagctctgtttagagaaaattgggggagatgattgctcatgtgggtgataagaatcacctcccgtgcaggggtctgcatagaacactccataggcaaacctgggtgtccaaggcacgtggcattttgcaaactctgggtgcagctccgagctgtcctgcaggtcccagaccaggtgagaactccctgagttcctgctgctngggtcgggggtgaggcataggtctttgggggttnacctggaattctnaatntattnatttcattngagaggaagagantngcaancaaagacctggantggaaaactcntntggttaaatnntnnnaacngnagtgagttgctanggggggga

SEQ ID NO: 439818 - DNA, 2071 bp, Homo Sapiens
  misc_feature (668)..(668): n is a, c, g, or t
  misc_feature (670)..(674): n is a, c, g, or t
  misc_feature (676)..(676): n is a, c, g, or t
  misc_feature (681)..(681): n is a, c, g, or t
  misc_feature (683)..(687): n is a, c, g, or t
  misc_feature (907)..(907): n is a, c, g, or t
  misc_feature (909)..(909): n is a, c, g, or t
  misc_feature (1064)..(1064): n is a, c, g, or t
  misc_feature (1070)..(1070): n is a, c, g, or t
  misc_feature (1114)..(1114): n is a, c, g, or t
  misc_feature (1119)..(1119): n is a, c, g, or t
  misc_feature (1124)..(1124): n is a, c, g, or t
  misc_feature (1836)..(1836): n is a, c, g, or t
aatatttactctggcccacatcgctaagcacctgcaggctgctctgccagtggtctgcacatgccacttgactgtgggaaatgcaatccccagcgtaaggtcagggctgactttttattcacttaggactagtaaagccatcactcatgctttcaagacaaatcccaacatatgcccattcccagggaaagccagcatctgcacactgttgaaacacacccaccctcggccctcacaacagccctgtgaggtaggctttcaggtgacctatggcttagagaaaaggagattgagggtcaaagaggcaaagggttaattaagtggcccctgggtctggccagatcctaaggctacgcgctttctaacataaaacacagattcgcatcagacagctcaagttccatcaacatgacgccgaaacaaggctcctgctcttcaaacgtggcatacaaacgtccgtaagatacaatatggtggttgttaacaggtccatgaagagcaaaataataatctcttagtaaaggttataaacatcaaggcttgtcattggttacaatttcattagctatccatccattcaacagaaaagaaacgtaagcgctaccactcgccaggcactgtgttgggcacccagcctgctgcatttgagcccaaatgttgtcagtcgncnnnnngngtggngnnnnnaacaatgcagtatctttgatggctggtgcctaatattttggggaaaaggacgccacccagaagggccttttgaaggcggacacaagtaggtgctgcacacaggccaggcacagaggcaggaagcacacagcattcagaaagcacagccaggcgtttccagcctctcagaggtgagcgtgaacgcgtacccccggggggtccaggggcattgtccagcgantnccccaaacccctagcatgaaagttcctgcccaaattcctcctgtcccaccatatacccctccaggtttagagataaatgctctcccactcagctgcctgagtgaggctgtctccctggccttttctcctcactcccctggcacacccccgggganacgcanaccgcccttccagaattcacagttcaaaatcacggttaaattgntcctnacaanagcctgcgaggtaggtgccgcagtcctcccccgtaggcagactcaactccagctctcacagtgactttaaaccacacgagtttgtccagttccagggtcttggctttgcctactctccttcctctccaatgcaatgaatgacattcagaattccaggttgaacccccaagacctatgcctcacccccgacccaggcagcaggaactcagggagttctcacctggtctgggacctgcaggacagctcggagctgcacccagagtttgcaaaatgccacgtgccttggacacccaggtttgcctatggagtgttctatgcagacccctgcacgggaggtgattcttatcacccacatgagcaatcatctcccccaattttctctaaacagagctgggcattaactcctcttgaaaggggcaggaatggctccaagatcacctccaggaaaggccagagtgttctaatgacttgaaaacctgctcccggccagaagcagccactcatcttggaaccccctggctctcattttggcctctcgaggatatgggctgtgatttctgagcacccagggaacacagttggctgattcctaatcaacctagttgtacaggggatcaaagtcagaggggcaatcaaactcgcaacagaactcgaatctacaagcctgacctgactcagggatctcgccttgtcaccgacacacaagcacggnccctttaccaacgtgttcattgttttgtttcaaaaggcaatgcgtcagcgggttcttgggagccagctctagtatagcactggcttatttttttaaaaacgtctgttggctgtgagtgaatgaatgaagggatgaagggatgaaatggatgagttacaaccaccgccaccttgtgtgggaagctgaaaggcttaagcaaactcatggggagggacatgcgccaggcaagtgaggc

SEQ ID NO: 439819 - DNA, 953 bp, Homo Sapiens
  misc_feature (272)..(313): n is a, c, g, or t
  misc_feature (744)..(760): n is a, c, g, or t
ccatagcaaccgggtgtccaggcacgtggcattttgcaaactctgggtgcagctccgagctgtcctgcaggtcccagaccaggtgagaactccctgagttcctgctgcctgggtcgggggtgaggcataggtcttgggggttcaacctggaattctgaatgtcattcattgcattggagaggaaggagagtaggcaaagccaagaccctggaactggacaaactcgtgtggtttaaagtcactgtgagagctggagttgagtctgcctacgnnnnnnnnnnnnnnnnnnnnnnnnnnnnnnnnnnnnnnnnnngcaatgtaaccgtgattttgaactgtgattctggaagggcggtgtgcgtgtccccgggggtgtgccaggggagtgaggagaaaaggccagggagacagcctcactcaggcagctgagtgggagagcatttatctctaaacctggaggggtatatggtgggacaggaggaatttgggcaggaactttcatgctaggggtttgggggactcgctggacaatgcccctggaccccccgggggtacgcgttcacgctcacctctgagaggctggaaacgcctggctgtgctttctgaatgctgtgtgcttcctgcctctgtgcctggcctgtgtgcagcacctacttgtgtccgccttcaaaaggcccttctgggtggcgtcctttttcccaaaatattaggcaccagccatcaaagatactgcattgttgcctnnnnnnnnnnnnnnnnnaactgacaacatttgggctcaaatgcagcaggctgggtgcccacacagtgcctggcgagtggtaccgcttacgtttctttctggttgatggatggatagctaatgaaattgtaccaaggcagagccttggtgttataaccctttctaagaaatattatttggttttcagggacccgttaacaccccctttttg

SEQ ID NO: 439820 - DNA, 389 bp, Homo Sapiens
tagaggatccccccagttcctgcttcttgaaaccagttccagggtcttggctttgcctactctccttcctctccaatgcaatgaatgacattcagaattccaggttgaacccccaagacctatgcctcacccccgacccaggcagcaggaactcagggagttctcacctggtctgggacctgcaggacagactcggagctgcacccagagtttgcaaaatgccacgtgccattggacacccaggtttgcctatggagtgttctatgcagacccctgcacgggaggtgattcttatcacccacatgagcaatcatctcccccaattttctctaaacagagctgggcattaactactctttcaagaagcagaactggggccgagctgatct

SEQ ID NO: 439821 - DNA, 1001 bp, Homo Sapiens
  misc_feature (914)..(950): n is a, c, g, or t
ggtttcagcccaattgacgggacttatccacatgtagggccccatgttcggcgaacaatgtccgagcaaccattggaatgccagggttacatgttgctcttaacttagatcctcagaagagcactgtaattgatcaatagccaggtaaaaataaataactgtggccaggaactgccatcactaggttaggaggaaggccactccatagagatttaatggccctcatttcgaatgatttttaaaaaatgcatccaatgttcccctggaaatttccctggcttcttataccatagtttgttgcctccctcttcacagacacatagatgatccatgagtccattactatatacaaaacattttcctttggggagtgggttgttttgggcttggagtctaattttaacaacatccaggggtgtcactattactgatgtcagtatagctccagtacatgaggcaagcatttgttgaagaggtgtcactttgataatctcttgtccccttgtctcaggatccatatttttaactaattaaataaaaacctggtttgagtctgttcttcaactctatgctccaatattttattgtttgtaacatcagtagccaaaaacctggggcagaaggcagctgcagggccggcagtcctggcaaacctagaaggcgggaataaccctggtgacgggcggggccgggctccggcgctaactgcatccactaggtttggtcaacacagagccgcgccaactctctgaggctgcgccaagacctgaagcggcggaccgagagcccgggtctgagactgagagagcaacggaatggaggcggggtagaggcggaaacacaacctgcagggccagagcgaggcgcgagaagccgctctcgacgaattcgagctcggccgatttggcctgatnnnnnnnnnnnnnnnnnnnnnnnnnnnnnnnnnnnnncgccgccaccgcgttaacctccgagtcgccctatagtgagtctatcattcg

SEQ ID NO: 439822 - DNA, 1063 bp, Homo Sapiens
  misc_feature (221)..(221): n is a, c, g, or t
ctgggagcgaaataggttgttcctcttatataacaagaatcaggaattcccagcaaacagatttcattacgtataaagcatattccagaaacacgcagatcacacatgaatatgctctcagtccatcataaacaggcattcactcaaggggtaaaccagtaatgagccaaaacatacgtactcatgcaaatgtacatttgacagcaaattattttagatcntaatgtcatttcagtgttaaaaatgagctggggagacagctcctgtgacatttggtatgaaagctttagattgcaattttcatgtagaagtagcttcatatcacatctcgtgagtttcgtatcgcacagcagaggaccatgctgaatatcatgccaaagatcgtcagacctgcaattccaataccgacaattccaatgagctggagcttaacactgattatggtctcaatttcatcgatgcaattcttgtgtcctagaagctcctttgggcatgtaggttggacctgttcggagctttcttttccacagcactgaaatgttgagtggaaggtgatgagtgtcccattgccttttcccctgtctttaaggtaatcattgtaagcctcttcatacatggtctgaacatgtcggatagctacccccttgcctataaaagcaaatactccagtggttacttcagcagcaaatatcaccaggaggcaggtaaaaaatgatccaagcacacattgcgactcccgcatggctccgcagcatccgaagaaccccacggccatcatcagggccccggctccaaccagaacatacagccccacatagaaatactctggggacttgtcctctgatgataactcctttatggcccctccgaaccgaaaccatagtccaaaagcaatgacggccgatccagccagccagaagagcaggttgaagccaagcagcaggtacttgatgcaccgcaggcccccgcggaagcgccccatgctgcggcccggcggcgggatccccagtccccaggcccgcgctacgagcgcggggagcggcatcccgggaattccggaccc

SEQ ID NO: 439823 - DNA, 758 bp, Homo Sapiens
ggaggcctgacggcgccttcttgtttgtccgtcccccccagagggcccctccgtggcgcccggaccgctgctttcttctcaggtgtgaagtcctggtcgctggtcttctccgactcagatgagctttccgagttctcctcttcggatggggacacgctggcctgatccaggtcgctggaggcctttcgggctcgtttcgagaccgacatctttagcgcaggcgtcttcctcttcaggccactgttgtcgctactcttgtctgagtctgagtcgctctccatcctgtcgctggcagctgtggcggttaccgctgtgacggccatgaccccccggtcctcatcgtcctcgtcagcgtcactgccgtcggcggggttggcctcgggggcctcgctgtcggaggagctcactggcggaggggcgctgtagctggcgtgggggttgttctggatctcccacagcccttcattgaagcctttcctcttgttgggcttcccgtacttgtctttacatttgtcgtaggggaacaggtccttgggtcccaggaaggctgtttcgtgtgtgccaaagaaaaagatggggtacttgttgggtgggggcttcacggcgccatccgcgatgtcgtcgatcctggcaggccagtgagggtagcccttcatcttagcgaacaccaagtccccgggcttgaaggcgtgtggcatgctgacggcgagaggcccaggccgcggaaagcggctgcagcggcggtagcggtggggcgg

SEQ ID NO: 439824 - DNA, 991 bp, Homo Sapiens
gttggtttcttcgcagaactgccaaagtggagagcttttcgcggagtttgtcgctttcttagggacaggggggagacacgcggtgggccatgaataccagagtggggctgagaggccttttccggggtgagttttaggaaagccgaacattgttgaggcgcgggggtcttcctttttcagggcccctgttgttgcctactctggtcagagtagagtgcggtctccatcctgtcggatggcagctgggggggttaccggctgtgacgaccatgaccccccggtcctcatggtccttgtcagcgtcactgccgtcggcggggttgccctcgggggcctcgctgtcggaggagctcactggcggaggggccgctgtagctggcgtgggggttgttctggatcttccccccagcccttccattgaagcttttcctcttgttgggtttcccgtacttgtctttacatttgtcgtaggggaacaggtccttgggtcccaggaaggctgtttcgtgtgtgccaaagaaaaagatggggtacttgttgggtgggggcttcacggcgccatccgcgatgtcgtcgatctgcagtgagaggccagtgagggggtggctttacccactgacccaggaaatcaccgagaaatcagccaagttacttggggcaaatcacgctgggaggaggggagccttccccccaggaagcagcagccccttcccgatgggaagctgcattcttctgtgtacccttcactgcaaagctgtgccccacccagagagctctccccctaccccagggacggagctggccccagggcaggtgctccacctgagcaaagccagatccggccctctgaagcaaccagggggtggggccaagctcagcgtctatggactgccaggacctttcctggggacccctcccgcaaagaggggctcacgggcggtcccccagaggatgcagctggcagctcctaaggatgcagaatcccgggaat

SEQ ID NO: 439825 - DNA, 2412 bp, Homo Sapiens
  misc_feature (450)..(505): n is a, c, g, or t
  misc_feature (1678)..(1678): n is a, c, g, or t
  misc_feature (1681)..(1681): n is a, c, g, or t
  misc_feature (1756)..(1756): n is a, c, g, or t
  misc_feature (1769)..(1769): n is a, c, g, or t
  misc_feature (1774)..(1774): n is a, c, g, or t
  misc_feature (1778)..(1778): n is a, c, g, or t
  misc_feature (1780)..(1780): n is a, c, g, or t
  misc_feature (1785)..(1785): n is a, c, g, or t
  misc_feature (1798)..(1798): n is a, c, g, or t
  misc_feature (1802)..(1802): n is a, c, g, or t
  misc_feature (1805)..(1805): n is a, c, g, or t
  misc_feature (1807)..(1807): n is a, c, g, or t
  misc_feature (1813)..(1831): n is a, c, g, or t
  misc_feature (1848)..(1848): n is a, c, g, or t
  misc_feature (1853)..(1853): n is a, c, g, or t
  misc_feature (1856)..(1856): n is a, c, g, or t
  misc_feature (1860)..(1860): n is a, c, g, or t
  misc_feature (1863)..(1866): n is a, c, g, or t
  misc_feature (1874)..(1875): n is a, c, g, or t
  misc_feature (1877)..(1877): n is a, c, g, or t
  misc_feature (1879)..(1879): n is a, c, g, or t
  misc_feature (1881)..(1882): n is a, c, g, or t
  misc_feature (1884)..(1884): n is a, c, g, or t
  misc_feature (1887)..(1887): n is a, c, g, or t
  misc_feature (1889)..(1890): n is a, c, g, or t
  misc_feature (1894)..(1894): n is a, c, g, or t
  misc_feature (1896)..(1896): n is a, c, g, or t
  misc_feature (1904)..(1904): n is a, c, g, or t
  misc_feature (1906)..(1907): n is a, c, g, or t
  misc_feature (1909)..(1909): n is a, c, g, or t
  misc_feature (1915)..(1916): n is a, c, g, or t
  misc_feature (1918)..(1918): n is a, c, g, or t
  misc_feature (1922)..(1942): n is a, c, g, or t
  misc_feature (1945)..(1946): n is a, c, g, or t
  misc_feature (1950)..(1950): n is a, c, g, or t
  misc_feature (1952)..(1953): n is a, c, g, or t
  misc_feature (1955)..(1956): n is a, c, g, or t
  misc_feature (1961)..(1961): n is a, c, g, or t
  misc_feature (1964)..(1964): n is a, c, g, or t
  misc_feature (1968)..(1970): n is a, c, g, or t
  misc_feature (1986)..(1986): n is a, c, g, or t
  misc_feature (1993)..(1993): n is a, c, g, or t
  misc_feature (1996)..(1996): n is a, c, g, or t
  misc_feature (1999)..(1999): n is a, c, g, or t
  misc_feature (2003)..(2003): n is a, c, g, or t
  misc_feature (2010)..(2010): n is a, c, g, or t
  misc_feature (2017)..(2017): n is a, c, g, or t
  misc_feature (2027)..(2027): n is a, c, g, or t
  misc_feature (2032)..(2032): n is a, c, g, or t
  misc_feature (2041)..(2041): n is a, c, g, or t
  misc_feature (2046)..(2046): n is a, c, g, or t
  misc_feature (2056)..(2056): n is a, c, g, or t
  misc_feature (2068)..(2068): n is a, c, g, or t
  misc_feature (2070)..(2070): n is a, c, g, or t
  misc_feature (2073)..(2073): n is a, c, g, or t
  misc_feature (2084)..(2087): n is a, c, g, or t
  misc_feature (2089)..(2089): n is a, c, g, or t
  misc_feature (2094)..(2094): n is a, c, g, or t
  misc_feature (2096)..(2096): n is a, c, g, or t
  misc_feature (2098)..(2101): n is a, c, g, or t
  misc_feature (2106)..(2106): n is a, c, g, or t
  misc_feature (2108)..(2108): n is a, c, g, or t
  misc_feature (2112)..(2112): n is a, c, g, or t
  misc_feature (2115)..(2115): n is a, c, g, or t
  misc_feature (2117)..(2117): n is a, c, g, or t
  misc_feature (2121)..(2121): n is a, c, g, or t
  misc_feature (2125)..(2125): n is a, c, g, or t
  misc_feature (2130)..(2130): n is a, c, g, or t
  misc_feature (2132)..(2132): n is a, c, g, or t
  misc_feature (2144)..(2144): n is a, c, g, or t
  misc_feature (2149)..(2149): n is a, c, g, or t
  misc_feature (2154)..(2155): n is a, c, g, or t
  misc_feature (2157)..(2159): n is a, c, g, or t
  misc_feature (2164)..(2165): n is a, c, g, or t
  misc_feature (2169)..(2171): n is a, c, g, or t
  misc_feature (2176)..(2176): n is a, c, g, or t
  misc_feature (2178)..(2178): n is a, c, g, or t
  misc_feature (2181)..(2183): n is a, c, g, or t
  misc_feature (2188)..(2188): n is a, c, g, or t
  misc_feature (2193)..(2193): n is a, c, g, or t
  misc_feature (2199)..(2200): n is a, c, g, or t
  misc_feature (2202)..(2202): n is a, c, g, or t
  misc_feature (2206)..(2207): n is a, c, g, or t
  misc_feature (2209)..(2209): n is a, c, g, or t
  misc_feature (2219)..(2220): n is a, c, g, or t
  misc_feature (2230)..(2230): n is a, c, g, or t
  misc_feature (2232)..(2232): n is a, c, g, or t
  misc_feature (2240)..(2241): n is a, c, g, or t
  misc_feature (2245)..(2247): n is a, c, g, or t
  misc_feature (2252)..(2252): n is a, c, g, or t
  misc_feature (2258)..(2258): n is a, c, g, or t
  misc_feature (2262)..(2262): n is a, c, g, or t
  misc_feature (2266)..(2267): n is a, c, g, or t
  misc_feature (2269)..(2269): n is a, c, g, or t
  misc_feature (2271)..(2271): n is a, c, g, or t
  misc_feature (2273)..(2273): n is a, c, g, or t
  misc_feature (2277)..(2278): n is a, c, g, or t
  misc_feature (2282)..(2283): n is a, c, g, or t
  misc_feature (2287)..(2287): n is a, c, g, or t
  misc_feature (2290)..(2290): n is a, c, g, or t
  misc_feature (2292)..(2292): n is a, c, g, or t
  misc_feature (2295)..(2295): n is a, c, g, or t
  misc_feature (2299)..(2299): n is a, c, g, or t
  misc_feature (2307)..(2308): n is a, c, g, or t
  misc_feature (2317)..(2317): n is a, c, g, or t
  misc_feature (2328)..(2328): n is a, c, g, or t
  misc_feature (2332)..(2332): n is a, c, g, or t
  misc_feature (2336)..(2336): n is a, c, g, or t
  misc_feature (2338)..(2339): n is a, c, g, or t
  misc_feature (2345)..(2345): n is a, c, g, or t
  misc_feature (2347)..(2347): n is a, c, g, or t
  misc_feature (2364)..(2364): n is a, c, g, or t
  misc_feature (2375)..(2375): n is a, c, g, or t
  misc_feature (2378)..(2378): n is a, c, g, or t
  misc_feature (2391)..(2391): n is a, c, g, or t
  misc_feature (2396)..(2396): n is a, c, g, or t
tgatgctaactggaacttcctggattttgcctaccattttacagtatttgtcttctattttggagcctttttattggaagcagcagccacatccctgcatgatttgcattgcaatacaaccataaccgggcagccactcctgagtgataaccagtataacataaacgtagcagcctcaatttttgcctttatgacgacagcttgttatggttgcagtttgggtctggctttacgaagatggcgaccgtaacactccttagaaactggcagtcgtatgttagtttcacttgtctactttatatgtctgatcaatttggataccattttgtcctgatgcaaaaacattccaaaagtaatgtgtttagtagagagagactctaagctcaagttctggtttatttcatggatggaatgttaattttattatgatattaaagaaatggccttttnnnnnnnnnnnnnnnnnnnnnnnnnnnnnnnnnnnnnnnnnnnnnnnnnnnnnnnngaaagtttccttttatgtccataaaatacaaatatattgttcataaaaaattagtatcccttttgtttggttgctgagtcacctgaaccttaattttaattggtaattacagcccctaaaaaaaacacatttcaaataggcttcccactaaactctatattttagtgtaaaccaggaattggcacactttttttagaatgggccagatggtaaatatttatgcttcacggtccatacagtctctgtcacaactattcagttctgctagtatagcgtgaaagcagctatacacaatacagaaatgaatgagtgtggttatgttctaataaaacttatttataaaaacaaggggaggctgggtttagcctgtgggccatagtttgtcaaccactggtgtaaaaccttagttatatatgatctgcattttcttgaactgatcattgaaaacttataaacctaacagaaaagccacataatatttagtgtcattatgcaataatcacattgcctttgtgttaatagtcaaatacttacctttggagaatacttacctttggaggaatgtataaaatttctcaggcagagtcctggatataggaaaaagtaatttatgaagtaaacttcagttgcttaatcaaactaatgatagtctaacaactgagcaagatcctcatctgagagtgcttaaaatgggatccccagagaccattaaccaatactggaactggtatctagctactgatgtcttactttgagtttatttatgcttcagaatacagttgtttgccctgtgcatgaatatacccatatttgtgtgtggatatgtgaagcttttccaaataggagctctcaggaaggaattaagtttttacttctaattattttgcattactttgagttaaatttgaatagagtattaaatataaagttgtaggttcttatgtgtttttgtattagcccagacatctgtaatgtttttgcactgggtgacagacaaaatctgttttaaaatcatatccagcacaaaaactatttctggctgaatagcacagaaaagtattttaacctacctgtagagatcctcgtcatggaaaggtgccaaactgttttgaatggaaggacaagtaagagtgaggccacagttcccaccacacgaggccttttgtattgttntantttttcagccctttactttctggctgaagcatccccttggagtgccatgtataagttgggctattagagttcatngcacatagcacanccatnaatnantcgcntcacccgcgctcnatgnccnantgtcannnnnnnnnnnnnnnnnnngccagacccctgctagnccttngtntgtnacnnnnacacaaanncngnanncntgngnnaacncnaaaggccngnngnacccanncncacnnnnnnnnnnnnnnnnnnnnnccnncccnannannccccnccnctcnnncccccctagccccatnccacacnccnaancctntattatnaatcacntattacaaanccccnaatgccccncacgnacacccagcncacccccgccgnanccnctccccccccnnnnantcagncncnnnnccccncncccnccngntatngcangcttntntttggtggcatnaagantggtnncnnnaaaanncttnnntggcncnttnnnaatcngatcncccctnnantgtnncnacccaccccnnagaccccccngngaacactnngatnnntcgcncaatcncatnctanncntntnagcnnaatnncaangcngntgnaccncaactatnncatctaagnatttaacatcncttngccncnnaaatgngnaagtgttggctggtttnaaaatctggtnacnccatgatgaaacnaaatntacttatacgtgtatg

SEQ ID NO: 439826 - DNA, 958 bp, Homo Sapiens
  misc_feature (52)..(108): n is a, c, g, or t
caaaagggatactaattttttatgaacaatatatttgtattttatggacatnnnnnnnnnnnnnnnnnnnnnnnnnnnnnnnnnnnnnnnnnnnnnnnnnnnnnnnnnagagatgtaaaataaaaggccatttctttaatatcataataaaattaacattccatccatgaaataaaccagaacttgagcttagagtctctctctactaaacacattacttttggaatgtttttgcatctggacaaaatggtatccaaattgatcagacatataaagtagacaagtgaaactaacatacgactgccagtttctaaggagtgttacggtcgccatcttcgtaaagccagacccaaactgcaaccataacaagctgtcgtcataaaggcaaaaattgaggctgctacgtttatgttatactggttatcactcaggagtggctgcccggttatggttgtattgcaatgcaaatcatgcagggatgtggctgctgcttccaataaaaaggctccaaaatagaagacaaatactgtaaaatggtaggcaaaatccaggaagttccagttagcatcaatttgagccaccatgccagagaggaacatgcccagaaagaggagcgaaaagaaaaacgctgtcacggacacaaacatgacccatccttgtagtagaggtagaggaacattggaggaggcgaaccagaaatccagacaaggacccccgaacagaatctccaggcagacgaaggcgccgcgagtaggtccgcaggatgtctggggccaggtgggcaagcggggaaccacggggacgcgaagcggaacgagacaagggccggaaagattcgaaggcgacaacggagaaatggacgacgcaagacaggaacaaacaaagcatgaccgagtaaacgagtgattgcaataacagaagacaccagaacaataggggaacaagaataacgaaaaac

SEQ ID NO: 439827 - DNA, 1446 bp, Homo Sapiens
  misc_feature (376)..(376): n is a, c, g, or t
  misc_feature (382)..(382): n is a, c, g, or t
  misc_feature (392)..(392): n is a, c, g, or t
  misc_feature (412)..(412): n is a, c, g, or t
  misc_feature (509)..(509): n is a, c, g, or t
  misc_feature (1357)..(1357): n is a, c, g, or t
agcattggtaagcgtcacactgccaaagtgagagctgctggagaactcataatcccaggaacgcctcttctactctccgagtaccccagtgaccagagtgagagaagctctgaacgagggcacgcggcttgaaggactgtgggcagatgtgaccaagagcctgcattaagttgtacaatggtagatggagtgatgattcttcctgtgcttatcatgattgctctcccctcccctagtatggaagatgagaagcccaaggtcaaccccaaactctacatgtgtgtgtgtgaaggtctctcctgcggtaatgaggaccactgtgaaggccagcagtgcttttcctcactgagcatcaacgatggcttccacgtctaanaaaaanagctgcttcnaggtttatgagcagggaaanatgacctgtaagaccccgccgtcccctggccaagctgtggagtgctgccaaggggactggtgtaacaggaacatcacggcccagctgcccactaaangaaaatccttccctggaacacagaatttccacttggaggttggcctcattattctctctgtagtgttcgcagtatgtcttttagcctgcctgctgggagttgctctccgaaaatttaaaaggcgcaaccaagaacgcctcaatccccgagacgtggagtatggcactatcgaagggctcatcaccaccaatgttggagacagcactttagcagatttattggatcattcgtgtacatcaggaagtggctctggtcttccttttctggtacaaagaacagtggctcgccagattacactgttggagtgtgtcgggaaaggcaggtatggtgaggtgtggaggggcagctggcaaggggaaaatgttgccgtgaagatcttctcctcccgtgatgagaagtcatggttcagggaaacggaattgtacaacactgtgatgctgaggcatgaaaatatcttaggtttcattgcttcagacatgacatcaagacactccagtacccagctgtggttaattacacattatcatgaaatgggatcgttgtacgactatcttcagcttactactctggatacagttagctgccttcgaatagtgctgtccatagctagtggtcttgcacatttgcacatagagatatttgggacccaagggaaaccagccattgcccatcgagatttaaagaggcaaaaatattctggttaagaaggaatgggacagtgttgcatagcagatttggggcctgggcagtcatgcatttcccagaggcaccaatcagcttgatgtggggaacaaatcccgtgtgggcaccaagcgctacatggccccccgagttctagatgaaacatncaggtgggattgttcgattcttataaaagggtcgatatttgggcctttggacttgttttgtggaaagtgccccagcgatgtgagcaatg

SEQ ID NO: 439828 - DNA, 2063 bp, Homo Sapiens
  misc_feature (29)..(29): n is a, c, g, or t
  misc_feature (33)..(33): n is a, c, g, or t
  misc_feature (372)..(372): n is a, c, g, or t
  misc_feature (396)..(396): n is a, c, g, or t
  misc_feature (585)..(599): n is a, c, g, or t
  misc_feature (834)..(835): n is a, c, g, or t
  misc_feature (837)..(838): n is a, c, g, or t
  misc_feature (1950)..(1959): n is a, c, g, or t
tgtgttttgtttgtttaccaagtacaaantctntgtgcacaagaactggcggccgatggtaggagaggataatttttgctggggggagccccagtgattcttatatatgtgacatctttcgtgtggtcacacatccgtaattgttgggtctgtgcggaggaggaatgctgggagggaggcggggcgcggccggggtttgttggtgtgccttgcattcgtgctgcttgtggattattttcgtatgtggagtgggcggctcttcatagtttggttgaagagatctacctcctgccgaggagagaggcgctcgtcggtggagtgcggtcatgggggaggcattgattatgggaaggtgttgttgaggaggacaangccaaaccccgtctcgcgtttgcnccacagacccgccacgggagaccagggtgcatgattctaaagctgtcgtggtcggggggggagtattctctccccgggtgtattggtgattattgtgttaacacattgaatgtttctcctcgttatttatggaaacaaatatataattaagccccgtttttctcctccattgggcggtggggggcggannnnnnnnnnnnnnnactccacgaggtgtgtggtgtgaacagctatcttcgcgcggcgcgcccagagggggccccgttcagaagaaagtgtgtaaaggcggggatatagggacagctttctcctgtggggtgggtgtagcaacacgcctctctttcacgggaggggggcgcggctggcgtttgatttggtattatagcaacacatagtagaatagtctgtgggtgtgggtagcgtcgttggcttcgctgnntnntgtttttttgacttgaaaacagtttatttaatttatacaaataactactaaatacaaaaagtagattaaaacaaaatagttatttttttctggcagagtttaaatgcacgtaatggataattctgaagaaaatgcattttccccgtagcgttcaggactaaaattctactgaaatctttgcttctaaatcagtaatatattcggtggtgtcacgtgggtaatggctaaatacgttctgcatatgaactgaaaaaaagttacagtctacacacatacaaatgtgaagcacttaaaatgtgattttaactgataataaaagaaaatgtccattttagagtatagtgttaaaaacatttctgtaataaaatcataagaccacataaaaataagctttaacatatgcacaaagcagttttgtaaaaactactaagtgcacaagtaataaataatttgcaaagttgtgtataaacaattcctaatgttcggcatcattgtaaacatcagcacatgtgtaaaatgcagcaaagtctgacattacattttgttttgccaaattgaattcctattatccaaagacagaccagtggagtacgcagccaacattttggcaagttgggtctttaaaattaagagtaacagtgcaagtaaggaatgcaaagaattcctagtgcaataaagaagagaagcacaggcaatattgctgattaaaaattcaccacctccttgagtttcccgtggggagtgtctaggagacttgtgaaagctatgcaaagccactgacttaatgcccagatctcttttaggatttctctgtgttcctccagtccctacctttgcaacagtgtctgtccaacattagtctctgcagtgtgaacagttcgtgaaatgcccagttcacagtcatcgagcgaggttagggtggttttgatgtctccccaacacatgggtgggtacgacagtgtgccttgtgaaaggagccatttggggagggagacagatggattgcattctgacaaccagtgaggtcatgattaggatctaattggacaatgagcacagcggggaatgtggcttgttgacgctgtgagaatggggacggggaggtgggaatnnnnnnnnnnaatgatgagatggtggtaaaagggtttttgattcatattgctgttagttaatacatatggattatgatgcccagggttgtagattggagtgtggggagagaggt

SEQ ID NO: 439829 - DNA, 780 bp, Homo Sapiens
ttacggctaggtaagcgaggcctggtggcgaattcggcacgaggtaagaatcgaaacaatccacctggatggtttcatctagaacttcgggggccatgtagcgcttggtgcccacacggggattgttccccacatcaagctgattggtgctctgggaatgcatgactgccaggcccaaatctgctatgcaacactgtccattcttcttaaccagaatatttttgctctttaaatctcgatgggcaatggctggtttcccttgggttcccaaatatctctattgtgcaaatgtgcaagaccactagctatggacagcactattcgaaggcagctaactgtatccagagtagtaagctgaagatagtcgtacaacgatcccatttcatgataatgtgtaattaaccacagctgggtactggagtgtcttgatgtcatgtctgaagcaatgaaacctaagatattttcatgcctcagcatcacagtgttgtacaattccgtttccctgaaccatgacttctcatcacgggaggagaagatcttcacggcaacattttccccttgccagctgcccctccacacctcaccatacctgcctttcccgacacactccaacagtgtaatctggcgagccactgttctttgtaccagaaaaggagacagagccacttccctgatgtacacgaatgatccattaatctgctaaggggtgtcctcccacattggggtgttgaggcccctgaagtgccaaatcccgtttcgggataaggggctgtggggccc

SEQ ID NO: 439830 - DNA, 593 bp, Homo Sapiens
  misc_feature (79)..(79): n is a, c, g, or t
  misc_feature (133)..(133): n is a, c, g, or t
  misc_feature (142)..(142): n is a, c, g, or t
caggaaggcaagaataggccaagctggacaatgacaacaacgtaaatctcctcctgacactatgaaaatgtcaacagtnagtttcaatttgtcgaggaattatcaattttggtcaaagtctttttgattacgnagtgctgtnagtcttgcggatggattttgataccagcattctttcattagcttggccagagaggttaatgtcgggtctgagaaccatctgttgggtatgtttggcctttgttgatccacacagactaccttcctcatatcttcaaaacttgggtcattgggaaccacatcgtagaacggtggcttgtaatcctccactataccattgctcaccatccgcctggccacttcccacaaaacaagtcgaaaggcccaaatatcgacccttttataagaatcgaaacaatccacctggatggtttcatctagaacttcgggggccatgtagcgcttggtgcccacacggggattgttccccacatcaagctgattggtgctctgggaatgcatgactgccaggcccaaatctgctatgcaacactgtccattcttcttaaccagaatatttttgctctttaaat

SEQ ID NO: 439831 - DNA, 1018 bp, Homo Sapiens
  misc_feature (3)..(3): n is a, c, g, or t
  misc_feature (8)..(8): n is a, c, g, or t
  misc_feature (10)..(10): n is a, c, g, or t
  misc_feature (18)..(18): n is a, c, g, or t
  misc_feature (40)..(41): n is a, c, g, or t
  misc_feature (43)..(43): n is a, c, g, or t
  misc_feature (143)..(143): n is a, c, g, or t
  misc_feature (149)..(149): n is a, c, g, or t
gantagtngntccagagncttaataagttatatgcttctnntncatcatcttgacgaagttagtaatcaccaagtttagcctagcttcaggaatgacatcaactaggggaggtaaagcctgcaaagccccttcacctcctcgnaaacanccagattgtgcctgatgagttctttagcaaattcaaaggatgaaagaacgcattgtcccatcaagcttttgagttctgcctcagctgctctgccattgtaaaggcgaaaatggttacaggctttaagattgagtgcgatggtactatcaggaatttgctgaaggtaaacagccaaaacttcttgagacacatcatagtaatccaacttgtagtagcagagggccacataaacattaagggcaaggtattccctgttatctagcagtattcgcttatatatatctatagcttcttggtagtgagatcgcatatagtggattgaggccaaactgagttgatcttctgtgacatcctgaagattttgatgaaagctcatcaattttttctcatcattaaacttgtgagccaagtggaagaggaggcggttttggagtcggctttttgaagctttaaatccagctgcttcagcttgtttatacatcccaagaaagaagtaggtgcaagctaggttcacccagacttcagaattacaattttcctcttttgtagcattttcgtattcctccagagctctcttgtagtcacccaggtgaaaggcacaatatccaatccacaaattagtatcctcttcttcttccccaacatgacgtttgaactccaacagggtaatagctccagtgaaatctctttttgaaagtagctcctctagttttggaatcttcctacctttcttctttcttttgtcagtgtgctgtacgcctctgcctacagcaggtttggcccttgaaagcatcatcttgacgtcggtcttgtgagtccccaccacacagcgaaggccgcgcctcagcgtttcgccgcatccacacagc

SEQ ID NO: 439832 - DNA, 476 bp, Homo Sapiens
gaattcctcaatttcatatgtagttagttctttggcatagaagttcaagccttgttctctcagggggaaaagccattgaatgtaagtgtggttgtgctccagtttttcataatctcctttccatttacttagaacttcttcaatgtaaacaccatctggcttgaatggaattttattcttataaaaacgaagattgctcaagtcattttgatatcggatatctttgaagttctgtgggtactggtgtcggtacttgtacaaatccctggcagcataaaaacttctctttggtttggcagttgcttcagtggaatcaccaccctcaatcaggcttttgtcctcagcactccaacaaaatagttcttgtgaacttcaccaataagtctccatcttgccaaaccatttcttaatgttcacctcaggtgacctcccaacagaactgggccaattaaagcatccctccttcctgaaacact

SEQ ID NO: 439833 - DNA, 1244 bp, Homo Sapiens
ttaaggttttgatatttttattaaaactgaaaatacacatctccaaatggggaaaaaaattatatagtgttaatgttaagaacaaagttgattccaacctcttgagacataaacacaagcatgaggattatggacagaaacaaatccgtattccaggaacagccgttgattatcgtgagggccgtaacagatgaatacctcttcatgctttctccaacgtgaagtcgttctaatttcgtaagaatgagtttcttcattaaacgctgcttttacctggacatgtgggctatgattcagcaggtccaggtacggagcgagtgcacaggtgtccggctctgcagaaaggcattcccgctgcctgggcctcaggtacacggctctggtgttgacggtgcaccaagcccacagcagggcactgtagctgaagatgctgtcaacagcctccgcaaacagaggctgcagagaagagaaaaagtctctggaggaagcaaagaactcctgcacgtgggctctctgctcttcagcctttgcttttaaagatttgggaagaaggttcaccacttccggctccaaacaaacagggcaggtatacgccttgggtaaaatctccaggtaaggcttccaaagagatcggtgcccagcatgcttttctgaaactaaaaaggtgcacagcgccagcagaggagatggaggaggcttccacttagtaatgtatgcccctaagtagcttcgaatcactgtgtccgtggtgagcaggcaactctcaggcaacgaaataatcatctgtccctcctgcagggatgtttgactcatcagccctcttcctgtacctggaaaacaagcaggcgctaagtttgaatcttgaaacttcctagctttcagccacttcctcagctctataaattcagacttgtggctctcattcactcctcttgattcagaacttccgcagagttttcgtcttctgatccggcttgttctcccttttcctttctgcatgctaaaactgtagtttcttttttctgaaatacagttctaggcgccggcggccgcttctaagatggaggctgcagtgggcgggcccaaggcacgtggaaataccaaacagccccagatgaaggcaagttaaaggaaccggccaaaactgcagagggagaggctgaaggctgtcgcgcctgcctggtgtccttaagcaatccaagtcctcagtctcccgggtccgccccttccgccgcgggcccgct

SEQ ID NO: 439834 - DNA, 1716 bp, Homo Sapiens
  misc_feature (414)..(414): n is a, c, g, or t
ctaatatcttccccccgggaagcactttcagaagtttaagcttctacttgttcttaagccacagggcaagtgccaggtgagtcctaaataaccgttcactcacactgcagggctggcaaccccggggcccacagcacagaagcagagtgggctccccgggtgagccagggaagggcgcttagcaggcttcttagagtgctgcattgctcgtctcccccccgtgtcacctgggagagttacgttctgtggccttaactctccttgctcagagaaccgccacactgtggggagggctctctgccctctgcactggctgtcccatccacagggcctgggggcctggggctgcagggaggcggcaggcccttccccacagagcaggccgccctcgtccatctcctccctcgccagtcncgtccagggaacatccctccgcagcgcccagagccccgcgggctatgctgtccacaggctccacggcttccccttctccctccgagatgacggtcatggggctgctctggatccggttccgcatgctgtacctgctgctggcggcagaaggcggcgttcggctgcggccgtacctggggccggaaaaggacagactccgaggcatcaagccttcgttcttggcccactcctcctgcgcccttctgttcttgcttggggagcagcttgacgggctctcgggggcatctggggaaggctctgacctcgacctctggaatctagggtctgtgttcttgagcatctctgctgcagacatgcgggcgctggtgtctgaacgactgccctttttcagcagcagagctttgaagttgtcactgctggtgctgctcttttcggatgcttctctgaatcgaccccacttgctttggagaggccaggcttggggcagcgccggtgggtgtcacgggcggggagggagaatggtttcgggagtggtcatcatctgaatctctacggccgaggactttccttttggatctgtgaatagctgcaaaaaggtcttctgtggtcctgggtcgactgggggtcattacctcatcattcccgtcttccttgaggaagtcacaggcctctgaggatgaaccggctgcgttggtctccggcaccccagctgctccgtcctgttgagataggcagctctccccatcgcccccagtatccgcactgttctcggctggctcctcctgcttgggggctggtgagacatcaggctgaaccatggggacattggcttccactctgctgggagacatggatcctgcagctcctccctcaagaaccgaggtgccagggtgcgtggcatgagagccagcttgggctgcagaactctcttttgcctccctgctgtgcacagagccctcctctcccgtcgtggggctgggcacagctcggagggcttcgctcacgttctctgcgggctccactgcaaaatctttctgcggaggtggtaccaccaggaacagtttgggcttcttggaaatggggggtggcttcctgctgggtgaagagtctgggagtggggtggtgctggggctgggccgagcctctgcctccccagcgcttggagctccagggctgcggctcacagggccaccacgctcagccgcactgccatggtcaccctagactcgagctcttggccaggcgtcggaagcgagcttgtcagcagaggcaggctggctttcactctccatttcatgtgtg

SEQ ID NO: 439835 - DNA, 989 bp, Homo Sapiens
  misc_feature (126)..(134): n is a, c, g, or t
  misc_feature (460)..(460): n is a, c, g, or t
  misc_feature (462)..(462): n is a, c, g, or t
  misc_feature (465)..(465): n is a, c, g, or t
  misc_feature (478)..(478): n is a, c, g, or t
  misc_feature (517)..(759): n is a, c, g, or t
  misc_feature (769)..(770): n is a, c, g, or t
  misc_feature (873)..(873): n is a, c, g, or t
  misc_feature (928)..(928): n is a, c, g, or t
  misc_feature (937)..(937): n is a, c, g, or t
  misc_feature (955)..(955): n is a, c, g, or t
  misc_feature (985)..(985): n is a, c, g, or t
ggtgaatagcactttattgagtattcttgctttgattgtctacgtaagcatgtaagactacaacattacgacccatctcttcaagaggaagtctggtattatggaaaaacattttgtcattcagannnnnnnnncttacagtatgcccatcacaaaccaggcagcaagcaaggtattgggtgctactcaatccagtgaagtcttgagggtcccttccctctgtgaagcatataatctagtggggtagactgctagctactaactatgaaaacaacatagtctgacttgagagtggggaaagtggaacaagggagtaatttttatatttttcttcacatttaaaaatattttctaaacaatccaatataatcttttctataatttccaatacaatcaacatgtattacttgtaaaataatagcatacatatatcgacagactgaagaaggtatactattananaanaaaaacagaaaanaattccacatctttttttgagacagagttctgctgtcannnnnnnnnnnnnnnnnnnnnnnnnnnnnnnnnnnnnnnnnnnnnnnnnnnnnnnnnnnnnnnnnnnnnnnnnnnnnnnnnnnnnnnnnnnnnnnnnnnnnnnnnnnnnnnnnnnnnnnnnnnnnnnnnnnnnnnnnnnnnnnnnnnnnnnnnnnnnnnnnnnnnnnnnnnnnnnnnnnnnnnnnnnnnnnnnnnnnnnnnnnnnnnnnnnnnnnnnnnnnnnnnnnnnnnnnnnnnnnnnnntgagcacttnnacctgggccgagaattccacattttaagaatatggtaaaagagttttatgctcttcagtaagatgaggttgagaataaaaaattaaaaagattaagcaaatgngagtttcacatcatagggtagtaataatgaactttaataatcttaaaaaatactnattgggganagaaatgtggttacagtnaactgttacttctagacttacccagaagtnatgg

SEQ ID NO: 439836 - DNA, 860 bp, Homo Sapiens
  misc_feature (35)..(35): n is a, c, g, or t
  misc_feature (42)..(42): n is a, c, g, or t
  misc_feature (73)..(73): n is a, c, g, or t
cccctttaaagctgactggggaagctgagtcaaanctttaangctaagcacggtgatattttcttctaaagtngcacaatatccatcaacaacacggtaatagtatcctcaagttccaggattatagaaaacctgaagagctgttccgacttgagttggattctgagtctccaaaccctgctctagtaggcgcttagcttgattttccacttcaagtcgggctcttgcaataaaaagtagatcattttctatcacttctattccagaaagatctattccttgagaaagataatcaagttcattgagactctgagcagcttttgttatctctctacttcccccttgcagttgtccttggagtctcttactgagattcaagatacgaataatcctccgaagcaaatcacaggcaacctgaagtcttgctagttgtgcagtccgggcaactatcttattgtatggttcaacaatttttgcttttatcctatcaacagctccctgtaaagccccaattctcgtctgcatcatctgaagaacaccttccaacgactcaatcccagttgcttgtgccagtaaatcttcatgtcttgcaacaacctgtaagtgtagttctctgtccaactgactgattccttgggcaagttttgctagttgttcagcaattacagcttgatgaatagattgagaagtataagtctttacatcaaagtcttcgtttaaaaagtcactataacacccgtcctgcagaagttcccggactgtagctgcagccgctccagagcctcgagctccgaggccagctacagcgacgctgccgccgccaccttccatgttggcaggtgccgtgttgatatcccgct

SEQ ID NO: 439837 - DNA, 976 bp, Homo Sapiens
gctacaaatacaaaggggctttattccttatataaacccacacttagaaaaaataaatagttaataaattataggcaaaccagttggtctcagccacgcctcccactgaggtccagggcagccgctgcagcagcagacgagcgggaaggtgtggccacagcttggctcaagggcgtggtctggactggggacgaagggacagaggaggaaggcaaggtctgggtgagggcagggatgggggctaaaggtgggttcctgaggcgtgcccaggctctggcccgggcagcaggggtgaggcaggggctcagctcctcctgggcctgggtgatgcggcgtgcgaagcggctgcgatcccgagcaagctgctcccaggggccctggcgggcggcctgggccggccctgcccagacagccaggaaatggacagtgaccttctcggagaagcgcacctttctggcctttaggggagtctcagggtccggatcatgagtaggggtttctgggcgcttgagccgcctttgcagtcggaggggcagcctaggaggagcccagggaggcggtggcttctctccaggtacatagatggccactcggaaggggcagggctcagcttctccccagtcctcagcagcttcctcttcctctgtctcttttccaggtcgatatccccagcccctgaagtgggccctctggtccgggtgggagggatgtgggttctgactcagcttcttccaaggctgcttctgaatcatcttccttatcctcactatccacatcctcatcttcctcctcctccgtgtcctctcctggccgatacacccaggccttcaagaaagcacttgcagggggtgtggaagcagaagtctcagcttctctttcatcctcggctgatcctgtatcactgtcctcatcttcctcctcctctgtgtcctctcctgggctgatagacccaggacttcaagaagacacctgtagc

SEQ ID NO: 439838 - DNA, 957 bp, Homo Sapiens
  misc_feature (306)..(306): n is a, c, g, or t
aaggggcgtggtctggaactggggaccgaagggaccagaggaggaaagggcaaggttctgggtgaggggcagggaatggggggctaaaggtggggtttccgaggccgtgccccaggctctgggccccgggcagccagggggtgaggccagggggttcagcttcttcctggggccctgggcgatgcggcgtgcgaaggcggctgcgatcccccgagcaaggctgctccccaggggccctggcgggcggcctgggccggccctggccccagacagccaggaaatggacagtgaccttctcggagaagncgcacctttctggcctttaggggagtctcagggtccggatcatgagtaggggtttctgggcgcttgagccgcctttgcagtcggaggggcagcctaggaggagcccagggaggcggtggcttctctccaggtacatagatggccactcggaaggggcagggctcagcttctccccagtcctcagcagcttcctcttcctctgtctcttttccaggtcgatatccccagcccctgaagtgggcactctggtccgggtgggagggatgtgggtctgactcagcttctcctaaggctgcttctgaatcatcttccttatcctcactatccacatcctcatcttcctcctcctccgtgtcctctcctggccgatacacccaggccttcaagaaagcacttgcagggggtgtggaagcagaagtctcagcttctctttcatcctcggctgatcctgtatcactgtcctcatcttcctcctcctctgtgtcctctcctggctgatagacccaggacttcaagaagacacctgtagcaggagtggaagaggaagcctcagcttctccctcttcctcatctgatccagagtcactgtcctcatcttcttcctcatcttcctcttcctctggtatcccgggaatccggaccggtccagcc

SEQ ID NO: 439839 - DNA, 2542 bp, Homo Sapiens
  misc_feature (112)..(112): n is a, c, g, or t
ccaatacattaccatttatttgcaaaataaacatggactcaaacactgaaacatggagtttgtgaaggatgtgggtggcagaggtcacgagatgagcacccccccaccttgnttttttttaaaatttggtttaagaaattgatactgaaaaaactcaacagaacccaggcccatgaagtctcacatcctactcaagcaccctcagtcccctgccctgcatccagctggtccatttctgagaccagatgcccccacccctccccacttccaacttccttcaaaccccttccccagctgcaactctaaactcctcattttctctgttggggctgatcaccagccccagccttagagggctggagactataccttctaaggaaaccacactccctcctaaataaatacccccaggcccccctcccattaccaaatgaaaaaataaatattgtgaacacccacccacctctgatgaaaatctcctggatttggggccccagccattcacctgcaaagtcccttctctaccctctctgcagcccccttcgactcctccccaggcccagctgaggggggaggaggggaaagggccatgaacccttctgatgctagggcacccctcccccgttatcgaggtccaagcagggccagggctgagagggagagaatgaggatggtttgggtgtgaaaaccaatagatgcccccccactcctgctccggccctggttgtagcgggcactgccacctcctcctttgcccccagaaccatcccttctaggagggtatggaggccgaggaggccgggctgggggagccacagccccagccatccagtcatctgcatactgctgtccccctccagagccgctggcatcctcatccgcgtcctgcccgtccaggtcgtgtcccagtgcggccgttttcattctggccgtggccgcccggagctgtagccgacgccgccgtgtcgggacatcggggcccgaggcgtccaccttgagctcggggttgttgacctgctcggccggggagcccccgaccactggcggcaagtaccggccccgcccggctccggttccagcagggcgccgcctccagcgaggcgtccgctgccatgcgagagtctccgcacaccgtcagggacagccgggccccagaagccccgcatccgggccagacgctcgcggagctcccacaccagccggtgcagctttggtgcctgcggccgtcgtgggccgctcctcctcggtcaccatcgaccacagccggcccgcctcttcccggggcggcggggctcgacggttgcgggcaggcaccgggtcgggggggccgcactcctgaaacacctgggcggacaccttcgcactgttttcctgcaggtacatcaaaccctccgagatcttcaccccaatggactcggccgtcagctcaaaggaaaggggccctggagcttatcagccaggatcaggagaccatccagataggttgcccccagtcaggctccagtcccctgctgctgagacagccacgaaccaccgttgaggcagaagcccctggcagggcataagtgagggaccccccggcacaggggacagccgatgagacgcatcagagcctggctgcagccttcagacaccggcaccttaagcgcttcgctgaccacatttcttccagtctccaggccctgcacaaaggctcgggcagccaccagggtccgggttatctgcaggcggaggcggcggggtgagtccccaaagggctgcagagagccatcggtagatgaggccaagcgtgagaggcagagcaggtagtcaggggggaagctgtactgtgggtgcagcagcgggaacactctctccaggagctgtgcccagaaatccgccagggtgtcatccaacccctcaccagattccccatagaagtctcgcagccgagagaacaggccattgaatatgagggcgtgctgggcatacaggcggccgtaggagtgggagaagagctgggtcagagagtgctgggctactgagagcatctccagaaaaaactcatcaaattttctgtgcctggcagccagtgtgtgaaccagaaaggagccgctgtcctccaccaggcctcggaaggtggcctcagtctccctgatcagcctctgctctgtctcactggaacagcaggtgtactcctggggacagacccggaggtgctcacctgagatcagggcgggagggattaggtttaagctatatccccgggcccccagcacctgccgggtctctgcacaactccgggtgacctttgcctcgctcccgggtccgggaccaggaccgggacacagaggcagcagcagaagcaggagaggtcgcagcgcggacataactgcagccaccccaggacggcaaagtgggtcctaaggaggaaagcagagcctcccaaactcgggaatccggtactcggccgcgggaccgctccgcgggccagagaaagagcgctgctccggaaaactgaataccgagcacgatagctggaccaggcgatcccgggaattcc

SEQ ID NO: 439840 - DNA, 1060 bp, Homo Sapiens
  misc_feature (11)..(12): n is a, c, g, or t
  misc_feature (15)..(15): n is a, c, g, or t
  misc_feature (18)..(18): n is a, c, g, or t
  misc_feature (28)..(28): n is a, c, g, or t
  misc_feature (54)..(54): n is a, c, g, or t
  misc_feature (56)..(56): n is a, c, g, or t
  misc_feature (60)..(61): n is a, c, g, or t
  misc_feature (63)..(63): n is a, c, g, or t
  misc_feature (69)..(69): n is a, c, g, or t
  misc_feature (81)..(81): n is a, c, g, or t
  misc_feature (84)..(84): n is a, c, g, or t
  misc_feature (98)..(98): n is a, c, g, or t
  misc_feature (125)..(126): n is a, c, g, or t
  misc_feature (144)..(144): n is a, c, g, or t
ttatgatcaanntgnttncacccccccnccggttgcaggtatggagggagactntnaggnnanagagantacatgaggctntgnaggtgagatgatgnactatggggaaggtgtgttagtctgtnnttcttctatgtgtcttgntacacttctcttgaggagatgcagaggaggaaaggtaccccgatggagcagaagcattccccaggatgcagccagccagccaggggtgaacagggagaggcgtgaggcaggggtgaatatggcagggaagttcagcttggtctagattcttcaaaagtttcctttgactctcacagtttccttatcgagcaagactatgtttgccctgatggtgctgaccaatttctgtttatattacgtcagtatggtttcaaccccaaagaagcaaatatactctctctctttacggttgacagttacagatctctggtgtccaggtgactgcagttagtcctaggtctgtaaaatctcaggcctagctcatggcagagaatcaggaggtccacccataaaaacacttagtcttataaaaatgcccatgtatgagctacgttgtagtttcagggacatatcctagaacctatataatgtggagagccaaacataaaaaactctaccatctctcaccccaactcttaacactcttggccttagggatgacaccagaaagtcacatacgtaaaaattcaggcattcccacaaaaagatttcacatagacatacagacattctggtatatgcactgaaagacagacaaggagctctaagggcaagaggcacagaaagacagaagagatgcagacagggcagtgcaggtgtaaagacagtgccctggggcctggagtgccgggaaagggaaacccagtctgatgcgaacagggcagtgcacgtgcagagacagtgccctggggcctggaggcccgggcgagggaaacccagtctgatgtggacagtggagtgcaggtgcaaagacagcaccttgggacctggaggcccgggcaagggaaacccagtttgatgtggacaggggagtgca

SEQ ID NO: 439841 - DNA, 1690 bp, Homo Sapiens
  misc_feature (579)..(579): n is a, c, g, or t
  misc_feature (1629)..(1629): n is a, c, g, or t
aaccccttcattggcaaattccaggtattggctgctgaaacccgaatacggaggggcatttgtttacgtaaaaaaagttccaagccctttccggggcaaggtccaggcaccatctgttaccagggcagccagggagaaaggatgggacccagccactctgagcagaataaatctctcttcactggccgaagaccctctgcctcaaagggccctacccagactgctgagtgaggatcccatccccaatcttcccacccctctcaggaagagctgggtcccagaaactcctatgacacaataaatccactttctctgacagtgtcagagcttcaagccgatactgcagcctacctcggatttaagtgcacaggagactccccaggttggaaattatggctctagagcccggtgtgtaggccaaaggtatggcaagcctgtgacagtctcgggttgacattcccccacttccttcatttcattaacatccccttggaggggcgcagtcaggccagtgcagtcaggagattggggtcttgctctgtggctgctaagtctccttccttctctggacctcagganaataaagaggatggaaggaatggtcccgcagtcccttccagacacacgggtggatctcgaacctggagaatgcctaaatagcaggaaggagagaacccatgtcccctcccaaaacgcaaccttggaaatgggtaaacatttaactcctgaaaaagaactggccctggtttcctgactcaaagggcccagacttagggcctatcctgttcctcacattttgagtggctcccctgggccctcttctgccaacactgccgcagctccacgatctcctggccataccagtcatgcagggtagagaagcaggaggtctcaggggacacagggctctgccccttgcctaggaggaggctggcagggccctgcagctcccactcagccaacccccaccctgcagacctgctgcccgcttcttcaaccaagcccacagggctgctgtccttggagaggcagtggccattctccaggcccgcagctcggtggttaggagcctggggcttacagcggctggcaacagacttccaggatgagcggcgttgcaaagccaggctctggcgtgcgtcctgcaactggctctccaactcgcgtaccaccaggcgcatgtagccaaagcttgcccgggacagcaccttcacccaggcctcctggccgccggcccttctgcagccagcaggtgtgggcgcactccaggggcatcaaagcagatggcaaaggcaaactcctcgggcacgggagcctcggccagttccactgtgcagccttccagcaccaccaggctcagtggggcccggccctcgcgactctcaaaggagaatagcaggttgcccttgaggacaaaccagcatcttcggccagtgccactgggggtcggtggggtccctgggcccccccaggtgcgcaggaagcccatgtggtccgctggggagtcgctgagtgcatagtgggctacactcctctcgttcagcttcatggctcccacgggaacagcagggctcactgggggagggcagggacctcttgtctggccacacagctcagcccttcgaccancctggttcccagggaacctcccgccgccgatcgcaccgaagcccaggagggcgatcccagc

SEQ ID NO: 439842 - DNA, 1746 bp, Homo Sapiens
  misc_feature (277)..(277): n is a, c, g, or t
  misc_feature (1404)..(1404): n is a, c, g, or t
  misc_feature (1407)..(1407): n is a, c, g, or t
  misc_feature (1410)..(1410): n is a, c, g, or t
  misc_feature (1413)..(1413): n is a, c, g, or t
  misc_feature (1416)..(1416): n is a, c, g, or t
  misc_feature (1419)..(1419): n is a, c, g, or t
  misc_feature (1460)..(1460): n is a, c, g, or t
attgcaatggcacaaaggaggaatccactccaccagtttccaatgaaacgagggtcattctggtcaaggtgaacaggatttctgggatcaacataaaaaccaataagaagtccacctaatatatatcccactgcatggccaagtgctcccatgacatacatgatggctaggtaccatgaggagttttctttcttgacattgtcatctaagtaggttggtcccagggtataaataggtgtggagcccattccaatgaggatctgcgcgcaaatgaatnaaagccacgtagacccagtgattatttcctcccgagtccttgggacaggcgggaggctccaaagtggcggtggagttgccaccctgacacaggccgtcgttgggggccgaggcgttcaactcttggatctggtaggggggcgagatgaagtgaggtaaggcgaagagggctgctccgaaggcgatgaggagtccacccacggccagccacaggggccgccgaccccggccgccgaagtagctgacgaacaccaccaccaccaggttcccgatgtcaaagcagctgaccagcagccccgactcggaactcttcagactgtagcgcctttcaatggtggtaattacgctgctcaggtacccagagaccattaacgcctggatgaaggtcagaaagcacatgcacaccaggaagcaacgggaatccgtgaggaccacgtagaggcaccttctctcctggagcatggccaaggcggaggacaccgagaaggttttgctgaggtccaccctgtggttacagtccccgagccccgccgaagtggacggggcagagggactgggggccaacgggttcgggccttgcttcaactccttggtggcccgaagaatccacacagccaaaggccgggttggcgtctccactagtgggactgaggcttggccggcaggaggcgctgctgaggaccggtaaactcttagacctgagggtctccggctcgcacctctcttggacagcttctgcagtggccggcgcctccagctgctctcccgccccgggctgcagtccagtgccttcgtccatggcgcttagaattcagatttgatagctgatggcacccaagcactccggcacgtttcatccaccggcacgaggggccgaagccgggcccagtcagtcttgccacacctgggactggggctgggggcgcagggccgcgcagcagggcatcctcaccagctgcgaggcgcccagtgcatcctgatcacagacacggcttcaaggctccgcagccgcgtgccacagggggcaggggtccgcgcggtactgcgatgagccctactcggcgtccctctccgggcggtagcttgaggcaggcgcctcgcgcgtcccgggctcatcccctccgccgncgncgncgncgncgncgttgggcccgcggccaggagcgagtgcaccctgcgccggnggtgggggggcacttagcgctgctgtccgtacagcatcccacctcgctgcgccaggggtacccgggtgttcgccgcctgggctcgcggcaccctcgggagtgaagctgccgacctgccaagcagaaagagggcggtcagcgaagagcggctgcggcttggggctagcgtcccagcgccccggggaccagggttaggtgaccccgaaccgtccctagagggacggaggagctagtcaggagcggagccccggaggactaggcagcagccggctgcagtctccagtcc

SEQ ID NO: 439843 - DNA, 1884 bp, Homo Sapiens
  misc_feature (135)..(135): n is a, c, g, or t
  misc_feature (367)..(396): n is a, c, g, or t
taaaaaggtcctcccctatccaaagaccaatttcacaacctaatggtaacaaatccatttacaagtgaacttcaaaatgctagagttgtaccatttaaaaaaagccattcagctaccttggtctttaaaaaagcntacactgcaatatcctaaccattgttatgtgcatctcacaatgaagaagagtggccttgcagtgcagaatgaggagagtacaacgtcactgtgaagagtagcatgctatggtttcaaggaagatcagcatcacagcattggattctgtgcatcaggatcgaggtcactgttgccagaagggggatggatagggagaatatccagctcatccacttgtggagttggatgcatnnnnnnnnnnnnnnnnnnnnnnnnnnnnnntgcagctgctgcaagattggtgatagatttactctttacacactgaaagtctacatgccgactctttccttcttccttctcccaggacattcgaatctttactttttctttgtaggtaggataaccttctattcccaatctaatcttcttaagacccctctccttcaaaactgacttggccacatctctgttttcaatatacttgaaaaatctatataattttgtgctataaataatttgtgaatattcttctcccatctgtggtggatattcttcatcccaatcaaccacatcatcatctgtaagcaccactatatgacattcccgttccccactctgggcactagctaccatgagagggaggatcatttcttccagataaaattcaaattgtctacgagcaccatcatttgataactcatgcattagggcactgagatctctacatttaatagtgctatattcaaaagagatacaaagatagtcacatgcttctctcagttcaggaatagatatgccatcaggacaacggattattcctgttttatagtaatccagaatcgctcgaaacacagtggaaccaattccctctgccacctcatactctcctttctcattgggtcgtgtaaagttatgttctcggccagatccaaacatcctgcccaacattgtatttggctgtgcagtaaaaatggatgggtctacaacaaatctagtgttatccactattagtgtcactcgttctgacgttcttatattccgagctccttcttttgcattttcatatacaaacaccatctccccagctgtcttacagctaccatctgaacttgactgactactgtttctgctgctgttcccagcactgctaatggaaccatttggggatgctttttgaggacgcggactgcttggacgagaggaactgtgatctttttctcgttcaacatggtgctgtcgtgttggagaagtcacatttctaatacaaggagtgagctgagactccgttctttcatgagatgaatctcgtgatctgtcacttgaccttcgtctatctcttgatctctcatgtcccccactagcaccatgtagactcattttggtgtggtcaactcctcctttagcaatacgcgaggaagtacttgaatgtttataaagtttacgaggtctactatgcaatttccgatcccaattctctggatcactggagttaccatcatagggatgaggccgtcctgccatcccactccaagcttcctcacactactgctctgaaagcacacatgtagcacccataactctcgaacctgtagtcccccttcagtgcccacacaagattggggcaaaggccggggccagtgacacctccacttcctcctcagccagatccctccggaggtggctgtggaggaagccactgaggcggctgcgcgtagcggagccgccccggcaggttgcaggccggctcctcagcctcttaccgcgaga

SEQ ID NO: 439844 - DNA, 1276 bp, Homo Sapiens
  misc_feature (330)..(359): n is a, c, g, or t
  misc_feature (1170)..(1170): n is a, c, g, or t
aagaatatccaccacagatgggagaagaatattcacaaattatttatagcacaaaattatatagatttttcaagtatattgaaaacagagatgtggccaagtcagttttgaaggagaggggtcttaagaagattagattgggaatagaaggttatcctacctacaaagaaaaagtaaagaaaaggcctggaggccgcccagaagtgatctacaactatgtccaaagaccctttattcgaatgtcctgggagaaggaagaaggaaagagtcggcatgtagactttcagtgtgtaaagagtaaatctatcaccaatcttgcagcagctgcannnnnnnnnnnnnnnnnnnnnnnnnnnnnnatgcatccaactccacaagtggatgagctggatattctccctatccatcccccttctggcaacagtgacctcgatcctgatgcacagaatccaatgctgtgatgctgatcttccttgaaaccatagcatgctactcttcacagtgacgttgtactctcctcattctgcactgcaaggccactcttcttcattgtgagatgcacataacaatgtttaggatattgcagtgtaggcttttttaaagaccaaaggtagctgaatggtttttttttaaatgagtacaactctagcattttgaagttccagttgtaaatgtatttgtttaccagtaggtttgtgaaattggttctttgtatgggggatggtcctttttcacacagctaggtcttttcagaagtggtggaaattggcagctggggtactttcagtttggactgatattcatcacacctcagataaaatgcagagtaatatatagttgcactttataaatggtggttaaatggaaatgttcaagccattttatagttgtgatgcacaatataatttaagtgcttctgtcaaagtattcctccagtacaatttgtatagtttgctgcccttgatgagcaaaaagtatttatcttgggcttatctgaatgatcaggatgagatttaatgcccatatcttaccagttcagttatctccagagccatttcaccctttagagtgagtcacatgcagggagtgtgaatgtcagaggtggtttattatccagtctgccttacccttaatctgttcacagatatttatttactaatgctttttttntcttaagagttatgggataggaaaatgaagtgtttgctcttcatttactaaatgattgtaaacttgagtttttcatcaaaataaaattccattgttttaatgttaa

SEQ ID NO: 439845 - DNA, 826 bp, Homo Sapiens
  misc_feature (263)..(271): n is a, c, g, or t
agcgggcagtgtgctggcgccgagctcggtggacacgcgcgcagtcagagctgcctctcgccctcgctagctgggctcgcagcctcttcctccctccctggctcctggctttttgtttaaagcaacacccaccctccatccaggctttttttctttctttctttattggtagcggccaaaaagagttgattgctattgggatccgctgagtaaagacacgggcaggggtgcgcggaggtgagaaaactgaagacctggaagannnnnnnnnccttcaaaaacccgtttccatccagtcttcagccagtccagtctactttaatcctcaccaggacaatggattaagtttctcttccctggaccagaagtcgggttcggacttggggcaaaatgaaggaaaaggccatgatcaagaccgctaagatgcaggggaacgtgatggagctggtggggagtaaccctccgcagaggaattggaaaggaatagcaattgcactgcttgtcattctggtcatctgctccttgatcgtcacctcggtcatacttctgacaccagcggaagataatagtctgtctcaaaagaacgaaggtcactgtagaagatctcttcagtgaagacttcaaaattcatgaccccgaggctaagtggataagtgatacagaattcatctacagagaacagaaaggaacagtgagactgtggaatgttgaaacaaatacttctactgtcttaatagaaggcaaaaaaattgattcattaagagccatcagatatgaaatatctccagatagagagtatgcacttttttcatacaatgtggaaccc

SEQ ID NO: 439846 - DNA, 1577 bp, Homo Sapiens
  misc_feature (1122)..(1167): n is a, c, g, or t
  misc_feature (1208)..(1208): n is a, c, g, or t
ccgggatccgacaagtgcgctgcaccagtggcaccggctgggggcgagccgacctcgagcagccgccgccgccgccgtcgttgctactgccgcagcggagttcagagggcccggaggtgggagacttcccacacggtgactgagatgtcgtccactgcggctttttaccttctctctacgctaggaggatacttggtgacctcattcttgttgcttaaatacccgaccttgctgcaccagagaaagaagcagcgattcctcagtaaacacatctctcaccgcggaggtgctggagaaaatttggagaatacaatggcagcctttcagcatgcggttaaaatcggaactgatatgctagaattggactgccatatcacaaaagatgaacaagttgtagtgtcacatgatgagaatctaaagagagcaactggggtcaatgtaaacatctctgatctcaaatactgtgagctcccaccttaccttggcaaactggatgtctcatttcaaagaggtttcagagttggtgaagcggtataatcgagaacacttaacagtgtggggtaatgccaattatgaaattgtagaaaagtgctacaaagagaattcagatattcctatactcttcagtctacaacgtgtcctgctcattcttggccttttcttcactggcctcttgccctttgtgcccattcgagaacagttttttgaaatcccaatgccttctattatactgaagctaaaagaaccacacaccatgtccagaagtcaaaagtttctcatctggctttctgatctcttactaatgaggaaagctttgtttgacccacctaactgctcgaggcattcaagtgtatatttgggtattaaatgaagaacaagaatacaaaagagcttttgatttgggagcaactggggtgatgacagactatccaacaaagcttagggattttttacataacttttcagcatagaaaaagaggtacttagaagtattgaaggaaaaaatgaagacctaagaaaaaaatatttcatgatcatttccctaagccatttccagaatggtaaaaggtttaatcagtttttattacctcatttttaagcctgtatgagaatgtagaaacnnnnnnnnnnnnnnnnnnnnnnnnnnnnnnnnnnnnnnnnnnnnnngtttgtaaattgtttagaaagataattggttatgagatgtnaagttttaatttcttaatgtgcatttttgtttttagatcttatacagaaatcttgattaataacatacacagaaatgtacatactacatcatctacagaaatcttgatcaataacctagaaactaggttatctaggttgatgatcaagatttctgtggatgatgcagcgttgtatcataagtaattgtggaatgaaagactattggatacattgggcattgggctgagtgtggcgggtcatgcctgaaagccacgccttggggggcttacacatgcaggccctgccaggaggtagatggaaggccaggctgagccacccggttgagccccgtgggtaccaacattcagggatctaccttcgggggtggt

SEQ ID NO: 439847 - DNA, 1072 bp, Homo Sapiens
  misc_feature (83)..(83): n is a, c, g, or t
ttaagttaaaaaattcccttaaggcttgttgggaaaggtccgtcatcccccccagtttgctccccaaatccaaaagttccttngggattcctgttccttcattaaataccccaaatatcccacttgaatgcctggagcagttaggtggtcaaaacaaagcttttcctcattagtaagagatcagaaagcccagatgagaaacttttgacttctgggacatggtgtgtggttcttttaagcttcagtataatagaaggcattgggatttcaaaaaactgttctcgaatgggcacaaagggcaagaggcccagtgaagaaaaggccaagaatgagcaggaccacgttgtagactgaagagtataggaatatctgaattctctttgtagcacttttctacaatttcataattggcattaccccacactgttaagtgttctcgattataccgcttcaccaactctgaaaccttcttaatcagcacattgttgttgactttgatatcgatgttaatgggagtgttaggaaaggcctcaaaaacttccttcagtaatggaattcggttatcttttccttcacactggcatgctctttgaaatgagacatccagtttgccaaggtaaggtgggagctcacagtatttgagatcagagatgtttacattgaccccagttgctctctttagattctcatcatgtgacactacaacttgttcatcttttgtgatatggcagtccaattctagcatatcagttccgattttaaccgcatgctgaaaggctgccattgtattctccaaattttctccagcacctccgcggtgagagatgtgtttactgaggaatcgctgcttctttctctggtgcagcaaggtcgggtatttaagcaacaagaatgaggtcaccaagtatcctcctagcgtagagagaaggtaaaaagccgcagtggacgacatctcagtcaccgtgtgggaagtctcccacctccgggccctctgaactccgctgcggcagtagcaacgacggcggcggcggcggctgctcgaggtcggatcccgggaattccggaccggtcc

SEQ ID NO: 439848 - DNA, 920 bp, Homo Sapiens
  misc_feature (8)..(8): n is a, c, g, or t
  misc_feature (29)..(29): n is a, c, g, or t
  misc_feature (44)..(44): n is a, c, g, or t
  misc_feature (113)..(113): n is a, c, g, or t
  misc_feature (141)..(260): n is a, c, g, or t
  misc_feature (348)..(348): n is a, c, g, or t
  misc_feature (381)..(381): n is a, c, g, or t
  misc_feature (406)..(406): n is a, c, g, or t
  misc_feature (410)..(410): n is a, c, g, or t
  misc_feature (432)..(432): n is a, c, g, or t
  misc_feature (440)..(440): n is a, c, g, or t
  misc_feature (459)..(459): n is a, c, g, or t
  misc_feature (480)..(482): n is a, c, g, or t
  misc_feature (488)..(488): n is a, c, g, or t
  misc_feature (618)..(618): n is a, c, g, or t
  misc_feature (680)..(680): n is a, c, g, or t
ccttccgnagaagggcgcgtccaagcccngggcggacgacggcngggaaggcgcttccctacaggcgagaggagcaggctcgccctctggtcgtcgggccgcgcgcccgcagntcccgccgggtcaccagggccgccagannnnnnnnnnnnnnnnnnnnnnnnnnnnnnnnnnnnnnnnnnnnnnnnnnnnnnnnnnnnnnnnnnnnnnnnnnnnnnnnnnnnnnnnnnnnnnnnnnnnnnnnnnnnnnnnnnnnnnnngctggaagtggtacagcagcttcatctgcttttcgctggcggcgtggagcgtcaggaactgcacggcctcctgcaggcaccacgagtngccttcgctgtagtcctggtgcaggctcttggncccgcggcggcaacaaaggctgcgngaanacgcggcggcggtgagcgggcngcggagancgggaaaaccggagaacgntggaaactcggggaacgggannnacgggnacgctcacctttgctgtgcttcaggtagctgacagccatctccaggatgtcggccttctccagcttggagttgggctggtgccgcgcgaactcctgctccagcagcagcttcagctgctcgatgctgctnttgatgcggtcgcggcgcatcttctccaccaccggcttccgcagctgcgggaggagggggtntcaggctggcccggcacggcgcagggacccccgaggaccggaggccgcggggacagcgcgccgggcgagtctggtacttactcggtttttctctttggggctgagcagctccacggccacagtgctgggggccatgcctggcgcggaacaggcgacgaggcgacgccggggaggccgggcgagacgaggcgagcgggcgcgggcaaggccaagcgcgtcccgggctggcgcgaacccgct

SEQ ID NO: 439849 - DNA, 1040 bp, Homo Sapiens
  misc_feature (942)..(942): n is a, c, g, or t
  misc_feature (944)..(944): n is a, c, g, or t
  misc_feature (948)..(948): n is a, c, g, or t
  misc_feature (953)..(953): n is a, c, g, or t
  misc_feature (969)..(969): n is a, c, g, or t
  misc_feature (986)..(986): n is a, c, g, or t
  misc_feature (991)..(991): n is a, c, g, or t
  misc_feature (999)..(999): n is a, c, g, or t
  misc_feature (1015)..(1015): n is a, c, g, or t
  misc_feature (1022)..(1022): n is a, c, g, or t
  misc_feature (1030)..(1030): n is a, c, g, or t
  misc_feature (1032)..(1032): n is a, c, g, or t
catgagacgcgttgccctgctctggcggtccgcgctgagagtcgccgactagtcggcatcgggcctcgggcgcccccggggcgggttgggttgcagcccagcgggcggctggaccgccgcggtggggcggggacaatggggtacaaggacaacgacggcgaggaggaggagcgggagggcggcgccgcgggcccgcgggggtctagactgccccccatcacaggcggcgcctccgagctggccaaacggaaggtgaagaagaaaaaaaggaagaagaagaccaaggggtctggcaagggggacgataaacatcagagtcagagcctgaagagccagccgctttcttcctcctttcatgacatcttaagtccttgcaaagagcgtggcccgaaaccagagcacagacagagcaaagtggaaaagaagcacctcccttctgactcctccaccgtcagcctccccgactttgccgaaatagagaaccttgcgaatcggatcaacgaaagtctgcgttgggatggaattcttgctgacccggaggcagagaaggaaaggattcgcatctataaactgaatcggagaaaacggtaccggtgcttggccctcaagggcttccaccccgaccccgaggccctcaagggcttccaccccgaccccgaggccctcaagggcttccaccccgaccccgaggccctcaagggcttccaccccgaccccgaggccctcaagggcttccaccccgaccccgaggccctcaagggcttccaccccgaccccgaggccctcaagggcttccaccccgaccctgagggccctcaagggtttccacactgaccccgaggccctcaagggtttccacattgaccccgaggccctcaagggcttccaccccgaccccaaggccttaagggctttcacccgaccccaaggccttaagggttnanactnacccnaggcctcaagggtttnacccgacccaaggtctnaaggnttaacccnacccaagccctaaggnttacccnacccaggncntaaggctt

SEQ ID NO: 439850 - DNA, 965 bp, Homo Sapiens
  misc_feature (8)..(8): n is a, c, g, or t
  misc_feature (14)..(14): n is a, c, g, or t
  misc_feature (28)..(28): n is a, c, g, or t
  misc_feature (33)..(33): n is a, c, g, or t
  misc_feature (36)..(36): n is a, c, g, or t
  misc_feature (41)..(41): n is a, c, g, or t
  misc_feature (43)..(44): n is a, c, g, or t
  misc_feature (56)..(56): n is a, c, g, or t
  misc_feature (64)..(65): n is a, c, g, or t
  misc_feature (73)..(73): n is a, c, g, or t
  misc_feature (86)..(86): n is a, c, g, or t
  misc_feature (90)..(90): n is a, c, g, or t
  misc_feature (102)..(102): n is a, c, g, or t
  misc_feature (108)..(108): n is a, c, g, or t
  misc_feature (111)..(111): n is a, c, g, or t
  misc_feature (123)..(123): n is a, c, g, or t
  misc_feature (141)..(141): n is a, c, g, or t
  misc_feature (163)..(163): n is a, c, g, or t
  misc_feature (175)..(175): n is a, c, g, or t
  misc_feature (179)..(179): n is a, c, g, or t
  misc_feature (185)..(185): n is a, c, g, or t
  misc_feature (188)..(188): n is a, c, g, or t
  misc_feature (192)..(192): n is a, c, g, or t
  misc_feature (203)..(203): n is a, c, g, or t
aactggtnaaaaantcccaaacccacancttanaancaaanannctcacaattaanattcttgnntgaccaanaatattaaatggnttangggttgcccacnctacantanttttcagtcttnaagtgtaatactctttanattcttaagatgttagattttnaaagattatctnattntttttnagntttnagattattgtnaaacttgaaattgtaagaaacacaatcaaaaactgtgcactgtgtaatttttacttattataaatgtatcctacaacagaaacacaacacatttctccatgaagcatattgagatggaataaaaatggatagatctataactcgttagaacatcaacattcagactaatctcagaagcctttcttcttcaatatctccacataatttgatgtatactgacaaagtttgctgattgctttgagactgtggaggtacctcctgtattaaattcctctttttgcttgtatttaaatgactttattctttgagctccattgttgattatggattcttctgctgctataaaactcattaagcaatttaagtgtctcccatttttgatttgttttgtgggaaacttccttaatactaggtctttgctgcatataaatgaagtcataatatagttttagcaccaaatatggtaacagggccccaattgttcactacttctaaccagactcagtgatactaacttgagtatttagttaacacaattaaagaaaataaaaaggcaaagagagaagtacatgtatcactaattacatatgctacctggtcatctacctcaccactagtcataacccaaaccaatcctagggagctctatggtcccagagtccccccgtggtttcctgtcacaaatgattttgggcttaacccgtaactctttttattatttctgattattcatcacccccaaggccaactatagtttgtatc

SEQ ID NO: 439851 - DNA, 1445 bp, Homo Sapiens
  misc_feature (1344)..(1357): n is a, c, g, or t
aatttttaaaatatggagtgtgataaataaaacacaccaagaaatcctaccagccaagcaaatcatacctatacatgtcttatggaaaactctattcgagttacagttaggtttaggaaaattttataaaaagagatattaaaataaatatctaattgatgccaaaattaccacaaaatcacagtgtctaatatactttgttggcacaattttgtcttcaatttctctcttataagaaagtctaaagaaaaaagtaataataaatataacaattttcatgggaagtttgggttctctaagcaatatagtattttctatcactaaatacagctatatctgcttaccttcagggaccatgaaaataaaaccgtgatagccctctacaaacaacagaaaccataaacttaacaaaactgccccctctatataaatcttaactgctattcctaaagccatttttcagtatgctttttttcctgaaaaggagtcagtaggatttcaacctcactcagtcagaaacaggcactggagagcacgcctgaggcaggtggagaacttcagaggcagtcacaggtctaggataagctcgccccttccagaatgggaaggggcaggagcctcgggatgaattagccggagaagccagggactataacgctggtcctttcacgcagagtcccacccctccgctacaaagtgagagtcttggcaaacagtgcccacagccacaacaaaatatccagagagagtggctgagagagactctttcaactaccctaagtcgaacaacaaatacagcaaacgcttgtcacaggcatattgccgcaggaacactgcccgggaatgagtaagaggccccaaacataacaagaagagccacctgatcagaggttgggtgtttgtttataataggaagagtaaaattggaaggccacacctgaactcttccttaaaacaaatctttgttttttctatactgaagtctacaaaaaattcaggatataaactgaaagaaaggcacaactgattgcccacaattcaggaaatgtagtaacttggttataatatattcataatctctgttccaacctccccagttgggctggcatcttttactgtttttctcctttataataccttcagagttcaagaaaggaaataaaactttaaaaatttttaagttacaagtagcactgatataaagaaaaataattaagaactactgtctaaaatgagatctagagattatctgccttgcacagatagtaaaatgttgagacttttgtcctgttggtataactcaagaggattttaattctacatcaaattaacatggtaacagannnnnnnnnnnnnncaagctgatattgtgacaagttttcaacgcacttggtaaaatcattaaattattaggctccccatctgtcccaagcttgtactacatc

SEQ ID NO: 439852 - DNA, 1555 bp, Homo Sapiens
  misc_feature (1234)..(1234): n is a, c, g, or t
agaaaacaaaagaaaagaacctatgtaaccacttagaggccttatcccttataaaaagctagatactaaaaaagaggcacctaattaatctcatcagtcatgaatacttagagtaattttgttaaacactttgagaagactttcagctgcagcagtttaggaacaagatggggcttgggaagaagaaacagcttggaacacgaagacctagatcgagtatcctggaagcccaggcatctaagggacagcagtagggacagggaaggtggcaaacatttactgaacaccttaaacagacattgagcaagaagcattacagatgctttctcatctactctactcaaagtgcatttttgttaacatcacttcacaaataaggtacttgtggctcagaggaattatataatttactgaaggttactaaaaaaatactgagccaggatttaaacccaaatgtgcctgactccaaagccctgattttttccaacatagcaccttggtgggagaatatctcgaagtgggagaatatctcgaagtgagagaagggagaagggtagatagagaagagatggattgttcccaaagtcttgccaactttacagttccacccttcattgcctctttagtaagatagagggatagagaaagcggggagagagagcagttccctccctattagttatcactccccgacccaactcctgtgctagtgtgggtgctgggtcatgaacatgaaaacctgggtcatccagggcctcttgtccatacccacaactgtttccagcccccagcaatcttccaccttcctggcccatgtccccgtgtgcccctaccacaggggcccagctctattaccaaagtaaatctcctgttcaaaggtgttgtctgtggagtaggcaaactttccagctcggggagtcacctggcgaaagtagctctgggtttggggctgggagaggctcgtcttttcatggatatcctcagtgctcttgttgccaggcatgatctcaactgtctctgcttgttggaagtaactgggcaatcttggcaggggtgagaaaggagggaaaagggggaaagagtaggaggtggatccccctttccattaaatccacagctcgttccctttcctctttaagctcagctcctatacacgtgagcattgcagaacaccaatgtttaacttttagccttgtccccatggtgccagttgaatgtggagctgccagaaggncctgtctacagctgtcctgcctggctactaaaggatccatgccttctgcagccaccaagcagcagggcagagtggcggtgctccagcataacccttttttaacattcgtactcttagaggcggcatggccttggggaagggatcccacctccttcgtcatctcactctgtctattctgtgtgtggttatttaatgtccatcacctggtggtggacaggctgtaagctccttaaaggtacatatctgtgtctgttgcttttacattgtattcccagcactttgcagagtgcctggaaagtagcaagaacataatttatattt

SEQ ID NO: 439853 - DNA, 1287 bp, Homo Sapiens
  misc_feature (1147)..(1147): n is a, c, g, or t
  misc_feature (1168)..(1168): n is a, c, g, or t
  misc_feature (1199)..(1199): n is a, c, g, or t
  misc_feature (1209)..(1209): n is a, c, g, or t
  misc_feature (1215)..(1215): n is a, c, g, or t
  misc_feature (1230)..(1232): n is a, c, g, or t
  misc_feature (1234)..(1234): n is a, c, g, or t
  misc_feature (1238)..(1239): n is a, c, g, or t
  misc_feature (1247)..(1247): n is a, c, g, or t
  misc_feature (1249)..(1249): n is a, c, g, or t
  misc_feature (1265)..(1266): n is a, c, g, or t
  misc_feature (1277)..(1277): n is a, c, g, or t
  misc_feature (1279)..(1279): n is a, c, g, or t
agaaatttttcaaaataaaaagtggcaaatgatttccatattattctgatttttgcacagtaacagaaaacattcctggctgcagctcattaatatttcttctttgttctcctgaggaatcaaaagattctcatttatgatatgtcaaaaggcacataaagaaacatatccaaactttgttgtctcttcattcaagtttggctttaatattttattaaaaatttttgtatttgtaaatattaaaacactgaaacttgctactgacacaagaacgacaatgcactaacaataaaatcaaagtagaagctaaactattcagaagcagtagcaactccatgattccaaggtaatttaaacaggcaatttcagagtgcttcaagatgaaggcgcaaagcagcctctcagcctgcagtgatgctacgacaccggcagatggcgctgcaaagcttctcaaatgcagcgggaagtccatttaccaacggctgttgcgatctcttaattagcttgaactgagtttgtattagaatttataatttttactgcatattgcagttactcgtatattactgacactggaacagacatgttttaacaaactggttgagccgtatcagtgcgaaccagctgaatgtcagcgctgttccctcctgtgacagaagccaccggcgcctgcctgagggcactcccctcactgggactctcagtaccacgcccacctgtccccaaggtttgtttcatcactaagccccaccttccagcattttcacctttctccttcacttgatccttcttcctaacatcgtgttaacacactccaaactaaaaaagttcctcaactgcatatactctgctccctccatttttttctttcattgcaatcactgccaaacattttgaaaattctctcctcacctccactgcctttacgcttttcctccaaattattccttacccctctgacatttggggcttttgattccacctctccaaagaaatgctcccacccagaccatggtaggcccctcttcgttgctggtggatactcgttcattttcccgccaccacccatcagcagcgttccacgccgcccttccttccttctttcttccctagcttcatcacacacgttactaggtttttctgtctnatggctctttccctgctctcnttttatatgtttctgctttcttctcagcttnttgctcccanactatntgtgatgagccaatnnngnttcnnccagactntnttacccagtccattgnnaaatgttctgngngataaggg

SEQ ID NO: 439854 - DNA, 1658 bp, Homo Sapiens
  misc_feature (1574)..(1574): n is a, c, g, or t
attttttttatgagggcatctgtgttgtgtgaagttaatgctttgtttacttcactaaacacggactagctagctaacccttctcagtatcaggactatcatattcttaatctagctcagcttttcaaaaacataccctctccctccttatcctcagttggttacttttgggtgtcttagtgctcatatttggtggtaagactgaggaagctggatgacaatggcatgaataggaatatattgcctaagagtaggaacgaaagaatgattttatttggggcatagtatttagctgctgttgggaatccatggagaggcgtatagcagggaagtggaaatatgtatcaggatgcaactagactcttaaaatggcaaacagacatgtaaagaaactgacgagtttcgtgtaagagcagagtggggatgtcagctctagtggggcacgagaacatggtgtcaggcattgcagtttaaggactgaggaaagtttcagtagagttttgtgtgaaatatgctagactgtagtgtgttgaagcagggaacaaagtttctttttaactttcgttttaggttcaagggtacatgggcagatttgttacataggtaaactacgtgtcacaggggtttggtttacagattatttcatcaaccaggtatttttctgatcctctccctcctcccatccaccactcttgttagtccccagtgtcttaattcctgctttatgtggatgtgttctcattgtttagctcccaccaaaattcttaacatgatctaaaggccttgtctaacttcacataagcaggcttgagttaagttcttttctgtttttaagacataggtgccttttcttcgtatcattgtgcctttaaatattcatgcatgttcttgctggagaggtatcccatgcctacctctaaatagctgtgggatctagggaagattatgtaattccctaaaattctcttgccaatctgtgaacataaggtgaatattaacctggctattatttctcacccagaatcttgctgtctcctcctagtctccctccttcttcctttggtccccattgtctcttctgcatggtgtataccctaatcatgaaaaatgaaaaccctgtgatgtcatttctctgtgcacagcatgccattgacttgctttctcattgagaaagaacccgactatcatgacttggtaagggtctgtgtgaagcttcatttctactcactgccctcatgcagcctgccccagctacacttgccttcccaagcatcctccagctgcagggccttttcatagtctgttccacctgactagaacactttttctctgcatataactgtataactcccttcctcatctcctttatttagatctttgttcagatatcatcatatcagagtgtccatcattgactaccctttataaaaataatacttaatcatttgttattccccttttatttgtttttatgacattgactgccatctcacatatatttgtgtatttgctgtctgacttctgccacaaaatgcaaactttttgggagttagcactttggcctgtatcactgntgaatttccacccactcactgtacctgagaatgatctgtgctggaataaacagtatcgagtatcactaaacataacctttagaa

SEQ ID NO: 439855 - DNA, 1702 bp, Homo Sapiens
  misc_feature (151)..(280): n is a, c, g, or t
ggagaaagtcaaaataccccccacaagtgaagtgcagttgcccaaaacaacccattcaacctttttctccaaggtccatgtattccgcggcctcacgcctcctaagtaactaggcattcaggcaacccccccctaagacaaaaaaaatggnnnnnnnnnnnnnnnnnnnnnnnnnnnnnnnnnnnnnnnnnnnnnnnnnnnnnnnnnnnnnnnnnnnnnnnnnnnnnnnnnnnnnnnnnnnnnnnnnnnnnnnnnnnnnnnnnnnnnnnnnnnnnnnnnntacaaactgactcttgtacccacgcccctcttctcccctactgcaattcctaccctagttcaggtctacctggaacacttcaacaggcttttccctctcaaagggaaatcctccacccagaggtcagagtgatctttctgaaacattcctctcagtttgcttaaaatgttcactttgcttaaagctctatagactccccgtccgctaaagcaaggctttaagttttcctaagtggaactcttgggttcaaaaataatcacctttgtttggaaactcagtaaattgcttggaggttgggaaagacatagagctctggagaagggtctgaaaaccatagatctacacaaccaagatcagtctcctcccccaggcaggcagggtcttccgtggtctgttccctctggcctcacccctccccgctccacctccccagcaacatcaggctggtgccatcctgcacagccactgcttttcacttccaggcctttgctagtattgttttctatgcctacaggccgccaccaccccacccacttttcctgtgtttgccttcccctgccgacacccaagcttgaagacctgatcccaggctgggttaggcagcccttctttgtgttctgtgatgcccctcgcatgtccctgtcactgcaccaatcacattgtattttcacctgcgtatgccccactgaacaggaaatgccagctagactgagagtcccctgacgggatgaaggaaggctgtaggaaagataagcattgatttccttacctgttggagctttttcactacgtatttttgcaagaaggcagggaaattttttattggggagtgtcttttctgagacattatctttgctgctgcaccttatatatctgtgtattccatgcccccaacacacagtgcctggcacatagcaggtgatcagtaagcacatgttgaatgagggtgagcagcagatgaggtggctcctggaggctgctttaggcaaagatcagaaatagctgccttatctgaaaagaaggaagagctagagagtagctgcagtggtagaatgattccattagaggcaaaaagcatggtttagcaatatgtagattattaaaattatttgttctaggacaaactaaacttggatagtgtttggtcctagaaaaagtagacaagtaaaatctgagtcatgttttggagagggaaacgggtcactatttgagatttccatctttagatcattcctttggctgactataaatctcccatttggtcttagagattactaaaacacttcagagatcatgagttataatattcaaggactgaaataagcatttctcttttcagactcccaagaagagtcaccagaaatctctgagcttttctaaaactacaccaagaaggatctctcatacaccacaaactccgtt

SEQ ID NO: 439856 - DNA, 1750 bp, Homo Sapiens
  misc_feature (675)..(675): n is a, c, g, or t
  misc_feature (721)..(721): n is a, c, g, or t
  misc_feature (737)..(737): n is a, c, g, or t
  misc_feature (1689)..(1698): n is a, c, g, or t
ctttctacaacaatgagaatatttattttttccagaaagtaaaaataacattttttctcttttgtaaaagtaccattacattccattttcttaaataacaaaaccctaaaaatatatattaaattgtatacagtgcgtcacacttcatcttatattttaaaatacatgatgtttctattttattctcaaagttgcatattaagagcatatttacaaataaagccttgtcatccaaagtcaaaatccctgctggaagctgagtttggatgtgggaaggtcttgacgtgcatgagacccacgatggcagctcccgtgcgggcggggaagggcctccagtctttgtgtctaaagacccttcctttctgaagcagatttccctctgactttcctccacaccccacttctgcctccgtacccaactcagcaagacggaagcctgtgagatgtgcccaccaggggtctgcaggcagagggtgaagccctgtcaccccggagccgtccagcctgaggggagacagctgtggctggaaggcttgaaaaacaccccacaccagggaagctaagctgagacctggccaggaggtagaacagtgaggaaggtaaacaaagacaccagaggaaacaatccaaactcccaaggtaggaacaaaagccgacatcaaacaccacacgggngatctgaaacctaacggtgccaggtggtgggcgctgtggagctgcncggctccgtgggaganctggcctgacctcagcagaccagggaggcagggtctcggaggccatccgcgtctaagtgcttgtgaagagtaagcgtgcagtgccaggatgcatcggggctgggtgatggcctggctgggctgcaggcagatcctgagcccggccaggaaggctcctgcctgggctgacagtggggcatgtgggtggagccgcacccaggcacgcccgtgggttctacccgagggccaggacagctgaacttgctagtgctttgatctctgtgggcttctggccgattggagtcttgagccagagcccactcttcagaagttagagcagcctggtttcctcgctcacgcccagagaggcctcaagcctgtcctgacgtgggggacagggcgggtgaagtcactcgggttcactcctactcattctctgctttgcaagcaactggacaaacggggaagaacagggcaccgtgtgcctcccgcctgccttctcagaagggccaaggacactgagaaacgctgctagaaactaggggccacagctggccaagacactgtcaccacggagagtgacaagatcggctggtgagggctctcctgttggcacaggtaccaagaaggcagggcctggcgccagcggggaacaggggtgaggatggcacgcaggcccagtgcagcctcctcccacgctctgtcacctcaggaggggctttggccagggtgctttcagagctctgtccacagtggtccccgaagcccctcccctgcctctcctgcagtcttctgccatgggttctgactgactttcccagggttaccctcttttcgccacctccaaccccactttatttatctaaggggtttcctaaaagttcaagtgccacctccttcatgctcctggagcccacgttatctctctggaaagcagttcttttctagtgtttacctagccgcagggcctctnnnnnnnnnncggttgcttttctacctggttttactgaggccatagccagctggagagctgc

SEQ ID NO: 439857 - DNA, 2075 bp, Homo Sapiens
  misc_feature (85)..(85): n is a, c, g, or t
  misc_feature (254)..(254): n is a, c, g, or t
  misc_feature (262)..(262): n is a, c, g, or t
  misc_feature (270)..(270): n is a, c, g, or t
  misc_feature (321)..(322): n is a, c, g, or t
  misc_feature (337)..(338): n is a, c, g, or t
  misc_feature (343)..(343): n is a, c, g, or t
  misc_feature (357)..(357): n is a, c, g, or t
  misc_feature (364)..(364): n is a, c, g, or t
  misc_feature (395)..(396): n is a, c, g, or t
  misc_feature (398)..(398): n is a, c, g, or t
  misc_feature (402)..(402): n is a, c, g, or t
  misc_feature (426)..(426): n is a, c, g, or t
  misc_feature (437)..(437): n is a, c, g, or t
  misc_feature (447)..(447): n is a, c, g, or t
  misc_feature (455)..(455): n is a, c, g, or t
  misc_feature (466)..(466): n is a, c, g, or t
  misc_feature (515)..(515): n is a, c, g, or t
  misc_feature (525)..(525): n is a, c, g, or t
  misc_feature (527)..(527): n is a, c, g, or t
  misc_feature (532)..(532): n is a, c, g, or t
  misc_feature (557)..(558): n is a, c, g, or t
  misc_feature (560)..(560): n is a, c, g, or t
  misc_feature (568)..(569): n is a, c, g, or t
  misc_feature (571)..(571): n is a, c, g, or t
  misc_feature (574)..(575): n is a, c, g, or t
  misc_feature (588)..(588): n is a, c, g, or t
  misc_feature (595)..(595): n is a, c, g, or t
  misc_feature (602)..(602): n is a, c, g, or t
  misc_feature (604)..(604): n is a, c, g, or t
  misc_feature (632)..(632): n is a, c, g, or t
  misc_feature (640)..(640): n is a, c, g, or t
  misc_feature (648)..(648): n is a, c, g, or t
  misc_feature (652)..(652): n is a, c, g, or t
  misc_feature (666)..(666): n is a, c, g, or t
  misc_feature (670)..(670): n is a, c, g, or t
  misc_feature (1844)..(1844): n is a, c, g, or t
ggaataaagatcagctttattattggcatgaaggcagagaggtggtgatagtgccaggccctctgcaggcaaggaggcggagggnttgtcagccagcactgatcctccaagttggccctcccagtgaagtccagggttccaggtgcctctggcttaaagcagaagcagtgggtgagcaggcttgcagactgtgaggcattggatatgtggaatcctcagggctgctctggagctgggatcgggctggggttggnagggggtnggggccgnggctggatgtctctggtgcgcatataggacagcagctgctccgggatctcnnccagcacatccttgnncagtngggccatgctcaanacctggntccccgaccggtcaacataatctcggaatgnnangaantgaacgatgtcccgctctgcgtangtcccctagangacacgcgcncatcatcnccgtccaactnttccattgcctcaaacatggctggtcctacaccgacgataatgataganatgggcaatntngaggngctgacgatggcctccttggtctgnntnatgttagnntngannccatcagtgttgntgtgcanaacatantnctgggtgccatcagagatcttgggtgcngcccgggncacttggntgangacaggggcaaagnaggngggcccatagatctgcactgtgtgcaggctctggaaatagctctccagcacaccctcgatgcccgcacagttggggtcctcatcattgttgtttttggggaactggtgggagatccgtccctctgggggcagcttggccccaaagccataagctgggaagagcttatcactgtcatagtcctggatgatctctcccactgccttgagggccatggcataggcgctgagctggtagggactcatgtagtgcagggaggtaggctgcagaggattcccattggaagccgtgaagtcaatggctactgtgaagttcagctgtgtccctcccttgatgtaatcaacaaaagtgaattcagagtccacagagaaggagagcagcgtcacagttcctgagttgacatatttcttcttcttacatttcttccgagggttaagaacctcatatactgtgaactggttctgggccttgctcagctcccggtagctggtggtgaactcaccaatgaaatcgtggcttccatcccggtcccagtcgtacacatcaatcttcaccgttctgtcatagtctccattgcacagagcccgcacagggatgctgaagggctgccacacaggattcagcgtgtttttcacaacctctgtcttgtggcagatggtgaacgtgccatcctcattgctcctgtagaacacaaggaaggggtctgatttcccaaagaagtccttcttgtccagcttgtttgcacacagctgcatggtggcaatgtcccgacaattgctaagctcttctgcagtcagcaatatggtcccacacttcttgcctggtacacccgtgagggttcgctctactcggctgccctggcctccaatcacctctcccagggccaggaacgcttgtcccaggaaatccttcggtttggagatgttggttttggagtccacgttgtacgcatcgaagcgcagattttgcttttcctcaaagaaatagtcgaggacgaatttgcgcacgaagtctgggttcagcgtgttatcaatcacctcggtccgtccgaactcccgccactcctggctggcccggctctgcgtgtaaagcaccaccatggggtcggacttggagaaggtatcaaggtctagcaggttccggcaggacacggtaatttcaatcttggtggccggngacgctgcgctcggaggctccgccgagagacatggctggtcgggcgaccagagccgcaggaggctgcgagaccagggctgctggggctaggggcgacggcagcggcggggccggcccatgtgccgcggtgtcggcggcggcggcggctgcactcgctccagccctgcgtgcgctccagccgctcgcgccctgacagtggccgccatcccgggaattccggaccggtccagc

SEQ ID NO: 439858 - DNA, 1594 bp, Homo Sapiens
  misc_feature (33)..(33): n is a, c, g, or t
  misc_feature (393)..(393): n is a, c, g, or t
cggggattacagcggaggtggcagcggcgcggncgctgagcgagcggcgagggagcaggggaagaggaggaagtggagccgcggccgggagctcgggagtcggccgccgcgccgaggttcgccccgttttgcagagagagccgagtcgggacctggaaagacgtccccgcggggctccggccgccgcgcctccccgccggcgcctgccctgccctgcccgtcccagccccgcggttcggggcgtgcggccgggacgcgcggaccccggccctgacccgctgcgccgggacgggacgctcctaacgccgccgtaccggtccgtggttgcagggtcgctccgcgcctttccgtcagtgagggtcggaaccccagctccagggctagcgcagtgtngccccaggccctcgcctccggtgcacgggaccccggacccccccagcctctggcttcacgagaccccaaccttcagttggaacagcttggaacagcgcgagcgcccgggaagccctggccgggtcgtgcgctccgtgaggggtcctaggcgggcaggacagtcggaccgaaccgccgggctggtgccgcgagcccaggctgtcaccttcgtcccgcctcaggcgaggggttcaacgcctgccccgaagataacacaggggtccccttctgtcccggcggcccgcgagagccaaggctgcagctctcccagtgaagtgatatcactgcctctgtggacaagacacctccaggagcccagctcacagccaccgggtaccttcttccaggacaagctgggggcctccatgggcgcctgagggccaggcgccagggccgtgggcacgagtatggtgagacaccagcccctgcagtactacgagccacagctgtgcctctcctgcctcacgggcatctacggctgccgttggaagcgctaccagcgctcccatgatgataccacaccgtgggagcgcctctggttcctgctcctcaccttcacctttggcctcacgctcacctggctttacttctggtgggaagtccacaatgactatgatgaattcaactggtacctctacaaccgcatgggctactggagcgactggcccgtacccatccttgtgaccacagctgctgccttcgcatacatcgctggccttctggtcctggcactatgtcacattgccgtggggcagcagatgaacctgcactggctgcacaagatcgggctggtggtcatcctggcttccacggaggtgcgcatgtcggccggggccccaactgtgggaggacgagtgggaggtgctgctgatctccctgcagggcacagcgccatttcctgcatgtggggggctggtgggcagcagtaaccactgctcttcttggatcgtggccgggacaagttcgtcccgtgcaaaagaggacccttctcccaaggggaaccatccttttgacccttctttcacggggttgtttggcctcttacctggggccgtttttaacattttcctttcccttgggtttatggaggaaagaaagaacttcggccccaagccctgttttttattggcccccggggggtgcccccaatgcagtggttcca

SEQ ID NO: 439859 - DNA, 1675 bp, Homo Sapiens
  misc_feature (1323)..(1333): n is a, c, g, or t
  misc_feature (1421)..(1475): n is a, c, g, or t
agtttccatttttattaaagttgtgtttttctaaggaatatatcacacttaaagttcaataccataaatattagttcttaaatcttctattttacttattaaaaatgtaaacataaaacaaccactccatccctgtccctgacccaatatatattaaaaaaatattactcctctcaggtaagttcttttcttcagaatgagtaacacagacttcattaaaatctttttagtcctcctgggctgcaaggacatggcaggaatgactagtgtccactgtgacaagggtctgtgacactgtgactgaggcccgtctcctcctgccacgacggactcatgtgccctgaggggacagggctcctctctgtccagtcaggcgtccaaggacacggacagtggtaaggcaccgagcacagacactgtgatggacacagcacgcaggatggcgtatgctcctggaggcagatcacagccagcacagacagcaattctgggtgagtgttagtcagagggtattagagctggaaggattctgagatcacctagtcgttcacagatggcctcagtcagtaagtcttctaatgttagaaggaacattgatacaactttatgaaatactttgatatatttatttatcttcctaaaactaaacctcataagatgatgtttcaacttcaaatattgataaaccttaagcctagataggctgagtaactgcaagcataatttataacatttatagaatgtctatttgatctcaacaaaaataactatcctataggaaaaatgtaagggttactggttttaagaaataaaaggatgtttttcagaatactggaaggatctatatgaggacaacctacctgtttgccagtttctttaaagctgtcagctcaaggctactgacatggcttttgcttccttcctgtaaattttgtttctgaaaacctgagacaaattcacttgatatttttgacaactgggaccttaaaatgatcaaaatgagcctaagtctgaacagaaaaccaagatagtttttaataagtacttgaccttttttgagtcagaaagtgactccagtctactgtccccaaattgctgctccccattccttccctgtgtccctcacttccactacagctgcagccggcccagcctgtccctcttaacacagcgacgtggcttcgtctttgctaacatgaagggtataacctgccacaggatatcaacgtgtgggccatttcaatttcttcactttgcagctgaattttataccaataattctgcaatgacatctcggattctaaaagtctgcttcactgtcannnnnnnnnnncccaagaaagtctcactctgtcatccaggctgcagtgcagtggtgcgatcagcttactgtaacctcaaactcctgatctcgtgatctnnnnnnnnnnnnnnnnnnnnnnnnnnnnnnnnnnnnnnnnnnnnnnnnnnnnnnnaccactaccatatttaaagtgactaaaatgtgccctcttaaaatctttgacagggtcagggtccttctaattctggctggcccactatgcagaataatggtgagtaaaatcttttccagccttactggaaagggcggaagaatcaacacagttatcctgaggactcaaaacttatccttctttatccagttcaatttggc

SEQ ID NO: 439860 - DNA, 784 bp, Homo Sapiens
  misc_feature (176)..(176): n is a, c, g, or t
  misc_feature (230)..(293): n is a, c, g, or t
  misc_feature (357)..(367): n is a, c, g, or t
ggccaaatggtgaaacttggataaaagtatggaataaagtcttgagttccctcaagggtaactgtgttaatgtcttccgtcctctcagtaaaggcttgaatatgatttactcatcattgattctgcaaaggtgtacccagcaaagacttagaaggaccctgaccctgtcagagatnttaagaggcacattttagtcactttgaatatggtagtggtgggcgcggtgactnnnnnnnnnnnnnnnnnnnnnnnnnnnnnnnnnnnnnnnnnnnnnnnnnnnnnnnnnnnnnnnngttacagtgagctgatcgcaccactgcactgcagcctggatgacagagtgagactttcttgggnnnnnnnnnnntgacagtgaagcagacttttagaatccgagatgtcattgcagaattattggtataaaattcagctgcaaagtgaagaaattgaaatggcccacacgttgatatcctgtggcaggttatacccttcatgttagcaaagacgaagccacgtcgctgtgttaagagggacaggctgggccggctgcagctgtagtggaagtgagggacacagggaaggaatggggagcagcaatttggggacagtagactggagtcactttctgactcaaaaaaggtcaagtacttattaaaaactatcttggttttctgttcagacttaggctcattttgatcattttaaggtcccagtgtcaaaaatatcaagtgaatttgtctcaggttttcagaaacaaaatttacaggaaggaagcaaaatgcca

SEQ ID NO: 439861 - DNA, 478 bp, Homo Sapiens
  misc_feature (449)..(449): n is a, c, g, or t
  misc_feature (460)..(460): n is a, c, g, or t
tgacagtgaagcagacttttagaatccgagatgtcattgcagaattattggtataaaattcagctgcaaagtgaagaaattgaaatggcccacacgttgatatcctgtggcaggttatacccttcatgttagcaaagacgaagccacgtcgctgtgttaagagggacaggctgggccgactgcagctgtagtggaagtgagggacacagggaaggaatggggagcagcaatttggggacagtagactggagtcactttctgactcaaaaaaggtcaagtacttatttaaaaactatcttggttttctgttccagacttaggcttcattttgatccatttttaaggtccccagtttgttccaaaattttcaagttgaattttgtcttcaggtttttcaggaaaccaaaattttacaggggaggggaggcccaaagccctgttccagtagnccttgagcttnaccagcttttaaaggaaa

SEQ ID NO: 439862 - DNA, 424 bp, Homo Sapiens
  misc_feature (255)..(255): n is a, c, g, or t
  misc_feature (280)..(280): n is a, c, g, or t
agtttccatttttattaaagttgtgtttttctaaggaatatatcacacttaaagttcaataccataaatattagttcttaaatcttctattttacttattaaaaatgtaaacataaaacaaccactccatccctgtccctgacccaatatatattaaaaaaatattactcctctcaggtaagttcttttcttcagaatgagtaacacagacttcattaaaatctttttagtcctcctgggctgcaaggacatggncaggaatgactagtgtccactgtgnacaagggtctgtgacactgtggactgagggcccgtctcctcctgccacggacggactcatgtggccctggaggaggacaggctcctctctgttccagtcaggcgtccaagggacacgggacagtggtaagggcaccgagcacag

SEQ ID NO: 439863 - DNA, 1663 bp, Homo Sapiens
  misc_feature (1510)..(1520): n is a, c, g, or t
aatcatcggagcttaaactcatggaggtttcatcagaatctgaggctataaattcatccatactgtcttcatcaaaataacccttattttctttgctaatgtagtctagctgcaaacaccaaggatgagtccatattctacttaacatctgaaaatcttggaaaagctttgcacctgcctttcctcttccaccttcactattattgcccacacctgttaagtgatctaagtagtactgatagagcttgcactgaatagaagtcattctcacagctaacacatattcgtgttttggaggcaagaattttgttaatgctgtataatctttcctctgaacacatccagctaacatctcatagagaatgtgagcacgttttttcatcactctgacatctaccatggtagaatctgtacactgaccattttgaattggatttataaatctattcctgaactccttaatggatccaagtaaattttccttgataaaattaaccatacaatgatactcaattaggttattttgaagtggtgttcctgttaaaataatcctcctccttgatcgtatagaattcatagctttagaaacagcagatgcttcattttttagaatatggccttcatcacaaacaacaaaatcagggcctggatcaaccaaagctttgttaaatatttctttaagttttccgactcttcacattccttccttgagcaagattttctatacatctcatagcctatgatcataacaccaccatcttcttgccacctctgcagcatgtagcttctctcctgaggacgtttcacagttgctaattcagaaacctcaagcttctcatcatcttttaatccctcttgccacttctcaaattcattcatccaattcaaagcagtattaagaggacaaaccactaacgccgtgctgaaatccagtttgtcacacaaaagaactgtatgaagaaaacttaccacctgtaaagtcttaccaaggcccatacagtgggcaagaatgcatcctgaacctggagatttctttgtttttttcacagactcacagcagcaatcccacataaactgaacaccatctacttgatggggtttcaatttgataaccatatttctatgaacctgcactaaaggttctttggtttcttcatcttcatctaaaaccaacttggttgttattggacacttggtgggtgaagcatcttcaatttctatcacctctctcaatttttctcgctcacgctccctctcagcaatacgttttcgtctctcttcctcttccttaagagcattttgtgtttctgttctcagtttatcatctttaagaatcttccgaattttctttctgccttttccaggagacttggaatcatcattttcatcttcctgctgctgttactactgctactgctcttactactgctgtagtttttgctgctcttcttgctcagaattactcttgttttcactgaatgaatcttgcttgacccttaatacggcgacnnnnnnnnnnnctgtttatagctgcgctgattttcttccactcttgcttctttgcagaccttgttgttgggccgctggtcattcttcggattcactaacttgtttactaacttctgattcctgaaaataagaatctgttgatcttcactgctca

SEQ ID NO: 439864 - DNA, 1513 bp, Homo Sapiens
  misc_feature (20)..(20): n is a, c, g, or t
  misc_feature (197)..(197): n is a, c, g, or t
  misc_feature (455)..(455): n is a, c, g, or t
  misc_feature (457)..(457): n is a, c, g, or t
  misc_feature (1417)..(1417): n is a, c, g, or t
ccctgctgggagacagcaantgctccagcggggttatttgtccccagatattctcaaaaagggctaaggaatgacctgctgctgtccctcacccacctcccaccagcccccttccaactccacactgaccctgagcaattgttgtgtctggggtgctcccacttacccagactctagcagagccttggagccatganttgaaccctgctgcgtagtggtcagactgtacgtgggctggccgcgtggagtgggcgtctgttgcagaggggaatacagccatgcagccaggaattttgaggtcctggaggttgggtggggctcttgtcagggatgggagatgaatgcccttacgaaacaagctcagtaacctagcacggccctgagaggaaactccagagtcccagtcctgtctctcccacctcccctgcctcgctttctctctgcttttctggatnanggaatggtccgtttgtagatactccacagcccacacaactgggcctcctcccaagccccgccgctccaagaaagctgagtcggaaggccctgcccagccctgtccaggcccccctaagctggtcccctctgctgacctgaaagctccccactccatggtggctgcatttgactacaacccccaaggagagttcccccaatatggacgtggaggcagagctgcccttccgggcaggggatgtcattactgtgtttgggggcatggacgatgacggtttctactatggggaattaaatggacaaaggggcctggttccatccaacttcctggagggccctgggcctgaggcaggcggcctggacagggaacccaggacacccaggctgagagtcagagaacgaggaggagaagagtccagtgctagatggagatagatatatgtagagagagcaacatgactggggctgtaccacacaagggtccccagggcccccaggtgggccttgtacccccagctctggcagcgcccccaggattgaacgtggggagccccagggcagaagcgagaaggtgtggggtttcttctccaaggggaagcagctcctcaggaggctgggctctgggaagaaggagtgaagctgtggcccatcctgcaggcagaagaggccctgagaggcccccagatcactgtctctgctgagcaggtaaggctcagtctgggcccatagcccccgttgttctgcgtttacactgtggcattcagaggggatcatagagccttggttaaggtcagtagctcaatggctcccttaagctatgtactctctagagtaagcaccttcctgcctacaggagggggaaactgagcccacagtgagtatgttacttgaccaaggtcactgagccaggactggaccccagaccctcgcgttctgttccaccacctcgtctactagtgtnccacagtgctgcgctagttccttttgccacctttccagtcccaggacggcccctggagggagaaagaacctcgtgccccctgaaggctctggctgt

SEQ ID NO: 439865 - DNA, 1122 bp, Homo Sapiens
  misc_feature (712)..(712): n is a, c, g, or t
  misc_feature (722)..(722): n is a, c, g, or t
  misc_feature (724)..(724): n is a, c, g, or t
  misc_feature (732)..(732): n is a, c, g, or t
  misc_feature (746)..(746): n is a, c, g, or t
  misc_feature (773)..(832): n is a, c, g, or t
  misc_feature (852)..(852): n is a, c, g, or t
  misc_feature (892)..(892): n is a, c, g, or t
  misc_feature (930)..(930): n is a, c, g, or t
  misc_feature (932)..(932): n is a, c, g, or t
  misc_feature (956)..(956): n is a, c, g, or t
  misc_feature (962)..(962): n is a, c, g, or t
  misc_feature (976)..(976): n is a, c, g, or t
  misc_feature (980)..(980): n is a, c, g, or t
  misc_feature (986)..(986): n is a, c, g, or t
  misc_feature (1027)..(1028): n is a, c, g, or t
  misc_feature (1041)..(1041): n is a, c, g, or t
  misc_feature (1053)..(1053): n is a, c, g, or t
  misc_feature (1059)..(1059): n is a, c, g, or t
  misc_feature (1066)..(1067): n is a, c, g, or t
  misc_feature (1078)..(1078): n is a, c, g, or t
  misc_feature (1084)..(1084): n is a, c, g, or t
  misc_feature (1088)..(1088): n is a, c, g, or t
  misc_feature (1094)..(1094): n is a, c, g, or t
  misc_feature (1101)..(1102): n is a, c, g, or t
  misc_feature (1104)..(1104): n is a, c, g, or t
  misc_feature (1110)..(1110): n is a, c, g, or t
  misc_feature (1116)..(1116): n is a, c, g, or t
  misc_feature (1122)..(1122): n is a, c, g, or t
gattttgtgaaaatagactttattataataaaatgtctttttaaacaaattcccccaccattccacacccctggagaccaaggtcaaggtgggggttcagtcaaactatctcccaccacagcaaaggaaacatgcaaagacacactcacccctcagagggtgggggatggagtggatcgggtaacggcggagaacccctaccccactctgaacagggaatgtatgaaaatagctgcataaatctgtccttttctccagcccctggactccaacaggggttagaagaaaactatgcaaaagaacttgaatccaatgagcaaaataaggcaaacccaactccgctttcggccccgctggccccagggtctttgggggcgggaccttacaggggccagcaggccccggcagggaaggatggagcacgacgggggcagggtggggcccactttggcttggcctttctccttcctgggcctgtgcagtggaagcgaggtggaggaagctgaactgaggcactgagtatatacatatatacaggctccgcccgcctgcccgctggggagatggggctccaataaaatccagtgcaaactttccttcaggggggggaagacagggtcagggcagccagagccatcagggggcacaggctcctttctccctccagggcccgtcctgggactgggaagggtggcagaagggactagcgcanactgtggganantagtagangaggtgggtggacnaggacgcgagggtcctgggtccagtcnnnnnnnnnnnnnnnnnnnnnnnnnnnnnnnnnnnnnnnnnnnnnnnnnnnnnnnnnnnnggaggaaggtgcttctctanagagttcatccttaaggagccatttagctctgaccttcancaaggctctttgattccctctgaatgccaaagtgttangnagaagaacgggggctctgggccantctganccttccctgctcanaganacagtnatctgggggctctaagggctcttctgcctgcaggatgggcnnagcttcactcttnttccagagccancctccngaggagnngttcccttggngagaanccanaccttntggtttnncnggaggncccagntaatcn

SEQ ID NO: 439866 - DNA, 1797 bp, Homo Sapiens
  misc_feature (736)..(736): n is a, c, g, or t
  misc_feature (739)..(741): n is a, c, g, or t
  misc_feature (1366)..(1374): n is a, c, g, or t
  misc_feature (1422)..(1524): n is a, c, g, or t
  misc_feature (1527)..(1544): n is a, c, g, or t
  misc_feature (1692)..(1753): n is a, c, g, or t
actgctttcttgattttatttcaaaagtacacaaggtcacaaaactagagcaagttgtttttcttaacaaattttgttcttacaaatttcaaaatctgcaccattggatatataagccagaaatcgtacatacaaaatctgaaactgacactgtcagttctatactttgcacacgtgaagtgtcagaatattttcttcagtagtacaggtgtatttatcactaaaattcacaattagggaaaagaataagtgaatcaatgaattgtggttctcttaaaacttgtgtcattaaataagttagcagaaaacacaaagttctgttttgatggagcttttagtctcgatgaccaaaaccaaacccaactgatatgtactatattcttaaattataaaataagataaattataaaagttaaccataatgaataagaggctggggttatctgctataagataaatgatcagccttccctaaagataaataaactgaaccacaattcacaaatgtgtttattattcttccctgcttctataacatttataaaaggaatttgtgctcagttgtggtctattttagtgttaaaataggtaaatgagtaagaaatcctattgcagaacatgatgcctttattgctggaatatccaaaggcattcaaaatattaaaacttgcccagaacatttacactactaaacacaggaatgttataaagctctttgtacatatatatatataanacnnnatgtcacaagccactaagaagttaaaattgtgccaacattttctacaaactactctttatgtgacacatcaaagcattaaccacataaaatatgaactttttctgttcacactggaataaggcatctgaaagccctaaacactgctgaagtgaaaattagaagaaaaaactcaacattcacataacatcaaatgtacatgctgcacgcacacaaaagacactgagaatatttttaagaagccacacatcacagaatttgatagtcaacttcatgcaatgagttccttttatatttcatcaaaaggtttacttgcccctttacttgttccaaatttccaagattaactcttaaatttgaaaaagtatctttttaataaaaatcaggtatctctttatatccatgatctatatggatagtgatttggattttttcaatcaaactctccctaagatacactcaggctgtgtttccattttagaaagtccatggcagatagctcaaattaaaaagaagcaatttgtccagaataattggttactgtcatgaatagtagacatttttgggggtgggggagtgagaggctctctaacaagggaatcatattagttaagattaccagtaagnnnnnnnnntagctgtaaactactccatattcaaagtacagaactggctggatgctnnnnnnnnnnnnnnnnnnnnnnnnnnnnnnnnnnnnnnnnnnnnnnnnnnnnnnnnnnnnnnnnnnnnnnnnnnnnnnnnnnnnnnnnnnnnnnnnnnnnnnnttnnnnnnnnnnnnnnnnnngtacagaactatatattctacagtaacatttctcttcaaattatcctctgtaacctagagatggatggtatcaagtctctcagttataaagtagaataaaatggctttgctgttaagatgcagtactgggccgggtgcagtggttcannnnnnnnnnnnnnnnnnnnnnnnnnnnnnnnnnnnnnnnnnnnnnnnnnnnnnnnnnnnnnaccatcctggctaacatggtgaaaccctgtctctactaaaatta

SEQ ID NO: 439867 - DNA, 1562 bp, Homo Sapiens
  misc_feature (49)..(65): n is a, c, g, or t
  misc_feature (68)..(68): n is a, c, g, or t
  misc_feature (310)..(350): n is a, c, g, or t
  misc_feature (1333)..(1334): n is a, c, g, or t
tgtcatacatggctttcattgtgttgaggtatgtttcttctatactccnnnnnnnnnnnnnnnnngtnctgaagggatgttaaattttatcacgtgcttgtttggcattaattaaaatgatcatatggttttgttcttcattctgttgatatgatgtattacattgattgatttgcatgtgttaagccatccttgcatccctgggataaatcccacttggtcatgatgaatgatcctttactgtgttgttgaaatcactatgctgatattttgttgagaatttttgcatcagtgttcatcaggccctgtnnnnnnnnnnnnnnnnnnnnnnnnnnnnnnnnnnnnnnnnnggtatcagattaatactggcctgatagaatgagtttggaagtattctatcctccactatctttcagaacagttcgagtaagattggtcttagttctttaaatgttggtagaaaccatcagtgaagtcattggatctcaggcttttctttactgggagacattttattatggctttgatcttgttagcttgttattggtctgttcaggttttggattttttcatggttcaatctgggtaggttgtatgtgtctaggaatttagccatttcttctaaattttctaatttattgatatgtaattgccatagtagcaactaatgatcccttgaattttgcagtatcagttctaatgtcttcttttccatctctgatttaatttattggggtgttctctcttgttttcttagtctggcaagagttttgtcgattttatttatgttttcaaaaaaccaactttttggttcattgatcgtttgtatcgtatttcttctactaattttgggttgttttgctcttgattttctagctaagatgtattgttaggttgtttacttgaagtttttcttcttttttgatgtaggcatttatagctataaatgtccctcttagtgttgctttcactgtatctcataggttttggtatgttgtgcttccattatcatttgttttaagaaaattttcaatttccttcttaatttctttattgacccacttgtcattcaggagcatattgtttaaattccgtgtatttgtacattttccaaaatttctcttgttattgatttctaatttcattccattgtggtcagaaaaggtgcttgatgtcatttcagttttttgagtgttttaagacttctgtagggctgaacatatggtctgtttttgagaatatccatgtgctgaagagaagaatgtgtattctgcagccactgaatggaatgttctgtatctattgccctatagtgtagattaaattggatggnntctttgttggtttttcgcctggaagatctgtccagtgtttaaagtgggatgttgaagactccagctatcattgtatttgagcctatatctctatagggcttggtaatattggtttatatatccgagcgcctcaggggtttaggcatataatgttacaaatgggcatttcccgccaaggcgtgggaacaaacccacctgtaatcccagctttctggggaggttgaaggc

SEQ ID NO: 439868 - DNA, 2230 bp, Homo Sapiens
  misc_feature (5)..(5): n is a, c, g, or t
  misc_feature (81)..(82): n is a, c, g, or t
  misc_feature (84)..(84): n is a, c, g, or t
  misc_feature (99)..(99): n is a, c, g, or t
  misc_feature (101)..(101): n is a, c, g, or t
  misc_feature (103)..(103): n is a, c, g, or t
  misc_feature (112)..(114): n is a, c, g, or t
  misc_feature (120)..(121): n is a, c, g, or t
  misc_feature (123)..(123): n is a, c, g, or t
  misc_feature (144)..(160): n is a, c, g, or t
  misc_feature (165)..(165): n is a, c, g, or t
  misc_feature (167)..(167): n is a, c, g, or t
  misc_feature (174)..(174): n is a, c, g, or t
  misc_feature (179)..(179): n is a, c, g, or t
  misc_feature (185)..(185): n is a, c, g, or t
  misc_feature (213)..(241): n is a, c, g, or t
  misc_feature (243)..(243): n is a, c, g, or t
  misc_feature (1522)..(1523): n is a, c, g, or t
  misc_feature (2054)..(2100): n is a, c, g, or t
  misc_feature (2198)..(2198): n is a, c, g, or t
  misc_feature (2200)..(2201): n is a, c, g, or t
  misc_feature (2205)..(2205): n is a, c, g, or t
  misc_feature (2212)..(2212): n is a, c, g, or t
aaaangttacaattaaaattcaaaaaaataaaatcccttccgggacctcagcccctcattccccagcccccacctccaaannancgccccgccggtggngncngggggaaannngcaaannanaaaacagaaaaaaaccccacnnnnnnnnnnnnnnnnnctcangngggacangttgncaagantctttgaggcagacggaggaggtggtcnnnnnnnnnnnnnnnnnnnnnnnnnnnnngnggggaacagggacagaggtctggggatcaggtagggtctccacctgaccccccgccaccaggagctgggagtgcggatgtgtcctccccaaatgtccctgcgcaggcactgcaagccctcttggcagcctggtgctctcgttgggcctccacctcggccgccgtggaggggaggcccgggaggcccggtgcatgctctgaaacagacagggtcctccaagcagggagaagggggctttgaagagccagggcagaggggctgctgtggcttacagcaaccacgaattcctcccgggacgagaactcatccggagccacaggtgcactgcctgtggactgtgcctgctgtgtcaaatacactgcctccagctcggcctccagggatgcttcctgtgccataacttccaacgactcctgggccggggatgcctcccaggctatggttgcatccagagcttcctcgactcctgacaatccctgcgcagtcaatgcctcttgggctgtgcacggtatctgggccattgatatttcttcctcctcttcctcctccagcgtcagctcaaactggaacttgtcaggcaggggtgggtggcctggcccccttgactcctcctcgggtggcggagatgggctctgccggatggcgctgtagtaccagtcccggttgtcctccaaagtgtccaagatctcctgggcatctgggtggacaaggtccgcccaggtctcccacaatgggtgcacaatgtagtcaataaaacccacctgagacttctccacggaggcagtgtgcttgtcacacatggggctgatttccatgccacgctcgcgctctcggtcaccctgctggaagaactcggccatgatgcggtctgtccactggcggtacagctccagcggcttggtggggttgctgaggtcggcacagtgcaccatgttccggaggacctggatgcggtcggagtagttatctagcaggaggacccctgagctggtcactttcttggtctccaccatggtcttcaggtcagccaggagggtcatgtgcttggacatgtccgtggccagcacctgcgggcaagggggcgtcactggggccgctgacacccgccccccagactgacccgggcctctgaagttttcaccaggtagaagccgcccgctctgtccaggttgagggttcctctgggactcagacccactcctccccaaagccctcgactcctaggcttcctttcccgctccgtcccgccccagccccgcccaccatgttcgatgaccanntcttgcgtaggctctgccgctgggcgcttgctgaggttctggaagatgtcgcagttgttcttctgcagcagcttgaagcccacggccaggtggtgattctcgagcaccgactcatcgttgtacatgagcgccagctccgaatttgtgttgatgaggaactggttggagaccccagggtgatccacatcgtggatggcagccgcgaagagggcggcgagaatctccaggtccgtgaacactgcccaggaatgttgtggaaatgtactctgagacctggtttccggacctgctcatttctgacaggtgtgtgagctcacggttcaacatccttttgaactggtcccaccagcccaccagccaaggcttagagcaggtctcgcagaagaaatccaccaagggcatcttggagacttagcccgcctggggctgctgcacacagaggctgggcttggggagtcccggggttaacaaccactggggagggggtgccgggcaggtgggtagtggaagggggagccgcggaggggcctnnnnnnnnnnnnnnnnnnnnnnnnnnnnnnnnnnnnnnnnnnnnnnncagcagccctggttacatggcccgccagccctggccccaacgggcccccccgcggcagtgggtggaggcggtggggggtccgtgcccatgggaggggngnngggnaagggtnccaggaggaggctgcgga

SEQ ID NO: 439869 - DNA, 790 bp, Homo Sapiens
  misc_feature (556)..(556): n is a, c, g, or t
  misc_feature (598)..(598): n is a, c, g, or t
  misc_feature (605)..(605): n is a, c, g, or t
  misc_feature (639)..(639): n is a, c, g, or t
  misc_feature (656)..(656): n is a, c, g, or t
  misc_feature (725)..(725): n is a, c, g, or t
tgctgtcggcccgagctttggactgcgagactgctctaagccttggctggtgggctggtgggaccagttcaaaaggatgttgaaccgtgagctcacacacctgtcagaaatgagcaggtccggaaaccaggtctcagagtacatttccacaacattcctggacaaacagaatgaagtggagatcccatcacccacgatgaaggaacgagaaaaacagcaagcgccgcgaccaagaccctccctagccgcccccgtcccctgtaccagacttacagcccatgtcccaaatcacagggttgaaaaagttgatgcatagtaacagcctgaacaactctaacattccccgatttggggtgaagaccgatcaagaagagctcctggcccaagaactggagaacctgaacaagtggggcctgaacatcttttgcgtgtcggattacgctggaggccgctcactcacctgcatcatgtacatgatattccaggagcgggacctgctgaagaaattccgcatccctgtggacacgatggtgacatacatgctgacgctggaggntcactaccacgctgacgtggcctaccataacagcctgcacgnagctgangtgctgcagtccacccacgtactgctggccacgnctgcactagatgcagtnttcacggacctggagattctcgccgccctcttcgcggctgccatccacgatgtggatcaccctggggtntccaaccagttcctcatcaacaacaattcggagctggcgctcatgtacaacgatgagtcggtgct

SEQ ID NO: 439870 - DNA, 1090 bp, Homo Sapiens
  misc_feature (105)..(127): n is a, c, g, or t
  misc_feature (195)..(246): n is a, c, g, or t
  misc_feature (359)..(368): n is a, c, g, or t
  misc_feature (558)..(566): n is a, c, g, or t
  misc_feature (831)..(889): n is a, c, g, or t
  misc_feature (908)..(980): n is a, c, g, or t
  misc_feature (1022)..(1042): n is a, c, g, or t
  misc_feature (1056)..(1056): n is a, c, g, or t
ggggggggagtccaaagccccctcttctatggcccggaatgtttctgtgggagaaaagactatggcgccctttttcattttccccctggggggccccgccgcccnnnnnnnnnnnnnnnnnnnnnnnttttctctagggcgcaggagggccgaccatttaatagtttctttttagcgccggggtagacggggggnnnnnnnnnnnnnnnnnnnnnnnnnnnnnnnnnnnnnnnnnnnnnnnnnnnnattgtgttttaaaaggcttaaaatgtattttaataggttgatgctgcattactgctccatttttcagaaaaactccaaatatatgagacaaatcaaacacagtacaccaatgnnnnnnnnnntgcacagcatgactacctaagataggcgagtctaagagctactgtcagaccttcagtatacagtaaccctgttcccaagattgtactaggcctatcaagaaaagctgtgaacagcaacatcatagacacaaaagggtcattcctgggtgtcctcacccaagaaaaagatggaggcaagttaacacaagannnnnnnnnaaagatacactaaaatgaaaatctctaagagaaaatgtcttctttaggacatgaaggggtaatatatggggtataacagaaccgtatgtacgctgcctgtgacctttgtggacgtttgcctgaattctcacctgggagtgaatggagcaatggggctaaggtcattgggggatgtttggtttttgtggtgtatgtggcagtttctctggggctgggggagtgtaaggataagaagcaagtgaggttgggcacggtggctcacccnnnnnnnnnnnnnnnnnnnnnnnnnnnnnnnnnnnnnnnnnnnnnnnnnnnnnnnnnnnatcaacctggacaagcttnnnnnnnnnnnnnnnnnnnnnnnnnnnnnnnnnnnnnnnnnnnnnnnnnnnnnnnnnnnnnnnnnnnnnnnnntccgtctcgggggcggggcaagcaaatgaaacaagatggacnnnnnnnnnnnnnnnnnnnnnctcgagactagttnctctctctccctcgtgccgaattcgccacccagc

SEQ ID NO: 439871 - DNA, 1779 bp, Homo Sapiens
cgggatcgcagtgaccccaaccactccctgcagggcatctagcagccccggccggcgcctcctcgaggttccaaaagatgccgcctggtcactctgggaacctggatttcaccggctccaccaaattagtgcctcttagatgatgtgatgtttactttgactcaagcgggggctcccggggtcagtgttcaagaaggaaatgtcttgttgttgaagctacagaagcccaggccagggctcccactggctgtagctgtgctctgggtccccaggtccctgcgcagccaccagggccccaccagaccatgggttccttattctggacaaaccctcctctgctggaaccctggactttggccccagtccctttaagagctgaaagggctgtgctgagagcactggcctctgcactcaactggaaccaattttcaccatgattttaaaaattaaaaaaacctggcagagcccgactagaaagggacggcctctcccctcctacctgccaccgctggggaggcacagagctcgccagcgtccctggagtcccctcaggaatggaaagtggagtgcccttgtctggtagcaccatgtgggagggacccagctgggcgcagcgccctgtggccttttagatccagacctccctgccggatgccccgaggcgggaggccggctgtgctgcaggaacccatctccagatgccaaaggacttgaggggcagctgacaatcgctgtgtcccggcagatccgcagctcgaaaaagaacaagccacagaaacgggctcgctcgtgccaggacacagcagtgtctttcaaaaaatcaaaaccagaagttttatcagcagcaggaaggatgtgggactctgtccaagttcaccgtcaccatcaagccactggctgtggaaggagtttgtccaacagggtcagtgtcacagccacaacttcagaaaagcagccatcccgcgtgtcgtccaaacagcagtgcctgcgtcccgctccacggagtcttccagaacacctccctctgaactaatcccggagcaccccacccccagcgagtcccacctggacctcttcaaagtcaaaactcttctctcgggacaaacaaatattcgggactttcgaagccctgaacttgagacaccaagtttgtctccatggaaacacgtagccgctgcagttggacagctgcgtgctggagttctgtccccaaaccaactgcagagaagaaagacgagcctcggcccaggacgcgatttctaacgaaatgcaatagttttctctttttggaaaaatgtttataccaatagttttgtgcgctaattgttattagaacgtttcttatgaatgtgtacattgcagtatattcagtcccaaatgttttgttctcattcacacagaaggtactaatgtcagctcacgtggcctttaaaaacctacttccccgcccgcaggagctcagagcatcgctgggcctgcgccagagtgaggggtgcaggaagacaaagacgcgtgctcactttagaaacgaaaagctgggaataatcacactgtttgtctggtcgtatagcccaaaccttagttgaaatcagacagaaagaatgtctttaaaatatacatctcctctccttggagacactgaagctcacagttaacggattgtaatgcccggcttttcctcactcctggtaaccaatacaagctggtttctgcctttggctctggcctgtctttccgatccacgaggaggaacagaggaagcagcggagccacaagcct

SEQ ID NO: 439872 - DNA, 761 bp, Homo Sapiens
gtactggagatggctgttgagtaaaccgcttttgtgtgatgtgattccttcgcttttttggaggttttcaatcgccatttcaagcgtggcggtcgatgagcgtgagttttgggccagggagtgtctggtgctgtccatccccccgtggatgagataggctcccgcgctggagacgatggggctccccccgacatccatggtgatgcccaccatgctgtgggaggggaccgctgtcggggacgaggctgccacggtcacctgggcaccgcctggggcctcgaagtaagaagccgtgctgctgggggcgtacatctgaggctcggggttgtaggtgtaggctgttcgtatggctccattggtgtagacggcgtctcccccttccacgtactgcacctgggcaggatacacgtgctgcaccggctgcacctgctggggtacctgctgaactctggggagggagatcggctgcatctgggcccctttgggattggagctggctgcctggaccaacaccctctgcggggaggctggcacaggcggggctgccgccgagggacgcagagccacggacgctggcgaatccgctccaccctcggaattctgcatgctcaggtctggagttcgggccgggagttcgggcagcggctcccgcggcggcggcagcggctgctgcgtgttggtccccgttggtaagtaacagtctccacggctacagtctctatggcggcggcggtgcggcggcggccgctcctcactccgct

SEQ ID NO: 439873 - DNA, 1046 bp, Homo Sapiens
  misc_feature (779)..(779): n is a, c, g, or t
  misc_feature (879)..(879): n is a, c, g, or t
  misc_feature (898)..(898): n is a, c, g, or t
  misc_feature (916)..(916): n is a, c, g, or t
  misc_feature (931)..(931): n is a, c, g, or t
  misc_feature (952)..(952): n is a, c, g, or t
  misc_feature (973)..(973): n is a, c, g, or t
  misc_feature (989)..(989): n is a, c, g, or t
  misc_feature (991)..(991): n is a, c, g, or t
  misc_feature (997)..(997): n is a, c, g, or t
  misc_feature (1001)..(1001): n is a, c, g, or t
  misc_feature (1007)..(1007): n is a, c, g, or t
  misc_feature (1009)..(1009): n is a, c, g, or t
  misc_feature (1026)..(1027): n is a, c, g, or t
tttaatctgaagtgtagacttcatcctcacgttagaaaactccatcttttttttaatccctaagttctttatcaaacctttatgttaaaaatataaataagtctcatacaaagttcatgtgaatacctctctgagacgcattttcaacattcatcaccgttcacacggccccgctcctggggccaggtgccagtgcgtgccggcccctggcgtgacccgtcggctcgctgtcctgatgggctacatgtgtgcacaggaaaagcaagtcactaccactagtgacagtatttcagctgttctctggacccctcctctttgctggcccaggtggcacaagggtcccatctccctggcaggtcttagccggcacaatccaacgctgcaaccggctggctctaggccagcatctcttcttctgagtctctgcctcctcctccaagcagatgcaggctgtcatcttcagatgcttctgcctcctcctcacttcccagcgggtctagggagcgttttgtgccccgctgcttggaaactgctagtgcgtactgcatgttatagtggttccagctacagctgtcaatcacacagggatggtcaatgccagcaacgcccaggccctggcctgtctctgcacccaaccacctcctctgtgacccctgagaaaagcagcaggggctggacatgccggttcctccaccccagcagccatttttttcctcttttccctgccccaacaatctggttctgccccatccagccctggggcagcaaaggccttcaanggacccaaggacccaactgtaacatcccatccctttggggtcatcctggcagctcagcccttccgctgggcccaatctagatggcttcacagcgagttcnccaaacacttacgagagancgctgcagactattgtgntgttgtggaggagangggaggacgcacgctctgatnacgtaatttctgagttatggnataaggagaaacgtgncnaccacncttncatagnangagactgagataatggnnagaacgaggacccccacca

SEQ ID NO: 439874 - DNA, 656 bp, Homo Sapiens
ttttgggcttcaaatcaagtttaataaataaaacagcaaaggggggttcaaggcagttatcacttcacagtgtggtccttggtggggtgagggatggtcgagtccaactcggaaaggggctcgagcacaagaggccggacgacacccggggcagggcgcgccgccgcccacggaggaccccactccaacgtgtaaacagaaacagaaacgaacgagagggccagggaggagggggaccaggactccaagccatcttgctaggaagcttcccacagaaggaagacctgcagggctggggaaacaggctggagtctggcccctgcgtggccagcagggccggctcctccggaggctccctgccttggtaccgggggaggacagcaaaggggatgtaaatcacctgtctcctcaaacccacgcctggggttgctgagggaccccaccccaaccgctcaggatcggggagcagggatggagggggaagaggcaggtgggggtgtaaagtgcggctttccctgaagtggagacgatggggtgggaaggcgaggttggggtggtggccggccagtgaggtatatggttttgggcccacggggtttgcactgagtagcagttgcccacgaaccctagggctggggtagtcctgggtccttgcc

SEQ ID NO: 439875 - DNA, 1672 bp, Homo Sapiens
  misc_feature (4)..(4): n is a, c, g, or t
  misc_feature (7)..(9): n is a, c, g, or t
  misc_feature (15)..(15): n is a, c, g, or t
  misc_feature (32)..(33): n is a, c, g, or t
  misc_feature (47)..(48): n is a, c, g, or t
  misc_feature (88)..(88): n is a, c, g, or t
  misc_feature (153)..(153): n is a, c, g, or t
  misc_feature (179)..(179): n is a, c, g, or t
  misc_feature (181)..(181): n is a, c, g, or t
  misc_feature (213)..(213): n is a, c, g, or t
  misc_feature (256)..(256): n is a, c, g, or t
  misc_feature (267)..(267): n is a, c, g, or t
  misc_feature (296)..(296): n is a, c, g, or t
  misc_feature (300)..(300): n is a, c, g, or t
  misc_feature (306)..(306): n is a, c, g, or t
  misc_feature (309)..(309): n is a, c, g, or t
  misc_feature (343)..(343): n is a, c, g, or t
  misc_feature (354)..(354): n is a, c, g, or t
  misc_feature (358)..(358): n is a, c, g, or t
  misc_feature (368)..(368): n is a, c, g, or t
  misc_feature (394)..(394): n is a, c, g, or t
  misc_feature (396)..(396): n is a, c, g, or t
  misc_feature (401)..(401): n is a, c, g, or t
  misc_feature (406)..(406): n is a, c, g, or t
  misc_feature (410)..(410): n is a, c, g, or t
  misc_feature (412)..(413): n is a, c, g, or t
  misc_feature (415)..(415): n is a, c, g, or t
  misc_feature (418)..(418): n is a, c, g, or t
  misc_feature (422)..(423): n is a, c, g, or t
  misc_feature (438)..(438): n is a, c, g, or t
  misc_feature (443)..(443): n is a, c, g, or t
  misc_feature (447)..(447): n is a, c, g, or t
  misc_feature (451)..(451): n is a, c, g, or t
  misc_feature (456)..(456): n is a, c, g, or t
  misc_feature (463)..(463): n is a, c, g, or t
  misc_feature (468)..(468): n is a, c, g, or t
  misc_feature (473)..(473): n is a, c, g, or t
  misc_feature (477)..(477): n is a, c, g, or t
  misc_feature (483)..(483): n is a, c, g, or t
  misc_feature (491)..(491): n is a, c, g, or t
  misc_feature (503)..(503): n is a, c, g, or t
  misc_feature (517)..(518): n is a, c, g, or t
  misc_feature (521)..(521): n is a, c, g, or t
  misc_feature (524)..(524): n is a, c, g, or t
  misc_feature (527)..(527): n is a, c, g, or t
  misc_feature (530)..(530): n is a, c, g, or t
  misc_feature (534)..(535): n is a, c, g, or t
  misc_feature (539)..(539): n is a, c, g, or t
  misc_feature (554)..(555): n is a, c, g, or t
  misc_feature (559)..(559): n is a, c, g, or t
  misc_feature (562)..(562): n is a, c, g, or t
  misc_feature (613)..(613): n is a, c, g, or t
  misc_feature (620)..(620): n is a, c, g, or t
  misc_feature (626)..(626): n is a, c, g, or t
  misc_feature (632)..(632): n is a, c, g, or t
  misc_feature (649)..(649): n is a, c, g, or t
  misc_feature (653)..(653): n is a, c, g, or t
  misc_feature (823)..(823): n is a, c, g, or t
  misc_feature (831)..(831): n is a, c, g, or t
  misc_feature (833)..(833): n is a, c, g, or t
aganaannnccaggnatccaataatggttagnnctttcagaaggggnncccacaaccccagccctagttcaaagctggacacattggngctcaaacagctgcctctcaccacgaccggaaatgctgacaaatgtgtatatattatcaatcccngggggcttgggtttaaaataaaattncnttattgcgggtctccaagtccttaggatttgnccttaaaggtactagaagatgagtaagaccacacacaccaagnctatgtttagnctttagagtaaactagcaaatggccagtntgtnctaggntgnattgcatcagacatcacagtacatgaagaaaatntgctttttgtnaaangccaccaggnattttagatcccgtttaccatgaggngnggggngcggngggngnncnggngggnnggtgagtggaaaggnggagngggngggngggcnctttggnggggntgggnacgntgcaangggggggngggactgggaantggagggggagggnnatntanaanggngtgnntagnaaagtgacttgaaannggtngtnaaccacttcccagggatccctcccctctcccaccaaaacaaacaaacaaanaacaacnacaacnaaaacnctgggaattatcttganagtnaagttaaaactatgtggtggagaagagagtgcttgttccaggtaaaggacttcaagataatttacaggcagatttatttttattagtaaaagtcacaaataggaaaagacttattggctgactttgagctgtgtgctttttaaaatgtctctattattacgttaacaaanaaaaaaantncaagcaagttttgcttccagttttgaatcttccagcaacagttggtgaaatcaacaaggtattaaaatgaaacccagcaaaacccagtcagttctttccagttgtctgcctgtttctttctagtcaccttgaattcaattcccaattagctgaggacaacatgccggtcaaagacagactttcgctgctcttggacttgaagcttccagcgctgctgtgcatattctaccttgttcagcacgttggctcgactgcgggagcgggctagcacatcgtgtgcatttgcaaaaggctggtgatccccaatatcatcatcactctgtatcaactgtgcatgtccaaagaggcgcctcttcagtatgggctcaaccagagtaagatataccatgtacagaagtagaaggcccaaaatggagagataaattataatggtaaccttgattgtgacagagcttctttcttcatatttgcattcacagcgtagacagtatgcttctacatcaggcccccgcacaggcatgggctccacgacatgaaggcaatcacaatctttctgagatatgttcttattataaatatgcccagaattttctttatagggagggcagatacatttacatctgacatcctcgaaattcttggcggcgtctgacagctgcgccagcagcagcacggaaagcgccaggcacgacaggctgagcaaggagccaagccgaagaaggcctccccacagggtcgccatcgctgggggcccagcggtcccacagcccggagcccccgcgaccggctcccggctcgggctcaggctcaggctcaggcatcccgggaattccggaccg

SEQ ID NO: 439876 - DNA, 1661 bp, Homo Sapiens
  misc_feature (640)..(644): n is a, c, g, or t
  misc_feature (867)..(875): n is a, c, g, or t
  misc_feature (1532)..(1532): n is a, c, g, or t
gatgtttcaaaaattatttttattgttacattccaaagacaaggaagaaaaaagccagttatccaataatggttagacctttcagaagaggcacccacaaccccagccctagttcaaagctgcacacattggagctcaaacagctgcctctcaccacgaccggaaatgctgacaaatgtgtatatattatcaatccagggaggcttgggtttaaaataaaatttctttattgcaagtgtccaagtccttaggatttgtccttaaaggtactagaagatgagtaagaccacacacaccaagactatgtttagtctttagagtaaactagcaaatggccagtttgttctaggatgcattgcatcagacatcacagtacatgaagaaaatctgctttttgtgaaaagccaccaggcattttagatcccgtttaccatgaagtgcagacacagcagatacccagataatacagtcagtgcaaaagtcaaatgagtaagtcagctctttgatgaggctggctacactgcaaaatataaatgaaactcgaaaatagaaggtaaggtctatttacaaaagtttgtttagttaagtgacttgaaaaaagttgttaaccacttcccaggcatccctcccctctcccacnnnnncagacggacgacctttactacacctactaaccctgaatattttcttgagagtctagttaaaactatgtggtgaaaaagagagtgcttgttccaggtaaaggacttcaagataatttacaggcagatttatttttattagtaaaagtcacaaataggaaaagacttattggctgactttgagctgtgtgcttttaaaaatgtctctattattacgttaacaagnnnnnnnnntcaagcaagtttttgcttccagttttgaatcttccagcaacagttggtgaaatcaacaaggtattaaaatgaaacccagcaaaacccagtcagttctttccagttgtctgcctgtttctttctagtcaccttgaattcaattcccaattagctgaggacaacatgccggtcaaagacagactttcgctgctcttggacttgaagcttccagcgctgctgtgcatattctaccttgttcagcacgttggctcgactgcgggagcgggctagcacatcgtgtgcatttgcaaaaggctggtgatccccaatatcatcatcactctgtatcaactgtgcatgtccaaagaggcgcctcttcagtatgggctcaaccagagtaagatataccatgtacagaagtagaaggcccaaaatggagagataaattataatggtaaccttgattgtgacagagcttctttcttcatatttgcattcacagcgtagacagtatgcttctacatcaggcccccgcacaggcatgggctccacgacatgaaggcaatcacaatctttctgagatatgttcttattataaatatgcccagaattttctttatagggagggcagatacatttacatctgacatcctcgaaattcttggcggcgtctgacantgcgccagcagcagcacggaaagcgccaggcacgacaggctgagcaaggagccaagccgaagaaggcctccccacagggtcgccatcgctgggggcccagcggtcccacagcccggagcccccgcgacc

SEQ ID NO: 439877 - DNA, 918 bp, Homo Sapiens
cgggtttgaacagggaaaaaaaggaaattccaggccaaggtttttgcttcccagttttggaatccttccaggcaaacagttggtggaaatcaaccaaggtattaaaaatgaaaaccccagcaaaaacccagtcagttctttcccagttgtctgcctgtttctttctagtcaccttgaattcaattccccaattagctgaggacaacatgccggtcaaagacagactttcgctgctcttggacttgaagcttccagcgctgctgtgcatattctaccttgttcagcacgttggctcgactgcgggagcgggctagcacatcgtgtgcatttgcaaaaggctggtgatccccaatatcatcatcactctgtatcaactgtgcatgtccaaagaggcgcctcttcagtatgggctcaaccagagtaagatataccatgtacagaagtagaaggcccaaaatggagagataaattataatggtaaccttgattgtgacagagcttctttcttcatatttgcattcacagcgtagacagtatgcttctacatcaggcccccgcacaggcatgggctccacaacatgaaggcaatcacaatctttctgagatatgttcttattataaatatgcccagaattttctttatagggagggcagatacatttacatctgacatcctcgaaattcttggcggcgtctgacagctgcgccagcagcagcacggaaagcgccaggcacgacaggctgagcaaggagccaagccgaagaaggcctccccacagggtcgccatcgctgggggcccagcggtcccacagcccggagcccccgcgaccggctcccggctcgggctcaggctcaggctcaggctcaggcacaggcttgggacccggctggggatcctccgcccgcacttccgtccc

SEQ ID NO: 439878 - DNA, 655 bp, Homo Sapiens
agcgggagagttagaaagccgacggggtgctgtggtcaggaggcgcgtgggcggcagaatttcgaggatgtcagatgtaaatgtatctgccctccctataaagaaaattctgggcatatttataataagaacatatctcagaaagattgtgatggccttcatgtcgtggagcccatgcctgtgcgggggcctgatgtagaagcatactgtctacgctgtgaatgcaaatatgaagaaagaagctctgtcacaatcaaggttaccattataatttatctctccattttgggccttctacttctgtacatggtatatcttactctggttgagcccatactgaagaggcgcctctttggacatgcacagttgatacagagtgatgatgatattggggatcaccagccttttgcaaatgcacacgatgtgctagcccgctcccgcagtcgagccaacgtgctgaacaaggtagaatatgcacagcagcgctgggaagcttcaagtccaagagcagcgaaagtctgtctttgaccggcatgttgtcctcagctaattgggaattgaattcaaggtgactagaaagaaacaggcagacaactggaaagaactgactgggttttgctgggtttcattttaataccttgttgatttcaccaat

SEQ ID NO: 439879 - DNA, 925 bp, Homo Sapiens
  misc_feature (35)..(35): n is a, c, g, or t
  misc_feature (842)..(842): n is a, c, g, or t
ttttttttacattatattaaaatttattttctatngtatacccaaatttttaagtattagatttacttagaaattcaccagtgttatcattatacaattggctggaattaacagttgcaatacagttattctagcttttcatattcaatttgaatgatcagaaaagtatattagtcacacagaattaaatattttagatagtaagaatcttacactttattagataataaaacataattgatatttgcttaagtaacaaaaaagttaagaaattgggttataagcaaaggaacataagtgtaaaatgtgtagaaagataaatattttccaaataaaattctaataaaaggctaaacattctcaaatattttacatacatgaagaataaattatttctggttaacatgtttttgccttagtgccaaaaaagccagaacaaatttgataagctcacattaaaatcaaagttttctagatatgaattctatataccatctctatatttgtttagaattttgcaaaattcttagaagattgcatgttagggtgggggaagataaatgcttgccaatactgacatggttaattaacagacaggcttgaaaggagaaggctagaagagggaagattatgtcactaagcatagctacaaaaggaaaagccacatggaagcagagacaaaggcaatcccgacacacagaggcatgtttgttgcggctcagggtttctgtttttcaagtgttcagagacgaattccagcaagacttctggtttgagtcaagcctttcaaccgagttgcttggcatacttaacgggaaaagcgagtaccttcagaattactntgctagatataaactagaaactggatgacagtaaacaatcagaaaccgaagcatggaaatcgagttagactcttagaaagaca

SEQ ID NO: 439880 - DNA, 1177 bp, Homo Sapiens
  misc_feature (56)..(56): n is a, c, g, or t
  misc_feature (62)..(62): n is a, c, g, or t
  misc_feature (77)..(77): n is a, c, g, or t
  misc_feature (133)..(133): n is a, c, g, or t
  misc_feature (154)..(154): n is a, c, g, or t
  misc_feature (223)..(223): n is a, c, g, or t
  misc_feature (228)..(228): n is a, c, g, or t
  misc_feature (410)..(422): n is a, c, g, or t
tttttaaatgctgctaatcattgttataaattaaacaaaagatttacaaattgtgnacctgnattatttttcttgangtgggaaacatgattgcttttgacttcgtcatttcagtggtatcaaaaagtgaatnactattgtgggctggagttanttttgtactttctacactttatccactgccggttgctttaccaaatcctctgctcagcactggagactnggaanacatctgtctctgactgtcctcctccacctcccaccaaagcaccacagggatcatgaatatccctaattatactggcctccatcaaaacacacacacatcatgaaggagcggtcacctctgtgtgttccaaggccactttcctttcatcaatcctgagtattgactttttaaacttgcagcnnnnnnnnnnnnngtttacccattttcctttgaatcatctgactgcatttctttcttagagatggccacagccaaaccgtgctttttggctgtaggtcttttggctagaggcccttcagttttaggaaagcatcttttactatggaggcaacatttcatgttatttaactttatggcttaaaagcaacctcggaaaatcttctggcagagattgcagacgccaagtttgaagtggaatcgcgtgtcaacaataaagtcatggcccttcattaggaggttttcccattgcacaggagagaccagttgcccagtttgacttctttgatgttcacagcgcctggatttgatgcttaatgggtttgtgactgcagtgaaatgccgttcattaacttttgttatatgttgaattgtcttcagatgaggtatgtatcctatttgagcaaagaaaaaataattcatttgggccttataatttcaaaatttggagtcacattgggatggaattaatacacccattagcttaacaaacaagaaacaaaccaaaaagagagagagatgaaagatatgttgggaaaaatgaagttcataagagactttagctgtgctgtttagcctactaaaaattcatcttgtaggagcacttagctctatgtttatatctattcgcataaagcagatatgaattttaaatgattattacatgaatgcaagaaaatcagtatctgttaaaggtatgttattctggtcctgcttgggtattttaatatg

SEQ ID NO: 439881 - DNA, 1026 bp, Homo Sapiens
  misc_feature (637)..(637): n is a, c, g, or t
  misc_feature (809)..(809): n is a, c, g, or t
  misc_feature (835)..(835): n is a, c, g, or t
  misc_feature (838)..(838): n is a, c, g, or t
  misc_feature (868)..(868): n is a, c, g, or t
  misc_feature (893)..(893): n is a, c, g, or t
  misc_feature (895)..(895): n is a, c, g, or t
  misc_feature (897)..(897): n is a, c, g, or t
  misc_feature (927)..(927): n is a, c, g, or t
  misc_feature (931)..(931): n is a, c, g, or t
  misc_feature (933)..(933): n is a, c, g, or t
  misc_feature (944)..(944): n is a, c, g, or t
  misc_feature (957)..(957): n is a, c, g, or t
  misc_feature (973)..(973): n is a, c, g, or t
  misc_feature (982)..(983): n is a, c, g, or t
  misc_feature (990)..(990): n is a, c, g, or t
  misc_feature (998)..(998): n is a, c, g, or t
  misc_feature (1009)..(1009): n is a, c, g, or t
aagatctgaagataatgcatttaataaatcctaactattcacattattgcatctgtatatattttaattttgtacaacattgtctttttcactagtcacacgaaaaatacatgaaagtgctctgataattttaaagcatcatataaattaaaggtgtcattggtaataatctcatatgcatttcttaacccttccatttccttgaagactgagacgacatcccatgtcccacagcatattgcacaatgatgggcaaacaatatgccctcagtaagtgtttcttgtttgactgaagcaacatggcatagcataacgagcacagacatcaggagactaggctgggatgaaattagtttaaggcaggagagccagtctgcagtcataatttattcattcaacaagcatttgttgaacacattctatgtgctagatgttgagttcagataatttcatcaaaagaagattgtacaagttctgacaaagccaagcccctgggcagtctccacaatcccagcccactcttaaaagcacaaaggctgtagccaccattgtctgccactggacaaacggccaattgctttggggaaagccccatcctgcctggctgtaagtagctctgattgagggttggaggaanggagtacaagtgagggagtgggctgcttccaacagaactgacagggactactagctgttaatttgtttttatttacactgaatcagtccacagttcaatcccctagcctatacgatgctctttcccctggccatcatctttccctccctgtcacctacacagtcaacctgtnccaaaccttggcccacttcatcctgnccntctgcggtcacagctgcctgctgggtgggngttcggggggaatggtatgtgtggncncnagagggcactgagtgggcttcagtggcatntgantnctggcagagtntcggatcccgatngggagaggagaaagcncagccaagnnacgagtnggggaggnggaggggctantaagggtgggggtgggg

SEQ ID NO: 439882 - DNA, 1659 bp, Homo Sapiens
gctggtgggtgaaagacttctccacaagccacgggattcagccgcaggaaccgcctgttcttgccagcttgccgggctccacccatctaaccggtggttagctcaccggaccagcctggtggaaagtgctcagagccagaacctggtttgagaagccccccaagactgtggaactggaggggttggcggcctgtgagggcgagtactcccaaaagtacagtaccatgagcccgctgggcagtggggccttcggcttcgtgtggactgctgtggacaaggaaaaaaacaaggaggtggtggtgaagtttattaagaaggagaaggtcttggaggattgttggattgaggatcccaaacttgggaaagttactttagagatcgcaattctatccagggtggagcacgccaatatcatcaaggtattggatatatttgaaaaccaagggttcttccagcttgtgatggagaagcacggctccggcctagacctcttcgctttcatcgaccgccaccccaggctggatgagcccctggcgagctacatcttccgacaactagtgtcagcagtgggatacctgcgcttgaaggacatcatccaccgtgacatcaaggatgagaacatcgtgatcgctgaggacttcacaatcaagctgatagactttggctcggccgcctacttggaaaggggaaaattattttatactttttgtgggaccatcgagtactgtgcaccggaagttctcatggggaatccctacagagggccggagctggagatgtggtctctgggagtcactctgtacacgctggtctttgaggagaaccccttctgtgagctggaggagaccgtggaggctgccatacacccgccatacctggtgtccaaagaactcatgagccttgtgtctgggctgctgcagccagtccctgagagacgcaccaccttggagaagctggtgacagacccgtgggtaacacagcctgtgaatcttgctgactatacatgggaagaggtgtttcgagtaaacaagccagaaagtggagttctgtccgctgcgagcctggagatggggaacaggagcctgagtgatgtggcccaggctcaggagctttgtgggggccccgttccaggcgaggctcctaatggccaaggctgtttgcatcccggggatccccgtctgctgaccagctaaacaccaatttcttcctgcttttctccacttggtttggaaaatcacacagttttcaggctccatctgtttggagaaaatacattctgaagcatccccaattcaccttctaaaaactcatgtgcaggtttgataaacaccagaacagaagacagtgatgctgtattattttagatttattacatagatttggaattcacttttttcatgacctagaaaaaaacattccagtgttcaactgttttatattattaaagggcttttaatttgtgaacttctgaaggcatgagtgttttctctttctacttttgtatatgtgcatgttttgtttcctctgacttggtatatgctcatctgagtgacggatatgtgaaatttgtagaactggttagtcaaatggtcagattatttctttaatttatttcctcaaatgcttttcaaattaaagcacctttgttagtaaacagtt

SEQ ID NO: 439883 - DNA, 685 bp, Homo Sapiens
  misc_feature (44)..(54): n is a, c, g, or t
ctctttccactgtttattattaatgtacaaaatatacaaaaccnnnnnnnnnnntactcatcctcaaatccattttggctctaacccaagaccctgcacaaaacccaaccaatccactgttttcatagaaaacaactgatgccaaagtgaaggagagaactgggaaagggcaaaatcatcttgttgaatccacccaggaaggcgcctggtggggattcagaggtggttgacagggtgaagtacctggaagcctccttcacgctggcaaggttccaggtgggagcagggagtgagctgactcccaaaggcagtgcatgtagtgtgactttcaggcccagcacgccgggcccaagttgatgagaagctggtctcactgaagtattttatcaagtctccagactggctatagttggcaaaggcagaccagcaccaccggtctcacctctgccagctaaaacttgcaccggatgcagatacgagttcgccatcatcgaacctagcagacccaggacgcagactgggtgttcacagaaagttgaaggtcccacttgagaaaggactaagaatggtgagcccacgctgggggaggggtggggatgatgtttttctcattacctcagctctcttttttgcgccctcccatcccatcgtaacttccacattctttctttatttcctcctcccc

SEQ ID NO: 439884 - DNA, 1049 bp, Homo Sapiens
  misc_feature (619)..(679): n is a, c, g, or t
  misc_feature (970)..(970): n is a, c, g, or t
  misc_feature (975)..(975): n is a, c, g, or t
  misc_feature (1029)..(1029): n is a, c, g, or t
tctcctccgtcttatattcattaaaataatacgctaccccctcgcgttgtagtataataaaatttgtctctagactaattaatcaacatccttctctatgttactcgcacaaataacttctttctacgcaccctctgcgcggcccatattaatatctcacgctcttgttttgttttactcacacccacttatttatccgaccccaccttgtatcaaatgatcttatataattatactccccctcttaagaggctgcttttaatatattctactctgataggagattgtcttctcctccccatcaattattgttccctcccctcccccactaaaatgagatgggtctcctctctttccctacaagattgattccccccttagtctgctgactcgcttgttttctccacgccaacactaacacatctttgttgtttatatcaactgtgcccctcccggtcttctgctgttgattatctataatataagaccaacccccctatctatatagggcgacccccctctttttcatcacacaaaaatatcggggtgctgcgcgcgctttatgtgggcgcgccccctcgcgggagagagattttttggggcgcgcgcgcccccctcnnnnnnnnnnnnnnnnnnnnnnnnnnnnnnnnnnnnnnnnnnnnnnnnnnnnnnnnnnnnngtatgagtctgtgatgtatcaagtgctccaactactcaaggtagcgcagaagggaaaacaggcacaggccggggggttttgggtgattacacaaatgggcttggcctccttaccccactgcaaactgctgaggcgcaagggagctcccagccctcagcctggaccctgggaccgtgccacctgagcccgaggctctgaagcactgcgtgatgacagttcccacctgcaactcagcagccagggaatgaatgagagttaggggtggcaggggccccggccatcagtggggcnctgcntgtccctccgctgcactgcctggctgctgagttgcaggtgggaactgtcatcangcagtgcttcagattggtcc

SEQ ID NO: 439885 - DNA, 456 bp, Homo Sapiens
aaaaggagggtaaaaaatgattatgcatcttagaaaaacgtgacatattacatagaagactgtaccacgaataattagccttccattaaaacttgtgaaaacatactggtaaaaataagacctatgaacaattataacaaaaaatcaatttttataatgcaaataatattttacgcagaccaagagaattcataatattaaagtatttcttttataaaaggaaggttttcagaaagcaatggcctattccttcatgttaatacattgcgaacttggatttggtgtaaatcaagccctgagaatattgctctgaatttctagcttaatttctgagcaacattctaaagcagttcattaatttactccaaaaacatttcttggacacttcggtgtaggagatatatattgcatggtccttaacctaaaaaatacaaagtgtaaaatatcttgttaaaa

SEQ ID NO: 439886 - DNA, 885 bp, Homo Sapiens
ggtcactgagggatttttatttgcactgattttgctataaagtgttactgaggtagagccaactgtccagggttggacaggggcaaggaacacaaggacccaaggaaaggggagccagggtcctacgttgtggtgcagtgcctcccagtcatccgtataaacaataaattgggcaataaatagacggtggacaaggatcggagggacaggcagagaaggcttcaaggagtgacaggctataggccttgaggaataaaacggtacagagttaggcatggacccagagcctacttccccagccttcccagataagtttagggcatatggagcagagagggtttcagccggaaggttcaagaaaagagaagacaccccgctttcgaggggttgcccctgcaccgccaacccctcctttgagcagggggaggggcaggggacctcctggggaatccatggagctggtccgcttgagccgcaggcggtcacgggcctgggcaccccaggccttgcctcgagctgtagaggccacaagacacttcttgtactgaaccatacaggcagtctgcacagtttcagagagttcctctgcatggggcttggccccagaaggttgctcaatggaagctttgaacgtcccaagtcagtgttcagcccaaaggttgtgtgggtctccggcctttacatattattgtaaaaggcgcacagggtactgtctcaatggttttcttattttgttactggtcctctgcctttaatggtattttgtacttatgtttaatagtccgaccccctgtatcatggttggtggaacccaagttttccggattccctccctgccagttagggctaccaaaggtccttgtttcaaaaatcacgttgccttgg

SEQ ID NO: 439887 - DNA, 1644 bp, Homo Sapiens
  misc_feature (211)..(263): n is a, c, g, or t
  misc_feature (508)..(528): n is a, c, g, or t
  misc_feature (569)..(688): n is a, c, g, or t
  misc_feature (709)..(709): n is a, c, g, or t
tggagacgtgtttttgtgggccacccccgttgtttctcccggtgggggaggtagttattggaaacaaaccgcgagggggaaaggtggaaatgtccacgaggcacgggtaaaggacctgtattgtgggggaccgggtgagggagggatggctccggaggggcgcaagggaaggggtttatccggttcccccccactcctgtggcaaacaaannnnnnnnnnnnnnnnnnnnnnnnnnnnnnnnnnnnnnnnnnnnnnnnnnnnnaggccccggggggaaaaagcgccgctaaagggggcccggggaacgcccgctatgggggtgttgttgaaacacggggaatggtgcccgcgccgcggaatgtgtttttgtgggggggagaaacagacaacgggggtggggaccaagggtgttttcatatgtgaaagagggggaaacggggaccttttttggtttttcttggggggccccgggcccgaaaaaggagaaatttgtagaaaaattttttnnnnnnnnnnnnnnnnnnnnncccaagggttataaggggggaggcacaaaaccacgctggannnnnnnnnnnnnnnnnnnnnnnnnnnnnnnnnnnnnnnnnnnnnnnnnnnnnnnnnnnnnnnnnnnnnnnnnnnnnnnnnnnnnnnnnnnnnnnnnnnnnnnnnnnnnnnnnnnnnnnnttttcaccatttctatctttntaatgtggttagtaaaaaagtttatattacatatgggctcataaatttctattggacagcaatttttagcaattttcactctctccaattaaaaaagatagtgaagcatcggcaaaaccaaacatgcatttaagccctctacttaaagtctgcctaaaacaatctaaaagaatcaacatattctgggccatttatctctggcacgtacctaaaaagccatcatccaatttcaagaatgggaaagtagctttgagaataagctaatacaaggtgagtcatgttaaagtaatggttcgtctatcttctgtgcatcagaattaacttgtggagcttttattaaaaatatagatggtcatcccacccagagattctaattcagtaggctgcaggtagaacccgagcatgtgtgctttaaaagctccccaggtgaatctaatagatagccagtgctgtataggtcatatttctacatatactactaaatatatttatgaaggtgctattaaaattcccacaggctttgtaatgctactgtgtggctgctttagcaacatcagcagacaacattgagaatcaacactaatgaaactgtggcaacagcaagaagctactggagtcaggcacttagctaaagccatttcctatgctccttccagacaggttttgcaacgtgcacaatggaggcaactcctatttccttcttccttcagttctcatggaaagcatttatacctgtcagactcttcagtccttctgtgaaaagtgactggaattcgggagactgcaacttcattgtgaatagatactgcttcagaaggcacagcctactccacctacggttcagcactggcctgtgccaatgatacaggcacctcagcatctggagaggcagtcaccaactacacatcggccccgctgttgccgcagccgccacc

SEQ ID NO: 439888 - DNA, 1031 bp, Homo Sapiens
tttatctctggaaaattaaagggagggcccaaaaaaaagagtttccccttgggcttttgggtggaaaaaaccccatccaaaccattttgttacctgacttttgttcaaaattcttttttaaaccttgcaattaggcaggtaaaccctatataagggagcccacatccaagatcatagataaggtgaaatcaaatgatttaacatggttaccaacaagaatttttttcagttccacccaaatcctttctcctgatattccagccaagccttttgcattttctgcaattgcttccaaagtctcaggatcatggtcaccaggtttgtctacaattctcccataaaacctgaagtatcttaaaattctaagataatcctcttgtattctctgtttagcatgtccaacaaatctaactttcttattttttaaatcttcataaccattaaagtagtcaaataaagtgccatcaaaacctaaaaacatagaatttatagtgagatctctgcgttccgcatctttctgccagtcagttgtaaattctacctcagcatgtcttccatcagtggtgacatcaatccgtagtgtagtaatctcaaaattttcttcatgaagcctggcagtaattgttccgtgcttttctcctctgttgtttatcatccgaatcccagccgactgaaacatctccttcatttgagtaggggtagcagtggtggcaaaatctatatcctgaggctttactccatttaataaatccctcactgctcctcctgctattcttaattcgtgattctctttgacaaataattctgtcagactcttcagtccttctgtgaaaagtgactggaattcgggagactgcaacttcattgtgaatagatactgcttcagaaggcacagcctactccacctacggttcagcactggcctgtgccaatgatacaggcacctcagcatctggagaggcagtcaccaactacacatcggccccgctgttgccgcagccgccaccgccgatcccgggaattccggaccc

SEQ ID NO: 439889 - DNA, 962 bp, Homo Sapiens
tcccgggacccggagcggatcgactggcgggcgccgcgccgaggcaccaccgggcgccgagttcctggcggctcgcacgcaggtaaataaaggcagctaaagctgactgctggttgcgcaaaatccccctggctcttctggctaaagtcctaccactccctgtacctggcagcagcctgtcttctgggcctcacctacacacgtctgggtaggagccagtcatctccatccatccacagccatgaatttcctccggcgacgtctctctgacagcagcttcatggccaacctgcctaatggctatatgacggacctgcaacgcccagatagctccaccagctcacctgcttcccccgccatggagaggaggcacccccagcccctggctgcctccttctcctctccaggatccagcctttttagctccctctccagtgccatgaagcaggcccctcaggccacctcaggactgatggagcctccaggtccctccacgcccattgttcaaagacccaggatcctgttggtgatcgatgatgcccatacagactggtcgaagtatttccatgggaagaaggtgaatggagagattgagatccgagtggagcaggctgaattctcagagttgaacctagctgcctatgtgaccgggggctgcatggtggacatgcaggtcgtgagaaatgggaccaaagtggtgagcagatccttcaagccagacttcatcctggtccgccagcatgcctacagcatggccctgggggacgactaccgcagcctggtcatcggcctgcagtatggagggctgcctgctgtcaactctctctactccgtctacaacttctgcagcaagccctgggtgttctctcagctcattaagatcttccattccctgggtcctgagaagttcccgcttgtggagcaaacatttttccccaaccataagccaatggtcacagccc

SEQ ID NO: 439890 - DNA, 1037 bp, Homo Sapiens
  misc_feature (161)..(224): n is a, c, g, or t
  misc_feature (1016)..(1016): n is a, c, g, or t
acatcaggctaggtatgaggcctggtggttaatcggccgaggagagacacggggccctactgggcccacgaggcctctgacatcatcttcagactaagtgccgaagtccctctccagccctggaggcccctccaagccaaagaagtccaagtcgggccagnnnnnnnnnnnnnnnnnnnnnnnnnnnnnnnnnnnnnnnnnnnnnnnnnnnnnnnnnnnnnnnnggcccgtggaccgggagcccgtggaccgggagccggtggtgtgccaccccgacctggaggagcggctgcaggcctggccagcggagctgcttgatgagttctttgagctgacggtggacgacgtgagaagacgcttggcccagctcaagagtgagcggaagcgcctggaagaagcccccttggtgaccaaggccttcagggaggcgcagataaaggagaagctggagcgctacccaaaggtggctctgagggtcctgttccccgaccgctacgtcctacagggcttcttccgccccagcgagacagtgggggacttgcgagacttcgtgaggagccacctggggaaccccgagctgtcattttacctgttcatcacccctccaaaaacagtcctggacgaccacacgcagaccctctttcaggcgaacctcttccctgctgctcttgtgcactttggagctgaggagccggcaggtgtctatctggagcctgggctgctggagcatgccgtctccccatctgcggctgatgtgctggtggccaggtgtatgtcccgggcttccgggtccccttccccattgccagcccctgaccctgcacctaagtctgagccagctgctgaggagggggcgctggtcccccctgagcccatcccagggacggcccagcccgtgaagaggagcctgggcaaggtgcccaagtggctgaagctgccggccagcaagaggtgagagctgccagcctgaggtgcccactccgccagccacaggaccacctcctctgccagcaggnaataaaggacttgtgcatccc

SEQ ID NO: 439891 - DNA, 1519 bp, Homo Sapiens
atggggaaaaagggcaggttcccaggcaggcccaggtttcccaggtttgaccacctgcccggttccttgggattccccaagggccacccagatgcgccccgggaggaggttccgccggaaagagggttctgcgtggggtcgtccagggaccgtttttggagggggtgatgaacaggtaaaaatgacagctcgggggtttccccaggggctccctcacgaagtcttggcaagtccccccactttcctcgctgggcgggaagaagccctgtaggacgtagcggtcggggaacaggaccctcagagcccactttgggtagcgctccagcttctcctttatctgcgcctccctgaaggccttggtcaccaagggggcttcttccaggcgcttccgctcactcttgagctgggccaagcgtcttctcacgtcgtccaccgtcagctcaaagaactcatcaggcagctccgctggccaggcctgcagccgctcctccaggtcggggtggcacaccaccggctcccggtccacgggctcccggtccacgggccgctcccgctcctgctccttctggggatcccgctcccgctcctgctcctgctcctgctggggatcctggcccgacttggacttctttggcttggagggcctccagggctggagagggacttcggcaacttagctgaagatggatgtcagaggcctcgtgggcccaggagggcccccccagtctctgtcccccacccgagaaaggaacaaagggggcagctgcgggtgcccttgtgctctgcttctcctgagtgtgctcgcagcagggccctgaggtgtccgcgtcctccggacggctcaagtcgccgcggctgagctccccagattccaagggaagtggagcgctggcggctgcctggccagccgacgctgacgagcccaggcttcctggggtcttgcccacggggtcgtagcacttcatgacaaacctgatggtggcgctgcccccggtcaggcccagcgactgcagcgtcgtgccccgcagggcagcttcacccgtcacctcatccctcgtgtacacgcagactggggtggccccgccggggtgctgcaggcactccctgatctgtggaaaatggctgagaagctcccagagggtctggcctgaacagaaagagtcctgcaacctcgagccatcgtccagctgcaaagcgatgcgaaccatgttctcaggcccctcacggctccgggaagcgggcaccatctccagcttggcattgttgggcaggttggcaaatctccactggagagaaaggtcgagcacgctcctctgaaacttcagatcatattcacaggggttgaagtcctgccgccggcacgtgtcctccagaacctgaagcagcacggtgctcggcgtcaccttcaccgtgtggcgccggccgttcggggccagcaccgacaccgcggagcctccgccgcctgccggggccgccattttcatcccgggaattccggaccgttccatcaaatggtggc

SEQ ID NO: 439892 - DNA, 1063 bp, Homo Sapiens
  misc_feature (211)..(211): n is a, c, g, or t
cggggcccgctccccgttcctggtccctggtgggggattccggtttccggtccctggttcctggtcctggtggggatcctgggcccgaccttggcctttcttggcttgggaggggccttccaggggttggagaggggatttcggccaacttagctaaggaatgatgttcagaagccctcgtgggccccaggagggcccccccaagtttttnttcccccacccgagaaaaggaacaaagggggcagctgcgggtgccccttgtgctctgcttctccctgagtgtgctcgcagcagggccctgaggtgtccgcgtcctccggacggctcaaggtcgccgcggctgagctccccagattccaagggaagtggagcgctggcggctgcctggccagccgacgctgacgagcccaggcttcctggggtcttgcccacggggtcgtagcacttcatgacaaacctgatggtggcgctgcccccggtcaggcccagcgactgcagcgtcgtgccccgcagggcagcttcacccgtcacctcatccctcgtgtacacgcagactggggtggccccgccggggtgctgcaggcactccctgatctgtggaaaatggctgagaagctcccagagggtctggcctgaacagaaagagtcctgcaacctcgagccatcgtccagctgcaaagcgatgcgaaccatgttctcaggcccctcacggctccgggaagcgggcaccatctccagcttggcattgttgggcaggttggcaaatctccactggagagaaaggtcgagcacgctcctctgaaactttggaaatgcaagctgctgtcggagacaactagtgaagagagttcagacagcccaggggcatttcagatcatattcacaggggttgaagtcctgccgccggcacgtgtcctccagaacctgaagcagcacggtgctcggcgtcaccttcaccgtgtggcgccggccgttccggggccagcaccgacaccgcggagcctccgccgcctgccggggccgccattttccgctcacatcccgggaattccggaccggtcca

SEQ ID NO: 439893 - DNA, 798 bp, Homo Sapiens
  misc_feature (53)..(59): n is a, c, g, or t
  misc_feature (67)..(67): n is a, c, g, or t
  misc_feature (72)..(72): n is a, c, g, or t
taaggaaatgttgttagaaagctttttgaggggcgaaggcgccggacatgttnnnnnnnttgctggnggggnccgggggggcaaagcaaatatttattaaatgaaaccacttttgtgactcttgggctttgagagaagctgaaaaaacaaacagggcgccgagggaggtttcggggcagcccgggctccgagggccggccactccctctttttccatgaaacacgtcgtgctttcaagagcccgagtctcccgccactgccctggagacggctgcgggacagcagattttccagttggaaagtgggctgaaagtgagcggggactgggtgagcaagagcaggccgcctacctcatccctcgtgtacacgcagactggggtggccccgccggggtgctgcaggcactccctgatctgtggaaaatggctgagaagctcccagagggtctggcctgaacagaaagagtcctgcaacctcgagccatcgtccagctgcaaagcgatgcgaaccatgttctcaggcccctcacggctccgggaagcgggcaccatctccagcttggcattgttgggcaggttggcaaatctccactggagagaaaggtcgagcacgctcctctgaaacttcagatcatattcacaggggttgaagtcctgccgccggcacgtgtcctccagaacctgaagcagcacggtgctcggcgtcaccttcaccgtgtggcgccggccgttcggggccagcaccgacaccgcggagcctccgccgcctgccggggccgccattttccgctcacgtccc

SEQ ID NO: 439894 - DNA, 1479 bp, Homo Sapiens
  misc_feature (27)..(27): n is a, c, g, or t
  misc_feature (31)..(31): n is a, c, g, or t
  misc_feature (1303)..(1303): n is a, c, g, or t
aaaatcaagattttattaaaaagaaanccgntttcaatcaagcaaacaattcacaaagacattttctagaatagtgagaataataaaaaccatcatttttggagaggccgattccttgccagaacctggggtcatgggcttggcacccatcattcttgcgcaccccatgaactgtaagagagatcttatccctttctggaaatgagcgaacgggttcagagaagtctagtgacctgtccaaggacacagagcccctgaaaggtagctctgttgtctgcaccaagtctgtgtgactctggcaccgttcccggggtcattcacagcagggacccgctcagacctcggcgggcagcgagaagaacacatggagattctgacttccagcacaaaggggcatcctgccttgtgtttttgtttcccatttctgagcattctctctggattacagccgtgaccgccgtatcgcagcgtgtttgcccagcccggtttgagttgtaagctggtgaaatagaagaatccttgtgaaaatatgaacacacttttatttaccaaaggtaaatgaaacctttcactgttctgaagggtttccatttttctgtcttttgtctcctccctttgattacccataacattaaccttcaaacaacctggcaaatccaagtctgatttcccggcagcctcctccttcagccaggcagggcacctgttgcaggccctcttggaatcaccaggcagagaagcttccctgtgcttcacacccactcacgcctgtccccccgtcctgggggaaggcagttccaggctggcccatggtcactgtgaagcgctcctacttaacaatgcaagtagccatccctctgtccagctggctttgacgaggctctgtcgccgcagcttcttgcccgtggctctgtgatggggaaaaaaggaaggaaaaatgcgttccatgcagggcctgtcactgccgtagaaacagcagtattattttcagggatgttgcgttaataggggaaggctgtttcttggaaaatactgccttcaagtactgtgactcttttcaggttatataaaagggcattaggcaaacactcagaaattcagcagcttccttggttgggagtgtggagggtgggtggaccagctcctgtgcacctccagcggcagccacgcagaatacgaattggctgcagttaccgtcctcatcagcccgcagtctggatagtatcagcaacaggaaaggttacagcttttcctgtgatgtattgcttcttcagagagtattaaagatgttttgaatctattnttttaggaatcttgaaaccaccagtggaacatttttgctgttgtgggtaatgcacaacgtagcagcgtaggaaggccgggccgcgagagggacccgagggtgttggaagcaccgaagacggcgcccgttgtcattttaacagtgaggaagcaagtgaggcagagcatatgctgagg

SEQ ID NO: 439895 - DNA, 619 bp, Homo Sapiens
  misc_feature (15)..(15): n is a, c, g, or t
ccgacatgttttttnttggagtgtggggttgtttttttaagtgaattaaaaagtttattagccatagaaaaaaactgattcctcaaaatcaattattgataaatcccctgtaaaacagcaagcttacagaaaatttctctcatgaacagatagtcactatacttttggtccaagaaatgttgggttttttcctccttcttcagatgacagatggatgtaactgaatctacgaacgagtgtacttgccccaaatgtgcaacataaatacagaagcgatgaacagaagactcataaccaatactggaacagggccaactttgagcccaggtgaatcttctgtgtagaatcgccacatccccccggtgcctgccgaggttgtgcggcctgcactccttgtcccacagctggcatttttcctctgccggacagtggatcccgccgcccgggcggccactgctttgctgggagagcgccctgaggatcccacgttagtgccactgggggtcggaccaggcatattggagatgagggtggcaaggcgctgacgcggacggatagaaagttacggagcccccgaaagaccggcagctggcgagactgactcaggccccgccccccc

SEQ ID NO: 439896 - DNA, 581 bp, Homo Sapiens
  misc_feature (53)..(100): n is a, c, g, or t
ggcctcgccgctctcgagaggccccgctccagccgattcgcagccgcagattnnnnnnnnnnnnnnnnnnnnnnnnnnnnnnnnnnnnnnnnnnnnnnnngatgggacaggcaccgggaccacggcggggacgcgaggactggagccgcgacctccccactgcgagcgagctggcctcccttgcggcgcgccggcgtcggaggggcgacctgcgggggctgggcttcggcggaacccgagcggggcctaccggtgagcgcagccgagtatttgcgcttgggggcggggccacggcggtgagcgcagcccgggactggagtttggggcggggcctcgtcggtgggcgacaccggggactagagttaaggttggtgcctcgcggtgagtgcagccggggacgggacccaaggttggcgacgggacccaaggctggcgacgcgacctaaggcagtgggcgggcccttggcgatgaacgcagtcggggactaaagctggacgcggggcagaggagggtcctcctcggatagtgagcgcggtctccagcggcgagcgaggcctggggtgaggactcagccggatgc

SEQ ID NO: 439897 - DNA, 627 bp, Homo Sapiens
  misc_feature (41)..(41): n is a, c, g, or t
  misc_feature (97)..(154): n is a, c, g, or t
tttataaaatggaaatgatagaaaagtccttcattcttaanttatccccaaatttcttatatattaacacagttctatttcctagtgtgtggacaannnnnnnnnnnnnnnnnnnnnnnnnnnnnnnnnnnnnnnnnnnnnnnnnnnnnnnnnngggaaccatttcattattgaaatcttatgaatgcatcagttaatttatattaaattataagcaggctatctgaaaaacaaggatatagaaatcatatatacacatttttgaaatatcagtttagtatttaacatattaacatttcaaaacaaatgcaatgatctagctacctatgacgccagctggtgtcagtggttgtagcgaagatgctgtttctgtttaccatgagcaaacagcatttcttgggtcttaagctaaacaatcacaagttatcaaagtaaagaaaatctaaagacagttcttacttttcatgtgtagaagtgtagtttgggtatccagtcatgccacagtgtgactgtggtcaacacagcccttgttacaggtgcgtatggtcctaaatagctggcctctgtctttccaacatcttcacttcattgggaattcagtgcaagtgtttgttttgtgagttagtg

SEQ ID NO: 439898 - DNA, 1307 bp, Homo Sapiens
  misc_feature (22)..(22): n is a, c, g, or t
  misc_feature (97)..(154): n is a, c, g, or t
taaaatggggaaatgatagaanagagtccttcatttcttaattatccccaaatttcttatatattaacacagttctatttcctagtgtgtggacaannnnnnnnnnnnnnnnnnnnnnnnnnnnnnnnnnnnnnnnnnnnnnnnnnnnnnnnnngggaaccatttcattattgaaatcttatgaatgcatcagttaatttatattaaattataagcaggctatctgaaaaacaaggatatagaaatcatatatacacatttttgaaatatcagtttagtatttaacatattaacatttcaaaacaaatgcaatgatctagctacctatgacgccagctggtgtcagtggttgtagcgaagatgctgtttctgtttaccattgagcacacagcatttcttggttcttaagctataccatcacaagttatcaaagtaaagaaaatctaaagacagttcttacttttcatgtgtagaagtttagtttggttatccagtcatgccacagttgtgtactgtggtcaacacagcccttgtcacaggtgcgtatggtcctaaatagctggcctctgtctttccaacatcttcacttcattgggaattcagtgcaagtgtttgttttgtgagttagtgcattcagctttttttgcatgttattttgaaaaagaagctgtcaggaagcagaagatacataagaacacaaggccctggatcctcagagcacctctggtctagagaattcagtgttttggaagtagtgttttcctgcattgggctggtcattgttgtaccattccctggataatcttgtttccatcagaataatgctgtgtgctccctctttgcctgctactgaacatgacgtctcttgttgtgaaccccactggcagagcacggaccatggaagcatcttttggcagcaccagagaactgagcatctcaaaggtccaggcattacaagtagatgtcccctcataggaaaccctagtcccaggtagaatatgagacaatcttggagggttttgatttttgcttgttaaacaggtctccgaggaaattatgacctcagagaacaaaaaaggatctatagctttcatgaagaaggacccaagtaggtggtagccattttgcctgggtgaggttcacagttggctcaggagacatcttctgatcattaaccactaagaccctgttagaaaaatttagtgcaagatacagggagtgcatggggctgttgaccagacctgtgtgaaacacctattcaggttaagtagatatagcaacccctgcaagaggggactgggcaggag

SEQ ID NO: 439899 - DNA, 846 bp, Homo Sapiens
gaatcactaactcacaaaacaagacacttgccctgaaattcccaatgaagtgaagatgttggaaagacagaggccagctatttaggaccatacgcacctgtgacaagggctgtgttgaccacagtcacactgtggcatgactggatacccaaactacacttctacacatgaaaagtaagaactgtctttagattttctttactttgataacttgtgattgtttagcttaagacccaagaaatgctgtttgctcatggtaaacagaaacagcatcttcgctacaaccactgacaccagctggcgtcataggtagctagatcattgcatttgttttgaaatgttaatatgttaaatactaaactgatatttcaaaaatgtgtatatatgatttctatatccttgtttttcagatagcctgcttataatttaatataaattaactgatgcattcataagatttcaataatgaaatggttcccttttaaaaaataaaaatactttgtagattaaaaataaatcagaatttcaaatttaaaattgtccacacactaggaaatagaactgtgttaatatataagaaatttggggataattaagaatgaaggacttttctatcatttccattttataaattgccacctgtgaaaatggtttttgcacattatttgtatttttctttgtatatgaaataatttttgtactttgtaaaatatggagcccattgtaccttcagctatttgagactatacacagtgcttcttttgtaactggattactttaactttcgtgaaggcattacattgcctgacattcactaaccaccttgaattaaatttatttcttaag

SEQ ID NO: 439900 - DNA, 1363 bp, Homo Sapiens
ctatgttgcccggctggagtgccgtggctttcacgggagcaaccatagcacactacagcctcaaactcctgggctcagcgatcttcctgccttagcctgggactataggcatgcgccaccaaacccagaatattaagaattttttaataaaagatttaaaatgtgccaaaaggcataaagatgaataccgtgaactctgatatacccctgacccactacaagaaacagaacatgacgaatatgatggaagcccagggtcaccacctctgttaaatcccctcgccagccctgccctcctcccatccccatggtgaattcactctgtagtgaatctcctgcatagagaggtatccacaaaccatataaacacttgtgcacgtttttaaactttacataagtaggatcacattgcatatctttttctgcaactctttccccactcggcattatgtctggaagactgaatcatggaatctctaaaccacagactcttccatgctgagttcccaaatcacaggcttttctaatcatagacatgggctcgggctctggtgctgggaggacctcgctggcaggctcgtgcagggccctcctaacatttctgcccagccccacccctcacgtgcaggtggcttgacggagggaggaagcattcggaagccattatcttctggaaatgtttgtgggcttctggcagcctggttaacaccttcctctgcagcataccaagtatcactgaggtgccttgttccctgttttgggggagaagatcagaccctggccctataacagttgagcagcagtccttgatatgctcctgaaatggagcacatccactgcttctcgatgctattttggagtcctggctgatggagatctgaaagccacgagggctggcatcggtccccacttgccgccttgccaggtttgctgctgactgtgccaaggacggccgtggccaatggagcctgctggggccgcggatgagtgagggagctgtggccctgcagacactccctgcaggagctcacgctgcacggggccacgctggctggaggaagggggcgtgggagacagatgctgcttgagatgcttcggctgctgcaggactcaagagtcctgctcccctggggagagaaccagtgaacacatgagcagagggcacctagagcagcccctgtgcttctaagcctctactcaggagcctgtgagaggcccctgaaggatgcagggcggtgtaatgtgagcgagagaaggcatcattaaaaagtggtggccaatggcaggacaggatggagcagcgcacagacactaaatcagagatgctgggcccctgcgtgcagagacagagccccaggatgtg

SEQ ID NO: 439901 - DNA, 2210 bp, Homo Sapiens
  misc_feature (616)..(616): n is a, c, g, or t
tatattttaaataactttattcttaaatttaacaagctcttattagaaatgctttggtatcaatagaataaaaaatgctggttttcccccactgaatcgtgtcaagtaactggaaaagttacacatttgttttccccagctttttgggaatttttcacaaataatgactactacttattcacatggcttaatatggtacactgtaatgataattttttggacttcagaaaaaataaacaaaatatccagaagagaaatttgcaaatgcttcttagtttcttcttcaaaggatgtttatataggtggtacaactcttagatcaccttttttcccagctttgccattctcatccttaaagctgttaaggatggatcctcagtcccatctccagttgtctgagcatcaaatggggaatggtggacagggctgcctaagctttcttcttgctctttcagagatatggaatttttgtggggggatttatgatttgtgttttcatgaggactagcttctgatctttttctaggaagtggtgttggtttggctggctggtacacctgactatggggagctatggggtggtaggacggtttctctgcttctccttcatcctccncctcctcatcatcaatcacaaccagctcagcatggatgatcccatcatatcctgtcagaaacttcttatcttcttcactgtcttctgcctgctgataccccatgaaaatcattgtcaccggttctgtatcatttatgtctggaggcagggaatgaacgatattatatctgacatcttcctcgtcctcctgacaagtgggtgaagaattctggtgttcagatttcccaaatattgtctctctggggctcagccttggctttggagagggtgcatctttgtcctgcatgacattcgattcttcccaaggagtcattagccttttttgcggggtgtgaagcttctcttctgcttgttgaatcactgatcggggatgaggcactggcggaatgggactgatgtgattgaagttgtttcccctttcctctgaaagaccattgcccatattgtgtatggattcatttacaccaatacccagtccattagttttatctttatcctttcttgaaagtttggtccaggggtcaccgtttctctctgtggggttgtaggcctgtaaaagggattggcatatacaggctcatgatactctgttggggatttagagttttctctctgaggcttgtcttagaagttcctctacttcaactggtgccaggccatcggtgccattgtatgctgcactgtgattagaacttactgcatacactgacttttgcccatcatcataaacttttattcctgtacctttaaagtcatctgatggcagaggtattgaagacagaactgtactttctccagtcttcaagtctttttcaactttaatttccatggcatataaagctttcctattttgttcatcatcttctttttcttcatttatctccttccttaacctagaaggtatgtaggactttggaaggtcagggatattagcatagatgtcctcaattgactcttctgctctttcttctctttccactttcacagatcttataatgtcttctgttgtccgctcaattgactttagtttctttaaaatggcctcttccttcgttgagatttgcagttcagctttttcaagatcttggatctctttctcaagcctgaggatactttgttctagaacctggatctggtgctggtcttgttgattttgcttcttcatctcttcctgttcttttccgctgctgattccatctagaagccatttctccctcaaggcctttttcttcaaatgctggtgctttagtttgtcttcctctattttcagacgcttctgtgagatttcttcctgtatttttcttttatctgtgatggcctggagtcttcccttcaccagctcagcttcttccattctagaagtcaaggacagtcagacggggaagcaagtccaaagctaccataaatcaaggagcctcctgggggagaggagcgggggtgacagaagagaagcagggagaaatccgctctttgcaccagtggagaaatagagaaattcccgacttgtcaggagcgtctccgagcagatgcacagatcaggccagacagacacatgtaatgagggtgtgctggggaggcagacgctgaggctgct

SEQ ID NO: 439902 - DNA, 1960 bp, Homo Sapiens
  misc_feature (686)..(716): n is a, c, g, or t
  misc_feature (1854)..(1877): n is a, c, g, or t
tagaggtgcattgttctgttcccatcgcatacttagcgtcggcaaccaagatgaagtacgcaggtggggggtaccgggcagttgctccaccagctgcggtccgtggtacccggatttagtgtcctggcgatgggaggcgccgaatactagtaatgcaacgccggaaagtgggtgaatggaagtggggtggacactgggggcggccattggggtacacagagtcggagggcgcggacccatggcggagacagcgggaagggcgtgggatgtcgaggctgaggatgggggttccccgggggacgaaggggggctaaagggaagccggttaaacgggagcccatgccgcggaaggtcgggggcagtgggatccgtcggaaggtgggtcggaggaattcaggtgcgcgggggcgaagcccttcgcgcaggtggccatgggtccaggcccctggggtggaacgggggtgagtccagggaccgaggccttcttgccgccacccgcgctttccacatcgctgcccggagtggggctgggagtcccttgccagcgccagcctgtgcccggatcctcccaagggcctggctcagctgaattctcatccagccttggaggaagaggcccagagagcttctttctgatgtccagaggggagctgttcaaggagggaaggaactcctggaaggagaannnnnnnnnnnnnnnnnnnnnnnnnnnnnnncgcagcgcccgtacaaactcctggtagcgctggcccggctcaaagggcgcacagcactcggccagggcggcgaaggcgcgggggccacgctctgcctgcgccccccgcagcccgaagagactcagcgtcacccgcctcagcacttcatccccctgaaacaccagcttgcgcacgtgcgacacgattcgctgcttggcgatctccaggtcctgctgccgcgcgttggcctcgcggacacaggcctggtacagcgcctcggcctcctgcgccttggcctgggcctcctctcgcgagcgccgccgccgctcctgctgcttgctaggtcccggcgaggcctggggggccgagtcctcaggggacccctgggagcgtgcccgcaggtcctcgctgcgttgcacatactgcagctgggcgcgccgcagtgcctgcaccgcctcattcatccgcttctgctccttcatccactgctccttgaactccttccgccacttctcaatctcagtccgtttggcggcgaggggctggtagtagtctcttttctgctgggccactgtctccatggccagggttcccaggctgagatcgtgctccagaaacagggtgtagatgtactgcagaggcatgtggctctgctgttgaatggacaccttgccagcttcagcgatcttcatggtgctcttagcaaactccagctcatagctggctctcttttcagtccaggcaagcagttccttggcatagcggctccaggtcttggcatattccagggctgcgtccacacccccctttgtccgaatgagccgcaagtccagttcctcccctgtgaggggtacaggaccctctggggaggggccgctccaacagctggcttcgttggtaacagtggctgtaggggtcttgtcaggttctgggtcttctgagagtagagggtctccagccagcatctcaagggtcacgttccccagtgagatttcgaggttgtccaggctccggaagatgtcactgtacctcttcctgccctcaggacctggggggagtcccggctctgctgcgtccatatctgggcccggggatcgctctgcagggaccgggatggggatggggtcgcgcgccggcggggccgagccccgatttcctnnnnnnnnnnnnnnnnnnnnnnnntcggttccgcgtcgatcccgggaatcccggaccggtaccagcggcatttggggccgacgtacggaggagaaacgaagcggcag

SEQ ID NO: 439903 - DNA, 744 bp, Homo Sapiens
tgctagtcccggcgaggcctggggggccgagtcctcaggggacccctgggagcgtgcccgcaggtcctcgctgcgttgcacatactgcagctgggcgcgccgcagtgcctgcaccgcctcattcatccgcttctgctccttcatccactgctccttgaactccttccgccacttctcaatctcagtccgtttggcggcgaggggctggtagtagtctcttttctgctgggccactgtctccatggccagggttcccaggctgagatcgtgctccagaaacagggtgtagatgtactgcagaggcatgtggctcatagctggctctcttttcagtccaggcaagcagttccttggcatagcggctccaggtcttggcatattccagggctgcgtccacacccccctttgtccgaatgagccgcaagtccagttcctcccctgtgaggggtacaggaccctctggggaggggccgctccaacagctggcttcgttggtaacagtggctgtaggggtcttgtcaggttctgggtcttctgagagtagagggtctccagccagcatctcaagggtcgttccccagtgagatttcgaggttgtccaggctccggaagatgtcactgtacctcttcctgccctcaggacctggggggagtcccggctctgctgcgtccatatctgggcccggggatcgctctgcagggaccgggatggggatgggtcgcgcgccggcgggccgagccccg

SEQ ID NO: 439904 - DNA, 934 bp, Homo Sapiens
  misc_feature (136)..(217): n is a, c, g, or t
  misc_feature (715)..(715): n is a, c, g, or t
  misc_feature (863)..(863): n is a, c, g, or t
  misc_feature (897)..(897): n is a, c, g, or t
  misc_feature (932)..(932): n is a, c, g, or t
ccggagcccgccgcgctcccgcgctcctttccgcccaggccgcgcccagctggaatgcagagatcgccgcccggctacggcgcacaggacgacccgcccgcccgccgcgactgtgcatgggccccgggacacgggnnnnnnnnnnnnnnnnnnnnnnnnnnnnnnnnnnnnnnnnnnnnnnnnnnnnnnnnnnnnnnnnnnnnnnnnnnnnnnnnnnagcgcagtcccccgcgcagccccgagccggggcgctatggcctcagcccggccggccgcggggaacgccaggcggcagacgagtcgcgcatccggcggcccatgaacgccttcatggtgtgggcaaaggacgagcgcaagcggctggctcagcagaacccggacctgcacaacgcggtgctcagcaagatgctgggcaaagcgtggaaggagctgaacgcggcggagaagcggcccttcgtggaggaagccgaacggctgcgcgtgcagcacttgcgcgaccaccccaactacaagtaccggccgcgccgcaagaagcaggcgcgcaaggcccggcggctggagcccggcctcctgctcccgggattagcgcccccgcagccaccgcccgagcctttccccgcggcgtctggctcggctcgcgccttccgcgagctgcccccgctgggcgccgagttcgacggcctggggctgcccacgcccgagcgctcgccttctnggacggccttggagcccgggcgaggctggttttcttcccaccggccccgggccccgaggactgcgcgctgcggcccttccgcgcgccctacgcgcccaccgagttgtcgcgggaccccggcggttgctacggggctcccctggcggangcgctcaggaccgcgccccccgcggcgccgctcnctggcctgtactacggcaccctgggcacgcccggncc

SEQ ID NO: 439905 - DNA, 1028 bp, Homo Sapiens
gctgggtggcgaattcggcacgaggcgcgcacggagggactgcggcagtgtcggagccgcgccgagcctggtggcccaggtgccccgcccgcgtcagccctgctccagccccgcgctagcccagcgcccctcgccccgggccgtccggaccgcgcccccgcccagggccttgcgcacgccggggcccaggccgagggccgcagcgccggggccggcgatgagcgcgaggagccggcatgagcgcagacagcagccctctcgtgggcagcacgcccaccggttatgggaccctgacgatagggacatcaatagatcccctcagctcctcagtttcatccgtgaggctcagcggctactgtggcagtccatggagggtcatcggctatcacgtcgtggtctggatgatggctgggatccctttgctgctcttccgttggaagcccctgtggggggtgcggctgcggctccggccctgcaacctggcccacgccgaaacactcgttatcgaaataagagacaaagaggatagttcctggcagctcttcactgtccaggtgcagactgaggccatcggcgagggcagcctggagccgtccccacagtcccaggcagaggatggccggagccaggcggcagttggggcggtaccagagggtgcctggaaggatacggcccagctccccaagagcgaggaggcgaagcgggtgctgcggtattacctcttccagggccagcgctatatctggatcgagacccagcaagccttctaccaggtcagcctcctggaccatggccgctcttgtgacgacgtccaccgctcccgccatggcctcagcctccaggaccaaatggtgaggaaggccatttacggccccaacgtgatcagcataccggtcaagtcctacccccagctgctggtggacgaggcactgaacccctactatgggttccaggccttcagcatcgcgctgtggctggctgaccactactactggtacgccctgtgcatcttcctcattttctccatc

SEQ ID NO: 439906 - DNA, 781 bp, Homo Sapiens
ccagtggaacccatggatgcctatcagctcttcctcggacacatcgtttctgccagcttacatagtccatgttctgtgtaagatgcatctaagacttgagcaatttgtttttcttatgacaagttggataagttctcaattttccgttataaatattgtttttctttctgaatagagagtgccgcctcatcaaacctacgtcctcgtactagtagtctggaggcttttcctagtaattcaactgcctgtcgtaagcgttcttcattttcaaacacattagctgtctgttgatataactgtacagccttctctggatcaacattttctataagctttccagctcgctccaaagccatggctgctgtgtctggggtgccgttttctagatacatcatgctggccttctcaattagctgaacggcctctggtagtttctgcatctccttcaacatcattccagcttgctcataagctttggcagcatgaaaaagagccctattattttcatgggcaacagcttccctcaggcaggcatcttttgcttgctcaaactgtttggcatttttaaaagcaacagctgcttttccatattcagaagcggcactgtcataatctggcttccattttaaaaaaccagttttcaggtatttctctgctttggcgaggtgttccagcccctcgtttatcttctgagccgccatctccacagtcaggtctctgacgtggagagagggtgaccctgcctcttcctccggcgccaagaatccgcctaaataggcgt

SEQ ID NO: 439907 - DNA, 948 bp, Homo Sapiens
aagaaattttaaaaaaccagatatgctttgcgagaagattcctggtttcttcagctggggattctggggacttaggtatatactggagagttcacaggtcaggctgcatggtctggtccagaatctacttggtctctggtctcctcacatcgtaaacactttctaagagatcaagaacaattcaaaagaacccatccaatcaacatgtcacaactgactgccatgactgagtcaaatcaaccgtaagatcctggggctcctgaatcacttccagaaatgagaaagcaggacttcgacctttaagaatgatatgccctcagctgttaccaatatccgaggctaagaaggttcaagtctgaaagttgattgagtaactgcaatgatccttgggtagagcagattcttctcttgctgctgaatgtcctcagacgtgtagagtgccaggagcaggggagagggcagtcctggaggtacaccctctggcctctcccaagcaagcagtgaggtgtgcattgttagaggtgcaccgggaagggagcttggtttcggaccccaggacatcctgtccgcaagcagctgctacttcttgggcttctctagaatattgaggaatttcccccgtgtcatctctctggactcatccagccccagctgataggctaggttctgtaggcctcgaaccttctccatcaaattagccgtggtgagactccccagttctttcaacatgtcgatgtcatcacgttctatctcagccatccatttgggtggagaactagtaataggacttttgaaggaagctgcaaattcagcaacacctggtaattgttctggccaaagatctggtgaggcacggtcaagtttttcaaaacttagcaaagatgcttccagatctgtcccgtctggggagacgccatcttccaaccctcgtgccgaattcgccaccca

SEQ ID NO: 439908 - DNA, 469 bp, Homo Sapiens
  misc_feature (440)..(440): n is a, c, g, or t
gaattccaaacacaggaccggccatgagcaccactcctaggagaaggtccaggtggtctcccatgatcctcgttgtcctagcagaagggacttctagtatgttcttattctagagggcagagggtcccctggttgtttaaagacttcagttcctgagactatagagaatcatcatcacagtgatggtagtcagtattttattttttggtgaatcaggagaaaggactttttgttttcctgtctccaggttcggacagcgccaacattctcaattagaaaattaacatctgaggctccgacatcttccctggatgctaaatcctgtgtattgatgggcaaagtcaattgccaggaaagctgggcaactataaggtcagggggctggagcagatgagagtagggaagtccagtatagcatccctctgggacgcctccccgcnccgcctgcgccacggttggcatcccggga

SEQ ID NO: 439909 - DNA, 1121 bp, Homo Sapiens
  misc_feature (260)..(274): n is a, c, g, or t
  misc_feature (517)..(517): n is a, c, g, or t
  misc_feature (536)..(536): n is a, c, g, or t
  misc_feature (643)..(643): n is a, c, g, or t
  misc_feature (646)..(646): n is a, c, g, or t
  misc_feature (648)..(648): n is a, c, g, or t
  misc_feature (661)..(661): n is a, c, g, or t
  misc_feature (663)..(663): n is a, c, g, or t
  misc_feature (675)..(676): n is a, c, g, or t
  misc_feature (687)..(688): n is a, c, g, or t
  misc_feature (694)..(694): n is a, c, g, or t
  misc_feature (700)..(700): n is a, c, g, or t
  misc_feature (703)..(703): n is a, c, g, or t
  misc_feature (708)..(709): n is a, c, g, or t
  misc_feature (714)..(714): n is a, c, g, or t
  misc_feature (716)..(716): n is a, c, g, or t
  misc_feature (718)..(718): n is a, c, g, or t
  misc_feature (720)..(720): n is a, c, g, or t
  misc_feature (731)..(733): n is a, c, g, or t
  misc_feature (739)..(739): n is a, c, g, or t
  misc_feature (770)..(770): n is a, c, g, or t
  misc_feature (784)..(784): n is a, c, g, or t
  misc_feature (790)..(790): n is a, c, g, or t
  misc_feature (801)..(801): n is a, c, g, or t
  misc_feature (808)..(808): n is a, c, g, or t
  misc_feature (814)..(814): n is a, c, g, or t
  misc_feature (816)..(816): n is a, c, g, or t
  misc_feature (822)..(822): n is a, c, g, or t
  misc_feature (824)..(824): n is a, c, g, or t
  misc_feature (826)..(826): n is a, c, g, or t
  misc_feature (829)..(829): n is a, c, g, or t
  misc_feature (834)..(835): n is a, c, g, or t
  misc_feature (866)..(866): n is a, c, g, or t
  misc_feature (868)..(868): n is a, c, g, or t
  misc_feature (872)..(872): n is a, c, g, or t
  misc_feature (885)..(885): n is a, c, g, or t
  misc_feature (889)..(889): n is a, c, g, or t
  misc_feature (900)..(901): n is a, c, g, or t
  misc_feature (938)..(938): n is a, c, g, or t
  misc_feature (944)..(944): n is a, c, g, or t
  misc_feature (947)..(947): n is a, c, g, or t
  misc_feature (953)..(953): n is a, c, g, or t
  misc_feature (955)..(955): n is a, c, g, or t
  misc_feature (960)..(961): n is a, c, g, or t
  misc_feature (965)..(965): n is a, c, g, or t
  misc_feature (967)..(968): n is a, c, g, or t
  misc_feature (971)..(971): n is a, c, g, or t
  misc_feature (973)..(973): n is a, c, g, or t
  misc_feature (975)..(975): n is a, c, g, or t
  misc_feature (977)..(977): n is a, c, g, or t
  misc_feature (984)..(984): n is a, c, g, or t
  misc_feature (994)..(994): n is a, c, g, or t
  misc_feature (1000)..(1000): n is a, c, g, or t
  misc_feature (1006)..(1007): n is a, c, g, or t
  misc_feature (1054)..(1054): n is a, c, g, or t
  misc_feature (1058)..(1058): n is a, c, g, or t
  misc_feature (1071)..(1072): n is a, c, g, or t
  misc_feature (1075)..(1075): n is a, c, g, or t
  misc_feature (1078)..(1078): n is a, c, g, or t
  misc_feature (1080)..(1080): n is a, c, g, or t
  misc_feature (1089)..(1089): n is a, c, g, or t
  misc_feature (1098)..(1098): n is a, c, g, or t
  misc_feature (1102)..(1103): n is a, c, g, or t
atacgtctaaatatggctgttcaggttaaagaagaaacatgttagagaactctaagcatcaaatgctctgatgtgctatatgatgatcaaatctttactcacataattatctctttgctattgtaaatctttcacttcaagataatttgacagttgagtatcagcataatttgtttagctctaaggcaaaagtttgcttgctggccaacacaatgaagataatacctacccacaaacatccctattctctactttcaccnnnnnnnnnnnnnnnaatccttttggtagaaatcaggttacaaagcaaaaccacaatatcagcaacacttcctaatcaaaattaagcattgaatatttgtttaagcttagttcagaagcaacgctcctacaggacttgacatttgctagttagaatatccctactcttctaaaaaatttgaaagtaaagagcagtaacacagtaacagtgagcacagccaagcctgacactactaaatgatttggtagtgaagccagnacatctacccttgactatnttttatgttatttatttattagtttgtccatttgtaacatgtatagatctgtcctgtgagcatttctgatgaatctatggttcttacagaaatttatcaaaggaatnaantnagagaaagagttnanaaaaactaacannaacttattaannaaatcngttagnaanagagnnaacancnananataaattagcnnnaaaaantaagataagaatcattaacatcatgaaaaanaaaagtactacatntctaangtattcccatngcaggtnttaggnanattatntntnaanacctnncttttgaattctacatttgagaaataagcangnaaanattagctgccccntctnccaatcaccannaaaaatttctatggcaattttgtaccatgaagtaaantgttanaanagtttntnagaannaaanannaanantnancttccantgagaataanaaaaanaaatannaattttacacctcatatgtcatcttagttctgaatgattagaagaantaanatatatttttatnntanaananttaaataanaaaagaaanttanntctcaaaattaatttatg

SEQ ID NO: 439910 - DNA, 2436 bp, Homo Sapiens
tttacaaggatagggtgacactttattactcctgaagccccaccggcagaacccacaggccaggcagaccccgcagaccccgcagaccccatggacccaggtgcagaggcccgacggcaaaaagcacagggtaggtgggtgtgggggcaccagcagggacaggaggctgactgtggggacaggatgtctgggtccccaggctttgactgtggggacaggtgtctgggtcccccaggctttctcgggcgtggggggactgccttgctggccctcccccacaaaggttagacgcaaagcagagcccccagtccctgccccttctcatcggggcagggtctcccgtggatgaacttcccagctccctccaagtccctcatgatctccctccctccacccacctggctcaggcagggccaggcatgggggcctgtattttgtcacccttcggccttgggggccccagagccgggcccaagccagcaggatcccaggaggactgggagtggggcctggtggggactggaggcttctgggaggtcggagggagcttaagggaccccaagcatgttgcagacagaggctgtacggacccattcctcactgcccccaccctacgccctccacatcttcacggtgtgcagcctgggctggcctctccggcagggacgcccaggcttctcgggggcaggcctctgtggctgtagtactccaccacctgcttcgggacctcggccagcacgcacttggccagcgccgcaggggatgcgttcttgagctcccggaagggcacgaactgtacgatgtcccggagcgcgggctcaccccgtggggagcgcaggacgccgtcgtcgccgtccaggacctgcatgtcggtgaagtcggcgttgcccacgcccacgatgatgatggacatgggcaggcgtgaggcacgcacaatggcctcccgtgtgtcggccatgtcggtcaccacgccgtccgtcaggatcagcaggatgtagtattgagaggctttcccggtgctctcctcggccgccgccacgcgtgccaccttggagatgatgggcgccacgttggtggggccgtagagctggaccctgggcaggcagttctggtaggcctccaccacgccctggatgccttcacactcatcgtcctcagggttgaaattgatggcaaagtcatgggacacctcatacttgggagggatccgggctccaaaccccaaagcggaaaacctcttgtcactgtcatagtcctggcagatctcgcccacggacaccagtgccttcaggtactcgttcggctggtaggggttgatgtagtgcagggagcagctgttccgcgggtctccattggaggcggtgaagtcaatggccacggtgaagtggatctggcagccgcccatgatatagtccaggaaggagtacaccctgtggaacttgaggtcagccaggacgaccactcctgagttcttataactgcgtctcttctgcttgtatttggggttcacacagtcccactgggcctgcccctcctcaaaggccttctgcatctcctcgaaggtggtagagaattctccgatgaagtcgtgctttcctcgagagtcgtaatcccagaccaggcactttagaggccttgtctcctcgcagctgcagagggaactcagagagactttgaaggcctcccacaccgggttcaggttgttcttcaccacctccgtcctgtacaccagctgcaagccctggtcgtcgttgaccctgtagagctccaggaaggggtcggacttgctgaagaggtccttgtcgtccagcttcctggcccggaaggagagctccacgtagccgttgttccccgagatgtcctcggcgatcaccgtgatggtggacttgccagcgttcctgccaaacttgagcagcagcgggcgggtcaccttcttctgggccacaatctgccccagggtgcactccatgccccccaggaaatcgtcctcctgacagctgaagccgctgggcccatgcgtgtcgtacacctcaaagcgcagcctctgcacctcctcgaagtagtagtccaccgtgaagaccttggagaacacgggatgcaggctgctccggaccacctcggttctgcccacctgcacccactggccctgcgcctgctgcagcaacgccacgctggggtcggacttggtgagcgggtcgcggtccagcaggtgccggcagctgagccgcagctccaccttcgaggcgcagggcgcgggcaaacccccgggggttgccgccgccccgcgctccgagcccgcgctcatgctcccggcgttcgggggcccggctgggcgcactgaggggccgctgcccgcgagtcggcgccgccgcggcgcccgggaaatggtggccggcccaggcgtggccgcgcttccctgaacgcctgccgggcgcg

SEQ ID NO: 439911 - DNA, 841 bp, Homo Sapiens
gggatgaggcttgagtccgaagtgtgaagagtgaggatctaccggtgaggctgatgattctcaagggaccttgctggcttgtgaaatattattctgtccttatgtatcagacataacctgatagcctgtcactacatgtgctttgctgactacatttctgtcggtcttacgtggaagtgagagagctcaactgttgtcatcatctaaaggtgccaccacttttatttgtttaccagatcaccagatgatactggtccattacccttgacctagtcagaccttgacaaaagacttaatggtgctatttaggatgcatttccttgctgctttgtgcaggtggctttctcgttgttgcataaacagtgacgggaacatcagttattgtcaggcaatgacttccagggcacctccggagttgcctggttggtgacatctccttcccattacaggcagcactggagctcagcccaggttccagctcaattgaagaatctcctccttccactggaaacctccttggctgggttccaaattgaaaaggcatacttcactgaaaaccaaaagaggctgagtctgattcctgtagaggtgaataaatcaatgctttctactggcctttccacagaaggctggaattgccaaaggaatgatgatcaaatgttccggtgacacccggaaattatgacatcaggagattctttcacatagtttcctacctgctgccagttaccccggcctccggagctgccgatgctcgaagatgttgacaaggcagctaggatatacagtccagaagcccagtcgctacggtaacggtgacacgcaagtgcacttgcccgct

SEQ ID NO: 439912 - DNA, 1302 bp, Homo Sapiens
agtgctggtacggccggagtatgggatcggccgagtgccacatcactgcgctggccgtccaaggtccgcgtcccaccatgccggcccgctgcctgctgctgctccttacagtcctggtctgtcgccgctgccctggccggggtgcgagtttgagcggaaccccgccggctctgattcctgcacagtagctgttgtcctggtcctcccctgccagaccgtgggtgcccctccctgcaggccctggccctgcgtggggtcccctacgtaaatgtctgacgcgtcacggtcagggccactgcgggagggactgacctgccgaccctgcctccccagacaactgcgtggacctgcagctcaggacctgcagcgatgccgcctacaaccacaccaccttccccaacctgcttcagcaccggtcgtgggaggtggtggaggccagctccgagtacatcctgctgagcgttctacaccagctcctggaaggccagtgcaacccggacctgcggctgctgggctgtgctgtgctggccccccggtgtgagggcggctgggtgcgcagaccctgccggcacatctgcgagggcctgcgggaggtctgccagcccgccttcgacgccattgacatggcctggccctacttccttgactgccaccgctacttcacgagagaggacgagggctgctatgacccgctggagaagcttcggggaggcctggaggctgacgaggcactgccctcagggctgccgcccaccttcatccgcttcagccaccactcctacgcccagatggtgcgtgtgctgaggcggacgggctgccgcttgcgcccacgtggccaggacctacagcatcgggcgcagcttcgatggcagggagctgcttggtcatcgagttctccagccgccccggccagcacgagctgatggagcccgaggtgaagctcatcggcaacattcatggcacacgaggtggcgggccgggagatgctcatctaccctagcccagtacctgtgctctgagtacctgcttggtaacccctgatcagcggctgttcaacacaaccggatcaactgctgccctccatgaacccttgacgggtattgaggtgggcagcttcccgaaggtgccggctaccaacggggtggacgatcgtggagtgaggaactgcgccacaacctggactctgacccgacacattcccgggacgtgtacgttcgagtaataacggcttgcggaaaacactgcgcgcctgcatcgtacatcaattcccaattcccagcaactactgggggacaaaggggc

SEQ ID NO: 439913 - DNA, 1710 bp, Homo Sapiens
  misc_feature (411)..(411): n is a, c, g, or t
  misc_feature (1482)..(1482): n is a, c, g, or t
gcggccgctctgcgagtctgtggccacatcctccaactcggtgacacagagctccaacagcatatctgccacctgtgggtaggcggtccccatgccggaaagcaccgcggagagcacatccctgcccctgtccccggcccggctgcacactgacagcttgagcaggtctaccaccacacgagtgtcatccgcaatcagcagactggtgaactcatccaaggcctgaggctccggacctgctgctttattttggctttcaacatcctctttggttttggtcatggtttctgcaatgatgcttgcagctcccaggtcatccgtcactgggataaaaggccgagcggaggctgagggggccgacggagtcactgcagagggggtcactgcgtcttcagaggaaacaatctctcntcttttcttgccatggatttggactcagtctgtcttcgatatcaacagccagcatgcattcttctccattcatgggactagccatcgcagatgcgtcggaaggggccgccgaggagaacgaggggcactccaccggggcgatcatggcggccggcatcagggccccgacaacagcatctctggcatacatgatttgcaatgctgtaagaatatgcgataaggcctgctgtttggccagatttccatccaatgacaagagaatcttggcaagagaagggtgatatggcttagaattacttgcaccacttattttattactggcagcagaagaattgacatctgaaggcacgcctaaataggaagcacctaaagggtcccttgcagtctggaagaggacgggctcgtggacagagggcgtggccacatccacagttgtccacgccacactgtgggacgacccacaagccacgcgtgtgatcttctggccttctaagccttgcacgagtgtgggcttcctgttaaccgtggtcgtgccattgccctgctggccgtggtcgttgtcaccccaagcatacacctgccccgagtccgtgaccgccaggcagtgcagggccccgacagccacatgcacgatcttcttccctctcagcccttccaccacctgtggtttccgcacgtgcacgtcagagccgtggcccaatctgaagtaatccccctttccccatgtccacaccactccagacttggtgagcgccagggagaactgagctccacactcaatctggcacaccccctgtccatttagtctctcaatgttctggggaatgttacagccttcacttccgccccggcccagttttccaaagtcaccatcaccccaggaaaataccaaaccttcatcggtcagagccagggtctgcgcgtctctactcccacatgcaacctggattactctgtgaccgagaaggactttcaccattttgggctttagctgtgtcgtattatccccatgtcccagccggccgtactcgccgaggccccaggtgtacagttctccgctggatgtgaggntgcgctgtgcgagctcccacaggcgatatcccggatacgcttggttttcagggcctcgatcagccttggtttgtcacagttcattctgctgaagtgtccaagttttccatcgtcaccttcgccccacgaaaacacttttccatcgacagttaaagccgtcgcgtgccggccacctgagtgaacagccaccttcttgaccacgtagctgctgagagctgtgatctgccg

SEQ ID NO: 439914 - DNA, 1713 bp, Homo Sapiens
  misc_feature (36)..(36): n is a, c, g, or t
  misc_feature (104)..(104): n is a, c, g, or t
  misc_feature (122)..(122): n is a, c, g, or t
  misc_feature (174)..(174): n is a, c, g, or t
  misc_feature (1518)..(1518): n is a, c, g, or t
  misc_feature (1588)..(1588): n is a, c, g, or t
  misc_feature (1592)..(1592): n is a, c, g, or t
ggtgggggacatacagggaagtggcattttccgtgnagaagcaggtgtaggtgtccgagagcttctccagcatcgtcatggaggagatgatgaccggggctagnaggtgctgagctggtctncagggcagggagctcttcttcctcattctctgactgcccgaacttcagccgnagactctcttcaaactcctgatctgtccagtagaagaggacctctgcgccctcagtggccaccaagacgcacttcatcttggcaagcacagtggagcatccagacggccagaggttcagaaagggcttcagcagaccgactcggtgactggctcatgggagagcagcacagcatccctggtcctgcaaatgcttaaaacagagagaatatgagggcaggcagatgccctggtcttgactgctgcccgttgagaaaggacaagctggagaagggctgcgtggtccctggtctctccaggccctgaggcagtctgctaagaacatatctgggatcctgcccctcacctcccataatggagaataggaacccggccagcacagccctttgcacagagcaggtgcccacttttgttccttcctcctttgttcccatgaagtgctctcacttctgcgggtcactcagagctccccaagcagccccagggagcttgctaggagtgactgacgggagacagcatagcacatcccaggttgtgaggatgcagtcccggtgaagggagtggggatcgtgggatgatacgatgaatggaaggaaattaacaggaaaggcatttgggaccagtttctatttttgctttgccaagtcccataaacctctctgagcctcaaaaacctgcggagaaacagagcaacatcccctactctacctccctacagggttagatcatgggagtgaccaggcaagctgcaaagtaaccttagcaaactgcgttcttacataggtgtggggatcattattcctatttcccagcttcccttcttcaaataacaggattaatcaatctggttccggaatcattcatatttgaatagagggcaggaacaacagaaaacttaattaggaagtcaagcactgtgagccagtaagaggcaagtgactacccgccacagagactgctgttacgagttcggcctttagcagccgaaccctgagacgggctccatcacccacatgattggcccgaatgccatattcccgaaacagggggatgcttcccaaaggctgctgggaagagaacctcgccggtgtcacactgagacttccgcttcacctcgctatcttgccctagaaagggaactcggaggggactgactgacgaaaggagctccagatggcggggggccaacctggggcgacccccagcgcccactttcaccatctggaccccagcaaacctccctgtggcccttggtcccgtcttcagcagctccttctggggtcccacacttcggagcccggccctgcccttgagtctctggagagagcgagtcagcagttcgccgnccgcggggctcccgtttgcctagcacgccagtgttctgtccagtttcaccccaaatccccacctcccccnaccnccgaaccttacggccaccctgggaaggaggcttgacttgtgacatccacccctcttcacggctgaggaactttggccccgagcgaggaagcgaccgcccacggccacacgcccggagtggg

SEQ ID NO: 439915 - DNA, 1335 bp, Homo Sapiens
  misc_feature (58)..(66): n is a, c, g, or t
gacccaggtgttttgggaggggtttcccttctggctattctgaaagggccatcccatnnnnnnnnntgcccccccttcccaggccccagatgtgctacctgagctctgatcgccaggggaaggagctggtgtgaagtactcctcagggagggagaagctgtctgtctccgtctctgcagagctccccccagttggggcccgtggagtgagggctccaggcctgctgcacggggatgttctggctgctccgggccctccgcgggggaaggctgaatgtcgtcctctgctgtgctctcgctggggtagaggtcctgaaccaggaggatgagggcaagcaggtcggccgggcgcagggagctggcactgtggctagagtagaatgccagcagcttggagtgcacaagcaggaaggcatgcagggcctcctcgcctccccgctcggggctggtgttgacagcctggatgacgtgccgctccagcgcctctatgcacagctcacagagctgggggtgaatcagtcgctccagggcctccacggcgaagcactgctcctgctcccgcaggcggctgtaggtccacagcagggctctggaagtgctccccacagctggacacgctgcgccaggtctgggggccgcagctcctttcggataagatgaccgtccacagtcaccagcccaaagtgcacttcaaacaggtacttgagcacatacagcttccgccgcaggtccccctcgctctcggtgtggtcaccattgatggcaatgaacaggcattctccaaacaggtgaaggacatacaggaagttgccattttccgtggagaagcaggtgtaggtgtccgagagcttctccagcatcgtcatggaggagatgatgaccggggctaggagggtgctgagctggtcctccagggcagggagctcttcttcctcattctctgactgcccgaacttcagccggagactctcttcaaactcctgatctgtccagtagaagaggacctctgcgccctcagtggccaccaagacgcacttcatcttggcaagcacagtggagcatccagacggccagaggttcagaaagggcttcagcagaccgactcggtgactggctcatgggagagcagcacagcatccctggtcctgcaaatgctcacttccgggagggttgaaggggggctccggagggaggatcgccgcccccagaggggacagcccggaggcccacgtaccggatcgcggcgcgcacagcgccccgcctgcaggagcccggatcccgggaattccggaccggccgcggggtgagacagattcaattagcccggagggagatt

SEQ ID NO: 439916 - DNA, 1646 bp, Homo Sapiens
ggtaccggtccggaattcccgggattgcagctccaccacctcgaccccaagactttcaagtgcagagccatagagctgtcctggttccagacggtgggggagtcggcactgagcgtagagcccttctcctaccaaggggagcctcacattgtgctggcacagcccttcgccggccgctgcctgattctctcctgggactacagcctgcagcgcttccggcccgaggaagagctgcccggtgagccccctccccgtccttctgcctgtccagcagcctgcctggctggcctgacctgcctccccacctccccacagcggcctccgtggtgtcctgcaagccactggtgctgggcccgagcctcttcgtgctggctgcccgcctgtgggggggctcacagctgtgggcccggcccagtcccggcctgcgcctggccccaacgcagaccctggccccgcggcggctgctgcggcccaatgacgccgagctcctgtggctggaagggcaaccctgcttcgtggtggccgatgcctccaaggcgggcagcaccacgctgctgtgccgcgacgggcccggcttttacccgcaccagagcctgcacgcctggcaccgggacacggacgctgaggccctggagctggacggccggccccacctgctgctggcctcggcttcccagcggcccgtgctcttccactggaccggtggccgcttcgagagacgcacagacatccccgaggccgaggatgtctatgccacacgccacttccaggctggtggggacgtgttcctgtgcctcacacgctacattggggactccatggtcatgcgctgggacggctccatgtttcgtctgctgcagcaacttccctcgcgcggtgcccacgtcttccagccactgctcatcgccagggaccaactggccatcctaggcagcgacttcgccttcagccaggtcctccgccttgagcctgacaaggggctcctggagccactgcaggagctggggcctccggccctggtggccccccgtgcctttgcccacatcactatggccggcagacgcttcctctttgctgcttgctttaagggccccacacagatctaccagcatcacgagatcgacctcagtgcctgagaccaccaacaggactctgggcatggctggggcccctggacggccccttggctggctcctggccctacttggggtgatggtccgcctgtgagctgctgaccgtgggccacgttcatcagccacacgtctaggccttaagcccacttcttaaaggatctgcacccatggggggacatagagggtcccagcctactggacctcccgagctgcccttcaggtctaaagcaacatctggacatctcggctggggcagattccccatcaaaggcaacctggggggtgcaggctggtgcactgcatggagtcgaggtggaggtcacgtgcagagctccatgaggtcccggagcccccctctcaacccgctcctaccccgctggtccctctgaaagcaccgaggggttgatggcattcctttcccattctaaactccacgcagccaatcgctttcctggaggagcgccaacctcgaagacaactcagcactgggcgggttcccctctgctgcttgtg

SEQ ID NO: 439917 - DNA, 1578 bp, Homo Sapiens
atgggctggaaaggaccgtgggccaccggcgcgaaggggaagttggctgcagccagaccgaaaacatggagccgtcccagccgcatgaccatggagtccccaatgtagcgtgtgaggcacaggaacacgtccccaccagcctggaagtggcgtgtggcatagacatcttcggcctcggggatgtctgtgcgtctctcgaagcggccaccggtccagtggaagagcacgggccgctgggaagccgaggccagcagcaggtggggccggccgtccagctccagggcctcagcgtccgtgtcccggtgccaggcgtgcaggctctggtgcgggtaaaagccgggcccgtcgcggcacagcagcgtggtgctgcccgccttggaggcatcggccaccacgaagcagggttgcccttccagccacaggagctcggcgtcattgggccgcagcagccgccgcggggccagggtctgcgttggggccaggcgcaggccgggactgggccgggcccacagctgtgagcccccccacaggcgggcagccagcacgaagaggctcgggcccagcaccagtggcttgcaggacaccacggaggccgcgggcagctcttcctcgggccggaagcgctgcaggctgtagtcccaggagagaatcaggcagcggccggcgaagggctgtgccagcacaatgtgaggctccccttggtaggagaagggctctacgctcagtgccgactcccccaccgtctggaaccaggacagctctatggctctgcacttgaaagtcttggggtcgaggtggtggagctgcatgtggctcagggaggcggggcccgcacaggcgccggtccccacgctggcattcacggtgggcatccactgcaggagccagaggacgcggcagtcacactggaacgggttcccgcggaggtccacgtgagtaagggtgtccaggcctcggaacaggaatctggggagggtctccagatggttattggccaggcttaggtgtgtaagcgagcgaagtcctctgagggcattcttagagatggagccaatctcattgtcctcgatgaagaggtactgcaggtgggacaggcccgcaaatgcatcgtcctcaatcacggagaaggagttggaggtgaagaggagcaggtgcagagacggaattctcaggaagctgccggccttcagctgggtgactcccgtcctgacgagtgagagtgacagcagggtcggagagaagctgacgggcaggtccggggagccctcacacagggcgctgtctttagagcaggagcagcgcaggggacactttccctttgggggtctccaggccaccaccacccccgccccagccagcagcagcagcagaatgcctgcccctcccatgcccccacccccactctgaggcacccgcttctcccggcccacccagctcagcccaggccactacgtctcctcctccaccaggccgccctccatccgcctgctggcacgctcggccctggcttctctctcctcttctccgtctttctttcagtcggccttcctccctgttcgatcccgagaattccggacc

SEQ ID NO: 439918 - DNA, 1028 bp, Homo Sapiens
  misc_feature (59)..(91): n is a, c, g, or t
gttccaaagtttgggtgggaaactcccacatggtggctccccaggggagggccgggggnnnnnnnnnnnnnnnnnnnnnnnnnnnnnnnnngtggcctttcccccggtggggcatcccactgcagggagcccagagggacgcgggcagtcaacactgggaacggggttccccgcggaggttccccgtgagtaagggtgtccaggcctcggaacaggaatctggggagggtctccagatggttattggccaggcttaggtgtgtaagcgagcgaagtcctctgagggcattcttagagatggagccaatctcattgtcctcgatgaagaggtactgcaggtgggacaggcccgcaaatgcatcgtcctcaatcacggagaaggagttggaggtgaagaggagcaggtgcagagacggaattctcaggaagctgccggccttcagctgggtgactcccgtcctgacgagtgagagtgacagcagggtcggagagaagctgacgggcaggtccggggagccctcacacagggcgctgtctttagagcaggagcagcgcaggggacactttccctttgggggtctccaggccaccaccacccccgccccagccagcagcagcagcagaatgcctgcccctcccatgcccccacccccactctgaggcacccgcttctcccggcccacccagctcagcccaggccactacgtctcctcctccaccaggccgccctccatccgcctgctggcacgctcggccctggcttctctctcctcttctccgtctttctttcagtcggccttcctccctgttcgtatgtctttggtgtctaattttctgtttctctttctccctgtctttctgtctctgtatttttgactctgtgtgttagtctgtttctatttctgtctttgtctctctttctgcctgtttctttttttctgtgttgctgtcagtctttcaggctttaggtagctgtctatctgttggtctctatgtgtggatcccgggaatccggaccggaccagcct

SEQ ID NO: 439919 - DNA, 1684 bp, Homo Sapiens
  misc_feature (82)..(82): n is a, c, g, or t
gtttcagccaggcttccaccagggcgggacccattcacccccaaaggttagggcccaggagcccagcccaagggggcccgtnccaggggcccccagccaatgccccagagtcctgtgggtggtctcaggcactgaggtcgatctcgtgatgctggtagatctgtgtggggcccttaaagcaagcagcaaagaggaagcgtctgccggccatagtgatgtgggcaaaggcacgggggggccaccagggccggaggccccagctcctgcagtggctccaggagccccttgtcaggctcaaggcggaggacctggctgaaggcgaagtcgctgcctaggatggccaattggtccctggcgatgagcagtggctggaagacgtgggcaccgcgcgagggaagttgctgcagcagacgaaacatggagccgtcccagcgcatgacctgtgggggtgtggccagtgagggcctggggtcccgggggtctctgggggccctggaacagcttggaagcagaagcctgtcggtcccaaaactcccatagctttcttatcttcataaaagtcaccacccacctgttgcggccacacacatggagttgttctgagcccttcccttgccctcacgccccacacagaagcactcagccatggactctgtcagtttcaccttctacagttgtacatttctcccaccgcctctggctgaactccatcccctcctgattggaccatcctggcagcctcttccctggcctctaggctcctctccctgctcccccagtctgttccccacccagagaccttgtgaacacctgagtcagatcagggcccttccagactcagaaccctcccctgcctgcacctcactccagaaacagtgggcagtgcttaaccctagcgtcagccttgggggctcagtgtcagggtggggacaggtgtggctgtggtgaagtctggaatgcatccgagtcacagagccagcatttgggggtagaatcagggatgttggggccagcatcagtgtcggggaactggggagtggttgggagtcagccagccttgaggggggtcagagtcttggcatcagtgtggggtggggtcctggttcaaaggtcggcatgtgagggtaggtcagagtttagaggcttagtgtgcaggattgggtcagtgctgaaaagccagccccccgcccccaggcccagcctcaccatggagtccccaatgtagcgtgtgaggcacaggaacacgtccccaccagcctggaagtggcgtgtggcatagacatcctcggcctcggggatgtccgtgcgtctctcgaagcggccaccggtccagtggaagagcacgggccgctgggaagccgaggccagcagcaggtggggccggccgtccagctccagggcctcagcgtccgtgtcccggtgccaggcgtgcaggctctggtgcgggtaaaagccgggcccgtcgcggcacagcagcgtggtgctgcccgccttggaggcatcggccaccacgaagcagggttgcccttccagccacaggagctcggcgtcattgggccgcagcagccgccgcggggccagggtctgcgttggggccaggcgcaggccgggactgggccgggcccacagctgtgagcccccccacaggcgggcagccatcccgggaattccggaccggtaccag

SEQ ID NO: 439920 - DNA, 993 bp, Homo Sapiens
  misc_feature (501)..(501): n is a, c, g, or t
  misc_feature (770)..(833): n is a, c, g, or t
gggcactcctatatcactgtttattacccccactttacagatgagaaaactggggctcaggaaggcagtgctgcttgctcagggtcttcccactccgggaaatggcagggcagggagtgagacgagcctcttggccctggcagcctttcccccagatctcccgcctcccaccccatcgggaaagccccccacctatggctctgcacttgaaagtcttggggtcgaggtggtggagctgcatgtggctcagggaggcggggcccgcacaggcgccggtccccacgctggcattcacggtgggcatccactgcaggagccagaggacgcggcagtcacactggaacgggttcccgcggaggtccacgtgagtaagggtgtccaggcctcggaacaggaatctggggagggtctccagatggttattggccaggcttaggtgtgtaagcgagcgaagtcctctgaagggcattcttagagatggagccaatctcattgtcctcngatgaagaggtactgcaggtgggacaggcccgcaaaatgcatcgtcctcaatcacggagaaggagttggaggtgaagaggagcaggtgcagagacggaattctcaggaagctgccggccttcagctgggtgactcccgtcctgacgagtgagagtgacagcagggtcggagagaagctgacgggcaggtccggggagccctcacacagggcgctgtctttagagcaggagcagcgcaggggacactttccctttgggggtctccaggcnnnnnnnnnnnnnnnnnnnnnnnnnnnnnnnnnnnnnnnnnnnnnnnnnnnnnnnnnnnnnnnnccactctgaggcacccgcttctcccggcccacccagctcagcccaggccactacgtctcctcctccaccaggccgccctccatccgcctgctggcacgctcggccctggcttctctctcctcttctccgtctttctttcagtcggccttcctccctgttc

SEQ ID NO: 439921 - DNA, 1027 bp, Homo Sapiens
  misc_feature (857)..(857): n is a, c, g, or t
  misc_feature (891)..(891): n is a, c, g, or t
  misc_feature (901)..(901): n is a, c, g, or t
  misc_feature (925)..(925): n is a, c, g, or t
  misc_feature (945)..(945): n is a, c, g, or t
  misc_feature (947)..(948): n is a, c, g, or t
  misc_feature (956)..(957): n is a, c, g, or t
  misc_feature (961)..(962): n is a, c, g, or t
  misc_feature (965)..(965): n is a, c, g, or t
  misc_feature (977)..(977): n is a, c, g, or t
  misc_feature (992)..(992): n is a, c, g, or t
  misc_feature (994)..(994): n is a, c, g, or t
  misc_feature (1007)..(1007): n is a, c, g, or t
gggacgtcatgaggaagtgccggcccactgaagccgtggggacgcgcccagcggagctaatcagattacctggctggtgtttgcttgttctggagtgatcttctgactggaaaagaactatgtcatggatcaaggaaggagagctgtcactttgggagcggttctgtgccaacatcataaaggcaggcccaatgccgaaacacattgcattcataatggacgggaaccgtcgctatgccaagaagtgccaggtggagcggcaggaaggccactcacagggcttcaacaagctagctgagactctgcggtggtgtttgaacctgggcatcctagaggtgacagtctacgcattcagcattgagaacttcaaacgctccaagagtgaggtagacgggcttatggatctggcccggcagaagttcagccgcttgatggaagaaaaggagaaactgcagaagcatggggtgtgtatccgggtcctgggcgatctgcacttgttgcccttggatctccaggagctgattgcacaagctgtacaggccacgaagaactacaacaagtgtttcctgaatgtctgttttgcatacacatcccgtcatgagatcagcaatgctgtgagagagatggcctggggggtggagcaaggcctgttggatcccagtgatatctctgagtctctgcttgataagtgcctctataccaaccggtctcctcatcctgacatcttgatacggacttctggagaagtgcggctgagtgacttcttgctatggcagacctctcactcctgcctgggtgttccaacccgttctgtggccagaggtatacattttggaacctcttcgaggccatcctgnagttccagatgaaccatagcatgcttcagaaggnccgagacatntatgcagaggagcggaagagagancagctggagagggacaagcntnntgacaganngctnngcnagagggcccaancaagtgggacgccancncgagacacgcttnacaaatctcgccaacggaaa

SEQ ID NO: 439922 - DNA, 1038 bp, Homo Sapiens
  misc_feature (847)..(847): n is a, c, g, or t
  misc_feature (911)..(911): n is a, c, g, or t
  misc_feature (937)..(937): n is a, c, g, or t
  misc_feature (949)..(949): n is a, c, g, or t
  misc_feature (951)..(951): n is a, c, g, or t
  misc_feature (958)..(958): n is a, c, g, or t
  misc_feature (966)..(966): n is a, c, g, or t
  misc_feature (972)..(972): n is a, c, g, or t
  misc_feature (989)..(989): n is a, c, g, or t
  misc_feature (991)..(991): n is a, c, g, or t
  misc_feature (1005)..(1005): n is a, c, g, or t
  misc_feature (1017)..(1017): n is a, c, g, or t
  misc_feature (1020)..(1020): n is a, c, g, or t
  misc_feature (1024)..(1024): n is a, c, g, or t
  misc_feature (1030)..(1030): n is a, c, g, or t
  misc_feature (1034)..(1034): n is a, c, g, or t
tacaactttaaatacggaatataaataaattttacatttaaaaaataaaaggaaagcccccaaaaatataatcaccgactttacaaactgaaggaagcaggttttggaaggcgggaagggggaaagtgcagtaggtgggaagggaggtgggagctcagatcccaccccagggggtcttggggatcttttcccttctctcccccattcccagcccacgagctggtttcctaggaggagccaccagaggtggagctcagaaggatcaaagatggggaagtgtgcaagcagggaggggtgcgggcaagagggctgcaccctcccttggagaccttctcccaggtgtcccacacccacctggaagggcagttgctggagcagaggactttgggaaatggaggtcatgtggacagcagtgttgcctccctgcccctaccacagtctccctcctatttggccactccaagccacaggctgcatcaggggcacagccagtccacaaggagtctttgtgtgaattaggaaaaggatccttttcctctttacctacatctgccagaaattgtcataataaatatacaaatcagctttatctatgatgtgaacagtgctccctgcatacaatgtccttgtgcagtacacaccctgcacaaccttacatggcagtcgtggctgggttggaatatgatgagcaggtcccttgctgccctggcctctagtcttctgccctagagaggagtgactgggatcatctggggctttaataaggggttcaagagccccttggtggagcagactgaagggccaggacaagaggaaaatgcagggtggaggtagagagatgaaaggnaccagaggaagaggtgaatcagagtggagtgtggggaggaaggggtggcaggaggcaggggacnaccagggtcaccatctacagccaccncaacagccaacncnatctctnaccacctnagaggncccagccacttggtgtncnggcaaaccaccaanaggagtcacgtnttnaaangaaacnaaanaagc

SEQ ID NO: 439923 - DNA, 1101 bp, Homo Sapiens
  misc_feature (138)..(138): n is a, c, g, or t
  misc_feature (245)..(271): n is a, c, g, or t
  misc_feature (378)..(401): n is a, c, g, or t
  misc_feature (777)..(777): n is a, c, g, or t
  misc_feature (893)..(893): n is a, c, g, or t
  misc_feature (921)..(921): n is a, c, g, or t
  misc_feature (923)..(923): n is a, c, g, or t
  misc_feature (947)..(947): n is a, c, g, or t
  misc_feature (952)..(952): n is a, c, g, or t
  misc_feature (965)..(965): n is a, c, g, or t
  misc_feature (980)..(980): n is a, c, g, or t
  misc_feature (982)..(982): n is a, c, g, or t
  misc_feature (985)..(985): n is a, c, g, or t
  misc_feature (987)..(987): n is a, c, g, or t
  misc_feature (995)..(995): n is a, c, g, or t
  misc_feature (998)..(999): n is a, c, g, or t
  misc_feature (1006)..(1008): n is a, c, g, or t
  misc_feature (1025)..(1025): n is a, c, g, or t
  misc_feature (1036)..(1036): n is a, c, g, or t
  misc_feature (1039)..(1039): n is a, c, g, or t
  misc_feature (1045)..(1045): n is a, c, g, or t
  misc_feature (1047)..(1047): n is a, c, g, or t
  misc_feature (1049)..(1050): n is a, c, g, or t
  misc_feature (1063)..(1063): n is a, c, g, or t
  misc_feature (1068)..(1068): n is a, c, g, or t
  misc_feature (1070)..(1071): n is a, c, g, or t
  misc_feature (1078)..(1078): n is a, c, g, or t
  misc_feature (1080)..(1080): n is a, c, g, or t
  misc_feature (1093)..(1093): n is a, c, g, or t
cccggctcagggaggcttaaaagctgtgatgctgaacgcagacggcgggcgctcgggggctggggggcgggtagaggccgccatttctcaaaaaggtctccatcgagccggcctctgctcccgcccgaggggcgtacngcccgatcccggcacccgggactgcccgtgggtccctgctggctggggacccccagcccccggctgcgcgcagggaaaggctgcagaacgcagagaccagagaagcnnnnnnnnnnnnnnnnnnnnnnnnnnnccacggctgtagcccggccccgcagtctcggagcctcagtttccttctctgttccacgggagcgtggacggagggatttccgaggctttgaccgctctgatagcccnnnnnnnnnnnnnnnnnnnnnnnntgcgccagccctggtcctgagcccccagcccggcgccggaacccggaccgcgatctcgggagccgagccccgcggctccagatgaaggcgcgagtgcgcggtgtgccgggtggggtgtctgagcgagagcggacttctcaggtggacgcccccagccacctccgggacccttcctgctggcctttgggcctgagaagtgggcgcggctggacagacgggaaacagccccccacgcacaggtggacacccgggggataccgggcgcgcgcggcgcctgggcaagggggaagctgctgggagacgcgggcggctgctcccgcggggccccctttccgaagcgccgctgcgaacgtccagccccggcgacgcgccctgncccgcgatcgggccggcgccgcggacaggaaaggctcgatcagctaggtctgcctccgagaagtcccagcgcccgcccgcacggggtggggactgacagtccccggggacggggcnggttcacagagcccgggagctgggggangngaggcgccgggggcccgacccgtnggaangtccctgtaccangctgcccggcgcttntnaananacacgganatnnaaaaacnnngggcggccggtaccccnctctgactttntgngcggangncnnctcgagcgttacnccggncnngggtgtncncctggtctttgancaacccgc

SEQ ID NO: 439924 - DNA, 1082 bp, Homo Sapiens
  misc_feature (7)..(7): n is a, c, g, or t
  misc_feature (14)..(14): n is a, c, g, or t
  misc_feature (16)..(16): n is a, c, g, or t
  misc_feature (20)..(20): n is a, c, g, or t
  misc_feature (39)..(39): n is a, c, g, or t
  misc_feature (50)..(50): n is a, c, g, or t
  misc_feature (56)..(56): n is a, c, g, or t
  misc_feature (72)..(72): n is a, c, g, or t
  misc_feature (76)..(76): n is a, c, g, or t
  misc_feature (99)..(99): n is a, c, g, or t
  misc_feature (105)..(105): n is a, c, g, or t
  misc_feature (135)..(135): n is a, c, g, or t
  misc_feature (145)..(146): n is a, c, g, or t
gcaaaantttatcnanccanaaataaaaatcacctctantcaatcgtacnacgggngacacgaatgaggggngcantgccgcatcctaacaatgggacnggatcnctttttcgtttactgttcttaaaacaatgntgaaaaactnnttttagcttgtcgttgaatttcatattctgaatctcgtattctattctgagatgatcctgatggttttctttcttgtccttctgatgttttatcctcttcatctgatactttattatctatttctattttctttaacataactttatcatcaaagtttaacctttttttggtttttactgaaacctctgtacttgaaggcagcatatttactgaattttcaaaagtgtaagtctctctcttttgggcactagatggaataacattttgtgatacagatgtttttgcatccaaaagaacagaaggtgagccaacggataagtaaaattcttcatcagcttcactgtgatgatcatttatgtttctacttgatatttttttcgagtcaggtgtatttttggaactaacatcagttgccagaattttctgatgaacttcatgggcctgaactgatctgtttgtggcttcacttggttctacaacaaactgtagagaggcttctttcttctttgaagaaactggaactgactttggatgtgatttctggcactctttgcttggtgactgaatacaagtgtcttttattttgcgtgttgaattaggcactgattttgtagaatttgtactaaaatcattggcaagacttttttcttcaaaacagtcttgtaagatttccagaacattctggccttgctctgtgttaatgtcacgtgccctggaaggtcgacaaaatcttcttctgtagccatttttgagatgatccagaccggacgcagccatgttccggccccgctgagccagcgcaactgtctgaggtggaagcccacacggaccacagctccaggaagccgagcaagaaacgaatcgccggaataccaggccgcggccaagcaataaccttaagtctcaggcgactgccgcgagagctgcgatccgga

SEQ ID NO: 439925 - DNA, 894 bp, Homo Sapiens
ccaggagagtgccctaaatgactgcagtgtttcaagcgtaagcatttcccacactcctttgttctgaaggcagccccaggtgaaggtggtcccactagcaggaagattaggaggcagcagctatgcagaagccatgtctcctggccctgccagagctcaacggtagaccttgctgaactcctggagggcccaccgcttgttctctgttgcctgcttgagtacggtgtactctttcaccagcctgtcaaactcctccccaaggacctcataggagttcaggacctgtcttgagttctccatgtcctgctcctgtaggtgaatggctccctccaaacggtccctaatcagacgatgaacttccactttctcaacagtgtaagtgtcggacaaaatctttagctcctccatcctcagcttaaggatcatagcaccgcacttgacttccaggtactgggcattgatgcggtctagctcggattgagtcttcagccggtgttcttgaagaagcctctgcagcaaagtgaggcagcggagaagcacctgggagtaagcagcactcttcttctccagcagcaacatctgctccttctgctggctcttggcatcctggcactgctgctgctcacccaccaggacctctgcgagtttccacacctttgctgccttcacggtttcactgtcagcatctgaattgggatcatagtagcagagcagagtgaaacatttctttttgagctgctcctctacttcttgctgtagccgagccctcatccacacaaaatcctttttgtcctcagaagttacatttgtgtcttgtatcttcacatagtagtccacaagcaactcttgaatgactctgtgtaaaatctcagacctcaaccatgttgtcttatg

SEQ ID NO: 439926 - DNA, 1769 bp, Homo Sapiens
  misc_feature (211)..(219): n is a, c, g, or t
gcctagtagcgtgatatgggcgcgcgccctgtggcgcagcgcgtcttgagtatactctgcagattgagctctcttcccgcggggagtggagggtgaatttacctgctccgctgcataaagcggaggagaacgcattccggctgacccgatgcagtgtccccgcgagatctgttgtcccggggtgattattgtagcccccgccgggaccggnnnnnnnnngagggccaacagggcccccaatgctggtgggaaattcgattttcataagctccgggaagcccgtggggccgccccgggggttcccccgggggtggttgtgttatttgtttttaagatataatatcataactttattcaggagataatcaaatacaatacagggctgacactgacacacagctatgcataaaaattatataaatctccttgctagattttccagaagaggcccagtcataaaaaataaagagaaaccaggagagtgcctaaatgactgcagtgtttcaagcgtaagcatttccacactcccttgtactgaaggcagccccaggtgaaggtggtcccactagcaggaagattaggaggcagcagctatgcagaagccatgtctcctggccctgccagagctcaacggtagaccttgctgaactcctggagggcccaccgcttgttctctgttgcctgcttgagtacggtgtactctttcaccagcctgtcaaactcctccccaaggacctcataggagttcaggacctgtcttgagttctccatgtcctgctcctgtaggtgaatggctccctccaaacggtccctaatcagacgatgaacttccactttctcaacagtgtaagtgtcggacaaaatctttagctcctccatcctcagcttaaggatcatagcaccgcacttgacttccaggtactgggcattgatgcggtctagctcggattgagtcttcagccggtgttcttgaagaagcctctgcagcaaagtgaggcagcggagaagcacctttttgtcctcagaagttacatttgtgtcttgtatcttcacatagtagtccacaagcaactcttgaatgactctgtgtaaaatctcagacctcaaccatgttgtcttatgcagtcgaacttccttccatgcctgagcctgctcctttgctagggtgaggcttaagccactctcatccacatgctgtgagagattcaggagaagcttgctgaagtatgggttctgtaacaggtcctctttactcaggttacaaggaggaagttgtttgctgcacacttgttgaagtatttccatcccttctccaggtgagcagaaatccccggatgccatttgattttcttgggattctaatagggcccgagatgaatcaaaatgcagaacgggctctccggcgcctacttcccttctgtctgggcggccaaggattcccaagagcgacgacggtctccggccactggccggaatgactctcccagagctcctcttccccgaagctccgcccgccgaccctctaaagcaaacctgcacaccctggggcagctgaagctctcaaggcggtgccgagaacctcggctggggagggctggccagcagcgtctacaccccagaacccgcccgcgccggggctccggaacctctcgttcgggccgggcgcaggggctgggggaagcgaggcccggaaagaccaagctgaaaggcccgggaaggggaaggagccgaaagtgcactagaggccgcgacgaaatcccgggaatccc

SEQ ID NO: 439927 - DNA, 924 bp, Homo Sapiens
ttgaggcccttccccaaaagcgtgaaccaggcccttggaagggctatttatgattttaaccgcttccatgttttatagaaacatttggttttactcgattctttttatgagtaacattcaaagtaactactcattgttttttaacatgtttagagggggacgcagctgaggaggcagaatgctgggacttaatttgcagctcggccggccgttgcttctgagaacttaaggaaaatgcttttttctgtgccaaacttttcccacctgcaaaactgagataacgattcctgccttggatgagacattaagaattaataacacaatcgacttgtcaacaaaagccactacttagttaagttcagtgttttaacaattctgtttatcgttgatctatgactgcaaataaaaagttttgcaggcaaatttcgcacttggaaatgaagaccaacccaaattccaaaaagctagctgttcgtccccccctagggtaagtgtccccttgcgttttttagggtgcctttctttacccttcttaaaggttacagggcgtgaacggcaatcaggctcgattctccaccctctgcactcagacgtgttaaaacgctgctacagggacccaagcatttaaatgttctgactcaggcgtcttttaaattcttagagctgtctttacacgctgcactgaacgttaaattgattttacaggttattttcacaagatatgacccttacagggcccgagatgaatcaaaatgcagaacgggctctccggcgcctacttcccttctgtctgggcggccaaggattcccaagagcgacgacggtctccggccactggccggaatgactctcccagagctcctcttccccgaagctccgcccgccgaccctctaaagcaaacctgcacaccctggggcagcgga

SEQ ID NO: 439928 - DNA, 1046 bp, Homo Sapiens
ccggtgttcttgaaggaagcttctgcagcaaagtgaggcagcggagaagcacctgggagtaagccagccctttttttttcccagcagcaacatttgctcctttctgctggctcttggcatcctggcactgctgctgctcacccaccagggaccctttgcgagtttccacacctttgctgccttcacggtttcactgtcagcatctgaattgggatcatagtagcagagcagagtgaaacatttctttttgagctgctcctctacttcttgctgtagccgagccctcatccacacaaaatcctctgagagtggcatgagttccagaaggtccgctttctccagccccagcagtggaggtatctccctctcctggctaggacctaagagccgcatcagttcagttacaagcagccgctgttcaagggtctcatgaaactttttgtcctcagaagttacatttgtgtcttgtatcttcacatagtagtccacaagcaactcttgaatgactctgtgtaaaatctcagacctcaaccatgttgtcttatgcagtcgaacttccttccatgcctgagcctgctcctttgctagggtgaggcttaagccactctcatccacatgctgtgagagattcaggagaagcttgctgaagtatgggttctgtaacaggtcctctttactcaggttacaaggaggaagttgtttgctgcacacttgttgaagtatttccatcccttctccaggtgagcagaaatccccggatgccatttgattttcttgggattctaatctgcacaccctggggcagctgaagctctcaaggcggtgccgagaacctcggctggggagggctggccagcagcgtctacaccccagaacccgcccgcgccggggctccggaacctctcgttcgggccgggcgcaggggctgggggaagcgaggcccggaaagaccaagctgaaaggcccgggaaggggaaggagccgaaagtgcactagaggccgcgacgaagcctcgtgccgaattcgccacccaggcctcgctactt

SEQ ID NO: 439929 - DNA, 903 bp, Homo Sapiens
cgagccctcatccaccacaaaatcttctgagagtggcatgagtcccagaaggtccgctttttccagccccagcagtggaggtatctccctctcctggctaggacctaagagccgcatcagttcagttacaagcagccgctgttcaagggtctcatgagactttttgtcctcagaagttacatttgtgtcttgtatcttcacatagtagtccacaagcaactcttgaatgactctgtgtaaaatctcagacctcaaccatgttgtcttatgcagtcgaacttccttccatgcctgagcctgctcctttgctagggtgaggcttaagccactctcatccacatgctgtgagagattcaggagaagcttgctgaagtatgggttctgtaacaggtcctctttactcaggttacaaggaggaagttgtttgctgcacacttgttgaagtatttccatcccttctccaggtgagcagaaatccccggatgccatttgattttcttgggattctaatagggcccgagatgaatcaaaatgcagaacgggctctccggcgcctacttcccttctgtctgggcggccaaggattcccaagagcgacgacggtctccggccactggccggaatgactctcccagagctcctcttccccgaagctccgcccgccgaccctctaaagcaaacctgcacaccctggggcagctgaagctctcaaggcggtgccgagaacctcggctggggcgggctggccagcagcgtctacaccccagaacccgcccgcgccggggctccggaacctctcgttcgggccgggcgcaggggctgggggaagcgaggcccggaaagaccaagctgaaaggcccgggaaggggaaggagccctcgtgccgaattcgccacccaggcc

SEQ ID NO: 439930 - DNA, 864 bp, Homo Sapiens
tgggagctggaacatccaatctggtttctgctggagcttttaactgcaatgacgttctgttcatggaagggcctgaaatgctatgaatgtcttgataggtcccatatgctaggtctttcattttctttgtccatctgttaactcatacagctgctgagcacaatctttaattaactcatccaaagcatcttccattgctgataagtcagaaagttcctcctgtagcttcttttgtttggggaactgctccaaaattgctaagatcagatcctatccatctaatatggttcttggatttcttttcaacgaggtcgattccatctaagacattggtgatgtcatacactctccgctttcggactcccagtttcgttgcaaccttgtttaagtcaagaatacccccgggagcagatttgtcatgatcgatacattttcgagttacatatatcttcgatacattaaaacgaggtctcttcactttttgagtttcagcaggccctccacgttgatggggtctcggcaccgacggcgaaccgtctcctccgtcgggtccaggaggagactgggtaacttcctcgccggccgctgctgactcatgctgcccggccgggcgtcgtgctcccctcgcaccccacgagctctcccgccctctcgcgctcagctcgagcaccgccccccacgcgccgatttccaagggcccagcacctaaggggtccgcggcttcctccgaggcgccgcccggctaggccgtcccgcccgccagtaaacgcggcacggcctcacgtgcccgggagctcccgacgcagacggaaaaagaggagggagacccgcggatctcaagtcgcccggcccgccatcttcccg

SEQ ID NO: 439931 - DNA, 2603 bp, Homo Sapiens
  misc_feature (557)..(589): n is a, c, g, or t
  misc_feature (2467)..(2468): n is a, c, g, or t
  misc_feature (2533)..(2533): n is a, c, g, or t
  misc_feature (2556)..(2556): n is a, c, g, or t
atttgttcagacatttattgagcacttcttaagggccaggcatggtgtgaggcactgggatgtaacagtgattatgacaaagtccctcaaggagctcacagtctaatggtaaactacagagtaaactgaggcacagagtggtaaatgacttacccaatgaggtagaaacagctaggtatgtgaaaatgtgggagcagagctggagagagggcaaggtacaacttgtcctaagtaaaaccccttggactgactcaacagcaaggctgcatacacaaacattacaaaatctacttgcaaaaacctgaaaggagtttccaattatcaccatgactgaattcatgtttcacaatgaattcagctatttcctgatggcatttctatccttgcccccaaagccactgggcatgccaccagtctgctgggagacagcaattaggtagacagcttaaaaccaagaagtatctgactccaattttagcactgaaaaccatattaaaatactttaattaaatccacaaacataaatgtgtagcacatttatgatacttctacatgtnnnnnnnnnnnnnnnnnnnnnnnnnnnnnnnnnccagaggattctaataagttatagataccaaagagattagagaatttgtctgtcactttccatatatacattattttggctgtacaagggtgaaaagtgtcactcagacatatttcgtaagtaatctcaacattatacagatatatacaaagacatcacatttaaattcgtgtgtacatctatgcaatgtacaacagtaactgcaaacgtgaaccagtgtaaggcaatttcttttgtgatatatgacatactccttgaagggaagggtagagtccacaaagaactgtccatttcagcctgactgtctgtcttcatgacactctgtgatgaagctacttcaggaggcaagatgtctatttcactgacaaaaagcagtgaattattataaaaaggagttgttttcaaatgtggaaaccacaattactcagtaatctaagtggtgaaactcctcaaagacactactggccatgatgccgctactgagaacgagagcacttcatggataatttattgctctgagaatcaaatttgatgcgtaattctccaggaagatattcccaaaaaactcagtgatacataaattctcaaatgccatcagttgcttacttcaagcaattcttcactttgctgaggattttcttcttcctcagggccttctggatgagtgctctcagatgaagaggtcctgacaccttcagaccttttgttactggtctgaccctgctccacttctcacaaatagacatcgataggtccgttggtgctccttatgtgcactgtgatagagtcttctctgggagctggaacatccaatctggtttctgctggagctttaactgcaatgacgatctgttcatggaaggcctgaatgctatgaatgtcttgataggtcacatatgctagtctttcattttctttgtcatctgttaactcaaacagctgctgagcacaatccttaattaactcatccaaagcatcttccattgctgataagtcagaaagttcctcctgtagcttcttttgttggggaactgctccaaaattgctaagatcagatcctatccatctaatatggttcttggatttcttttcaacgaggtcgattccatctaagacattggtgatgtcatacactctccgctttcggactcccagtttcgttgcaaccttgtttaagtcaagaatacccccgggagcagatctgacaagatccataaattttcgagttaaataaaccagcgatacatcaaaacgaggtctcttcacttttagagcttttctcatggacacatattgtacattatcttctaaattaatccttatttttgatggcagcaggccctccacgttgatggggtctcggcaccgacggcgaaccgtctcctccgtcgggtccaggaggagactgggtaacttcctcgccggccgctgctgactcatgctgcccggccgggcgtcctgctcccctcgcaccccacgagctctcccgccctctcgcgctcagctcgagcaccgccccccacgcgccgatttccaagggcccagcacctaaggggtccgcggcttcctccgaggcgccgcccggctaggccgtcccgcccgccagtaaacgcggcacggcctcacgtgcccgggagctcccgacgcagacggaaaaagaggagggagacccgcggatctcaagtcgcccggcccgccatcttcccgcatgcgcagtcaaaatagttgctcttctggagagatggctgtgggattcatgtgtcatagttatcccttcttaaacatcagtgtttgactttctatcccttgtcctgagacctctgagggtagcccctgttttagcagaatctacttctaatactttcctaaagaggcttnntccagaagtttcattcaacaataaccgagtgcctttctacagcactcattgtttctgtatctccngtgccacagaattcacagttaanatcatgactaacattttaagtcgtcacctgatatgtatttttatctt

SEQ ID NO: 439932 - DNA, 1497 bp, Homo Sapiens
  misc_feature (135)..(146): n is a, c, g, or t
gatgtttggttaacttgggcaatatgacaagtattactttttgggcaaaactactcattaagcaatttctctagtgtgtcggacacaaataggttctttatttttggcatgtatgcctttttattttcattcaannnnnnnnnnnnctcagacagacatagtagtaacgactagcattggaaaatacatatcactattcttggaatatttatggtcagtctactttttagtagaatatttttggatagcgttgacacgatagatcttattccatacttctttattattgataattttattttcattttttgctttcattattatacatattttggtggagaagaggttgggcttttttgaaagagacaaaaatttattataacactaaacactccttttttgacatattaaagcctttattccatctctcaagatatattataaaatttatttttttaatttaagatttctgaattattttatcttaaattgtgattttaaacgagctattatggtacggaactttttttaatgaggaatttcatgatgatttaggaattttctctcttggaaaaggcttcccctgtgatgaaaatgatgtgccagctaaaattgtgtgccatttaaaaactgaaaatattttaaaattatttgtctatattctaaattgagctttggatcaaactttaggccaggaccagctcatgcgttctcattcttccttttctcactctttctctcatcactcacctctgtattcattctgttgtttgggatagaaaaatcataaagagccaacccatctcagaacgttgtggattgagagagacactacatgactccaagtatatgagaaaaggacagagctctaattgataactctgtagttcaaaaggaaaagagtatgcccaattctctctacatgacatattgagattttttttaatcaacttttaagatagtgatgttctgttctaaactgttctgttttagtgaaggtagattttttaaaacaagcatggggattcttttctaaggtaatattaatgagaagggaaaaaagtatctttaacagctctttgttgaagcctgtggtagcacattatgtttataattgcacatgtgcacataatctattatgatccaatgcaaatacagctccaaaaatattaaatgtatatatattttaaaatgcctgaggaaatacatttttcttaataaactgaagagtctcagtatggctattaaaataattattagcctcctgttgtgtggctgcaaaacatcacaaagtgaccggtcttgagacctgtgaactgctgccctgtttagtaaataaaattaatgcatttctagagggggaatatctgccatccagtggtggaaatgtggagtaaagaagctggtggtctgcttctgtgctgtatgccagccttttgccttaagttgagaggaggtcaactttagctactgtctttggtttgagagccatggcaa

SEQ ID NO: 439933 - DNA, 1475 bp, Homo Sapiens
  misc_feature (141)..(141): n is a, c, g, or t
  misc_feature (173)..(173): n is a, c, g, or t
  misc_feature (204)..(204): n is a, c, g, or t
  misc_feature (348)..(348): n is a, c, g, or t
  misc_feature (352)..(352): n is a, c, g, or t
  misc_feature (365)..(365): n is a, c, g, or t
  misc_feature (371)..(371): n is a, c, g, or t
  misc_feature (389)..(389): n is a, c, g, or t
  misc_feature (391)..(391): n is a, c, g, or t
  misc_feature (400)..(400): n is a, c, g, or t
  misc_feature (411)..(411): n is a, c, g, or t
  misc_feature (420)..(421): n is a, c, g, or t
  misc_feature (427)..(427): n is a, c, g, or t
  misc_feature (486)..(486): n is a, c, g, or t
  misc_feature (490)..(491): n is a, c, g, or t
  misc_feature (495)..(495): n is a, c, g, or t
  misc_feature (500)..(501): n is a, c, g, or t
  misc_feature (503)..(503): n is a, c, g, or t
  misc_feature (507)..(508): n is a, c, g, or t
  misc_feature (520)..(521): n is a, c, g, or t
  misc_feature (526)..(526): n is a, c, g, or t
  misc_feature (563)..(563): n is a, c, g, or t
  misc_feature (566)..(567): n is a, c, g, or t
  misc_feature (573)..(574): n is a, c, g, or t
  misc_feature (579)..(580): n is a, c, g, or t
  misc_feature (590)..(591): n is a, c, g, or t
  misc_feature (595)..(595): n is a, c, g, or t
  misc_feature (601)..(601): n is a, c, g, or t
  misc_feature (606)..(607): n is a, c, g, or t
  misc_feature (611)..(613): n is a, c, g, or t
  misc_feature (617)..(617): n is a, c, g, or t
  misc_feature (626)..(627): n is a, c, g, or t
  misc_feature (630)..(630): n is a, c, g, or t
  misc_feature (633)..(633): n is a, c, g, or t
  misc_feature (638)..(639): n is a, c, g, or t
  misc_feature (645)..(646): n is a, c, g, or t
cctaagggttcatggaagcatggcatcttgtccttgcttttagaacacccatggaagaaaacacagagtagatattgctgtcatttatacaactacagaaatttatctatgacctaatgaggcatctcggaagtcaaagangagggaaagttaaccttttctactgatttcgnagtatattcagagctttcttttaagagctgngaatgaaactttttctaagcactattctattgcacacaaacagaaaaccaaagccttattagacctaatttatgcataaagtagtattcctgagaactttattttggaaaatttataagaaagtaatccaaataagaaacacgntagntgaaaataatttntatagnaaataattgttttgggcngntttttcagnaaatccaaagngacttaggnnagaagntacactaaggaccaggggttggaatcagaatttagtttaagatttgaggaaaagggtangggnnagtntcagnntnaggnntagagccagaanngggtnaggtgagaaagaaagttaaggttaaggctagagccgnctnnaagggnnagggnnaggaccaggnnaggncagggntgganngggnnnagantggggccanngcnggngttanntgatanntgtcaggatggaggtaaggtttggagtaagcgttggtgcttgaagtgagttcaggctagcattaaattgtaagttctgaagctgatttggttgtggggtctttcccctgtatactaccagttgtgtctttagatggcacacaagtccaaataagtggtcatacttctttattcagggtctcagctgcctgtacacctgctgcctacatcttcttggcaacaaagttacctgccacaggctctgctgagcctagttcctggtcagtaataactgaacagtgcattttggctttggatgtgtctgtggacaagcttgctgagtttctctaccatattctgagcacacggtctcttttgttctaacttcagcttcactgacactgggttgagcactactgtatgtggagggtttggtgattgggaatggatgggggacagtgaggaggacacaccagcccattagttgttaatcatcaatcacatctgattgttgaaggttattaaattaaaagaaagatcatttgtaacatactctttgtatatatttattatatgaaaggtgcaatattttattttgtacagtatgtaataaagacatgggacatatatttttcttattaacaaaatttcatattaaattgcttcactttgtatttaaagttaaaagttactatttttcatttgctattgtactttcattgttgtcattcaattgacattcctgtgtactgtattttactactgtttttataacatgagagttaatgtttctgtttcatgatccttatgtaattcagaaataaatttactttattatgtcagtggcatcc

SEQ ID NO: 439934 - DNA, 924 bp, Homo Sapiens
  misc_feature (723)..(723): n is a, c, g, or t
  misc_feature (747)..(747): n is a, c, g, or t
  misc_feature (751)..(751): n is a, c, g, or t
  misc_feature (755)..(755): n is a, c, g, or t
  misc_feature (768)..(768): n is a, c, g, or t
  misc_feature (771)..(771): n is a, c, g, or t
  misc_feature (804)..(804): n is a, c, g, or t
tggttccttctgtttggacttagcctgtatttctgtggtctctctgatgctgtattgaaagatggttatttcagaaatttaaaggctttaactcgcttggatctatccaaaaatcagattcgtagcctttaccttcatccttcatttgggaagttgaattccttaaagtccatagatttttcctccaaccaaatattccttgtatgtgaacatgagctcgagcccctacaagggaaaacgctctccttttttagcctcgcagctaatagcttgtatagcagagtctcagtggactggggaaaatgtatgaacccattcagaaacatggtgctggagatactagatgtttctggaaatggctggacagtggacatcacaggaaactttagcaatgccatcagcaaaagccaggccttctctttgattcttgcccaccacatcatgggtgccgggtttggcttccataacatcaaagatcctgaccagaacacatttgctggcctggccagaagttcagtgagacacctggatctttcacatgggtttgtcttctccctgaactcacgagtctttgagacactcaaggatttgaaggttctgaaccttgcctacaacaagattaataagattgcagatgaagcattttacggacttgacaacctccaagttctcaatttgtcatataaccttctgggggaactttacagttcgaatttctatggnactacctaaggtagcctacattgnattngcanaaagaatcacatntgncatatttcaagaccaaacattcaaattcctggngaaattacagactttgggatctccgagacaatgctcttacaaccattcatttttttccagcatacccgatatcttcttgaggtgccataaactagggactttgcccaagatcaaccttag

SEQ ID NO: 439935 - DNA, 1665 bp, Homo Sapiens
  misc_feature (1537)..(1537): n is a, c, g, or t
gcggccgctgctgcctctccttgtggtggccgcgtgcgtcctgcccggagccggcgggacatgcccggagcgcgcgctggagcggcgcgaggaggaggcgaacgtggtgctcaccgggacggtggaggagatcctcaacgtggacccggtgcagcacacgtactcctgcaaggttcgggtctggcggtacttgaagggcaaagacctggtggcccgggagagcctgctggacggcggcaacaaggtggtgatcagcggctttggagaccccctcatctgtgacaaccaggtgtccactggggacaccaggatcttctttgtgaaccctgcacccccatacctgtggccagcccacaagaacgagctgatgctcaactccagcctcatgcggatcaccctgcggaacctggaggaggtggagttctgtgtggaagataaacccgggacccacttcactccagtgcctccgacgcctcctgatgcgtgccggggaatgctgtgcggcttcggcgccgtgtgcgagcccaacgcggaggggccgggccgggcgtcctgcgtctgcaagaagagcccgtgccccagcgtggtggcgcctgtgtgtgggtcggacgcctccacctacagcaacgaatgcgagctgcagcgggcgcagtgcagccagcagcgccgcatccgcctgctcagccgcgggccgtgcggctcgcgggacccctgctccaacgtgacctgcagcttcggcagcacctgtgcgctgctcggcggacgggctgacggcctcgtgcctgtgccccgcgacctgccgtggcgcccccgaggggaccgtctgcggcagcgacggcgccgactaccccggcgagtgccagctcctgcgccgcgcctgcgcccgccaggagaatgtcttcaagaagttcgacggcccttgtgacccctgtcagggcgccctccctgacccgagccgcagctgccgtgtgaacccgcgcacgcggcgccctgagatgctcctacggcccgagagctgccctgcccggcaggcgccagtgtgtggggacgacggagtcacctacgaaaacgactgtgtcatgggccgatcgggggccgcccggggtctcctcctgcagaaagtgcgctccggccagtgccagggtcgagaccagtgcccggagccctgccggttcaatgccgtgtgcctgtcccgccgtggccgtccccgctgctcctgcgaccgcgtcacctgtgacggggcctacaggcccgtgtgtgcccaggacgggcgcacgtatgacagtgattgctggcggcagcaggctgagtgccggcagcagcgtgccatccccagcaagcaccagggcccgtgtgaccaggccccgtccccatgcctcggggtgcagtgtgcatttggggcgacgtgtgctgtgaagaacgggcaggcagcgtgtgaatgcctgcaggcgtgctcgagcctctacgatcctgtgtgcggcagcgacggcgtcacatacggcagcgcgtgccagctggagccccggcctgtaccctnggcgggagatccagtgggcgcaaaggaccctgtgaccgttgcgggcagtgccgttttggaacctgggcggaggccgaaaccggcccctgggtgtgcccctttgaatgcctgggttttggcccaacccg

SEQ ID NO: 439936 - DNA, 2146 bp, Homo Sapiens
aataggtttggagttcaagagctattttatcataccagtaataagagaatttggggtctcacatccccgccctggggtcacacgggaattctctttgaacaaaagagaaaaagatacaagaaattatgctgtgtgaccctgaaaggtggtcatagagccccttgaagggcagtagggactttttaggaggagcataggcaacaaagggagagtgcagagcaagcaggcgggtagcatgcttcctgtccctgctggtcctgccaaaccctgcgcttgcagactgcacagccacctttctcaaccaggacttccaccatccacgcaccaatgggaatgccgctctggcccgcagggctcccttgagcactggccaggtcttccctcagccacaatcccctcccacaatctgggcacctttagttctgccagcagctgccttggcctctctgttcctcaccatacattacttttcattctctgcctgccctgccctccatatccccctgccaccatccacacaccaatgggaatgccgctctggcccacagaggctcctctccctcccagcatccatgtgacgtgtgtcataccgcaccgtggcaggctggggaaggggcacagggtcaccctgaaactgtggaatgcacctcctccccctgcaatcccctccccaacccagaggggaaaatgaaggtcaccctgatttgactctccatgtaaaatggcattttcttccataacatcccatatcaatgtgtcaattttctattaattttactggggaagtgtcttccccttgtttctcactctgcctcctcctctgtgttattatgggcttgaggggcaggggtagctattgctcatgacttttactacaagataaccagacttcctaagccctccatattgggaccaatttctgctgaatgccaggtgatgagaggtttcagcccctggcgtgggtggatgacgtcagaccagggcagcagaggactctcattccacaagctccctcaggactgagcacttgctccgggtctcctgaagccccatgtccatctccttgtctgccctgccagtctagcagacttgggctgagaaccagacctttgcccttggcccagcctcgccttccccactgggtctctagatttctagattccccatagggtatgccagcaaggagaggatatgagggcccaagcaaactcaggaaagtttctatcaccaagggcagaacacgaacatcttgaggctaaaggagctgcatggttgctaccaacagaggagaccgccggggtgcagttgattcccatgtttttactggactttacccccaaattcccagcaaggtctaaagttcgccaggaacccttgtcttcttgccaaaggcatctcagggccatcctgcaatactcatgaggttgcctgtcccttcatgcccctcaccccaccccaggattaatcatcaaagaaggactgtctacatgtcctcctccctgtgcttaggaagagagacaaataagagaatgagaaggctgggaaggcccttagcggtcacatcaagcaactgtccttgccaaggttttatggaggaggaaactgaggccgccttgtgctgagtggcttacccgtgagcagccggcactccatagggccacagcagagactgtttcttcgtggcacggaaggacatctctgcttgctggtcccacgggctaggacagcccctattgacgttgcactatagctgcatgtgacctttaaccaatggtaaaatagccggatttgtttccacctccttctgaggttctgacctgtagtagagaaaagaaatagacaagcgtgggtgggccacatcctgatcagctgccaaaatgcgtgtggcccttgttacccctgtcctgcccacttggtggaccatggcaggaagtctgagccctctccttcctttctcttgcagggcgaagatggcttaccagtccaaggctgctggaacaagtgatgcctctaaccttggattggcctgtgtgtgtgtttgtacatagaatatttatttttatacagttttcactttttgaaaatgccagaagtatgatgcatcttacagattattaaaaaagaaatttatacctgcatattttgt

SEQ ID NO: 439937 - DNA, 1559 bp, Homo Sapiens
  misc_feature (242)..(242): n is a, c, g, or t
  misc_feature (1548)..(1548): n is a, c, g, or t
  misc_feature (1553)..(1553): n is a, c, g, or t
aaagaggacaaccggagccaaatatggttatgtaaatgatccggtctacatgtggaacaaccaaaaacgctcagccgtggtccggtaaaaggcgtgagctcagggctgctgcagaaagattgcacgttgtttggcgaactagatttcaaagctagcactggtggctttttagatttcgaaatcggcatgcaattggaaacagaaaagtatgtgggaaacaagtcctaagttcagtttctganaatgttgagccatttcgacaaaaactgtccatgataatcaaagaggagaaactgtgtctagctcagctatacagtggggatgaaacagacctcttttggaagtcaatgccagaaaattctcaggcaagtaggaaagatatctgcctaccagggaagaaaataaacaaagaaaggttgtctgcctttttatgtgcaaatgcagacggaactcataaattaaagtcaatcattattggaaaatcaaaactgcccaaaagtgtgaaagaggacacaagtacattgcctgtgatatataaacccagtaaagatgtttggttcaccagagaattgttttcagaatggttttttcaaaactttgttcctgaggtccgacattttcaacttaatgttctaagatttcatgacgaggacgtcagggcattgttacttctggacagttgcccggctcatccttcctctgaatccctaaccagtgaggatggtcgaataaaatgtatgttcttcccccataacacttcaaccttgattcaaccaatgaatcaaggtgtgatcttgagctgcaaacggctgtatagatggaagcaacttgaagagagtcttgtaatatttgaagaaagtgatgatgagcaagagaaaggagataaaggagtttccaaaattaaaatctacaatataaaaagtgcaatttttaactgggcaaaaagttgggaagaagtaaaacaaataaccatagcaaatgcatgggaaaatcttctttacaaaaaggaacctgaatatgattttcaaggcttagaacatggggattatagagaaattcttgaaaaatgtggggagttggaaactaagttggatgatgatagggtgtggttaaatggagatgaagaaaagggttgtctcctaaaaaccaaaggtggaataacaaaggaagttgttcaaaaaggaggagaagctgagaagcagactgctgaatttaaattatctgctgtaagagagagtttggactaccttcttgactttgttgatgccacacctgagtttcagagattccacttcacactgaaagagatgcaacaagaaatagtcaagaaacagttccagagtaaaatccattctagaattggtagctttttgaaacctaggcctcataatattaaggactccttcagtgggccttcaacttctggttctaatcattagattttgtgtttaaagatttctgccattatatgatgtaggccagctgtgaattgtcttgttttagcaactgacattattttgtatatcagtgcccatttatataatggtnataanatttac

SEQ ID NO: 439938 - DNA, 1890 bp, Homo Sapiens
ttgaatcaaaggctttatctttaagaaagcagatttagagaatcagaattttcttccattttggttctattaagaaaagtataccaaattaaaaattaagaactattttttaatagataatacatgtacatggtacaaaattcaaaaggtacaaaaggtgtacattgaaaagtcattcccacccctcttcccagaggcaattcaggctgccgggctgctagatatcctcccagagacatcctaggcatatgcaggtggacatatgatatacacgtgtatacgtctgtgtgaaaacatatgcacacacatacatctacacactttctccattccaaacattaggataccatgggcttttttcctcacttaatcatgcatcttggggcccattctatggtagtacacacacacaggatccattgttttaaatttctacaaactattccattgtttaagctggccataatgtatttaaccattcccctgtattggtgggcactctccaactttttgctattacaatgtttcaacaaaaactcttgtacacaagtaccttgtacacaggtacaattcttaggagtagcattgctagttcaaagagcttacgcatttgcacttttgatagacaccgtccagctgtcccccatggagtgcctacatgtcacactcctgccaccaccgtatctagtgctgccacccacagccttgcactgtggtcccacttcttggttcacatggctgagacatttctgcccatcaagttacctttaggttcatgacacattttgagccaaaacataccttatctctaacattagtgtagttcttccctctctttttcccttcttagggaataaacaaaaaatctgtaaaaggcaattcctttgaaagattcaaaacctctgacaccttgtttcatctcaaacttcaaggttacagtataacatactctgagagagaccctctaaagttgtgaaaactgttctcaaactaagcatcaagtagaggaaaggttcaatctaaattttcctaatagagatgcaaagttgcaatgtggaaaagccattttatccaaccggaatttcccagtcagtcatctaccttgagctagatgctggggagagtgtggtaagacaagcccttacttttgttgcgcagggccactggacatgggcaggcaatggggacggatgtaaggctggcgtggaacatccacggtattccctgtgttgtcaagtatgctgcagatcagcaccagattctccagttttgcacatttattgagaagagggaatactattatagcattaccttttacaatgcatcttcagcctgtaatagaaggaatgctctggacttcatggaaaggatcaagagagggcctgggggatttctgaagatgcccagaacaaggcacttttccttggcaatccccaccatgggggacagatgatggcatccatcctatgggggctctttattgtactgttctgcattaagatgttcttttactttgaggccaacaccagccatgagtaaatcataaagtgcttccttaaagtgttcttcctcaatgcatgtttcaacatctgcacttcagaacaagtggtcaggctcaaagtaactgtgctactgctagatacctacctcccttttagggtgatcatcagtcacctacagagtgggcaaacaagaccatatgaggcagcagaaatatgagggcacaggttagagccagggctcactgtccggagtgccctttcaggcaggtctgcttcggtcactagagacgtactggggcctgacaacatcaacaacgtcacaaccctgaggtctgaggtcccgggcatggcactttgtgaggtagtaaaaggactgtctgaaggtctt

SEQ ID NO: 439939 - DNA, 1163 bp, Homo Sapiens
  misc_feature (442)..(442): n is a, c, g, or t
  misc_feature (496)..(496): n is a, c, g, or t
cgcttctttctgcaaacacttattaatggcctggtttgtgcaaggtgcccaagagaagccaggaaaggctgcacagagggggcgccctcataacactcctcacacgtaaagtttgacttgcactttctacgttcatggtttgaaaagattgcagtaagcattttgtaaaatgtaaattacattcttcaattttaggaagaacacaatagtttttccaaaagccgcctgtcacaggtgtgagggttcacagagctcttttaaggggatcggaagttctttggctgccttgctatgtttttctagccagaagtctctgctgtagtgcattgctcattttctttcaactgaaaaattaaatctggacttgtgtcaaaatgttgttatttacacatccggacactcatcacagttcaccaagctctacgcagagtccaggctgaanggttggcatgttctccccaaccccacccttttgaggtctgggaagcccaggtgntggggaggagctgaacaactgtgtccagggagtgtctggcaaagccgacccagggagttccacgggagcctcggtgctatgaaaagagccagtgtccatgcatttcctcgggtgtgaatcacactgcccggtcgggcctttgggaaaaaattaatgaaggacacagtcagcgccgtagaacctgccaaatacatatcagatccagtggagtctgtgaagggggagggggagatttttccagaggcttttcttctcgttccatttctcttttgtgcccacgactgggttcttgaatgtaaaactctcagaaaggtcagggcggactggttttatgccccgaggagtatcttgcccacccgtaaatgctgacagacagctgcgacttcggcccaggagacccggcggggactgggtccgaccagccctctctcgcgggcgcaggtccgggacccctgaagcgagccggccgggcgcagagcgcagtcagtctgggcgctcagaagctgggagggggctccacctgggcgcccagccgcggcgggaggggcggggcccggctttccggaggcggtggcacctcctcgcgcccgagcgcgcgctccccgacgtccggcgcacgcgcgaggccggctgggagcgcgcccaagcggcggcggcggcggcggct

SEQ ID NO: 439940 - DNA, 1137 bp, Homo Sapiens
  misc_feature (8)..(8): n is a, c, g, or t
  misc_feature (198)..(198): n is a, c, g, or t
  misc_feature (207)..(207): n is a, c, g, or t
  misc_feature (236)..(236): n is a, c, g, or t
  misc_feature (240)..(240): n is a, c, g, or t
  misc_feature (243)..(243): n is a, c, g, or t
  misc_feature (263)..(263): n is a, c, g, or t
  misc_feature (285)..(285): n is a, c, g, or t
  misc_feature (289)..(289): n is a, c, g, or t
  misc_feature (292)..(292): n is a, c, g, or t
  misc_feature (300)..(324): n is a, c, g, or t
  misc_feature (326)..(326): n is a, c, g, or t
  misc_feature (329)..(329): n is a, c, g, or t
  misc_feature (335)..(335): n is a, c, g, or t
  misc_feature (337)..(337): n is a, c, g, or t
  misc_feature (340)..(341): n is a, c, g, or t
  misc_feature (346)..(346): n is a, c, g, or t
  misc_feature (352)..(353): n is a, c, g, or t
  misc_feature (355)..(356): n is a, c, g, or t
  misc_feature (360)..(360): n is a, c, g, or t
  misc_feature (366)..(367): n is a, c, g, or t
  misc_feature (384)..(384): n is a, c, g, or t
  misc_feature (386)..(386): n is a, c, g, or t
  misc_feature (394)..(394): n is a, c, g, or t
  misc_feature (397)..(397): n is a, c, g, or t
  misc_feature (403)..(403): n is a, c, g, or t
  misc_feature (405)..(405): n is a, c, g, or t
  misc_feature (411)..(412): n is a, c, g, or t
  misc_feature (415)..(415): n is a, c, g, or t
  misc_feature (418)..(419): n is a, c, g, or t
  misc_feature (422)..(422): n is a, c, g, or t
  misc_feature (425)..(425): n is a, c, g, or t
  misc_feature (427)..(427): n is a, c, g, or t
  misc_feature (440)..(440): n is a, c, g, or t
  misc_feature (446)..(446): n is a, c, g, or t
  misc_feature (454)..(454): n is a, c, g, or t
  misc_feature (525)..(525): n is a, c, g, or t
  misc_feature (603)..(603): n is a, c, g, or t
  misc_feature (635)..(635): n is a, c, g, or t
  misc_feature (649)..(649): n is a, c, g, or t
  misc_feature (655)..(656): n is a, c, g, or t
  misc_feature (662)..(662): n is a, c, g, or t
  misc_feature (664)..(664): n is a, c, g, or t
tttaaaanaaggccctgtccttaaccctcccaaagtacttttagacattttccttctgcccagaatcctctgcccggtcccctgtagctagtgtccagacactggtcacagacctccactgagcccagttagagcgctgacctcccatctcaggacttcttggcccttgcccattgccatactctactgtcagatttnaaaactgcnagaccatgtgccaattcacattgacttgnagcnacnaggaccctgtgtctttttcnattgtgcttgttcatggccagnaatnaangaacttannnnnnnnnnnnnnnnnnnnnnnnnanaanaaaaananaannaaacnaaattnngnnaatngaatgnncccctcttggtggaggngnaaaaaaanaancatcananaaatannaanaannaancanancccagcctgaggncctggncccctttngcaccatcctaatttcaacatccagatgtcaattcagaaaattattatatcattctaatgactcaaaaaanaaaatcccctcttttgtctcatgttgaagagctgatgacatcagacctatcaggtcagacttattttcctagtcaganactgaatggcatattttcaaagaacttcgtcnaaattgaatggaanaaaccnnaggggngnaaagatctggttgttctcttgagatgcagagaggaggcccacaggtggcggaggggtgagggaggaggagccaccacttccgaagcatcagaatgtcaaaatctaagttttccacgaggtcagcagcaggtgtctcctggtctggagagggcatggaagtggccacaggtctggacctctctgggtggatgtgggggagggtgactgaactggaggagggggctggcttgagaccttcctgttctatgttgggggggatactgagggtccgtctcactgggacgaagagggggcacagatgcaggtatgcccaggtacctgagtcccagccaaagcggcaaagccagacctcccgggattccttgagtttggacaaagggtgtcccgacgacgataaagagccaggagcagagagccctgcatcttgcctggggccccttgtatctctggctcatggcctgtcctgggcacgg

SEQ ID NO: 439941 - DNA, 884 bp, Homo Sapiens
ctctctccacactggaaaagtggagaatggctagatggtgccccctccaataatccacgaacctgggtgacacttattatccttcagtctttattttaaataaggcccctgtcctttaccctcccaaagtacttttagacattttccttctgcccagaatcctctgcccggtcccctgtagctagtgtccagacactggtcacagacctccactgagcccagttagagcgctgacctcccatctcaggacttcttggcccttgcccattgccatactctactgtcaggattttaaaactgctaggaccatgtgccaattcacattgacttgtaggccactagggaccctgtgtctttttctattgtgcttgttcatggccaggaatcaacgaactttggacagacagtcagtagactttgggtgtggccttggtgaaggcttcccactttggtgacttgcatgtgcccctctttgttgagggggttttgaagcagcttctgcgtcattgggagctggctgctgcgcccagcctgaggccctggaccccttttgcaccatcctaatttcaacatccagatgtcaattcagaaaattattatatcattctaatgactcaaaacataaaatcccctcttttgtctcatgttgaagagctgatgacatcggacctatcaggtcagacttattttcctagtcagagactgaatggcatattttcaaagcacttcgtctaaattgcatggcacacaccccaggagcccaaagatctggttgttctcttgagatgcagagaggaggcccacaggtggcggaggggtgaaggaggaggagccaccacttccgaagcatcagaatgtcaaaatctaagttttcccctcgggcc

SEQ ID NO: 439942 - DNA, 1234 bp, Homo Sapiens
  misc_feature (193)..(250): n is a, c, g, or t
  misc_feature (399)..(399): n is a, c, g, or t
  misc_feature (549)..(549): n is a, c, g, or t
tctttctcttcttcttctttaactgggaagccatttcattgacatttctatacttttctgtttcttccaagcttcaactgccaatttctgtttctttctttgttcctctttttgcttttgattatcctcttgtttattatgaaaaagcacaggtgtgttgtctgccttttcctttaacttgaaaatttcctcnnnnnnnnnnnnnnnnnnnnnnnnnnnnnnnnnnnnnnnnnnnnnnnnnnnnnnnnnnagagccagaaacttttgataccatttttcatgctgttgaacttcatcttgtgtttttccaggaaggtgttctagaacttcttccataaatgttggcttccctttatgtttgtttctcacctttacaaagttctggtgatcataatcatncccagggcaccttgtcgccctcctgtttgctgaaggaatttttcaaaatctagtacctcttctggaagagtacttggtgttactttgtctacaggaactttgcttgagattgctctgaaagctttctctgtttctgaattacccaaagcnccatgtgtcaatttttcttgatatggcactcaactcattattagttgtcttctcttctttaattagctcttcatatatcaacctctgctcttctttaaaagtgttaattgcattttcaatttcttccatcatttctctgagcttctcaacaaaatcaggtgtaggcttcacatcttttaattgatgctgaagtttctttacattattatgtattttggccaattgttgctggatttttgctctttctgttttcctgctgtgaatcaatttattttccaattcttctagcatactatgctcaattctgaagtcacttttttggttgtagaaatgactgtgtttatctttttccatgttaattacttgatttttaaatttttctgctgtgcgtacaaattctgctttcttagtctgattaactttctgcttccagttctgaagatgaaaaggacgaattccacctgaagtactaaaacagccatcactctgttgaggcgctggcgtcgctcccacgccggtcccggtggccgcgcccgcccctgccacagccccggctaccgcggtggccgcagccgctaccacaaccgtcgtcagtgcggccatgtttacccgccgagctactcgggccgcggcggccaccggtgcctggggattcgtggcaggcgcaccctggcctctgcagaca

SEQ ID NO: 439943 - DNA, 1829 bp, Homo Sapiens
  misc_feature (1145)..(1185): n is a, c, g, or t
  misc_feature (1291)..(1291): n is a, c, g, or t
  misc_feature (1293)..(1293): n is a, c, g, or t
  misc_feature (1481)..(1538): n is a, c, g, or t
agcatgagccaccatgccccacctaaaacattttaagtgccatcaagagaaatcacagtattttaaagctggcttatttcagatgatgtttcagaacaaagaattttcctattttgaggcaaacagaagcagaaaagaaaactgcattagccaggaagatgtgaaagacacaaagattttataaatctgtgaaatccagaaaggctgaaggaaaatttggaattgctgaaggaaaccaaaaagattatatcaataatacaattaatagggtatatgagagacatatttttaaaataaatattctctatataaaacaaagcatgcttcaaacaaatacaaaatatttattacacaaaaatgtcataactgacaaactgccaatttgttaaacatagaaaaagtactaacatttcgtaactctaaacaaaaaccactttacctttttgttactcaagctaacttaactccaagttataaaagttacaaaattttggtttaaaaaatgtcattgtatgattgttccaatttactttgctatgctataacaaaaacaaaatctctttgaaatgttttcagtatttaaattgaataatgtttctaacattaacttatttaaataacttttacatcaataataggccaacacatatattaaataccttcttggtagaggggggaatactaatggagaaagcctcatggaaacttaaatacctctcaattcacaatatagcacaataatcaatctgactaagctattgatatttaaagaatgtggttagtcactctctccctggtataacttagtatgttaacattcttatcaactgagtagcaatttgattatctcatactcttctctgtattccttgtctccaggttggaatagccctatgtgggatatgtagaagtggcccagagcctgttggtcctatctttttggttcgttcttcccaacctttggtgggtttgtaaagcctagagggatctctactaacattgttttcaactttttcttttaattttgccagtcttctttgtttttgtgacttttcatcttcctttgcctgtctatcttattttcttttcaagtttctgtaattctctttcttgaaatctggaaatttcatcagcagcagctggcnnnnnnnnnnnnnnnnnnnnnnnnnnnnnnnnnnnnnnnnnaagcctcaaaaattcttcctgttctttcttctgctgggtataactttctagtagtaattttaacttaaactggcgctggcgcttttgattatcctcttgtttattntnaaaaagcacaggtgactgggaagcacatttcattgacatttctatacttttctgtttcttccaagcttcaactgccaatttctgtttctttctttgttcctctttttgcttttgattatcctcttgtttattatgaaaaagcacaggtgtgttgtctgccttttcctttaacttgaaaatttcctccnnnnnnnnnnnnnnnnnnnnnnnnnnnnnnnnnnnnnnnnnnnnnnnnnnnnnnnnnngagccagaaacttttgataccatttttcatgctgttgaacttcatcttgtgtttttccaggaaggtgttctagaacttcttccataaatgttggcttccctttatgtttgtttctcacctttacaaagttctggtgatcataatcatcccaggcaccttgtcgccctcctgtttgctgaaggaatttttcaaaatctagtacctcttctggaagagtacttggtgttactttgtctacaggaactttgcttgagattgctctgaaagctttctctgtttctgaaattaccc

SEQ ID NO: 439944 - DNA, 426 bp, Homo Sapiens
  misc_feature (64)..(126): n is a, c, g, or t
  misc_feature (202)..(248): n is a, c, g, or t
  misc_feature (331)..(369): n is a, c, g, or t
  misc_feature (411)..(411): n is a, c, g, or t
tggttcgttcttcccaacctttggtgggtttgtaaaagcctagagggatctctactaacattgnnnnnnnnnnnnnnnnnnnnnnnnnnnnnnnnnnnnnnnnnnnnnnnnnnnnnnnnnnnnnnngcctgtctatctagaattttcagttcaagtttatgtaaatctctttcttgaaatctggaaatttcatcagcagcannnnnnnnnnnnnnnnnnnnnnnnnnnnnnnnnnnnnnnnnnnnnnnaagcctcaaaaattcttcctgttctttcttctgctgggtataactttctagtagtaattttaacttaaactggcgctggcgtnnnnnnnnnnnnnnnnnnnnnnnnnnnnnnnnnnnnnnnaactgggaagcacatttcattgacatttctatactttttttnttcttccaagcttca

SEQ ID NO: 439945 - DNA, 1646 bp, Homo Sapiens
  misc_feature (1040)..(1040): n is a, c, g, or t
  misc_feature (1303)..(1329): n is a, c, g, or t
  misc_feature (1398)..(1398): n is a, c, g, or t
ttgatactatgagcttttaattggtatcttctcccttatatttgaggaagaaatgaggacgccccacaaggaccttcttcagcttggaggggcagggacagaatagggcagaggagggtagtgggggcagatgcagagctgacagtggggtttcccaatcctctctctagcggccggagggccaggatcacacaggaagcctggaaacacaaaaaaatcatcgacgagctgccccatcctttgcccaggtctcacaaagagcctccttccaggttcccgtgggttcctgaggccgccaccagatgggagcatcgagcaatgttccttttccttctccagccacctccctcctctctcagtcctttactacccccttccctgcctgctttttcatcttccttcatttctcctgctaccaaacagatcccggggcttttgtctgatctatgtccaaggaagccagtggcatatgaaagcacaccatccatcagacagaaactccagacagttgtgagtccagcggaggggtgtgtctgggggccctgggatgagggtatctgtgttggggctctaagaactgggcagtgactaacatctctctgtggtcctggcacccagtaagcattcagagaacatccactgagttgaactgaactagatcgacaaaccaatgcagccaaggagaagaaatacgtattctgctggtgccgtggtggcctcagaggcaagccgaccaccacccaaaggcacccgtttcagcagcttccattcagggcaagtcatatgctgggctggactctgccgccagcttgctattgcccatgcccctaactccgagtggcctctgctcacagcaatcgaggaggctgtgggaaaggtgtcccatgagtccctgggccctcctatctctccccacctaccccctttgcaagccaatccattcaacacttcctgtgaccagcacacagcggccatctcttaaacccttgctgggagactggctaggggagggtgactgggagagccaggggtgtggggcncagtgaggggcaggaggagaatatctgagcaagctggtggtcacgagtaacttccatgtgtccactgacttctcctcttgtccccctcagctaaaaaagatatgaaccccttattgaacccaaagaatagatgctgatctgagaccttctgtggctttttctgtgacacgtcggttgatgtttccctgctgtcccaagcctgtctaatctgacctcgcccagtttgctgagaggcattggggtggataggtggaagaaggccnnnnnnnnnnnnnnnnnnnnnnnnnnncttcagtgcaagccaagaaactccttgaggacgtcacaggtcttcttgtgcatgacctcacgaagcttncctgacccgcgggcactcgatgcgcccacaaagctatcggggcccagcatggccatgcccgccgtccacctcccccatgatgatgagcggcatctcgctcacggtcacgttggggcaagggcatgcccagctcacgtgaagcagagtgacctccaatgcctcctgccccaggaacttgaagcccattttctcatcctttaggacctaattcccagttaccaagccgccggcccggtcaggctcctcgg

SEQ ID NO: 439946 - DNA, 3743 bp, Homo Sapiens
  misc_feature (61)..(61): n is a, c, g, or t
  misc_feature (1754)..(1814): n is a, c, g, or t
  misc_feature (3106)..(3132): n is a, c, g, or t
atacacgaaagggttttggagcccatacattaacataaatctttttaaccttacgtatagngtctccagacaacactcagacatctatatacattttttaatatatacacacatacatttacatacacacgttcacacattcactcacagatgaaggaaaaaattgccactgtttggattgcaaggcagtgtaatgaaacgttctagtcactttagagggctgctaatgagctttctaaaaaaaagtattcatggaaaattagaaattaagttttgtgattggtctctctctgctgctgtcagtcatctggttggtaatacgtttgcgattccgtttcaatttagaaaggtctttgtcaaacacttctcctgagcgtaaagctgaaacaaggtcatcaaactctccgctttcttcactattctctttagcttttctcattttacgttccctttcacgttgttctttgagctgagcttccatgcgagctcgacgttcttcttcctcctttttctttctcatattttcgttttcttgtttggcttctgacacagcttgaagaaattgatcaaaaatgccaaagaactcatctggttgtattttgccagcctcttccccaaagtgcttcactgctttagtaaacaggtctttagcttctgctagaaggtcttcaacatcagagaagctgaagctggctactgtgatgaactggcgtgacaacagacacaaacttatctccgggctgtgggggctgagacttctgatattccagctctgtctctactgctttcaagccacttctcaaggtacttatttctttgtccagctcagtcatgtttactttcgcagcttgaggaatatctcgcaattcttcatttagattgagaacactggggtacttattttccacaatagtgatgagatagtgcaaaagggtaatgtttttgtcgatgctggattttgtgtcagcaattttgtttaggctagatatcttgaatccatatgcattccctctttgacctttattcatataatttccaaatgccaaaaccacctccagcaactgcttgagggcaccactcctaaacacctcttctgagccagaacgaattgcttccactttaggtttcacttctgccacacgctctgcaaacttctttttgaagtacagcgattgcaacctttgctgatagtgattaattcggctcatctcaaaaaggaacctatcagccttggccatccgatccagttcgtgtttatgttcctccaataggtcaatgtcacttttttcaggaacaaatttcaagagctgttccaacatgtccttgggcagatcttcctgttcgtccattgttagaattgcccgtttgatttcgtcattggataatttcaacctcgatagaaggatgttgcaattctgagctctccgaccatcaatcaccgaaagctctttaactttaagtttggaactcagagtgtcatcaatggcatctgcttctttctgcttggagttactgttcacaaagaaatcctgctgtctttgataggcagagaaggttctttccaggtcttcaagatctagaattttgaagacttttgtatcatcaatttcggtccatactgttccttccagtttgttctcgggcagtttagaccagttgaaggatttcagggcatttgtgggctgaggaatgcttttcttcttcagtgctaggcccattggagcaccaggaggtggcatgattgcccctaaggnnnnnnnnnnnnnnnnnnnnnnnnnnnnnnnnnnnnnnnnnnnnnnnnnnnnnnnnnnnnncatcccacctggtagaggtgggggtggtgggggaggaaggagagatccaggcacagaggaaggaaagggccctcctggtgctccaggcgagggtccacctgggattgaagcacagacggccctcctgctgagctcatggagctgtgctgtgaggtccgccacctgctgcttgacttgcttatgctcagtagtctccttttcaagtttctctttcattttatttaaggtctgcatcatctcttccttctcttgagtcttagcatcacattctcgttctttcttttccagtttctgctgtagctcattgtgctcttttctcattttttccgcttgttctttccactgcttaacttcattttcattaaccaacattcgtacgacattcttaatattaaagttttccaaaggtgtggagtcagggtcctgtcctttgtcattctggataactatctgctgtataattctatctagtagtagccagtactgaacagtgttgccactcctcttgtaaggcatttggaggcagtggtgcaggatggacatgaaatgcgggtaagcttcactatgtgtcagcctcttcctggtcagctcaaacatctgagttgcactttttgtgtctatgtgaaccagttcaaatcttttggcaaattctagttcatcttcatttcggagcatttcaaaaaagtctaaatgcctatctaatgttgaattttcgtgttcccttaatttatctattacaggttgaattcctaacatcagaaattcatagcgaagatgaagtctaaagtccaaactctccactcctgcaccttggctgagcactgcattaatgaaggacatgatggcagtcttgagactcacttcatctcgataccgcccagtgcttttatccaagtcgttaattaatgtctgaaagcgggtcctttcgctggcatacttctggtagtgcagcatggcctgcagaaccttcttgtggcccccgggaaccaggcacacggcgcccaagatttccagcacggccaccttcgttttaatgttctctgtgctcagactctgagcaattacattaatactctcagaatgagccaggacgtgagcccggccttgagagttgttcattaacgcttttatacagccaatgagagaagtatgtattcgagactctgaggtctcgtagtccatggtctttagaaagttgaggatacatgataggccatccaagtcgatgaatctggttacaaacctcattggttttgtcctcagtgctgtctttaaactctctatagttttannnnnnnnnnnnnnnnnnnnnnnnnnnaaagccagcagagattttctagcagccatggaattgagctgatcaatgtagaattcaggccaacttgtagctcccttgttttcttcctggtcctttttcttgctacagtatatttgccattttttctcagctggaagtgcaaacatggcttctctgtgtttgtctgtgaggtccagttcatccaccagttcactgaacatgacatccagctcctccacagggggcatgggcaatgctggttccatggtctgaagcgcaaagttgctatcatttcgcagccgatacgtgatttctgggtgatcattatttcggaaacagcaaaagatgaatgaaatacctcgtccacctctctttcttggggccatggctgaattctgttctatttcttgatgtgactaaacgctactggcccgggagctccggggaggcagcaggagggcgcgccgcgaacccagcgcccagcccacggaagcacgcccacccccgcaccactgagcagtgccacttaatgtaatgagtgcggcgggctaaggaggagcgtcccccttacctgagcagcccctgctatgctggaaaggctggttctgcaatcccgggaattccggaccggt

SEQ ID NO: 439947 - DNA, 719 bp, Homo Sapiens
ggccattagaaatgcttttatttataaaagaactacttaaatataaacatctctacatagaaacactcttcacaaaaggactcttgcattactgccttctgaccacgaccagcagacactgtggatgtaaggactccacggtgtctcccgactcccaggattttaaggctaaatgtgcacttggagggaacaggggctgtaaggctatttcttccctttcttttaaaagacaaatttcatggtttcccattccaagataggcttcatagctggggaagatcttaagattcttggtctaaggggtaagcaaatatcttcctgagactgggaggtatgatcaggcacttgggaatctggctttgaatgtcatctctgaagcatggaagttagtggtgaaaaaaatcttatttccaagtctaggataagctacttctggaatggcttatcccaattcaagtaagtcacaggtgttatgttgtctgcatctatggatgtaactaaacagtcattagggtgcttggatgaagaagaaagacatccagtcttccattaggctcaactggtttcagctcaaagcagaactaatacttttaatggaatggctggagctctcatactgttactctaggaaaatctatcaattattgagtccagggcaggggggccaccagacatcacagactgtgtaaagaccatcagaaaggtgtcattgaggttgc

SEQ ID NO: 439948 - DNA, 1603 bp, Homo Sapiens
  misc_feature (12)..(12): n is a, c, g, or t
  misc_feature (21)..(21): n is a, c, g, or t
  misc_feature (1116)..(1130): n is a, c, g, or t
  misc_feature (1214)..(1215): n is a, c, g, or t
  misc_feature (1250)..(1250): n is a, c, g, or t
  misc_feature (1254)..(1254): n is a, c, g, or t
  misc_feature (1287)..(1287): n is a, c, g, or t
  misc_feature (1290)..(1290): n is a, c, g, or t
  misc_feature (1292)..(1292): n is a, c, g, or t
  misc_feature (1294)..(1294): n is a, c, g, or t
  misc_feature (1308)..(1308): n is a, c, g, or t
  misc_feature (1330)..(1330): n is a, c, g, or t
  misc_feature (1355)..(1355): n is a, c, g, or t
  misc_feature (1403)..(1403): n is a, c, g, or t
  misc_feature (1406)..(1406): n is a, c, g, or t
  misc_feature (1410)..(1410): n is a, c, g, or t
  misc_feature (1504)..(1504): n is a, c, g, or t
  misc_feature (1508)..(1508): n is a, c, g, or t
  misc_feature (1531)..(1532): n is a, c, g, or t
  misc_feature (1557)..(1557): n is a, c, g, or t
  misc_feature (1559)..(1559): n is a, c, g, or t
  misc_feature (1580)..(1580): n is a, c, g, or t
  misc_feature (1582)..(1582): n is a, c, g, or t
  misc_feature (1585)..(1585): n is a, c, g, or t
  misc_feature (1592)..(1592): n is a, c, g, or t
  misc_feature (1600)..(1600): n is a, c, g, or t
  misc_feature (1602)..(1602): n is a, c, g, or t
gtaccctttaanctgctttanaattttacaatgaaatcaggtgctattaatttcatgtttatttcatacagggtttttgtcaagtttatcagttttaaaatgattaagtcataatcaccattcaaagacaaattttcctctcaaaataataatttccattctgctacctacagtttggcttatcctttggtctgatagccatacttcatctcacaggactatacaagtatgtactatgtacaaaacattttcaagtttgctttcaaatgatacctacaaagagtagatcaagttttcaagtttacagaataccatactacaacaatttaccactataaatatgtcttaacacctgtttattccattctatttagattgcaacactaacaagattcttaatgcatatgtccccaccacctgtactttccctacactatcattttgacacttaacatagaaacaactcaattcagcaaccaagttttacaaccactgttgctaccaatcaaatggtgatgcatcagatcccaattctcatgagtattaacatattaagagagtacattatttacctaagactgaatgactgtgccttactttataaaaaaacaaagatagccacatcaatttaattccatatatatgatactacctattcaatttattaaaaattgtaataaacataataatcaaactagtgctccaaacttatgctgttcacatggaagacaccacaaaagaagacataatatagagactgccttgcaataagaagtacaaattccttctataaagatggagaaataaaaggacaaatctagttgtctaaaagacaattcactgtacacattttatttacagttttgtacactgtcttaatatgaatgggactgcttttctacttgagccatttttaaccaaagcaaaataacctaagtaatacaaagtgttaaaatacagcataaagatacaaaaacagacatactaattctagttaggaatgtaattatgatgttacattttttataatccacaattatgtttaggaaatcacacaaacatagatcactgatttgaatgaaatgcataaatttgtagcaaagctttgtagttacnnnnnnnnnnnnnnnttaccaaagaatgcacaaaattaatgtttattccacctttgtgtcatattcctggatccttcaccaatgttacatgaggaaaannacaaaagcaaaacaaatgaaaaactgtaaatcagnatcncgaatattaccaagtaggtgaaacaaataaatnaanancnagcagccatcagcnagagtacagcaaagacaatgcngtaaaaagaaacaaagaaaattgcnagaaaactgtatgcatcataatccttcaaaccagcaaaatatgccccngcntaanagggtacaacagaattttttttccgggaaagtatagaaatgccaagtggtttgcggtccatggtggtgaggtaaaacctgtatgtaattaatgntaantctactgtactattacagtgtgnntcaggtacacatttatggtttctgngnttgtgtactgtaattctttgntnggnttagtgntaactctngnc

SEQ ID NO: 439949 - DNA, 1622 bp, Homo Sapiens
aacaaaaatggaatttattggctgctgcaattcaaaaacccgtatatatttttagcttcaggcatggtgtatgtggctgttcaaacattatcttcagtcttttactgctctccaattctcagatgcatttttgctgtgtggacttcattctcacctctgtaagagtctagttcttcttctcagcattaaaaccaatgggggtgggcggggggagagtatttgttcctattagctcttgcaatcctgggactctaattgaaccatctttggtcatctactgacatctgaatcattaactgtggcttgagggatggatcagaggctgagtcaggcctgtgtcacacattccattcctgagtagaagacggaatccactcagtacatttcactggagtgtactattaccagtaaaagggggtaaaaaattctgggaggccaaaacgacaaatgtccagcacaggcttctctccagagtagacatgctcaaggtgacctagctgggaagaagtcccaaaggccttctcatacttgctacactcatagggtttctctccagtatggattctttgctgctgctgaagatttcttttgctagtgaaggcttttccacactcctcacctacataggaagactcctgagtatgaattctcagatgcctttttaattgttcctgagcactgaaggcttttccacaatctacacagtcaaagggtttctcctcactgtgaattctctggtgccgagttagttttgtatgaaaattgaaggcttgtccacatactttacaagaataaggcttttcccctgtgtgaatacgctgatgttggcttagatgggaagtccttccaaagcttttgccacactcattacactcatagggtttctctccagtgtggattttctgatgccgaagtaagggtgaattaccaacaaaagctttgccacactcattacactcatacggtttctccccagtgtggattctctgatgtataacaaactcggaactactggtgaaactattcccacactctgtacagtaatagggtctgtccccactgtggattctctgatgcctgatcagatttgcattatcattaaaggctcgcccacactcctcacagtgatagggtctctctccagtgtgaatcctctggtgccgaattaacgaagaattaccattagaaggcttttccacactcactacactcaaaaggtttctccccagtgtggattctctggtgtctagcatagtaagaaaagtagctgaaggatttcccacactcctcacatatgaaaggtttccttgcacaggggattcttgagacctttccttggatattttccactggggggatgacctgggggcttttcacattacgtgtttttgggaagtcagttcttggagggcactctttaggtggccatgtgccatatcccatttttttcttaaaaaatccctggataatgggcccccctggccagtgtgggctaacaattttcagacctttttggaccttttggtgggggaaaatctggggtaacaggcccaagccttggccctctttcaaaggggaaacagtgcgtgtgttgaatggttcccccggaaacagaaaatatg

SEQ ID NO: 439950 - DNA, 929 bp, Homo Sapiens
ccaacgataacataccaagcgtgtcatcaataaacagagttcttcgcaacctggctagcgaaaagcaacagatgggcgcagacggcatgtatgataaactaaggatgttgaacgggcagaccggaagctggggcacccgccctggttggtatccggggacttcggtgccagggcaacctacgcaagatggctgccagcaacaggaaggagggggagagaataccaactccatcagttccaacggagaagactcagatgaggctcaaatgcgacttcagctgaagcggaagtgcaaagaaatagaacatcctttacccaagagcaaattgaggccctggagaaagagtttgagagaacccattatccagatgtgtttgcccgagaaagactagcagccaaaatagatctacctgaagcaagaatacaggtatggttttctaatcgaagggccaaatggagaagagaagaaaaactgaggaatcagagaagacaggccagcaacacacctagtcatattcctatcagcagtagtttcagcaccagtgtctaccaaccaattccacaacccaccacaccggtttcctccttcacatctggctccatgttgggccgaacagacacagccctcacaaacacctacagcgctctgccgcctatgcccagcttcaccatggcaaataacctgcctatgcaacccccagtccccagccagacctcctcatactcctgcatgctgcccaccagcccttcggtgaatgggcggagttatgatacctacacccccccacatatgcagacacacatgaacagtcagccaatgggcacctcgggcaccacttcaacaggactcatttcccctggtgtgtcagttccagttcaagttcccggaagtgaacctgatatgtctcaatactggccaagattacagt

SEQ ID NO: 439951 - DNA, 2712 bp, Homo Sapiens
  misc_feature (2681)..(2682): n is a, c, g, or t
  misc_feature (2686)..(2686): n is a, c, g, or t
agctttttacaaagacatttattttccccaaaatatacccccagtttacaaaatccctccgagtcccacatttaaattagaagtcctcacatcttccattcctggggcagggagagatgacatccggaaggcatcagaacgtctgaagtctcactctaccagaggccaggagctggccagaggcaagccaggaaaagactgccccagccccagaatagcaccatggtgggggtggggggcagtcccctcggtgtccccaaagcattcctggccctgccctgccccaggctctgccttttctgctgctatgaaaggtccagagggccttggtgcctgcccacctgcccacacctggacagacattttggacaccaccagattctctagccgtggcgaggggctatgtccctctctccaggtttccgccccaaccccatgctctgggtaagaattatgggtgggatgggggtgaggtatccaggaagccttgagccacagaggaggtgtggagcagggagccaggcaggagccccctgcaaaccgcagggtgcagtgtagttagttgtctgtctcccagctggatggggagtccttgagggaggaactttatcttcccacgcagggcccccagcacctaacacagtgctgacatctgtagttgctcaataaacatcaactgaatggatacatgaaaagaaaggaacaaagaggtgagaaggcagagggacagaagctgacccccaggggccccatcacagacccctggagaaccagtgtgaccagcacatgcttccgtggggaggatgggcaggggagaggggcactgcagaggaggctgggccaggggggaaccacacgtgttccagcacgtgcacctgcaggtctccatgcacagctgtgcatgtggtgggcgcagagtgccctgtcttcacttggggcagggagggaaaaggccagtattaaggctagagcaagaggaggaaggaggggaaaggaaacagcttctagactccaggagatgttgaggccgcactgtccctgtctgagaagaaaagattctatgcaggtggaagcagggctgaacatgatcactagtgtatcacggccattggagaaacaaggccggggtgactatgcatcgtgtctttggtgaaataaggcagggggtcagtcagtctgaatattgcatcttttggagaaaaaaggcagccagatggtccacgcagcactggaagaagagggtggtgatgtggtcagtatactgtgtccctaagaaatgtatgtactgtgaaataaggcagcaggcaggatgacttagagaactaaggttgtgggtggtctgttcattgtgtctataagaaaaaaggcagcaggatgacttgggaatcatgtccattggagaaataaggctgcacagtggtctgtgtatcgcatcctttggagaaggagcccacctgtcagagcaggatgcatctgttgggggcagggctcacagtgcagccccattgcagccagagggtaggagctgtagggaggggtagcagctccctggtcctcatggtcaggctatttcttgtccatcatcttctttgctgtcagagtgtttcagaggctgcagggctgtcttggagccttctccctccccatcctggtcctcagctcctgcattctcctcctcacagctctgtttgatctttctccagcacacgaaagccagggccaccagcagtgcaatgagacagacagacagccccacggtcacccacagggcctctggggggaatgtcataggctgccctgtgatggtgacagagccgtgcgcatcctgctgcagcacggggttgcgcaccaggcagctgtaggtgccattcgcacccagcaccacccgcaggacgctgtgcacatcaaacaagccctgctcgttggccatctgcgacgtggtcacgttgccagtcaggggcacaccctgcccatcctgccagaacacctcagcctcagggtagccctggtagctggagcacgtgatggtcaccgtgtcccctggccgcaggtccttgttgggctccagggtcatgctgggcttcgagtagggagcggccacctgcaggctgacggcagcgctgccgaaatcccggatgctcacgaagcaggtgaagctgccctcgtccgccacacgcacgcgctgcagcctcagggatgcgttgccctgtgccagcaggtccgggaagagggccgtgcggttggcataggcgctgccctggtcctggccctcagcaaagctgtgcaccagctgtttggtatctgtcagctgccagatgaggttgagctgtgccaggctgaagccaggctcaggggagaaggagcagcacagggtggcatcggtgcccaccagtgccaccactgggtcttcagggacctggacctccagggctcctgtgaggcagaaccacagtgctcccagggctgcacccacatgcacacccatgccagggctgccccgccgacgcagcatcttcctgtgaggcggctgacagctgggctccccgtggtggaaggctgcccctgccgcgccgcgccgactctgggactcagggccgcggcccagcctggctcagtcgccgccgcagcgaggcccggcccgaatgggggccgggggcggcccggggagtccgaggggcggnncggnccgcgccggagaatccgcctgaggcc

SEQ ID NO: 439952 - DNA, 829 bp, Homo Sapiens
ttttttttagcatttctttgaattttattgaaaattgacatggacattagaaaggtatcaggctaaacagtgctgggttctgggatgtttctcctggagaatgaaagccccagaggggcaatgactggtcacacctttgagcaaaaagaacaaaggagaagaaaggaaaaacacacacagattctggaaaacatgcaaagaggctctctcaagagacactgaacagcagaatggtggtgatggtggtaggggatatatgagaatgagcacactcacatggtattttgatgcaagttaaaccaatgaattcaaggcagatttaccaacatcaaagctctccctccagatcccaggttgagcagaaacctctctcaaaaccctaactggtctcggaaggtggaatggagtaattttgccctcactaagcttaaaccccctcccttctctacctaagtgttagatagtggatacattttccccctttgctggaatctatagaatgtctgccaacgctgtagaacattctatcgccacttgacttttctcttggttattcaaaaatgcctaacagcggcttgcgacagttaacccatcgtgccatagaagcgttaattgataaacagtaatccccaacatacctgcggaccttacattactttcattctcaccttccgtttattctgtcctagatcctaaactttgtatcagcggttcttgcgtttgtgtcatttggtacccctccatgaccaatatccccgttaacggcccttttattttgcgttatgtgcatgggacaaaacccggggactgttaaaacccaaatgtgggt

SEQ ID NO: 439953 - DNA, 958 bp, Homo Sapiens
  misc_feature (673)..(673): n is a, c, g, or t
  misc_feature (680)..(680): n is a, c, g, or t
  misc_feature (690)..(690): n is a, c, g, or t
  misc_feature (693)..(695): n is a, c, g, or t
  misc_feature (707)..(708): n is a, c, g, or t
  misc_feature (717)..(717): n is a, c, g, or t
  misc_feature (721)..(721): n is a, c, g, or t
  misc_feature (724)..(724): n is a, c, g, or t
  misc_feature (732)..(732): n is a, c, g, or t
  misc_feature (752)..(752): n is a, c, g, or t
  misc_feature (764)..(765): n is a, c, g, or t
  misc_feature (774)..(774): n is a, c, g, or t
  misc_feature (784)..(784): n is a, c, g, or t
  misc_feature (787)..(787): n is a, c, g, or t
  misc_feature (790)..(790): n is a, c, g, or t
  misc_feature (798)..(798): n is a, c, g, or t
  misc_feature (801)..(801): n is a, c, g, or t
  misc_feature (807)..(807): n is a, c, g, or t
  misc_feature (809)..(809): n is a, c, g, or t
  misc_feature (812)..(812): n is a, c, g, or t
  misc_feature (826)..(826): n is a, c, g, or t
  misc_feature (828)..(828): n is a, c, g, or t
  misc_feature (835)..(835): n is a, c, g, or t
  misc_feature (842)..(842): n is a, c, g, or t
  misc_feature (844)..(844): n is a, c, g, or t
  misc_feature (854)..(854): n is a, c, g, or t
  misc_feature (859)..(859): n is a, c, g, or t
  misc_feature (875)..(875): n is a, c, g, or t
  misc_feature (880)..(880): n is a, c, g, or t
  misc_feature (882)..(882): n is a, c, g, or t
  misc_feature (889)..(890): n is a, c, g, or t
  misc_feature (893)..(894): n is a, c, g, or t
  misc_feature (900)..(900): n is a, c, g, or t
  misc_feature (904)..(904): n is a, c, g, or t
  misc_feature (910)..(910): n is a, c, g, or t
  misc_feature (914)..(914): n is a, c, g, or t
  misc_feature (923)..(924): n is a, c, g, or t
  misc_feature (928)..(929): n is a, c, g, or t
  misc_feature (931)..(931): n is a, c, g, or t
  misc_feature (937)..(937): n is a, c, g, or t
  misc_feature (944)..(944): n is a, c, g, or t
  misc_feature (949)..(949): n is a, c, g, or t
  misc_feature (951)..(951): n is a, c, g, or t
  misc_feature (956)..(956): n is a, c, g, or t
ttggctcctagaccagtttatttcactttccagcattcaaagaaatgtgatctgcaaaaaactagatacaaaggccttttacttctttacaaactacggttagttctcaatgaatttacatgcctcactttttattccaagaaaaatccccattatgcaatacaagggtgaaacagctgttacaaatacacagaaacataataaagataaccaacactgttaagaggaaggggaagaggaaaaaacccaagagaaggaaacttttccacagtgactagcagaatgtcttgtagataccaataaccgaagacaaacaggttgctcacttcatcctatttatcaagtcatcctatctaaaatgagaatagttcatgcctaggataggctaactataggctttgctagtcctccttcctaatagaatgccctcagattattcctgagctatcactcaagtcacagatacttcagaatataatcttaggttttgtaaacaggaacatggtcaaaatgcaatacaatggaaaatctctacaagagaatgagatttggaaagccatgcttagagtctctgagccacacaaccataagatcttcgagtacgtttaatctctcatccaggaacattatccatttaccttgtaaggttgtgagaaatgaatagcataatatncaagaanctatcacatnatnnntattctacaaannacaattttntcanctntaaaattntaataatacccatttcccantattttttttannattaaatanaaatattttnaantcncatttttnttnacattnanttntcaataatatttanancattcantaaaaananaaacaccacntattnatcctaatcaatcatncacanantcaaaannaanntccttnctanttaccnaatnaattttttnnaacnncncctttnttatttnttaanantattncc

SEQ ID NO: 439954 - DNA, 517 bp, Homo Sapiens
  misc_feature (155)..(164): n is a, c, g, or t
aatagaatttcattttaataagtatatttaaagtttatcgcttccaaaaaacagcactttaattacattcaagttgtattcattttaaataccaacaaacccatcatttacatatagagctagatattacaaaacagatggaaatttaaacaagnnnnnnnnnnaagtccttccaaatttagaacattgtgaactattaagtacatgcctaaaaaatgtacacattatcagggaaacacaagttgctctaataggaaaagagccataatacacatacagtggaatataattcaaataggttcaatttacaggtatgtcttaaagtacaagaaaaccccaaagctaataactagaactataggcaaaatcatagctgactttctaaactaatgcaccactatataatgctttcccggagaaagtagaaggttctcaagattttatgttgacccatgatttttcacgtgttctcaaatataataccagagttttctttttgtcttaatttaaatccatc

SEQ ID NO: 439955 - DNA, 613 bp, Homo Sapiens
ttagacacaaacatctagtttattttttctgactgtaaccaaagtcagcaaaagaaacaacaaaacttcagtgccctagaaatcctcctggattcaatgacaacacatcaatggccgggcacagggttggattccttttatgaaatcaccttataatctctcatcatcccaggacagtgccttttgggactgcatgaatctttaatagctacaccacattttctcatcctttaagttatgacagacaggttatctctctccaagagcatcaggttagatgctctttcactcttacaaactgtcaggtggagggagaatcacgacatcattcataaataactgtggagtctgggatgctggctgaaggcatctccaggaaggactggagggcgattttgctaaagggctgctcactgctcatttcactgcatgccgcttttctcactttggttgggagtttgaaggaccatgtaatcacagagattagagctccctgtgaaatcaatcactgcctttagatctccacaaagacctgttctccaatagcacatgcgtttctctgtgagctgtattcgcatcagcgccggagcctcagaaagaatgcgtgtttaca

SEQ ID NO: 439956 - DNA, 1875 bp, Homo Sapiens
tcgggaaaaaaaagatttttttctttaatagtaaaataatatacgtcttggaaaatacagcatacaaaatacagaaaatataattgagcacttttatgagcatatcgatcattgaatcgcgagtctgcatcgcctatctctccgcgtctcttgcgtgcgtgtaggtatataaatggtgtataggcttgtgggtgtgcatgcatagacagtccttcttgggtactcataagggggctcagaccctcaggtgcccctgagtcttaaccccaccccttcttcatccgtcctgttcctgaagacgaccatgaaggtgactcttcattgagagcctctggaggctgggagcttttagagtaaggctttgcaatgtaaccgtgaggtagctatgatcatccttatttccagatgtgggaactaggcttcccagaggctgatgatatgaccaaggccacacagctggcaaacagtgattccaatggtctggaggtccctaggcctctgttctctcaacctggggctttcagtttcctcaagtctgattatctgccctcttcaaggtgctgctcagagggtctggggctcaatgatgaaaactgggatgggtcccaagggcaggtggagtagttacatccaccagtccatagactctttggggcaagccctgacgatgaccatacagtggggcagccccttacacaggatcttctccgcctcctgaccctcccaccccagcccctgcagctcaaggactctgagcttgggcatagtgaggcaggaggagaggatttcagtgggggagggcatttctggggtgacgaggggaccctgcaggcacagactctccagggccggcattccctccagcacagccaggccaggggcagagaggcccctcacggtcagccggatcttgcgcacatctcggaggtggcggctgatggccagcagggtgctgtcggcagacagggtgcagcccagcacctcaagcctctgcagatagctgagctcctgcaggccagcatccagccctgtctcggtcacacggtaggtaccacccagcaccagcgagcgcaaggcccggaagcgcgtcaggccctgcaggtgctcgtcacggaaggcggggacgcggtccagcacgatgcattcaagcaggggcagcacggtggggtcctgctgcttgtggagccaggccatggagatctcgcagctgtgcagctccagggtcctcaaggtgctgggcaggctggtgatgggcaccatgctcaggtcggccacgtgcaggcagaggcgcttcaggttggggcacttctggcccagggctctcaacagagcaggggacaactggggggcctgggagccagagaacaggtagccacccatccgcagggaatggagccgggatgccatgtaccttcgaaggaggtgccacatgactttaggtcgcatcgtgtagagcgtcaggtcgacatgtcgccacagccaccggtcgtccaccagcctcttccagcggtgacagaccctggagatgcggatccggtcccgtaccgggaggtaagagaagatctcgagcaggaccgagtccggcagttcgaccaaagtcgccatgatcccgccgacacgcacttccgcttccggttaaagagacccgaggggtcctgggggcgccgaggcggctgacagggcggcggccgcgaccttcccgtagccggtcgagaaatttgaccttcctctcgctgggaagtgattcggtcccagggccggaccagccgcggatggggaccagaaaccagcctggaaagcgtggctgaggcagtgagaggcttgcgggaggtggctgaggcgtgatttggccgcgactgggaactaagacccgct

SEQ ID NO: 439957 - DNA, 1126 bp, Homo Sapiens
ggtcttagttcccagtcgcggccaaatcacgcctcagccacctcccgcaagcctctcactgcctcagccacgctttccaggctggtttctggtccccatccgcggctggtccggccctgggaccgaatcacttcccagcgagaggaaggtcaaatttctcgaccggctacgggaaggtcgcggccgccgccctgtcagccgcctcggcgcccccaggacccctcgggtctctttaaccggaagcggaagtgcgtgtcggcgggatcatggcgactttggtcgaactgccggactcggtcctgctcgagatcttctcttacctcccgggtctgtcaccgctggaagaggctggtggacgaccggtggctgtggcgacatgtcgacctgacgctctacacggccctatgatgccaagtagagaaatccagcaataaaaggcagatatgcgacctaaagtcatgtggcacctccttcgaaggtacatggcatcccggctccattccctgcggatgggtggctacctgttctctggctcccaggccccccagttgtcccctgctctgttgagagccctgggccagaagtgccccaacctgaagcgcctctgcctgcacgtggccgacctgagcatggtgcccatcaccagcctgcccagcaccttgaggaccctggagctgcacagctgcgagatctccatggcctggctccacaagcagcaggaccccaccgtgctgcccctgcttgaatgcatcgtgctggaccgcgtccccgccttccgtgacgagcacctgcagggcctgacgcgcttccgggccttgcgctcgctggtgctgggtggtacctaccgtgtgaccgagacagggctggatgctggcctgcaggagctcagctatctgcagaggcttgaggtgctgggctgcaccctgtctgccgacagcaccctgctggccatcagccgccacctccgagatgtgcgcaagatccggctgaccgtgagggggcctctctgcccctggctggctgtgctggagggaatgccggccctggagagtctgtgcctgcagggtccctcgtcacccaggaaatgccctcccccactgaaatcctctctcctgctcatatgtcc

SEQ ID NO: 439958 - DNA, 823 bp, Homo Sapiens
  misc_feature (734)..(770): n is a, c, g, or t
gtcagccggatcttgcgcacatctcggaggtggcggctgatggccagcagggtgctgtcggcagacagggtgcagcccagcacctcaagcctctgcagatagctgagctcctgcaggccagcatccagccctgtctcggtcacacggtaggtaccacccagcaccagcgagcgcaaggcccggaagcgcgtcaggccctgcaggtgctcgtcacggaaggcggggacgcggtccagcacgatgcattcaagcaggggcagcacggtggggtcctgctgcttgtggagccaggccatggagatctcgcagctgtgcagctccagggtcctcaaggtgctgggcaggctggtgatgggcaccatgctcaggtcggccacgtgcaggcagaggcgcttcaggttggggcacttctggcccagggctctcaacagagcaggggacaactggggggcctgggagccagagaacaggtagccacccatccgcagggaatggagccgggatgccatgtaccttcgaaggaggtgccacatgactttaggtcgcatcgtgtagagcgtcaggtcgacatgtcgccacagccaccggtcgtccaccagcctcttccagcggtgacagacccgggaggtaagagaagatctcgagcaggaccgagtccggcagttcgaccaaagtcgccatgatcccgtcgacccgctctcgacgaattcgagctcggccgatttggcctgatnnnnnnnnnnnnnnnnnnnnnnnnnnnnnnnnnnnnncgccgccaccgcgatgagctccgagttcgccctatagtgagtcgtatacatcg

SEQ ID NO: 439959 - DNA, 505 bp, Homo Sapiens
  misc_feature (285)..(285): n is a, c, g, or t
  misc_feature (399)..(399): n is a, c, g, or t
  misc_feature (445)..(445): n is a, c, g, or t
cgggaaaaaaaaatgatttttttctttaatagtaaaataatatacgtcttggaaaatacagcatacaaaatacagaaaatataattgagcacttttatgagcatatcgatcattgaatcgcgagtctgcatcgcctatctctccgcgtctcttgcgtgcgtgtaggtatataaatggtgtataggcttgtgggtgtgcatgcatagacagtccttcttgggtactcataagggggctcagaccctcaggtgcccctgagtcttaaccccaccccttcttcatccngtccctgttccctgaagacgacccatggaagggtgactcttcattgaggggcctctgggagggctgggggagctttttaggaggtaagggcttttgcaatgtaacccgtgaggnaggctatgatccatccttatttcccagatgtggggactagggcttncccagagggcttgatgatatgaccccagggccacacagctggggcaaacagtgattccat

SEQ ID NO: 439960 - DNA, 941 bp, Homo Sapiens
  misc_feature (798)..(798): n is a, c, g, or t
ccaggggaggaaaaagaaacaagttttattaaagccccaaacacttggctagaaaaactgaaaaggaaagagagcagggagcgggggagaagaaaaaaggacattaaaaaagagagacagagaaaacacagcaacccttttccatttagaaattgtcaagttacaccgacagaggtcacagaatatccacagaagccatcactgctacaccaacatgggccctacagggtggatggggcagggtgtggagccggggctcaccccggggggccccctggggaccccactcagagcctcaggcctgaggctcctggggaaacagcatattgtggaaggggcaggaaatcccccatgcgagtaacacagcacagtgggcgggggctgagaggaccaggtacaggggtcccccgagacgtcttagttttctcttggtcaagcacacactgatggacagagcagcgaggcgcatgcagctgggggcactgatgtgctgcaggctgtgagaggtccagcggggacgggggctcaggaagggatctggagccagtggtgcagggatgatggaacacacgcccacagagtgtattcctactcactttgggtcttgcatcaggccaacatatcttgcacacacacaccttgttatacccaccataactatgctccttcctagtatgcgttttttatgcacaatgtcgtgggttcaatacataagtttcttggctcgtcgtgatgtgttggcccaacatttacccatcgtttttttaccctcatcgtccttttagcgttacattttcngttgttccgtcgccagtggcctaaacttgttttcttgcattctatgtggtcttcgtttttcccctacaattgggcttttgtcactcacctgtgttggccatgtcctcatagtggtgtgcccaaccaactcgctggttgcttgt

SEQ ID NO: 439961 - DNA, 750 bp, Homo Sapiens
  misc_feature (109)..(170): n is a, c, g, or t
  misc_feature (599)..(615): n is a, c, g, or t
  misc_feature (726)..(726): n is a, c, g, or t
  misc_feature (734)..(734): n is a, c, g, or t
gggggcactgatgtgccttgcaggctgtgagagggccagcgggacgggggctcaggaagggatctggagccagtggtgcagggatgatggaacacacgcacacagaggnnnnnnnnnnnnnnnnnnnnnnnnnnnnnnnnnnnnnnnnnnnnnnnnnnnnnnnnnnnnnngattacatgcacctccatgtatgcgtctctatccacatgtacgtggcccacacacaagtctctggctctcggcatgtctgcacacacattacacatgttctcacacacaaagctcctctcacgctaacatgcaggtaggcacgtgccaatgcccgaacaggttacatgcacctatgtgcccacgccttcccccacacatgtgctcggccatgcctgtgggtgcaggccccatgcgtctgcacacacagtgcatgggcttgtgccagcacacacacaggctgcacgcaagttccacacggatgcctcccagcccataaatgtgcaggaaccaaaagagaaagaaagatgcaaatcccactgggcttcacccgagcgggtggggcggggcacgtggctccctccttctgccccttcgtggatggacactgnnnnnnnnnnnnnnnnnacaaagggacattcaactcaggacaatgacggtggggcacacattccagtcacagggctgagggtgggagtctgcggggcaagccgacgcgtcgggtcgacgatatcccantaacaccnggcggtaccagcctgc

SEQ ID NO: 439962 - DNA, 459 bp, Homo Sapiens
  misc_feature (412)..(412): n is a, c, g, or t
aaaagtcaaaactggtgtttattgtgttcccaccatagcagtcattttgtataggtaaagtgattggatctacatattcctccataatattgctctattatatactagtgatacacagccatatgctacataaagacatttctgtcaatgattccacatttaaaaccatggtcccataagattatagtggaacatatacagaaacctaatacatgggcccttgatattgggcattgcaggatcaagtaggggaaatgactgacattcagtaataatgctgtgacatttgggtatttcatgtgaaaatatacatgtaaataaaaatacatattaacatctagggtttgtgttaaggtacattctataatgtttacacaatggacagaattgcctaggtggacactttctaggntgtatccccttcgtttaaggcatggctgaccgtatttactggcgttc

SEQ ID NO: 439963 - DNA, 1458 bp, Homo Sapiens
  misc_feature (1191)..(1191): n is a, c, g, or t
aggggcgaggcctgggtggcgaattcggcacgaggctgagatggagcaaagagaaaccacctcttcacaccacggataagttccaaaacaggctccattcccttgaagacccctgccaaagattctgaaggaggatggtttattgacaaaaccccaagtgtaaagaaagacagttttttcttggacctgtcatgtggagaaaagtaatcctaagaagccaataactgagatacaggattcaaaagattcttctcttttggagagtgatatgaaacggaaaggcaagctaaagaataaaggaagcaaaaggaagaaagaagatcttcaggaagtagatggagaaattgaagctgtcctgcaaaagaaagctaaagccagggggttagaattccagatctccaacgtgaagtttgaagatgtgggaggcaatgatatgacattaaaagaggtctgcaagatgctcatacacatgcgtcacccggaggtgtaccaccacctgggcgtcgtgccccctcgtggagttctccttcatggaccaccaggctgtgggaagacattacttgcacatgcaattgctggggaacttgacctgccaattttgaaagtggctgctccagagattgtgtctggagtatccggagagtctgagcagaagctgagagaactatttgagcaagctgtgtcaaatgcaccatgtatcattttcattgatgaaattgatgctattacccccaaaagagaagtggcttcaaaagatatggaacgaagaattgtagcccaactcctaacctgcatggatgatctgaataatgtggctgctacagccccggggtcctagttattggagctactaatcgaccagactcgttagaccctgctttgagacgtgcgggaaggttcgaccgagaaatatgcctaggtatcccagatgaagcatccagggaaagaatacttcaaacattgtgcagaaaactgaggcttcctcaagcttttgatttctgtcacttagcacacctaactccaggctttgttggtgctgatctcatggcactgtgccgagaggcagcaatgtgtgcagtcaatagagtcttaatgaagctacaggaacagcagaagaaaaatcctgaaatggaagatttgccatctaaaggagttcaggaggaaaggctgggaactgagcccacttttganacacaggatgaattatcaaggcttgctggggttgctaagagaccaagatcccctctcagaggagcagatgcaaggactgtgcatttgacttgatgatttcattgttgctctattctcagtccaaccctctgccaaaagggaaggctttgtcactgtccctaatgtgacatgggcagatattggtgccctggaagacattaaagaagagctcaccatggcaatattggcaccagtacgcaacccagaacagttcaaagctccttggat

SEQ ID NO: 439964 - DNA, 862 bp, Homo Sapiens
atcaggccaaatcggccgagctcgaattcgtcgagagcgggaaggaccgacgcgatgaagcccagacctgcagggttcgtggataataaactcaagcagcgagtcatccagtatagactatggtcgaagaaaaagaaatgcttttaggattcaggtagaaaaagtatttagcataattagtagtgagaaggaacttaagaatttaacagaattagaagatgaacatttggcaaaaagggcaagacaaggtgaagaggataatgagtatactgaaagctattctgatgatgattcaagtatggaagactacccagatccacagtcagcaaatcacatgaacagttccctgctgtctttatatcggagaaggaaatcctgattctgtttcaaatactcctgagatggagcaaagagaaaccacctcttcaacaccacgaataagttccaaaacaggctccattcccttgaagacccctgccaaagattctgaaggaggatggtttattgactagaaagcccaagtgtagaagaacagacagttttttcttggacctgtcatgtgagaaaagtaatcctaaggaagccaatacactgtagatacaggattcaaaagattcttctcttttggagagtgactatgaaacggaaaggcaaggctagagcaatacaggaagcgaacaggacgcacagaagatcttcaggaagtagatggagcaatttgaagctgtcctaccacagagagctaaagccggggggttagaattccagatctcccacgtggaatttgaagatgtgggaggcaatgatatggacatttaaagaaggtctgcaagatgctccatacacatgcggtcacccggga

SEQ ID NO: 439965 - DNA, 1149 bp, Homo Sapiens
agcggaggcgccattttgtagcgagggagggaggctggtccttgtgattacccgggagggagccggggtgacgagcgccattttccccacaggggcgaggaggcggctttggttctcccggtgggcttgccggagtgcgttctgcagaccagaagggctttgtctggcgattgctgaatgctcaatagcagcctgctgggagggaagtcgaagggagaaataggacagaaagagagacctgacctctccctggaggctctcagtgtcggccgagtcccttggtcttgctctagggctctgcattcccgagagctgctgtatgccggggattggcttccaagcctgcctgagcttctccagtctcccgggcatcgccatgcggtgggagggtgagccttcctctcctgctgaaattccggcggcttggcaaccggccggggggtcttggattcctcggggagacaccactgatgctttgtggtttcacgtaatttggatttaacaagttgaaggcgtcagaacatggttgtcgctacggtcttttgtatgttcttgtgttgcgaactaataaaggaaagtccaacagggtgggagaagcattcagtctggttccctaaagttactaagaatggatacaaattagttgtggccgttgcggttaatgcttcttgtagctcttaacccagccctttctaaacctttggatatacttactagtcagttccgaaggtactcagtacaaatttgcgttggcgcaccaggccgactaaagatgaggtgggtgtattagactcaaaatttcttaagtcggccagggggtagaattgagctaccaagagaatgagagactaccctgttgtaacagatttggatcgcgcttagaaaaacagggagaaagctggatgatgttcaacttaatgtcttgcatttcagacgattatcgaatggacggggataaataaaaacgatgttacagatagccctctaagtgtggatagtaaatattttgatttacaattaagcctaccttgaggtgcaggccctaaccaacggatagttgagtaataggggcctatacgccaatggaaagaaaatgggactttaagctttgtttgaacatatattctgttaataaagaagtttaaatca

SEQ ID NO: 439966 - DNA, 1266 bp, Homo Sapiens
  misc_feature (49)..(49): n is a, c, g, or t
atgagccactgcacccggccgagaataaggtaaactttaacttggcacngtaaaggtcaattttcaggcagtcttagagtttagcaatttctctagtgtataaactgattcttaacgatttaaagaaaattatattcaagtggcaaatttggaggcaacaggctacttcggagtccatgatatgagatggcgttttaaatacatgttttatcttcaaggttttcagctcttttctctggaccatctggatataagttgatagctgtcacaggtatgacgtccactttatccaactgaagaattcctttgtattcagaaactgggaaaaacacctttaagatggttattaccacagctgctcctgtaattccaaccaccatgatgttcaaaaactgaaagaatactgggaaaacgttgctccagaacctacacagatcttttctaaacttttccatccactgacacattaccttatatgaagatggcggctctgctctgagaggagtttcaggtaacttgccaggtaaaacatcttcatctacagtggtttccacattcctgataagatactggctagtggtttgcagtgaactaacactttcttttttggagaggttaggaagggtaaataaaatgtcactgtctcgagaaatagagtagagcatgctttcttccaaagggagggtatagtttgaatgtctgagtactccccggttcttaactaaaatatcaatttcagtgacatccttttgctgaacttgttttccatcaatctctactacctcttcttgaatgacaattagttgcaaactggaaccagatgtcataggccactcatgaactaaaatccttacactgacaattccaaaatattctttttcctccaaatttttcaagattttcattcttcactatcaaagtctgacagcttattcgggttacaccactatttacaggtaagtcatttacatacacctgtccactctcataggttatgttaagaacaacctgctgtttagatatgtccccatcatctttcagtgtagttacattaattctgatgccgtcctgtggggctccggacagcggcggcggctcgggggcgcccgtcgtcagccagccggaggcgggtagcgccacgaacagcaggagccggagggcgagcgaaccccggtggagcgccctccatcttggacaacccgggcagagggcagccgcggccgggaggtgagggcggagccggcccgcgggcgggacggagcttcg

SEQ ID NO: 439967 - DNA, 1108 bp, Homo Sapiens
  misc_feature (1003)..(1003): n is a, c, g, or t
  misc_feature (1045)..(1045): n is a, c, g, or t
  misc_feature (1053)..(1062): n is a, c, g, or t
ttttaaaagttttattttagttttaattgacacataataattgtataccaaatagcaatttttaaaaatagggagacccaagagttaaaaacacaaagtttttccactgttctttgtaaaatttctcatactgaggaaactgtttttataaagcaaccatgtatgttgccattacagtgtactgcatacttattagacaattgacaggaaaaacaacttttggcacaagaatgccaatttattccttttttggacacataaacacaaaatatccctgcaggccaaaaaaaattgcaaaatttaaacgaccatcatcttatctcaacatgaggatacaacccctcccttaatagtttagaaagtacctcgtattgctagagacatacatccagtccaaatttaataaaatacattttaaaacattacaggtctaataatatagaaacaaaaatcacaccattagtcaaatgaacaaatgcaaacattttcagccactagacgtagaaagagcatgaatatgtcaatagcaaggcataagaaaatggttaatcaataacaagatctttcctttaattttacaaggaaaacttcttggagttgcaacagtattgatacaatgccctcagcctccactttcttaaaatgaaagcagagctaccaccttgctattgagcaagaaaatatcacagcacattcacaaaaggtcgttaggacagggtggagagggtgagccttgttaaacagtggattatattttcccacttgaagggtaggcagctttgccaggtaggcaagctctgatagaggctgggcaccagatcctaaaacacagaccatatagaacatgtctgcttgaaaatcatcacctttggaagcagcaaatagaatttacagtaagaatgaatatgttctgctgcccagaacgctggctgcattaagccagctagttcactttataaaccattcaggattcaacagctaagaacaccaccaccaaaacatnaattgttcaacatttgggtcatcaccactctcttaatgtccncccccccnnnnnnnnnngagacgagtttcgctctgttgcccaggctggagtaatagctcactg

SEQ ID NO: 439968 - DNA, 1038 bp, Homo Sapiens
  misc_feature (917)..(917): n is a, c, g, or t
  misc_feature (920)..(920): n is a, c, g, or t
  misc_feature (979)..(980): n is a, c, g, or t
  misc_feature (984)..(984): n is a, c, g, or t
  misc_feature (991)..(991): n is a, c, g, or t
  misc_feature (1017)..(1017): n is a, c, g, or t
  misc_feature (1027)..(1027): n is a, c, g, or t
gaaaactgtgagagagagaatttttaaaaagcagctggggcctgaggtttctcccccagtaccctgggtcacctcagcccagagctggcggcaggcccccagcccctcatgtcagagccccctgtgtactgtaacctggtggaccttcgccgctgtcctcggtccccacccccaggccctgcatgccccctgctgcagaggctggatgcctgggagcagcacctggaccccaactctggacgctgcttctacataaattcactgactggctgcaagtcctggaagcccccgcgccgcagtcgcagcgagacgaaccctggctccatggaggggacacagaccctgaagaggaacaatgatgtcctgcaacctcaggcaaagggcttcagatctgacacagggaccccagaaccgcttgacccacagggttcactcagcctcagccaacgcacctcgcagcttgaccctccagccttgcaggcccctcgacctctgccgcagctcctggacgacccccatgaggtggaaaagtcgggtctgctcaacatgaccaagattgcccaaggggggcgcaagctcaggaagaactggggcccgtcttgggtggtgttaacgggtaacagcctggtgttctaccgagagccactgccgacagcgccctcctcaggctggggaccagcgggtagccggcccgaaagtagcgtggacctgcgcggggcggccttggcgcacggccgccacctgtccagccggcgcaacgtcctgcacatgcgcacgatccctggccacgagttcctgctgcagtcggaccacgagacagagctgcgagcctggcaccgcgcgctgcggactgtcatcgagcggctggatcgggagaacccctggagctgcgtctgtcgggctctggacccgcggantgnagcgccggggaggacgaatagaggagtcggagctggtgttcaagcgctgctgccctcannagcngcggagntcattcgggggccgaaggaccgaganaacgcgtgcnaaaaaataaag

SEQ ID NO: 439969 - DNA, 323 bp, Homo Sapiens
tgaggcgcagcagcggcttggacaccagctccgactcctcttcttcgtcctccccggcgctcagctccgcgggtccagagcccgacagacgcagctccagggggttctcccgatcctagacccggggcgggccgtgtcgaaggtgagagaggagagaaatctgcatccctagctggactctgacccactgccagggtcccacgtcccggcccaggccagggctctccactgagcccaccctgcccccactgctcctgactcctatcgttcctaccccactcccttggtcccggccggccggagcctccctccgggcctccacc

SEQ ID NO: 439970 - DNA, 1371 bp, Homo Sapiens
  misc_feature (237)..(237): n is a, c, g, or t
  misc_feature (244)..(244): n is a, c, g, or t
  misc_feature (263)..(263): n is a, c, g, or t
  misc_feature (356)..(356): n is a, c, g, or t
  misc_feature (850)..(893): n is a, c, g, or t
  misc_feature (1009)..(1052): n is a, c, g, or t
ctcccgtcccccccgtgctcatacgaccgcgttatcgtcgtctccccgccgccgccctctgtaccagcccgctgcctagttcgtgggggtggcgtaggggtcactcaatcggcgacgggggggtacgcttgagtaccttgtgccgcgctctcgtacacgcgctcgctctgtggtcgtaccactgtcgcccccccatcgcgtggtttctctccttgccgcaggctatgtcggtgtcgntcggagngcggtgtcgtggtctgtcngtgcgcagtctgcgcgccgttcgtgtctattgtctcgtgccccggtgtgttagcgcgtaagattatgcgcggggcggcggcggtttacgttantagcctctctcgtgcccaactaatcgctacagtgggcgtgctcccattgggcctggcggagtatcggcaatttttgcgcgccgccggggcatatatttggcccctcccgcccgggaggtggccccaagtactagattcccgtcgccccgggagaacagagggggtggtacacctgaatggccttggtccccgacgggaggcggtctcggggcttttccggccaggtgcgcccgggtatttttattcatttccgggggggcttcctttcaatgtgccagcgccttcgccagcccgccttagccctcgtgggatgaaacggcccgcttctcccgtctccgaccaaaagtttcccactcggcgccccaggcgccttgctgatctccgacttgtgcatcttggggttctcctgggccatcttgcgccgctgcccgcgggaccacaccatgaaggcattcatgggccgcttgacgcggtccgggctgtttttctggttnnnnnnnnnnnnnnnnnnnnnnnnnnnnnnnnnnnnnnnnnnnnaagtttgctgcgggcccggcggcttcagctccgtctccatcatgttgtacatgcgggcgctgtgcgcgggcccggcccgccggcggccgccgaccctcggcccggccgggactttnnnnnnnnnnnnnnnnnnnnnnnnnnnnnnnnnnnnnnnnnnnnggtgtcgggagctgcagggctccgcgaggaaaatcaggcgaagaataatttgggggaaaaaaagagagaggcaaactggaatcaggatcaaaaaaagcgcttccctcctcctctggccgatcctgccgccgccgatgattgttattattattttttggaaaggcttaagcctggggctcaaacttctctccctttctttctctctcctcttctttctctcagtcctagtcttaaagaggcagcaaactactttcccccttttgcaaacactctcttctctgccttgacaactcctgatacttttttgaacaagttaata

SEQ ID NO: 439971 - DNA, 1127 bp, Homo Sapiens
  misc_feature (185)..(210): n is a, c, g, or t
  misc_feature (356)..(378): n is a, c, g, or t
ggcgactcaatgcccagactaccggagcggggcgggcccgagcgccagaagcgcacacggcccaccaaaacagggagggccgaacggcgaacggagggggagaaatgtacaaggaaaaacggggaaaagggaggggggcaaaagaggagagtaagaagcggcaggaagaaagcccggagcgcgcnnnnnnnnnnnnnnnnnnnnnnnnnncccagcgcccacagcaaaagacagctgcaaaagagagcaccaagcccagccacacgcacgcaaaagccgcgatgccgacaagaaaacggtaatgagagagagcctggactactatttggggaacaaaacttgaacagagaaaaccnnnnnnnnnnnnnnnnnnnnnnncaatggaccttgtatagatctggaggaaagaaagctacgaaaaactgtttaaaagttctagtggtacggtaggagctttgcaggaagtttgcaaaagtctttaccaataatatttagagctagtctccaagcgacgaaaaaaatgttttaatatttgcaagcaacttttgtacagtatttatcgagataaacatggcaatcaaaatgtccattgtttataagctgagaatttgccaatatttttcaaggagaggcttcttgctgaattttgattctgcagctgaaatttaggacagttgcaaacgtgaaaagaagaaaattattcaaatttggacattttaattgtttaaaaattgtacaaaaggacaaaattagaataagtactggcgaaccatctctgtggtcttgtttaaaaagggcaaaagttttagactgtactaaattttataacttactgttaaaaggaaaaatggccatgcaggttgacaccgttggtaatttataatagcttttgttcgatcccaactttctattttgtttatatttggttttctatgtaattactgtgtttgaaatattttcttatggtttgtaatatttctgtaaatttattgtgatattttaaggtttccccccggggttttccgtagttgtattttaaaagattcggctctgtattatttgaatcagtctgccgagaatccatgtatatatttgaactaatatcatctttattataggtttttttt

SEQ ID NO: 439972 - DNA, 2512 bp, Homo Sapiens
  misc_feature (998)..(1022): n is a, c, g, or t
  misc_feature (2377)..(2413): n is a, c, g, or t
taatttcagtgtccatatttcaaaaatttatttatctcaaactgtgcataatggagtaaaaacttaagttgaaaatgtacctgttataaggatgatattagttcaaatatatacatggattctcggcagactgattcaaataatacagagccgaatcttttaaaatacaactacggaaaataaaggggggaaaaccttaaaatatcacaataaatttacagaaatattacaaaccataagaaaatatttcaaacacagtaatttcatggttttttttatctgaacaaaatggaaagttgggatcgaacaaaagctattataaattaccaacggtgtcaacctgcatggccatttttgcttttaacagtaagttataaaatttagtacagtctaaaacttttgccctttttaaacaagaccacagagatggttcgccagtacttattctaattttttccttttgtacaatttttaaacaattaaaatgtccaaatttgaataattttcttcttttcacgtttgcaactgtcctaaatttcagctgcagaatcaaaattcagcaagaagcctctccttgaaaaatattggcaaattctcagcttataaacaatggacattttgattgccatgtttatctcgataaatactgtacaaaagttgcttgcaaatattaaaacattttttttcgtcgcttggagactagctcttaatattattggtaaaagactttttgcaaacttcctgcaaaaggttctacccgtaccacttagaacttttaaaaaggtttttggtagctttctttcctccagatctatacaaggtccattcccccgccctccccaccctccccaggttttctctgtacaaaaatagtcccccaaaaagaagtccaggatctctctcataaaagttttcttgtcggcatcgcggtttttgcgtgagtgtggatgggattggtgttctcttttgcagctgtcatttgctgtgggtgatgggannnnnnnnnnnnnnnnnnnnnnnnngagcgtaccgggttttctccatgctgtttcttactctcctcttttgcacccctcccatttccctcgtttttctttgaaaatttctcccccctccagttcgctgtccggccctcacatgtgtgagaggggcagtgtgccgttaatggccgtgccgggcaccgggccgctctggtagtgctgggacatgtgaagtctgctgggggcggcgggttccggcacctcggcgccggggagatacatgctgatcatgtcccggaggtccccggcctggcagggcgccctggagtgggaggaagaggtaaccacaggggggctggagctggcctcggacttgaccaccgaacccatggagccaagagccatgccaggggtgccctgctgcgagtaggacatgctgtaggtgggcgagccgttcatgtaggtctgcgagctggtcatggagttgtactgcagggcgctcacgtcgtagcggtgcatgggctgcatctgcgctgcgccgtgcgcattgaggcccgggtgctgcgggtagcccagctggtcctgcatcatgctgtagctgccgttgctccagccgttcatgtgcgcgtaactgtccatgcgctggttcacgcccgcgcccaggccggcgcccaccccgaccccgctcgccatgctattgccgccgggggccagcagcccgccgggcagcgtgtacttatccttcttcatgagcgtcttggttttccgccggggccggtatttataatccgggtgctccttcatgtgcagcgctcgcagccgcttagcctcgtcgatgaacggccgcttctccgtctccgacaaaagtttccactcggcgcccaggcgcttgctgatctccgagttgtgcatcttggggttctcctgggccatcttgcgccgctgcccgcgggaccacaccatgaaggcattcatgggccgcttgacgcggtccgggctgtttttctggttgccgccggccgccgccgcggtggagttgccgccgccgccccccgaagtttgctgcgggcccggcggcttcagctccgtctccatcatgttgtacatgcgggcgctgtgcgcgggcccggcccgccgcggccgccgaccctcggcccggccgggactttggggggcccacgtgcgggtgtatagtagtagtggatacgtgttgctttttcgggagcgcaggctccgcgaggaaaatcaggcgaagaataatttgggggaaaaaaagagagaggcaaactggaatcaggatcaataaaagcgcttccctcctcctctggccgatcctgccgccgccgatgattgttattattatttttttggaaaggcttaagcctggggctcaaacnnnnnnnnnnnnnnnnnnnnnnnnnnnnnnnnnnnnnagtcctagtcttaaagaggcagcaaactactttcccccttttgcaaacactctcttctctgccttgacaactcctgatacttttttgaacaagttaata

SEQ ID NO: 439973 - DNA, 1045 bp, Homo Sapiens
  misc_feature (492)..(516): n is a, c, g, or t
ttgcttcttttcacgttgcactggccctaaagtttcagctgcaggaatctaaattcagcagaaccttctcctggaaaataatggccaattctcagcttataaccatggacattttgggttgccaatgtttatcttcgataatactgtaccaaaaggttgcttgccaatattaaaacactttttttgtcgcttggagactagctctaaatattacttggtaaagacttttgccaacttccttgcaaagctcctaccgttaccactagacttttaaaaagtttttcgtagctttctttcctccagatctatacaaggtccattcccccgccctccccaccctccccaggttttctctgtacaaaaatagtccccccaaaagaagtccaggatctctctcataaaagttttcttgtcggcatcgcggtttttgcgtgagtgtggatgggattggtgttctcttttgcagctgtcatttgctgtgggtgatgggannnnnnnnnnnnnnnnnnnnnnnnngagcgtaccgggttttctccatgctgtttcttactctcctcttttgcacccctcccatttccctcgtttttctttgaaaatttctcccccctccagttcgctgtccggccctcacatgtgtgagaggggcagtgtgccgttaatggccgtgccgggcaccgggccgctctggtagtgctgggacatgtgaagtctgctgggggcggcgggttccggcacctcggcgccggggagatacatgctgatcatgtcccggaggtccccggcctggcagggcgccctggagtgggaggaagaggtaaccacaggggggctggagctggcctcggacttgaccaccgaacccatggagccaagagccatgccaggggtgccctgctgcgagtaggacatgctggtcatggagttgtactgcagggcgctcacgtcgtagcggtgcatgggctgcatctgcgctgcgccgtgcgcattgaggcccgggtgctgcgggtagcccagctggtcctgcatcatgctgtagctgccgttg

SEQ ID NO: 439974 - DNA, 405 bp, Homo Sapiens
  misc_feature (395)..(395): n is a, c, g, or t
agcagcgtcttggtcttgcggcgcggtcggtacttgtagtccggatactccttcatgtgcacggcgcgaagtcgcttggcctcgtcgatgaatggtcgcttctcggcgtcggtcagcagtttccagtcggcgcccaagcgcttgctgatctcagaattgtgcatcttggggttctccagggccattttgcgccgctgcccgcgggaccataccatgaaggcgttcatgggccgtttcacacggtcctggtctgtacccccgccacctccgctcgcaccaccgctgctgccgccgcccgagttcgcgccgccggctgcgttcgcactactcttgcctgcgcctcccggggctgcggggccgccggtgcccgccgcttgtgtgggtgtccctacggngttcttgagt

SEQ ID NO: 439975 - DNA, 469 bp, Homo Sapiens
agcccgcgggttcctgctgatttggcgcggagcattttgataagcctacccttcccgccggactcgctggcccacaggcccccaagctccgctccgacggagtcccagggccttttcaccgtggccgctccagccccgggagcgccttctcctcccgccacgctggcgcaccttcttcccgccccggcaatgtacagccttctggagactgaactcaagaaccccgtagggacacccacacaagcggcgggcaccggcggccccgcagccccgggaggcgcaaaatggccctggagaaccccaagatgcacaattctgagatcagcaagcgcttgggcgccgactggaaactgctgaccgacgccgagaagcgaccattcatcgacgaggccaagcgacttcgcgccgtgcacatgaaggagtatccggactacaagtaccgaccgcgccgcaagaccaagacgctgct

SEQ ID NO: 439976 - DNA, 458 bp, Homo Sapiens
gcccgggcggcggcgggctgcagccgcggcagggcgagagcatgtccaagccggtggaccacgtcaagcggcccatgaacgccttcatggtgtggtcgcgggctcagcggcgcaagatggcccaggagaacccccaagatgcacaactcggagatcagcaagcgcttgggcgccgagtggaaactgctcacagagtcggagaagcggccgttcatcgacgaggccaagcgtctacgcgccatgcacatgaaggagcaccccgactacaagtaccggccgcggcgcaagcccaagacgctgctcaagaaggacaagttcgccttcccggtgccctacggcctgggcggcgtggcggacgccgagcaccctgcgctcaaggcgggcgccgggctgcacgcgggggcgggcggcggcctggtgcctgagtcgctgctcgccaatcccgagaaggcggccgc

SEQ ID NO: 439977 - DNA, 1626 bp, Homo Sapiens
  misc_feature (101)..(137): n is a, c, g, or t
  misc_feature (301)..(382): n is a, c, g, or t
  misc_feature (480)..(523): n is a, c, g, or t
ctattaacttgttcaaaaaagtatcaggagttgtcaaggcagagaagagagtgtttgcaaaagggggaaagtagtttgctgcctctttaagactaggactnnnnnnnnnnnnnnnnnnnnnnnnnnnnnnnnnnnnngtttgagccccaggcttaagcctttccaaaaaataataataacaatcatcggcggcggcaggatcggccagaggaggagggaagcgctttttttgatcctgattccagtttgcctctctctttttttcccccaaattattcttcgcctgattttcctcgcggannnnnnnnnnnnnnnnnnnnnnnnnnnnnnnnnnnnnnnnnnnnnnnnnnnnnnnnnnnnnnnnnnnnnnnnnnnnnnnnnnagggtcggcggccgccggcgggccgggcccgcgcacagcgcccgcatgtacaacatgatggagacggagctgaagccgccgggcccgcagcaaacttnnnnnnnnnnnnnnnnnnnnnnnnnnnnnnnnnnnnnnnnnnnnaaccagaaaaacagcccggaccgcgtcaagcggcccatgaatgccttcatggtgtggtcccgcgggcagcggcgcaagatggcccaggagaaccccaagatgcacaactcggagatcagcaagcgcctgggcgccgagtggaaacttttgtcggagacggagaagcggccgttcatcgacgaggctaagcggctgcgagcgctgcacatgaaggagcacccggattataaataccggccccggcggaaaaccaagacgctcatgaagaaggataagtacacgctgcccggcgggctgctggcccccggcggcaatagcatggcgagcggggtcggggtgggcgccggcctgggcgcgggcgtgaaccagcgcatggacagttacgcgcacatgaacggctggagcaacggcagctacagcatgatgcaggaccagctgggctacccgcagcacccgggcctcaatgcgcacggcgcagcgcagatgcagcccgtgcaccgctacgacgtgagcgccctgcagtacaactccatgaccagctcgcagacctacatgaacggctcgcccacctacagcatgtcctactcgcagcagggcacccctggcatggctcttggctccatgggttcggtggtcaagtccgaggccagctccagcccccctgtggttacctcttcctcccactccaggcgccctgccaggccggggacctccgggacatgatcagcatgtatctccccggcgccgaggtgccggaacccgccgcccccagcaagacttcacatgtcccagcactaccagagcggcccggtgcccggcacggccattaaacggcacactgcccctctcacacatgtgagggccgggcagacgaactgggaggggggagacattttcaaagaaaaacgagggaacatgggaggggtgcacaagaggagagtaagaaaacaggcatggagaaaacccgggtacgctcaagaagaaaaagggagcacaaaaaatcccatcacccgaggcaaatgacaggtgcaaagagaaccacaatcacatccacactcacgcaaaaacgggatgcgacaagagaagctttatgagagagacct

SEQ ID NO: 439978 - DNA, 1610 bp, Homo Sapiens
  misc_feature (1048)..(1048): n is a, c, g, or t
  misc_feature (1121)..(1121): n is a, c, g, or t
  misc_feature (1577)..(1577): n is a, c, g, or t
  misc_feature (1593)..(1593): n is a, c, g, or t
aggcttttcccccattatctggcatacaataggtcttttccgcagtggagattctataaatgtgcgataagttgtggaggtcagtccttaaaaaacttctcaacatttaatgccatccataagggcttttctccggtaatgaattctctaatgttgattcaggtgttagcaatagccaaaggtcttcccacattcatacatttgaaaggggtctctcctgtgtgaaatctttgatgtaaagtaagggttatgcgtctgctgaaggcttttccacactgattacattcatagggtttctctccagtgtgaatcctctgatgttgattaaggtgagcactctgtctgaaggctttattacattctttacattcatatggtttctcacctgtgtgaattctctgatgttcaacaaggaaggcataacggctaaaggccttcccacattcattgcacgcaaacggtttctctccagtgtggatcctctgatgttgagcaaggtgagcactctgtctgaaagctttgttacattccttccattcataaggtttctccccaatatgagttctttgatgttcactgagaaagaagtcgtggctaaaggcttttccacagtcattgcatgcatatggtttttctccactgtgaattctctgaggttgagtaaagaatgagtaacagctaaaggcatcaccacattcatcgtatccatggggtaattttccaaaatgagtggtctgatgttgagtaaataatgagtggaaacttaagagctttgaaaaatcatgactttcataaggtttctccccaggaggaattcctatatctttactaaggtacgtactctggttgaattcttcacattcattacctatcaaagattccttctcagcatggagtcttttatattcaattatgactgaattttgggggaagagtttatcataaatatcaaatttatgtacttgctgtatggtaggaactttctgttgtgttaaaaatactgatttcaggggtatgcttctcccagaattactaaattcattgtctnttttcccagtagagatttccttaacagctgtcacttgcatgaaatgcctctccgcatttccctgatgtagctnaaattcacccttatatttccaggcttctctgaaactggagcattcaaggccatgacttgctagcctttccattaccatctcctgggatatttcatcttcatcaatgaaccattttggagataattcctcaatttcacaccaagactcccagtctgcacagtgaccctgtgacatctttctctccaccatccacggttccttcccttgctccagtaaggagatcatgttgggcttagaaatggagagtccaagttcctgtagttctccaacatgacatctctgtataaatccttctgagatggcttcagccattcccactcttcttgggaaaagtctagcgccacatctctgaaggtcaccaacccctgggacatggctttacaaagccccacagccattcctccttcttcagttttctcttctgaagaagaacaaagtcctcccggcgccgcgggntctgcaaacgggcccngcgaccgagacccgcga

SEQ ID NO: 439979 - DNA, 1569 bp, Homo Sapiens
  misc_feature (127)..(127): n is a, c, g, or t
  misc_feature (1076)..(1076): n is a, c, g, or t
  misc_feature (1111)..(1112): n is a, c, g, or t
  misc_feature (1130)..(1130): n is a, c, g, or t
  misc_feature (1142)..(1142): n is a, c, g, or t
  misc_feature (1145)..(1147): n is a, c, g, or t
  misc_feature (1150)..(1150): n is a, c, g, or t
  misc_feature (1153)..(1154): n is a, c, g, or t
  misc_feature (1157)..(1157): n is a, c, g, or t
  misc_feature (1161)..(1161): n is a, c, g, or t
  misc_feature (1176)..(1178): n is a, c, g, or t
  misc_feature (1181)..(1181): n is a, c, g, or t
  misc_feature (1190)..(1190): n is a, c, g, or t
  misc_feature (1196)..(1196): n is a, c, g, or t
  misc_feature (1211)..(1211): n is a, c, g, or t
  misc_feature (1214)..(1214): n is a, c, g, or t
  misc_feature (1232)..(1232): n is a, c, g, or t
  misc_feature (1236)..(1236): n is a, c, g, or t
  misc_feature (1239)..(1239): n is a, c, g, or t
  misc_feature (1248)..(1248): n is a, c, g, or t
  misc_feature (1250)..(1251): n is a, c, g, or t
  misc_feature (1255)..(1255): n is a, c, g, or t
  misc_feature (1257)..(1257): n is a, c, g, or t
  misc_feature (1261)..(1261): n is a, c, g, or t
  misc_feature (1271)..(1272): n is a, c, g, or t
  misc_feature (1278)..(1281): n is a, c, g, or t
  misc_feature (1286)..(1286): n is a, c, g, or t
  misc_feature (1291)..(1291): n is a, c, g, or t
  misc_feature (1297)..(1297): n is a, c, g, or t
  misc_feature (1300)..(1300): n is a, c, g, or t
  misc_feature (1309)..(1310): n is a, c, g, or t
  misc_feature (1314)..(1314): n is a, c, g, or t
  misc_feature (1318)..(1319): n is a, c, g, or t
  misc_feature (1327)..(1327): n is a, c, g, or t
  misc_feature (1331)..(1332): n is a, c, g, or t
  misc_feature (1337)..(1340): n is a, c, g, or t
  misc_feature (1344)..(1344): n is a, c, g, or t
  misc_feature (1356)..(1356): n is a, c, g, or t
  misc_feature (1359)..(1359): n is a, c, g, or t
  misc_feature (1363)..(1363): n is a, c, g, or t
  misc_feature (1365)..(1366): n is a, c, g, or t
  misc_feature (1368)..(1369): n is a, c, g, or t
  misc_feature (1373)..(1374): n is a, c, g, or t
  misc_feature (1380)..(1380): n is a, c, g, or t
  misc_feature (1382)..(1383): n is a, c, g, or t
  misc_feature (1386)..(1386): n is a, c, g, or t
  misc_feature (1389)..(1389): n is a, c, g, or t
  misc_feature (1392)..(1392): n is a, c, g, or t
  misc_feature (1394)..(1395): n is a, c, g, or t
  misc_feature (1402)..(1402): n is a, c, g, or t
  misc_feature (1412)..(1414): n is a, c, g, or t
  misc_feature (1425)..(1425): n is a, c, g, or t
  misc_feature (1434)..(1434): n is a, c, g, or t
  misc_feature (1436)..(1436): n is a, c, g, or t
  misc_feature (1443)..(1443): n is a, c, g, or t
  misc_feature (1447)..(1447): n is a, c, g, or t
  misc_feature (1449)..(1451): n is a, c, g, or t
  misc_feature (1455)..(1455): n is a, c, g, or t
  misc_feature (1467)..(1467): n is a, c, g, or t
  misc_feature (1471)..(1471): n is a, c, g, or t
cctggcagggaaccccgtcatagcttggggatgggaagggacccaggggatctcctagaggtgttggtgccccgccctcttgacaaccttgcaaagttcctgtcttgctgctttgctgaagctgggnctgtgcattaaaagtcaggtcatctccctcctgtttgtgatttctttctggcctcagcctctgtgctagctagtggaagactcctgttagggccctgggaaaagcttcaactttgctaacaggggccccaggccccatgctgatgtcatactgtggggtagacatggttcggggaggaaggcttggatcacaaaagagcaggagatgccaaccctgcccttgcctttcctccctggtgattcagggaacagagcccttccctagggaacaggtttgaagcccagctaagacagggcccctgtttactcagcagagtaggcaggaagtggcagctggatactgccacaccacactgcctcattaatcattaaccatgtatgagcttgaacgatcagggagacacaggccaaaacagctgccgctgccacctccactcccctcgcccctaggctgaggatgggagacctgtaatctacctgtctcaaagcttcctcaggtgtctccacccagaggcccttgcctagcaaaccggctaggcagctttgactaagctactcaccccaggagtgaaggaaggaaagaactagttgagtgtttttagggggccctagttcttgacacaggcagatgccagcttgagcccaagcagctttaagttttgatctaagacaagctagaactgtccactgctaaccaacctcctgtagaatgaagtcacaccattgccgactctgcaccattcctccttcccaggcagttcgcctgaaatggcaacctgactttgggccccttgcacctcttctctcactccaggaacactagactaagatctacaccaacctgcttccactttattcttgtttacacattctcctgctcccagatttggagtcagaacactatgtgagctcaacagtcctgctcagagccattttccatttcccaccantttcctcttttcccaacccccacccacccccactnnttaattccccttgcccantttttgctcttngannnaanaanncanaatnaaatattcattactnnnatnattttcctnaccccnctacccccaattttnagntaattcctttatttaatntttnttnattccaatnanntatntnaacntttttccaanncacaannnnccatnttctnaacatnctnttttttcanntttntttnntatttttnccannagctnnnngctncagcgcctccanctnactnannannagannaatttnannacnctnatncnnttccacnttcatcatcnnnttcaggagctnccgcaatgntnaagaatncctngnnntttntgggatgctganttgnttctgcacagcaagggccacactgtcacccttttggaacaccatgtcataagggccttccccaaacatcatggcatatagcacgcagcctagggactg

SEQ ID NO: 439980 - DNA, 900 bp, Homo Sapiens
ggccctgtctaagatgggcttccaaacctgttccttaaggaaagggctctgttccctgaatccccagggaggaaaggccaagggcaagggtggccatctccctgctcttttgtaaaccaaggctccctcccccgaagccatgtctcccccaccagtatgacatcagcatggggcttggggctcctgttagcaaagttgaagctttccccaagggccctagcaggagtctcccactagctagcacagaggctgaggccagaaagaaatcacaaacagaggggagatgacctgacttttaatggcacagccccagctccagcaaagcagcaagacaggaagctatgcaaagctgctcagaggtgcagtggcacaaacaactctaggagatcgcctgtgttccctcccatcccccaagcttatgacgtggctccatgcccaggaactctgggccagcccagccccactcccaaaccctcataatgcacagaggagcctgggccaagccttgcttccagagttggtaaatgtagaggcagcaggaagaacagggtagcagtctaactttcaaagacagaaaccactggattatactcctacttggaaaggagctgaagactcatccttcaacagtttgtgcctggattttggtcctcatttcctccctatactgagtaaccctaggacttcaatttaaagtccctggggttatgcttcctgggcctggcaagaacccctttgcaggtctcaccttcagcgatggaagggataagggtcatgaacagcaaacagagcagcagcagcatgaaggggaaggcagcagaagctcaagcactcagagggaacaagaaaccgtgcaaggaaactgttttttcgaaaggattttgcaataaacataggaat

SEQ ID NO: 439981 - DNA, 1139 bp, Homo Sapiens
  misc_feature (480)..(512): n is a, c, g, or t
  misc_feature (1022)..(1022): n is a, c, g, or t
  misc_feature (1028)..(1028): n is a, c, g, or t
  misc_feature (1035)..(1035): n is a, c, g, or t
  misc_feature (1055)..(1055): n is a, c, g, or t
  misc_feature (1063)..(1063): n is a, c, g, or t
  misc_feature (1073)..(1073): n is a, c, g, or t
  misc_feature (1075)..(1075): n is a, c, g, or t
  misc_feature (1081)..(1081): n is a, c, g, or t
  misc_feature (1090)..(1090): n is a, c, g, or t
  misc_feature (1097)..(1097): n is a, c, g, or t
  misc_feature (1106)..(1107): n is a, c, g, or t
  misc_feature (1109)..(1110): n is a, c, g, or t
  misc_feature (1115)..(1115): n is a, c, g, or t
  misc_feature (1120)..(1120): n is a, c, g, or t
  misc_feature (1134)..(1134): n is a, c, g, or t
gcttctctctggcccgagccagcatgatccgctgggcccccagcgcatctcctggaagagcccactcaccctggacgagctcttcggtagcctcagaccgtccttgaagaggatgactgagacattatgggccacgcgctgtgtgtctgctctcggggaactgtcatcattgacaactaagtcgctacctcgttcatccagcaaactgggggaggggtgagtgtttggaacgtcagattaatctagttcctcaagtttatgatcattgaaggacagctggtgtgcatatgcttggggcactagggttttatccctatccctgtgctctctcagctgacagaacctagctacacatgtatcaagaaggtggattgctggagccagggcctgctacaatccacctcgtgtgaccttgtataaaagccatgttttttctcatcagcttaatggacgatgattgattatccctcactgatggannnnnnnnnnnnnnnnnnnnnnnnnnnnnnnnngatgtctcacccaatgcggggttgacaagtacttgattaagtgttggctattcattgtatcttaggcatcatgtcaagtgcagaggtctctattacgaccataggacctcaaagatttctatatctctgctcctgaggagctcacggtgtaatattcttcagatttctcttagagccacatcttgggaaggtttctgctaaatgggaaggacaccccactccccaccaggaaatttctctaggtccaagccatgtgggaagatgaccatggccctttattgacccctttggcccacagtgggttcagctatgtggacctagtggaagggttacatgatggacacttctacgccctgaagcgaatcctgtgtcacgagcagcaggaccgggaggaggcccagcgagaagccgacatgcatcgcctcttcaatcaccccaacatccttcgcctcgtggcttactgtctgagggacggggtgctaagcatgaggcctggctgctgctaccatnctcaanagaggtngctgtggaatgagatagaangctgaagncaaggcactncngaccgngatcaatcnttggcgntgcgggganngnnaggcntgagncttcagccagggtntgccc

SEQ ID NO: 439982 - DNA, 1424 bp, Homo Sapiens
ttacaccaacctgcttccactttattcttgtttacacattctcctgctcccagatttggagtcagaacactatgtgagctcaacagtcctgctcagagccatgttccatatcccaccagtttcccttttcccaacccccacccacccccactcagtaagtccccttgcccaggttttgctcttggagggaagaaagcagaagaaaagatgcaggactgagatgattgtcctgaccccgctacccccaagtgtaagagaagtcctggatggaatgggtggtgattccaatgagggatgggaacctctttccaaggcacaaggggccatcttctcaacatgctgctttttcagatttgggtagtatgttggccaggagctgggggctgcagcgcctccagctgactgaggaggagaggaatgtgaggacgctgatgcgggtccacggtcatcatcgagttcaggagctgccgcaatgctgaagaatgcctggggctttgtgggatgctgagttggttctgcacagcaagggccacactgtcacccttttggaacacccatgtcataagggcctttcccccaaacatcatgggcatatagcacgcagcctagggaccagacatcagtccgctcatcgatgacacagtgactctgcacagagaagagctctggggctcggtaggagatggtgcaccgctgggctgcccagtcctgcagggtcagagcctggcgggagccctccacatggatgcatgcttgattcatggaacccaagtccattaaaactggctgcccctcatctccaagcaatatattggtgggcttcaagtctctgtgggcataacccttggcatgaatggcctcaaggcctctgcagatccccagcagcagccaaaggatttgatcctcggtcaggaagttgcctttgtccttcagcctttctatctcattccacagcgtacctctcttgaagaatggtagcagcagccaggcctcatgcttagcaccccgttccctcagacagtaagccacgaggcgaaggatgttggggtgattgaagaggcgatgcatgtcggcttctcgctgggcctcctcccggtcctgctgctcgtgacacaggattcgcttcagggcgtagaagtgtccatcatgtaacccttccactaggtccacatagctgaacccaccctcccccagtttctggatgaagaggtagcgcttattgtcaatgatgacagttccccgagagcagacacacagcgcgtggcccataatgtctcagtcatcctcttcaaggacggtctgaggctaccgaagagctcgtccagggtgagtgggctcttccaggagatgcgctgggggcccagcggatcatgctggctcgggccagagagaagcgccaccgaccatgcagggaattccggacc

SEQ ID NO: 439983 - DNA, 944 bp, Homo Sapiens
cctgttcaacatggatgcaaggcttgaattcatggaccccaagtccattagaacctgggctgccccttcatctccaagcaatatattgttgggcttcaagttctctgtgggcataacccttggcatgaatggcctcaaggcctctgcagatccccagcagcagccaaaggatttgatcctcggtcaggaagttgcctttgtccttcagcctttctatctcattccacagcgtacctctcttgaagaatggtagcagcagccaggcctcatgcttagcaccccgttccctcagacagtaagccacgaggcgaaggatgttggggtgattgaagaggcgatgcatgtcggcttctcgctgggcctcctcccggtcctgctgctcgtgacacaggattcgcttcagggcgtagaagtgtccatcatgtaacccttccactaggtccacatagctgaacccaccctcccccagtttctggatgaagaggtagcgcttattgtcaatgatgacagttccccgagagcagacacacagcgcgtggcccataatgtctcagtcatcctcttcaaggacggtctgaggctaccgaagagctcgtccagggtgagtgggctcttccaggagatgcgctgggggcccagcggatcatgactatagtgtagagaaaacaggccctgctccgtcgccagcttcaggggtggggtcaggcgccttacggcctcaggacacacagcggctaccgggccacttcctccaaccccagcccatctttgggcagcccccgctcccacgcccatcgcgccgcaaaagcagagcatagcgtagtttcagaggacgtgcgaggctcaggcccactcctggcagggcccaccccggtctaggagcccagagcccgggatgggccatctgcactgccggactgaccctcgtgccgaattcgccaccc

SEQ ID NO: 439984 - DNA, 1252 bp, Homo Sapiens
cgaaggaatgccttttctcccccgtcaacctctggacctgtccagggccttcaaacaaggttcatttgatccaggccccaacctgtgaatattgccctttgcccagggtataacagctcccagatttgtaagggcaacagaaaactggaatcgcaattccactttaactactccaagaccagtaagagaatcaatcttcataggcactttacagccatcgctgcctccccggccgagcttgccgtagtccccgtccccccaggaccagacagtgtcgtcatctgtgaggcagagggtctgggcatctccactgccacaggcgatgtcaaccacacggtggccctgcagcgcctccaccagcttcggcttcagctggtcctcactgtcgctgtgccccagccggccgtagcggcctttgccccatgtgtagaggtccccggctgctgtgacacaggcgctgtgggtccgccagcagcaacatcgaccacttcaattcctctcagagactcgatgacacgagggcggtcacacggacttctgttgccatgccccaacttcccatcttctgcctcacccccaagagtaaacttctccttctgaagacagggcaaggcagtgctttcctccagagttcacagctactttcttaataaacacatgctgaatggattcaagcaatgttggggtggacaccgactctgtccctccaatgcctagtctgccacctgcaccatacccagtggcatacagcttcccatcagccgtcacagcaaagagggtctgttcccctccgattaactgcacgggtctgagagttgcaagggcttcacagggagtgggaactttgacttttgcgccttcaatgcccccgagctggcccctgtgattatgtccccatccataaattgttccactgccaccagcagagagagtccagtcatctggtcgcctgttcatccactgcacaagttgttcgtcttgctctcttttaaaaatgtcatggctctcatgcagaacatccatgttttcgctgtctgccattaattcacgaattttcttagccacctcatcaagaaacagacggggcaacggtgttcttttgtcaagggccacagcaacacgggaggccatgcagtacctccggaaccaggcccacttgtgcgtctcggcacagcaaggcagagtgtccagctccaggtcacaagcaagagctaccagtaccttaaagaatgggctgtggagcagctgtttg

SEQ ID NO: 439985 - DNA, 1004 bp, Homo Sapiens
  misc_feature (5)..(5): n is a, c, g, or t
  misc_feature (39)..(39): n is a, c, g, or t
  misc_feature (55)..(55): n is a, c, g, or t
  misc_feature (59)..(59): n is a, c, g, or t
  misc_feature (76)..(76): n is a, c, g, or t
  misc_feature (87)..(87): n is a, c, g, or t
  misc_feature (91)..(91): n is a, c, g, or t
  misc_feature (102)..(102): n is a, c, g, or t
ctctntgacattgaacgggctccccgcagtttcacggtntggcaggtggtgggtncttntggtttgctggtttctntgtctcggctntggnctcctgttgtntttttttcccagctggcatcccttgctcttggcttgcacctttgctgtctctttcctgcaggactggggtggcggaggaatcctcttcctcggcctcactcccttcatcacagtgcacggcttcatcttcactttcctcttcctccgaggaagaggacgacccagccttcaccatcttggatttcaggtaatccatgtccgacagctccttctgcacagctgcctttggttcgaggcttgcctcttcttccaggtcctccccggctccctcctcctcactctcctgcccagaatcggagtcgaagttcaggtagtcactggccggcttgctcttccctttcgagggctcagcatccaggccatcattcgcccaagtggctgcctgcgcccgcctctgatgaactgacagaaactcctggaactctgtatcctccttcagcttctccagttgacctgccacctttttcttcttctcatctttcttaatttctggagtagtagagtcttttggaggctgcttgggctggcttggtttttgggcatgtttgctccaggctctgggtttggccgggtccccgaatgacttgcagaactccactgtgatccgggatgtgtcgatgaagctcttgttgaaatgcttctgtgccttctgggcctcttcctcggacttgaagccaataaaaccaaacttgcggaacttgccatctttggtgaacttcaggctgcagtctgtcagcgtgccgaaggcggcaaacagctgcctgaaacgctcctccttcatcccattcgggagattcttcacgatcagtcgcgacatggcgcagggtccccgctgttttgattccaacacgactggtcagcgtcttccaccaagtttcacgtaccgccctggcgccgccatc

SEQ ID NO: 439986 - DNA, 1051 bp, Homo Sapiens
  misc_feature (604)..(680): n is a, c, g, or t
tctgcccaacgatcgattggccgcttctgtgtggtgtggggagacgctggtcctccccgtcctcccatagcgcttattgcctcaccctcaccccctaggggccggatccaaaggcgctgcactccccaagccttggggcatcagccaggaaggtttcctacctcctaattcaggggcaggactcctcttttccccccacggggaaaagaggcagaaagttaggggtttccctcctttcttagggtcagacgctcttagggtccacttcttcaggggcggaagcctctcctacccttcccataggggcacaggcctttaccccactgtacttcggagccaacgcctttccctcagcactgccaccccagagtcaggacccagaggactgtgccttcgcccccaacgcaggcgcggccttttggagaggagggaggagtggagaggacaggggcccttgctctcccctccccaacttgttcctcttgccccccagtccctggcaatccagagatcccgatatctaggactgtccatccatccactccctgaccttttcccggctcctggctgcagccatggagttgcagaagggaaaaggggcggnnnnnnnnnnnnnnnnnnnnnnnnnnnnnnnnnnnnnnnnnnnnnnnnnnnnnnnnnnnnnnnnnnnnnnnnnnnnnctgctactttcaaccagtttggatgccaaggatgagttagaggagagattggaaaggtgtatgagcattgtgacatcgatgactgctggtgtctcggagagagaagccaatgatgccctcaatgcgtatgtgtgcaaaggcctcccccagcatgaagaaatctgcctgggcctgtttactctcatcctcactgaacctgcccaagcccagaagtgttaccgggacttagctctggtgagtcgtgatggcatgaatattgtcctgaataaaatcaaccagatacttatggagaagtacctgaagctgcaggatacctgccgtactcagttggtgtggttggtacgggaactggtgaagagtggggttctggg

SEQ ID NO: 439987 - DNA, 3455 bp, Homo Sapiens
  misc_feature (2587)..(2587): n is a, c, g, or t
  misc_feature (2630)..(2630): n is a, c, g, or t
cactgagacaactgcatgtggaatttatttcaaactcacccccatctctagccatcttcttacccccatacagtgtcaaggagtcatgcagcaggtcggcgtcaaagaacactggaaacatctttctgagagtcatttatttcttttgtcattgccaaacattccccaggtcttactcaccagaaattaacatagcttcttcatttctcctccctgacaaccctcatctactgaaagggctttaagggcacactgccaatgaaaatgcagagtgcatataccatgtccttaacttgtttcaaaactacctattctggcagtatccaattcaggtttcagtgctcccttgtttgaaagtggtcttcacaaaagcccacattttaaagctatttggaggagcacaaagagttaaagtgggtaatagcctttcagaatttgaaaaggtagtacttgtctatatcaggttcattttttatgtggcatatgccacaaaatgggcaagaatatataagaccaatatttacgcaaaatggggaagagaatccagaaacacgacaacaaagctgctctaaccaatgttccagagaaagccaccctcaaagagaaataacccattaaacattaccagataggcatgaggtacagaaaaagaatttttctttccagctccagataaatatctacatctggtgtcaaagtctcaggatataaagaggagagaactccatatataaaagaggataggacaatattctcagaaaattcaaaaagacagaggttggctaaggggatgggtggaaacagtggggcgtagactaacaagtaaggtaaagtccagggagaaggaatgcgcaccttggttttcccttagtggcactaccaggagcactaggagactgtcaaaacatcaggggcaatgtgatatttctcaattcttaaaaccaaagaagcaaaaataagcttcagagggcaagtgatcatagctatggatgaggcctcgggctccaggaaagttggggcagtatttattgctgcttctactttctctttcctgtcattttaatgtttgggtcactttactcctaaggttgcttttcatgtctgtgggtctagtcactgctacttggtacaaagcatttcccagtataaacagcatagggtagttctagagttttcatcctaaatccgttttcttactttcaatcttaaaaccatattgagaggacaaacagcctccataaagtttttttcccaaggagacagagtaatcttattatgtgaatgacaacagttctaacttctagacttgttatatcacaaatacaaaatgacaaatcagttatggttttaaaaaattagtttggaatggtttcacaagctagatgatggagcagctactaaatcaatggagcttccaagaacattctataccccaggaaggaaaggacaaccaaagaggtttccttagttttgttacagggccaagcggagcctatagttggcccttgagagggagctctttgggcaagataaaaaaacaagaggacttgacgaggaatagcaggaaaacctactaaaaggggaggggggaatcaaaatgtaagaagggaagacagtgaaatttacacaggaggaaggagctgagaaagtcacagccttacacaaacagctgaaagaatcttcactcagtcctcccagcacaggtccccgtgacaacagcatcacatctgctttcctaggagcacttttacactgactgcctatttccttcctcgtttatgattagtctttgggggctttactttctggaactgtgctggcactggctcctgctctggttccttacaggaggctgacactaccagttcctcattattcctcctctgatccttccctactctaagactcagctctgtctcgggaagctcaatgccaggctgctgccgccttcttagagaccttctgctcctgtgctgctgcctccgcttttcttcttcttgctgccgctgctttatcttcatcagcttttcaaagcttttggttgttgttgggtttacaacgaaccagtcctcagcatggacggagttgatgtgatacttgacaccactctctgacacaaattctttctgacatagaagacatttgtattttccagccacaaagtttcccaatgtacaagagcccaggtgagctttaaggccagatacactgctgtagacagtctcacagccctggttaggacactgaatacgatgatatttcttgatatctgtcttccatttatgtagtacttcctggctgaaggtaggtagccctggacgagtatattttaactttcgatcatcaggtaccaggtcctgaagcaccttcctcttgggccattccttggccagttcagcagaggccagctcctgtaggtggtatacagctatcttggcagaacgtctctgaactcggcccccactctttgactctaggttcatctcctttaagcactctggctgtcctgactctggaaagaaggatataggccccatgctctgacctcaggtgatatgcaagtccagccttcgacctatatgttttnccacagtggtgacatttcagggtcatcttttccagctctgcancccctttgccacattttctgacatggtagagatatcccatgatgctggtgaagctactggagcaactctcacgcatgcacctgagctttccccgtctctttagaactgttcggagcctttccctctcacttggctcatctatttcatctccggctttccaaatgggccaactattatgatttgccatgacatgatacttcatccctgccagtgaacgaagttgtttcccactatgatgacaagtaaacatttcctgcttgcagttttccatgtgtttctttaaaccctctatggtcttcctccccactgcctggcaggtagggcaggagacactgcctttatcaacgatttctaagtaccattgctcctccaaactgcctgctgcataaactggtggttccttccgaatacgacgggcctgggatttgggattgggctgagttttaggccgttgcttcctcccataaagcttatgcttcttctgaggaaattctcgatagtcttcatcttcttcctgcctgggtttccttttccccttggctgatactccacctgacccttcgacatgagaagtagcagctggcttgattcttctcatcttcatccagtaggtagattttcggaaagatgctggaaaatcactcactggttcacacgaagatgcagacgatgaaccacttaaggagtcatcatgagggatagtgtactggaaactattatcctttatggagcactgggtcctgctacgagtctggaagacatcactccctctccacgcctaacaatttcacccaagggctccggccagaccaacgccacttccgc

SEQ ID NO: 439988 - DNA, 858 bp, Homo Sapiens
caagatatgtactaggtcccgggccgggtgttaattcaggcacgagggttggccggagccctagggtgagattgttaggcgtggagagggagtgatgtcttccagagtcggtgctgtacccgcctaggcaggacccagtgctccataaaggataatagtttccagtacactatccctcatgatgactccttaagtggttcatcgtctgcatcttcgtgtgaaccagtgagtgattttccagcatctttccgaagagatctacctactggatgaagatgagaagaatcaagccagctgctacttctcatgtcgaagggtcaggtggagtatcagccaaggggaaaaggaaacccaggcaggaagaagatgaagactatcgagaatttcctcagaagaagcataagctttatgggaggaagcaacggcctaaaactcagcccaatcccaaatcccaggcccgtcgtattcggaaggaaccaccagtttatgcagcaggcagtttggaggagcaatggtacttagaaatcgttgataaaggcagtgtctcctgccctacctgccaggcagtggggaggaagaccatagagggtttaaagaaacacatggaaaactgcaagcaggaaatgtttacttgtcatcattgtgggaaacaacttcgttcactggcagggatgaagtatcatgtcattggcaaatcatcatagtttgcccattttgaaagccggagatgaaatagatgagccaagtgagaggggaaaggctccgaacagttctaaagagactgggaaagctcaggtgcatgcagtgagagttgtccagtagcttcacagcatcatgggatatctctaacatgtcaga

SEQ ID NO: 439989 - DNA, 1029 bp, Homo Sapiens
tgagtctatccacgcagttcttaacatacattccaaactgctgcggggtttcctctccacacccacgaggccaaacccgcatcattacagtccaactcttcttagacactaatcactttctaaaagaagtgagttctccagggaagaaaaatcaacttagccagtgaaaagggttaaacttaagtctattatttgttgccctcaatcaaaagatatgtatagaaaagtcatttaaattatttatttctacaagctaattgaatccaggagcagctttaattattaacactaacggaagagaaaagaagtatttccaagggctcaaatggaagctgtactcagtccggtggaggcagggggaggtaaagtttctcacactcaagtcgtcttcatagtttactgtccttttccaaacaaaagctaataacgccatacgcatccacacactccctcctggatgaacctaagtctcgtccccactgtcaccccaaggccagttatcaaaaactgttccttctctgccctcaaagactgaagccgcagcctgttctgcctctgctcaggaatctgattgctcttaaagtgctcttacaagattccgtcgatgtttgctccctctgtcttatctctccttccagtattttcagacgcacaagctctgactcaggccacccagcacctggcagccttcctctgcgtgccagtgaaatctctcccagtaggtgctcaggctcttcaccctctcgttgcagcagcccctctggcccgagattgtattttctagtctgctcaagaacagaggggcctggcgaggtggaggaagggaggctccctccccggggctggccgcctcagtgatggtgatgccaccagttccagcctgcacggatggagctcacttcctaccatcacttctgctttcagtctcctcatagccttcggcagtctcctctgaaaacacactgcctacgttagtgggaaaggatggctaagggtgtgatttctttttattagggaggtgggaggggg

SEQ ID NO: 439990 - DNA, 348 bp, Homo Sapiens
gagggagcaaacatcgacggaatcttgtaagagcactttaagagcaatcagattcctgagcagaggcagaacagggctgcggcttcagtctttgagggcagagaaggaacagtttttgataactggccttggggtgacagtggggacgagacttaggttcatccaggagggagtgtgtggatgcgtatggcgttattagcttttgtttgataactggccttggggtgacagtggggacgagacttaggttcatccaggagggagtgtgtggatgcgtatggcgttattagcttttgtttggaaaaggacagtaaactatgaagacgacttgagtgtgagaaactttac

SEQ ID NO: 439991 - DNA, 582 bp, Homo Sapiens
gagggagcaaaacatccgaacggaaaccttgtaaaaagcactttaaaagccaatccagattccctgaagccagaggccagaaaccagggctgcggccttccagtctttgagggccagagaaggaacagtttttgaataactggccttggggtgaacagtggggacgagacttaggttcatcccaggagggagtgtgtggatgcgtatggcgttattagcttttgtttggaaaaggacagtaaactatgaagacgacttgaagtgtgagaaactttacctccccctgcctccaccggactgagtacagcttccatttgagcccttggaaatactccttttctcttccgttagtgttaataattaaagctgctcctggattcaattagcttgtagaaataaataatttaaatgacttttctatacatatcttttgattgagggcaacaaataatagacttaagtttaacccttttcactggctaagttgatttttcttccctggagaactcacttcttttagaaagtgattagtgtctaagaagagttggactgtaatgatgcggctgtgcctcgtggtctgga

SEQ ID NO: 439992 - DNA, 1517 bp, Homo Sapiens
ccggcgcacagcctggacgcgtgcgcaggcgtcaggcgcatagacctgctagcccctcagctagcggccccgcccgcgcttagcatcactaactgggctatataacctgagcgcccgcgcggccacgacacgaggaattcgcccacgcaggaggcacggcgtccggaggccccagggttatgagactatcactgctcaggacctactaacaacaaaggaaatcgaaacatgaccaaatcgtacagcgagagtgggctgatgggcgagcctcagccccaaggtcctccaagctggacagacgagtgtctcagttctcaggacgaggagcacgaggcagacaagaaggaggacgacctcgaagccatgaacgcagaggaggactcactgaggaacgggggagaggaggaggacgaagatgaggacctggaagaggaggaagaagaggaagaggaggatgacgatcaaaagcccaagagacgcggccccaaaaagaagaagatgactaaggctcgcctggagcgttttaaattgagacgcatgaaggctaacgcccgggagcggaaccgcatgcacggactgaacgcggcgctagacaacctgcgcaaggtggtgccttgctattctaagacgcagaagctgtccaaaatcgagactctgcgcttggccaagaactacatctgggctctgtcggagatcctgcgctcaggcaaaagcccagacctggtctccttcgttcagacgctttgcaagggcttatcccaacccaccaccaacctggttgcgggctgcctgcaactcaatcctcggacttttctgcctgagcagaaccaggacatgcccccccacctgccgacggccagcgcttccttccctgtacacccctactcctaccagtcgcctgggctgcccagtccgccttacggtaccatggacagctcccatgtcttccacgttaagcctccgccgcacgcctacagcgcagcgctggagcccttctttgaaagccctctgactgattgcaccagcccttcctttgatggacccctcagcccgccgctcagcatcaatggcaacttctctttcaaacacgaaccgtccgccgagtttgagaaaaattatgcctttaccatgcactatcctgcagcgacactggcaggggcccaaagccacggatcaatcttctcaggcaccgctgcccctcgctgcgagatccccatagacaatattatgtccttcgatagccattcacatcatgagcgagtcatgagtgcccagctcaatgccatatttcatgattagaggcacgccagtttcaccatttccgggaaacgaacccactgtgcttacagtgactgtcgtgtttacaaaaggcagccctttgggtactactgctgcaaagtgcaaatactccaagcttcaagtgatatatgtatttattgtcattactgcctttggaagaaacaggggatcaaagttcctgttcaccttatgtattattttctatagctcttctattt

SEQ ID NO: 439993 - DNA, 956 bp, Homo Sapiens
aaaaaatgaaggaaaaaagcccgctctgttcccccaacggtaatggcaggcggccctgggtcctgaacaaggcccggcctcctgccccgcccaggctgcgagcacgtgtggggagcacttccccatggagcctgggtgctgtggggctgtggcatcctccctgcgcttgcggccactgctctcactggcccagcatacaggccttcttacaggccaccgccgagaccaggccgcgccccggccactgccctcctccgactcgatgaaggtgatctcgcagctgggcgtcagcctgcgcacgctggcatggaaccgctccttgaagctggggtgcagcttgtacacggagccatccacgcccacagtgatgcgcattacgtccttgctgcggctctcgcgcatgcggttgatgacgcccgccagccccgccgagcacatgtgcgcagcgcgcgtagacacgctctcgcaggcgcggcgcacgatgtcgcagtcggtggtcgagggtcgcagccccagcgtgctcaggatgttgtagatctgcttgcggtcgcccgtgtcgctgcggggcgggaggaggtagggcggtcgctgagtgtcgctccgacagtccatccccctccagcggcggcctctcgttctccagggaggggccccggccagccgtccccccagcggcggcctctttccctcgctgagccgggacccctctctggagaaatgggggcgatcccgctcacctcacccagccaaagcgtttccgccagggactggttagtactgccccctctaactaagcccagggtctccgtcctaacgtgggggtgtcaaccatgccgcgccttggggttgtgagtgatgtgagaggatggccacggcgggcagggagcaccgaggggactcacggatggggaccagtgcccggacgcaggctcgctcccatccctgctcttgatccc

SEQ ID NO: 439994 - DNA, 1252 bp, Homo Sapiens
cttaatgttcatttattcaacaaatactaattgagcctctattgtgtgccaggttccattctaatgctggagacacagacaacacaaaacagatgtcccctactcaaggggcacatggcacacagggaatagatgcctcattacatctgtttaagaaacaacatagccactgcagagattcacagcaggctgaacacgtgtttatctccactcctcttgacatccacttaaaatgatagttaaagttgtaggaccacccataaggacaaaggaaatcggagacggtagaagagagattgatttcagcaatgttttgaagataaaaatctagatggacaacaacttcagccatctttctctgctctgacaagggcctgcacggggagcacgcagctttgggctgcagaagtccatctggaaaggcttggaaactgaccaccccaggcaggaagaacaaccaaattcactgcaggccagaactgtgtgtggtattaaatgcgcaggctctgcagagagattgcaggattcaaattccggtcgtctgctcactggctgtgtgatataggtcaaggttctaaacctctctgcccctctttgtcctcatctgtacacaaggggcagcaaaagtgcctttctcacagtgctgttctaagtgcgccagagaacccgctgcaagccctcggtgtagccccggacacagagtgagcactcagtaaggggcagctattagcatagctatttcttctctcagctcagagcgtctcccagagcagccagtcctcacaccctgcccccagaatggaagaacaggtggaagctaataccatcactgcacagtatcgttgggaagttgtatggcatccctttgtttgagttaataaagctctttccctcctttagattaaaaaaagaaagaaatggaatgaacagcgctctgcctggcttctcctccacatctctgaggcgggacacttccccatagacctgcaaatcactcagcctcatgcgaccatcatgccaggagaggcatgaggtggcagcagtccagcctctgcatgtcactgcacaaagttgactccacagaggggagtgacacccacaaggccacacgctggtgacttttggggatgggaatgcagagccctgaggcctcacctgcagtctccctgtccctcgacgttgcttcccatgtgaaactggccacaattcaaggagacaggcagagcaaagggggttttataacacgtgagcc

SEQ ID NO: 439995 - DNA, 1902 bp, Homo Sapiens
tttttggcagctcccggcatttattgattgcagcccccacagagcacactgcccttcccaggtggggtgaagcccagcgaccagggaggcagaggatgcagcatccgccccgtcggactccttgtcggggagaaggccctaaggaggaaccgcagcccgcctgggccattcccccagggagccaagcgggggggcccaggtgcccgagggacgcaggcacaatccctgaagacagagaccgcctgctggtgagtggagaggctttggcaaaactaactgttaaagccactgcagggcaggcagcggtgcgcgggacctcggtggccctcgaccctcacccacaatggctccagaaccaccctgggccactccctcccaggcactcgcttgtggtctgcgttgcttgttcatcccacccagctgcggggtctcgcggggagttgcagctgcccgaggacatggaaggtctggttgctctcagcagacacgaagtgcagagctagcacttgggtgagcaacagccaggctgcacccacactctgccacccaagtcctcgatggaaagtgctggaagatgctgctttgggcatcgggggcaggaggcagggataatacccctcccctggcccaggagaggggagaaatcagcctctggtagcccctgttcccctgaggagctgccagcgggagaggggcaaggccacgcagtgcccagccgggagagcctggtagccagagcgggggtggtgcagctacagctgagaggggacgaggccaggaggagctcagccagcaggtggggggacagcaggggcctgctgcggaggacgggtggccacggccagggaggtcgtggccccaggagcaggtgctgggcttgggactctttggaagaacctagcgtgtctggcctggcagcccagccattcccacggctggtcaggatggcactttgatgccaaagtttttgcgtagctgttccagaaacacaaaagtgagcacggtgtgggggatgaggcggatgccagctgggacgaggcccttgtaaaaggccagaggcccgagcttcgctgtctccacggcgcagtggaaaacgccctgatactcccccttggagttcatcaggcgagtcttcagcacatccaggggctggcacaggaacgtggcacatccacctgcaataaagctggcgacaaagtgagtgaagatgttgtcagagaggtacccggtgctaaggaccagctgcttggcctggtcgtagcaggacagctggcccacagtgactaaggcccctcggctggatgccatggttgcacccgagaacagtctcctgagaccctcttcacgagctacgcggtacaggccatccagcgcatgggcgtagttgcgccgctgaccctggggcagcttcacgtcgttctgcatcctgacgttgaccaagtctgcgggcgtccccacgaagcctccagctaaaccgctgacggagcccagcaacaccttctcgtggaaggggagaggcccctggctgcccttggccacgcggtcccgcacagtctcgtagatggcgaaccgagtcagggagtaggtcatctgtctgcacagcgaggcgctcaggccgctgtagagtgccaggatgccgtcggtacgcaccacccgcagcgccatgcccgtcatgcgcagcttcacctcctgctgcgtctgcagatgcaccttgagcaggtccagcgggtgcgtgcagcaggcggccccgcaggaggccagccccccgaagtaccagcgcgacacgcgcgcctcggctgccatggcccaggagagcccaatcccggcccgaccacaacccgaccccggccctaccccggcgtgtaccggccgcagcgccccgcgccccgcgccacgcgcccg

SEQ ID NO: 439996 - DNA, 1275 bp, Homo Sapiens
  misc_feature (160)..(160): n is a, c, g, or t
  misc_feature (167)..(175): n is a, c, g, or t
  misc_feature (738)..(805): n is a, c, g, or t
  misc_feature (953)..(967): n is a, c, g, or t
cagtagcctaggcgacacagccagaccctgtctccaaataaataatcaggagaaaaaatggaatatttggtagatagaatgacagaatttggcaaaggctatatgtgaaagatgtaagagaacagaaagtgactggttgtcttgtataggaagtattaanaaataannnnnnnnnctgaccttgttatcatactctaccttgaagtataaaggggagggcagtatatggtctgcttagttgctgctattaatatctttaacttcatttaaaatacaaagaatacagtcttagaacagcactgttttatttagatgccttgtttcaaaggctctttcctgactctgacatgggagggtcaagggcacatggaaagtggtgacagtggtaagaaggcacctggataatctctagaaaccttccacatgggaaaatgaaggtacagaagggttctgacttactcagggctatctcactagtcactgctactgtagggaccaaaaccctgaacacccgaatcctaatctagctactcagtgctgtacctcacaaaacgaaatgttattccacctttgtaaactgaaaaataatagttattttaagcattttttagtattttaaaatttttatcagttaataccagaatggaattgagtatggcaagattgaaaaagtgtcattttagaagagtttatatatgtggttagattatttgaaaagacaaagaaacatatatattnnnnnnnnnnnnnnnnnnnnnnnnnnnnnnnnnnnnnnnnnnnnnnnnnnnnnnnnnnnnnnnnnnnntatcactagcttatcagttatataaaaaattctcggtaaatgactgatgaatgagtgactgagtggatgaaagaaatggactcttatcctaagagaagttaagaggactcatgacacatgtaacaggaatagtaaaaagaaaatggannnnnnnnnnnnnnnaaatttgtctttatccatattgctacacttattatttgtaattccattttcctcttggagatgttaaaatagtttttatatgtaagtcttaaatttagattactctaaatacttctggcaaaattttaacatatatagtatacatatatccattcagcatttctatgtgctttgaaaagtattctattagatttttttcattttattgaaaacatctgattttgcttttgtttctgccgagttgcaatttgcttgcttctaccaccgttttttgactcttgttcatctcaaggttaatcggttttttg

SEQ ID NO: 439997 - DNA, 2124 bp, Homo Sapiens
  misc_feature (1980)..(1980): n is a, c, g, or t
  misc_feature (2036)..(2036): n is a, c, g, or t
  misc_feature (2047)..(2047): n is a, c, g, or t
  misc_feature (2058)..(2058): n is a, c, g, or t
  misc_feature (2085)..(2085): n is a, c, g, or t
  misc_feature (2095)..(2095): n is a, c, g, or t
ctccttaccatggtgacggccgcagagcctgcaggagcagcctgctggagtgcgaaagggctctcaattttctgggtctcaaagaccctacaagcccacaccacgcaggccgggacaggaaagagtcaccctttaaaacggccgagtgaagagcaagaaccacgcagcggttccgagcctctgttttccgcttttagctaggaggacggaagttgctggcaggcggcatttggccggtacaccgccggaagtgtggaggtgtggctgcccgaggcggtagagcggagaaagcctattttcttttcgtttagatacattgccttttgcctaggctggcgtcgagacttgaggccgttgcagactttggcgcggctcgcgcctcctgcttcaagagcccagcggtgagagctggcctgcggcacgcggcctaatgccagacagtaacagtttggaggatcaagatgttgaccaacttgaggatatttgcaatgagtcatcagacaatacccagtgtgtatattaataatatatgctgctataaaataagagcaagtttaaaaagattaaagccacatgtgccgcttggaagaaattgcagttctctaccaggcttaataggaaatgatatcaaatcccttcattccatcatcaatcctcccatagctaaaatccgtaatattggaattatggctcatattgatgcaggcaaaactaccaccacagaaagaatattgtactattccggatatacaagatcactgggagatgttgatgatggagacacagtgacagatttcatggcccaagagcgagaaagaggcattactattcaatcagctgctgttacatttgattggaaaggttatagagtcaatctaattgatacaccaggtcatgtggactttaccttggaggttgagcggtgcctaagagtgttggatggtgcagtggctgtatttgatgcctctgctggtgtagaggcccagactctcacagtatggaggcaagctgataaacacaatatacctcgaatctgttttttaaacaagatggacaaaactggagcaagctttaagtatgcagttgaaagcatcagagagaagttaaaggcaaagcctttgcttttacagttaccaattggtgaagccaaaactttcaaaggagtggtggatgtagtaatgaaagaaaaacttctttggaattgcaattcaaatgatggaaaagactttgagagaaagcccctcttggaaatgaatgatcctgaattgctgaaggaaacaactgaagcaaggaatgccttaattgaacaagttgcagatttggatgatgaatttgctgacttggttttagaagaatttagtgagaattttgatttgttaccagctgaaaagctacagactgcaatacatagagtgacactagctcagacagcagtgcctgtgctttgtggaagtgccctgaaaaacaaagggatacagcccttgttagatgctgttactatgtacttaccttcacctgaagagcgtaactatgaatttctgcagtggtataaggatgacttatgtgcattggcatttaaagttctccatgacaagcagcgaggaccactggtttttatgcgcatttactcaggcactataaaaccccagttggccattcataatattaatggaaactgcacggagagaataagtcgtctgcttttgccgtttgctgaccaacatgtagaaatcccttcattgactgctggtaacattgctttgactgttgggcttaaacatactgccactggagacaccattgtctcatccaagtccagtgcattagctgcagctcgtagagcggaacgggagggagaaaagaagcacagacaaaacaatgaagcagagagacttttattggctgggagtgggagattccagaacctgttttcttctgtaccataggaacccccatcactgtctaaggcagccagatttnggaacatgcgtttgaaatgtctttcagccgtggaggttcccagttttgaaagtggnggttaggtccncgattttgggncaactgttctgtgtgggtttggggggngtttcctttnggggtttttcctggtccggttcagggggg

SEQ ID NO: 439998 - DNA, 1056 bp, Homo Sapiens
  misc_feature (868)..(907): n is a, c, g, or t
caaacagacaccagctagaggataaaatacatcccatgtcactaccataaatgacatagcactgtgcagaagcctacatttttaggatttcctactttttaaaacttaaggataagtccatttctacaagctaattttacagctccttaatattcttaatctggacagttaattttgcagactttgttggtgtctgccttttcaattgttttacccaaaaagaggccttgaaaaaactttcaaattcaggaaacccctaaacccctgcagagaaccctcatggtatgtgagtgtgagcactaagttgaagaatactcttatttcacagaaatctaggactgtcagactagggctgagttcattctcttccttcagagacaaaatttcaagctgagcagattcagagacaagggttcctcataggttatatactagtgctgggaaaaggagagaaaatgctatttcattgggtcttgtggttcctccagccgggttagaacaagatttgagagttgcaccctttattttcaaggccaagtggctgcagaaacatttcaagaattcctctggcaaggtggcaagtcagtttccttttagatctaagagtcttgtcgctttaagaaaaatttttttccccagaacctttcagagacttgtccatttgttcatgtgatgaaaaacgtctgcaaaataggctactttctgtagtcatttttcatttccaaagcactcagcaaaagctggctgttttattgtaagtactctggcaattcacctttcaattcaaatatcctgtagagaacgcttcctctgagaagccactggatgtctgtatggtgcaggaggtttatgtgctgtctgtccaggnnnnnnnnnnnnnnnnnnnnnnnnnnnnnnnnnnnnnnnngcataaatgggtctttgatacaggtaaccagttttgtaacattattcagaacttcactgtatcttcaagtttttgatatcagcatctctgtggagaaagcagtgtgctataatgtcaacatcaggatttctttttgtttgttgtttaat

SEQ ID NO: 439999 - DNA, 752 bp, Homo Sapiens
  misc_feature (410)..(410): n is a, c, g, or t
  misc_feature (412)..(412): n is a, c, g, or t
  misc_feature (438)..(441): n is a, c, g, or t
  misc_feature (449)..(450): n is a, c, g, or t
  misc_feature (458)..(458): n is a, c, g, or t
  misc_feature (460)..(460): n is a, c, g, or t
  misc_feature (469)..(469): n is a, c, g, or t
  misc_feature (474)..(476): n is a, c, g, or t
  misc_feature (481)..(481): n is a, c, g, or t
  misc_feature (491)..(491): n is a, c, g, or t
  misc_feature (495)..(495): n is a, c, g, or t
  misc_feature (497)..(498): n is a, c, g, or t
  misc_feature (502)..(502): n is a, c, g, or t
  misc_feature (508)..(508): n is a, c, g, or t
  misc_feature (515)..(551): n is a, c, g, or t
  misc_feature (556)..(556): n is a, c, g, or t
  misc_feature (558)..(558): n is a, c, g, or t
  misc_feature (564)..(564): n is a, c, g, or t
  misc_feature (569)..(570): n is a, c, g, or t
  misc_feature (572)..(572): n is a, c, g, or t
  misc_feature (590)..(590): n is a, c, g, or t
  misc_feature (593)..(595): n is a, c, g, or t
  misc_feature (601)..(604): n is a, c, g, or t
  misc_feature (606)..(606): n is a, c, g, or t
  misc_feature (617)..(617): n is a, c, g, or t
  misc_feature (625)..(625): n is a, c, g, or t
  misc_feature (628)..(628): n is a, c, g, or t
  misc_feature (640)..(641): n is a, c, g, or t
  misc_feature (645)..(646): n is a, c, g, or t
  misc_feature (656)..(656): n is a, c, g, or t
  misc_feature (658)..(658): n is a, c, g, or t
  misc_feature (661)..(662): n is a, c, g, or t
  misc_feature (665)..(665): n is a, c, g, or t
  misc_feature (667)..(667): n is a, c, g, or t
  misc_feature (676)..(676): n is a, c, g, or t
  misc_feature (687)..(688): n is a, c, g, or t
  misc_feature (737)..(737): n is a, c, g, or t
  misc_feature (742)..(742): n is a, c, g, or t
  misc_feature (747)..(747): n is a, c, g, or t
atttattattacctaataaaaactaccaaaatatgtgaagcaaaatctgacagaactgcagagaagtaaatccaatttaatattcagagatgtcaacaatcctcttaaaataattgctagaaccaaaaccacagaatgtcaataaagatagaaaaaacttaaataacatcaaccatttttacctaatcaacacttgtagaaccccttcatcaaacgagagtacagtatacatttcaagtgaacatgtaactcataccaagatagcccatattctgggccacaaagcaaatctcaataaatgtaaataattcaggtcttaatgtactctgaccacaatggaattattgcagaaactaccagatagattagcaaaatccccaaatgtttgggaattaaataacatacatttnanaggggccatgtgtcagggggggtttnnnnggctgggnnccctcctncnctccactcncatgnnnccgcntcggctgggntcgngnngggngtcccngcgctgnnnnnnnnnnnnnnnnnnnnnnnnnnnnnnnnnnnnngcggngncgtccnggctnncncggtgggcctcgtctctnctnnnggggcnnnnanttagccaggcntggtggcnggngcctgtggtccnngcgnntggggggggngnggnnggngngtggtgtgngcccggggggnngggcttgaagtgagaagagatagagaaaatgaaataaaaaatggatganagagnaaganaatgt

SEQ ID NO: 440000 - DNA, 737 bp, Homo Sapiens
  misc_feature (83)..(123): n is a, c, g, or t
  misc_feature (607)..(607): n is a, c, g, or t
  misc_feature (664)..(664): n is a, c, g, or t
  misc_feature (707)..(707): n is a, c, g, or t
ggcacacaccaccacacctagcaaatttttgtaaaaaatttattgtagagatggggtctcactttgttgctcaggcttcaagnnnnnnnnnnnnnnnnnnnnnnnnnnnnnnnnnnnnnnnnngcatgagtcactgcacccagccctcttcaaactgttaatcataaatataaaaatcacacaagaagcactcgaggaactcaagcttggaataagtggtaaaactttgtaatataataagcatgggactctattatggtaattaaatttctttaaaacaaattcagttgaatatattataacattgtaactgttacactacattattgattattggcctctcttaggaagaatatgaagaactgcttcgttatgctatagtgactccaaatattgaaccctgtgcttcacagtcatctcatcctaagggagaattggtgccagatgtcagaatttctacaattcatgatattcttcatagtcaaggttatatatatttttcaggatatctcttaatttaaaatattactgagtttattaatgatactgacaggattgtgatctaggggagctttttacattttaaatatattattcctgactctcngtgtgacagcttgattttctttgaaactcatttgactcttacctttatgaagaatantaacagtgaagccatgctatggcaactgcatggcctctttggnatgggtgatctcagtactcgttccaacagt

SEQ ID NO: 440001 - DNA, 2386 bp, Homo Sapiens
  misc_feature (74)..(89): n is a, c, g, or t
  misc_feature (103)..(109): n is a, c, g, or t
  misc_feature (111)..(116): n is a, c, g, or t
  misc_feature (118)..(121): n is a, c, g, or t
  misc_feature (123)..(123): n is a, c, g, or t
  misc_feature (128)..(206): n is a, c, g, or t
  misc_feature (209)..(270): n is a, c, g, or t
  misc_feature (805)..(805): n is a, c, g, or t
gggaaccaatatttgccctgtgtcctttccttttgggggccccggccccaaaagaaagttttgaaaaacttttnnnnnnnnnnnnnnnncgccccaatttttnnnnnnntnnnnnntnnnntnttccnnnnnnnnnnnnnnnnnnnnnnnnnnnnnnnnnnnnnnnnnnnnnnnnnnnnnnnnnnnnnnnnnnnnnnnnnnnnnnntcnnnnnnnnnnnnnnnnnnnnnnnnnnnnnnnnnnnnnnnnnnnnnnnnnnnnnnnnnnnnnnctacatatagttacaaagcatggtagagcttgaaaaagcctcttgtaattttgaacagatgaacatgatgtctccatgatgttctaacaatatggaaaagttaaaaccaaaagacttctaacccttggtaagaccagagggattaaaagaccccactatggacatattcactttagtcaaccacttttatggaatgaacacttgtgagagactgggtgtgagctgatctggttccaagtgatctggaagctgaggtactactttcaggatgaatggtccggggatattttgctgcagttgcttgaggaatggtttgcactgtgactggatgatgtttttccacaacaactgagctcatgggaggagaaactcccattatagctaaactgctgctaattctattttttgaagcaaaatcacatcttcctgtgatccgggctgtaatagttcttcctgctttctgttgtgcagaggttacaactcttggcacatacatttcttctgatgcagcagtagctgcagatcctgcaccaangagcagaaacaggaacgtgaacagaagatgcggaagcagccctggtagaagtcatcgaagcagctgagggaaacggcagtcgcgcttgctcctccgacggcggctggtggggatggcagcagtggtgatgtaactggtaagggcatcggaggagctgaaggatccaaatgagcagaatgttcttttccttgaacaccaggaccatactcttcctttttattatttgtggagtctatccctgcatcatttctgtttttgaaaatatagtcatggcttcaagatttaaatgcacatacccccctcatggaaagcttttttcatggaatcttcaaagtgctctttttcatgttgcattctttgaatctcagcttttgcattttccaaagctccagataacatagcaactttggcttcataatcattggaaatctggatacaactttcttcagctcttgcttgacaagctctttctaccacatctttccactgcttttgcactacggaacgccagactttccagactttcttcagtaaagttctctggtagtactggtcagctagtttaccttcataaacatcctgtctggctctgacatggccgattcgccagtggaagaatgttctcatcaactctatcttttccttttgcttgcctatggcatgagacaagctagaaatcacctcatcttttctcccaatggagatttcaaaggttttttgcagctccttcaattcattgatctgattacacagttgttttaaatgtgctgcatgtttttctttctcttttctcatttccattcggtgccagtcaataaaattaagtctccatttacttagttcagatatgatgtttgtcttaagacctgaactccaaagatcaagcacattttccatcttctgaaggttttcatcagaaacaagaaaatcgctcacaagtatttcatgggcatctgtatgactagaatttgttgctggtgaggaagagtcagctaaaagatgtgaactgaaaaaatccatgactgggtgagaaggcttccttggcgataacactggtgatgactcatctgtctttgaatgacttgaaatatggaaatcacatccttttccaacttctattgcagtttctcttacttcagagttatttccttgactatgaagaatatcatgaattgtagaaattctgacatctggcaccaattctcccttaggatgagatgactgtgaagcacagggttcaatatttggagtcactatagcataatgaagcagttcttcatattcttcctgaagattcgaagagacagaactgcctcgactggagtcattttgcacaactggaagtgagtatttctcctcatctgatgacattctgcacaaatgctcgtcgccgctcgcgaccaaatcccgactcctcgctctgcgcctcttagccgcgtcgcagctgcagtgtcagcaagtgcagcctcagcaagcacaaccgctacctagacggcaacctgacagtttcaaactgcagggaggaattaaggaccgccctgggcattggtcctttgtttcaatcccgggaattccggaccc

SEQ ID NO: 440002 - DNA, 533 bp, Homo Sapiens
  misc_feature (111)..(135): n is a, c, g, or t
ttcatggataattttaattttcaactttaggcttccattttcaaattccactatggacacataagctagagtttggtttcaatacacacgtgtgcacgtgcgcacctacannnnnnnnnnnnnnnnnnnnnnnnngagcctggcttgctaagggcaagaatccttgattgcaaagaacctcctgccagttgcttctgaagcacacacaggccttggggagcccacaaaaggcctcctgctttttgtgcgctaggcctctgcagcctcaccctgctctcctggggcagccttcatgcaggggtggcctgacaactttctagggctgccaaatttaacgcccccattgagtttcatgggattttaatggtcattgttttggaggaagggagaaattgtgatgaactgtgggcccccttgagctacagaccttttccacaagtagtcaggccctgggaacctgagtgcttcacccagagaacttgagtctacggaagcttttatttgacaaccaagccaggctcactacaccagct

SEQ ID NO: 440003 - DNA, 1512 bp, Homo Sapiens
  misc_feature (22)..(22): n is a, c, g, or t
  misc_feature (27)..(27): n is a, c, g, or t
  misc_feature (1492)..(1492): n is a, c, g, or t
ccaattagtcaataattatcancccantttttaaaattgcccccagaaaacggctgtccaaccacatcggtcacactggccaacgcaaaacaaggaacgggttcatgcggtcaaacagcttccagcttcatgcccaccctggaagcccaggggtgggggactgtggctctggctcacaaacaggtgcttgggggcagcctgagctcttgtctgcgcaggtactggctccagctgaactcctcctccttgtaacctttgggaggctgcagcttgtggcccgtcttctcgaaccagccagcagggtgaatgtcaggggagttggcattgacccagaagtcatggcactcagaatacccatcaaagtgcaggcgtaggcgatagccacatacctcagccacggtgaggatgaagtacatggacgggtgttgagggtcaatgccttccaacttcaatgcccagtttgaacccaattcttgttgtgagtgactgcctgggagtcctggaagaggctgactggagcagttatggccttctgctcctctaggtaggactcccacgaccagcattccttctgtcctcacctgttgcaggctggcctgctgctccactcctcactctctggggtcgctagcagtgggttagtaccctctgggtcctttccttcttcttgcttctccatggcctctggctccgactcctcctctgatgggctctggtattccctgcgcttcctcttcttcatgggtttgaggagctcagaagcgctggtagagcctgaggagttctccactatgactgaccgctcctggaacagctgagggcagccatcattagaggaaccaagatctggacccgcggcttggtgaggcccgcacgcctggcactgacaggtgctatcatcctctggggggtcctgattgggatcttctggaggattctgggggtggtcctccgcctgttgggggcccgcctcgccatctcccgccggggccccgccatcttcgtattcggtcacgccttcctgccgcagctcggggctcgggggctgctccactcccgccatgttcagcggcttatactcgcttatccggaactggagcgcgggagggtctgaggattgcgactcccgtacgggtccttgacccatctcggagtcggtgccatggccctctcttcgcctcatgccagctcacgccctcagcaggcctcaagactccacgccagggggcctcactcgcaagctacaccagccaaaccctcactccaggctacgcccccaagcacctgcggggtccagtcccagggtgccccactctaagccacgcccccaggctcccacaggcccagtcccacggtaccccactctaagccacgcccccaaactaacacaggcccactcagggtgccccagtctaagccacgcccccagacacccacaggcccagtcccagagtgcctcactccaagccacgcccccatagtccccagggcntaggagtgcttcaactcaag

SEQ ID NO: 440004 - DNA, 776 bp, Homo Sapiens
  misc_feature (8)..(8): n is a, c, g, or t
  misc_feature (42)..(42): n is a, c, g, or t
  misc_feature (76)..(76): n is a, c, g, or t
  misc_feature (658)..(658): n is a, c, g, or t
  misc_feature (742)..(742): n is a, c, g, or t
gaggctcnttctagctccacaacccaaactgcctgtgaatgnctttacactcaagatgttacacctagtgaattancgggagaaaggtaagatgaaatccattcatatattggactgccttttaatcattcacaatgaaagaaatctcaggcattgccaatgtcatttaaattgcattcatatttaaacatgacttaaccatattaccaggcgtttccaactctgagtttacagtatgttttgatttgatcattacagattataaatttgagctggttttaaaatttctggcattgacttaagtttatatacatagcaaatgttgtatgctagcagcaaaataaattttccccaaagagtcaaaacttttactcggaacatacatttggctaataaactcctataattaactaccaaattggctgaaatttaggggttagggatctgctacagtaaagggattcatctgggggtaaatcagtttgcacttggcaacatgactgagtaacgggtggggctctttatgtctatgctggaaaggcctgggactgaataggatggtttgaggaacatggtgggtccctgggtcttcttacgtccctagtcagtctggaagactaaggtttgagccaggcctttaatgagccccttccctctnccttgcaagcaatactgaggctgactcaggttcaagactactctgggttggccttggaggtgggtaatgttgattttaaatatncctattctacactgggttcttacaaagatcaaat

SEQ ID NO: 440005 - DNA, 1808 bp, Homo Sapiens
  misc_feature (1154)..(1154): n is a, c, g, or t
  misc_feature (1267)..(1267): n is a, c, g, or t
caacttctctaaatctttttttgctaggtctataatttcaatggtttctttgtctgaggatagtatggtaggagaaaaagttgatgatccgctgaaatatggcgctcttgctgtggctcttgtcaagttttttcgaaggttctcattcactgcttcactttctaataattttgccctgagatcttcgatttcttttatataactatgaatcatattactaatctcctcatttccttcacctgctctggcaagaacatggttggcctgatcactaacaagctgtgtaattctggacctcaatgcatcaaccgtctcttgcatggctttaattcttacacgcaggttattattttcagtctgtagcatagcattctcatgaaacatgtcattgatgctttccacaccctcttcgtcaattattcttttacctgttttgtactccatgagctccatctgaagtcgtgtgatttcactacgaagtgcattgatttgctgactagctctgtcctgattgaccatcaccttattcttgatatttctagctcgattggcgtatttcagggtgtttaacgtttccataaagtctctgtctgaagggctgacacatgctatcatgattgtttggctattacccccgagggaatcctgtagtagtcttgttagcttggaatctctataggggacatgtgtggccctcttgctcttgtctcccaaggcacttattacattgccaagtgccaaaagtccacagttgatagaaatgccttcttttgccctctcgcctgtagctccagtacgcttcagtctttcagatcctgcgagatcaacaaaatggaactttgcagtcagggtttcaaattcattcatctgtgctgattcagaaataattttattatcagttgcattgtcagcatctatttggggacacactctggtttgacacacatgaatggtaaaaatggcatgtgaacgagagctctgaacattcatctgggtactggcagttgtccgggataaagcacccaacttcaaacactgcatcatctgaaaaaggggaagaaacaaggactctgattctgtattcacagtacgtgttgtaacgcccacagtataaattcctccagttgaatcttcatgaattcttatatttgatnttttactttttgcatcaatatcacgagtggtatcaaataagtcaaggacctcttcattatagagctctaagaattgggcattcactttaaaatctggagcaggaagcccattnttaattgctatgtgttttttttcttcaatactcttaaaaaggtgtttaacagctcgagaaataatacccagttcttcctcaacaatgttaacatcaaatcctgttcccattgtgtatgttttaccagctccagtttgtccataagcaaaaactgtagcattgtatccttcaaagcaaccttcaattagtttttctatacattgaatgtagatctgctcttgctgggagtcaatgtcaaatacatagtcaaaagtaaaagccttatctttccctaggaagacctgaggctctcctggtgtgacagatgtacaaatatggcatccttcaatcttctctttggcaagctgtggtcttattctgacagccacccgcacggagctctcgtccggggcgcccaacatgctggcggcgggcagcgaccgagccgttgggcctcggcaaccgcagagctgaggcgccactggggccgcgggactcgggcgcagtaggctggggcgtctgcgggcgggcggccggctcacctccgccgcgctccagccat

SEQ ID NO: 440006 - DNA, 1143 bp, Homo Sapiens
ggaaatggggggggctgttaggtttgtagcccgccgggcgccctgatttgcattgcccaggtcccgaatggtcccccgggggataggaaacgctctgttgtccccctctcccccggaagtccccggtgcactgcagtttttccagatccgggggggtgcacccaaaaggggcctttgcagtccgggtttcaaaaatccaatccatctggggcggattcagaaataattttatttttcagttgcctgtccagcatctattgggggacacactcgtggtttggcacacatgaatggtaaaaatggcatgtaacggagagctcggaacattcatctgggtacgggcagtgtcccgggataaagcaacccaacttcaaacactgcatcatctctgattctgtattcacagtacgtgttgtaacgcccacagtataaattcctccagttgaatcttcatgaattcttatatttgattttttactttttgcatcaatatcacgagtggtatcaaataagtcaaggacctcttcattatagagctctaagaattgggcattcactttaaaatctggagcaggaagcccatttttaattgctatgtgttttttttcttcaatactcttaaaaaggtgtttaacagctcgagaaataatacccagttcttcctcaacaatgttaacatcaaatcctgttcccattgtgtatgttttaccagctccagtttgtccataagcaaaaactgtagcattgtatccttcaaagcaaccttcaattagtttttctatacattgaatgtagatctgctcttgctgggagtcaatgtcaaatacatagtcaaaagtaaaagccttatctttccctaggaagacctgaggctctcctggtgtgacagatgtacaaatatggcatccttcaatcttctctttggcaagctgtggtcttattctgacagccacccgcacggagctctcgtccggggcgcccaacatgctggcggcgggcagcgatcgagccgttgggcctcggcaccgcagagctgaggcgccactggggccgcgggactcgggcgcagtaggctggggcgtctgcgggcgggcggccggctcacctccgccgcgctccagccatcccgagaattccggaccg

SEQ ID NO: 440007 - DNA, 1078 bp, Homo Sapiens
  misc_feature (27)..(27): n is a, c, g, or t
  misc_feature (33)..(33): n is a, c, g, or t
  misc_feature (37)..(39): n is a, c, g, or t
  misc_feature (42)..(42): n is a, c, g, or t
  misc_feature (44)..(44): n is a, c, g, or t
  misc_feature (52)..(52): n is a, c, g, or t
  misc_feature (57)..(58): n is a, c, g, or t
  misc_feature (61)..(61): n is a, c, g, or t
  misc_feature (85)..(85): n is a, c, g, or t
  misc_feature (88)..(88): n is a, c, g, or t
  misc_feature (95)..(95): n is a, c, g, or t
  misc_feature (97)..(97): n is a, c, g, or t
  misc_feature (102)..(102): n is a, c, g, or t
  misc_feature (108)..(108): n is a, c, g, or t
  misc_feature (113)..(113): n is a, c, g, or t
  misc_feature (118)..(120): n is a, c, g, or t
  misc_feature (124)..(124): n is a, c, g, or t
  misc_feature (126)..(126): n is a, c, g, or t
  misc_feature (129)..(129): n is a, c, g, or t
  misc_feature (132)..(132): n is a, c, g, or t
  misc_feature (136)..(136): n is a, c, g, or t
  misc_feature (167)..(167): n is a, c, g, or t
  misc_feature (171)..(172): n is a, c, g, or t
  misc_feature (174)..(176): n is a, c, g, or t
  misc_feature (259)..(259): n is a, c, g, or t
  misc_feature (1069)..(1069): n is a, c, g, or t
acacccctccccaccccacggtttcanttccgntccnnntcnancccgacanccacnnagnaggccccgctttcctaatctcagnagntttttgngntgaanagcccncccgncccannnagantncgnagngctncttgcctgggcccctatcctcggggtcaggntcgnngnnnccccgtaaggcctgcacgagctggtccagcgactgcagcagtgtgtggggctccagcaggcatccagggagggcaggaagggntcaggcgtgcagacctccacacactcggtgtccgtggggatgcgcaggtagaaagcgtgcagcatcattctgaacggccggtcctcccggccccgagacttctccgtaggtcaggtcgccccaccacggggtggccccagggcactgcagtgcacgcgcagctggtgtgtccggcccgtgagcggcttcagcagcactttggagacaggatcgcctgcgtacagcccgtgttccagaaccacgagatctgtgaggcttggctttgggttctcacaaccctgcgagccctcgatgcacatggtgtgggcccggccctccgtgctgttcctgccaatggcatggctgatggttacccggctctcctggatgtgcccccgcagcaatgccaggtaagccttggtcacgcgccgctccttgaagcacctgtacgcgctgccggcggctgccttgtttagggccacgcacagcgccccgctggtggagaaatccagctggtggcagaacctgaacccgtagcaggtgtcagggtcggccagctcgggaaagcggtaccgcagctgcttctgcagggtcagagtctcccgccacgccttgctgtcaatgcgaacgtcccagtgcttgttgaccaccaggaagtcgcggctccggtacacgatggacaggttctccacgctgcctggctccatggccggcctgctgccgggccgtgcagtccaggcccccgatgccgtgcccggcgccggctccagccgcgcgcccgcgcgctggcgacccagagaccctggaagtccgctccggacgcctggcagngttccgccc

SEQ ID NO: 440008 - DNA, 956 bp, Homo Sapiens
ttcgtttttgtccctctatgccttcacgatacttgttccatgctgtcttgctacctacttttttcgggctctcaacaggcatctcatgtgagggccattgtatatggggtcacgcgtgcagtccgtctcacacatcgtcggttgtcccgtggggaatgtcgcaggtagcattcgcgtccagcagcattctggttcgcctcggttccttccccggtcccgatgcgttctgccgtaggtccaggtctgccccacacggtggtgccccaagggcacttccagtgcacgtcgcgacctggtgtgtccggcccgtgatcggctttcagcagcactttggagacaggattcgcctgcggtacagcccgtgtgtccagaaccacgagatctgtgaggcttggctttgggttcctcacaaccctgcgagccctcgatgcacatggtgtgggcccggcccatccgtgctgttcctgccaatggcatggctgtatggttacccaggctctgcctggatgtgcaccccgcaagcaatgccaggtaagcccttggtcacgcgccgctccttgaagcacctgtacgcgctgccggcggctgccattgtttagggccacgcacagcgccccgctggtggagaaatccagctggtggcagaacctgaacccgtagcaggtgtcagggtcggccagctcgggaaagcggtaccgcagctgcttctgcagggtcagagtctcccgccacgccttgctgtcaatgcgaacgtcccagtgcttgttgaccaccaggaagtcgcggctccggtacacgatggacaggttctccacgctgcctggctccatggccggcctgctgccgggccgtgcagtccaggcccccgatgccgtgcccggcgccggctccagccgcgcgcccgcgcgctggcgacccagagacctggaagctccgctccagcacgcctggcagcg

SEQ ID NO: 440009 - DNA, 1079 bp, Homo Sapiens
  misc_feature (191)..(243): n is a, c, g, or t
ggaggggagggccccgttcgcgggctccccctggtaccagggattttccgggggaggccgctcttccgtagtcccctcgggggagccccgttatcttgtcggggggctccgcgggcttgggggggcttggcccccgatatgggcccggcctaggaacgcttggttccagtcgatctgctcagccaggtttnnnnnnnnnnnnnnnnnnnnnnnnnnnnnnnnnnnnnnnnnnnnnnnnnnnnnttcagggtcgtgccaagaccttcccaccgcactttgggtgtccctgtgggggactgccgcaggttagaaaaggcgggccagcatccattttgaagagggcccggtccctcccgggccccggagggcttcccccggtagggtccaggtccgccccacccacgggggtggccccaggcgcctttgcagtgccacgcgcaacctggtgtgtccggcccggggagcgggcttcagcaggcactttggaggcaggatcggcctgcgtacagccccgtgttccagaaccacgagatctgtgaggcttggctttgggttctcacaaccctgcgagccctcgatgcacatggtgtgggcccggccctccgtgctgttcctgccaatggcatggctgatggttacccggctctcctggatgtgcccccgcagcaatgccaggtaagccttggtcacgcgccgctccttgaagcacctgtacgcgctgccggcggctgccttgtttagggccacgcacagcgccccgctggtggagaaatccagctggtggcagaacctgaacccgtagcaggtgtcagggtcggccagctcgggaaagcggtaccgcagctgcttctgcagggtcagagtctcccgccacgccttgctgctgccgggccgtgcagtccaggcccccgatgccgtgcccggcgccggctccagccgcgcgcccgcgcgctggcgacccagagaccctggaagctccgctccggacgcctggcagcgcttccgccatcccgggaattccggaccggtaccagcctgcttttggcatggaaaaagcgtctctgctcgcccgctctccg

SEQ ID NO: 440010 - DNA, 1074 bp, Homo Sapiens
  misc_feature (85)..(85): n is a, c, g, or t
  misc_feature (239)..(239): n is a, c, g, or t
  misc_feature (259)..(259): n is a, c, g, or t
  misc_feature (263)..(263): n is a, c, g, or t
  misc_feature (447)..(447): n is a, c, g, or t
  misc_feature (498)..(498): n is a, c, g, or t
gttttggaaggtctggctgggggaaaacccgggggggcctgattatgccttggacccttgaggcccccagactcagggagcaggncggttgcttggcccctttccctagaggtcccggttgggcagttggcccccccctgttcccagcccccaggggttttaagcgtccggtttccagggtccaattcgggcagcccattgcaggcaggggccccgctgtgccttcatcttcagggggncttgttgggggtggaggagnccgnccgggccccaggcaggagtgcggagggggctgcctggcctggggcccctatccttgggggtcagggtcgggggtggcccgtaaggcctgcacgagctggtccagcgactgcagcagtgtgtgggggctccagcaggcatcccagggagggcaggaaggggtcaggcgtgcagacctccacacanctcggtgtccgtggggatgcgcaggtagaaagcgtgcagcatcattctganacggccggtcctcccggcccgagacttctccgtaggtcaggtcgcccaccacggggtggcccagggcactgcagtgcgacgcgcagctggtgtgtccggcccgtgagcggcttcagcagcactttggagacaggatcgcctgcgtacagcccgtgttccagaaccacgagatctgtgaggcttggctttgggttctcacaaccctgcgagccctcgatgcacatggtgtgggcccggccctccgtgctgttcctgccaatggcatggctgatggttacccggctctcctggatgtgcccccgcagcaatgccaggtaagccttggtcacgcgccgctccttgaagcacctgtacgcgctgccggcggctgccttgtttagggccacgcacagcgccccgctggtggagaaatccagctggtggcagaacctgctgccgggccgtgcagtccaggcccccgatgccgtgcccggcgccggctccagccgcgcgcccgcgcgctggcgacccagagaccctggaagctccgctccggacgcctggcagcgcttccgccatcccgggaattccggaccc

SEQ ID NO: 440011 - DNA, 696 bp, Homo Sapiens
ctccagcagccatccaggaggccggaaggttcaggcggcagcccgtccaacacactcggtgtccgtggggaatgcgcaggtagaaagcgtgcagcatcattctgaacgccggtcctcccggcccgagacttctccgtaggtcaggtctgcccaccacggggtggcccagggcactgcagtgcacgcgcagctggtgtgtccggcctgtgagcggcttcagcagcactttggagacaggatcgcctgcgtacagcccgtgttccagaaccccgagatctgtgaggcttggctttgggttctcacaacccctgcgagccctcgatgcaacatggtgttggggcccggccctcccgtgctgttcctgccaatggcatggctgatggttacccggctctcctggatgtgcccccgcagcaatgccaggtaagccttggtcacgcgccgctccttgaagcacctgtacgcgctgccggcggctgccttgtttagggccacgcacagcgccccgctggtggagaaatccagctggtggcagaacctgaacccgtagcaggtgtcagggtcggccagctcgggaaagcggtaccgcagctgcttctgcagggtcagagtctcccgccacgccttgctgctgccgggccgtgcagtccaggcccccgatgccgtgcccggcgccggctccagccgcgcgcccgg

SEQ ID NO: 440012 - DNA, 1216 bp, Homo Sapiens
  misc_feature (1135)..(1171): n is a, c, g, or t
tttcttctcgttcatctgcaggtagaagacgccgttcaagcactgcaggtgggcgcaggtctctgcccggcagggcacggagagccgcatcttcaccagcggacagatgagggacacccgcacaccggtggtggcgatctcgctgtcaggatcaaggcgcagcttctccttgaccagtgccttgcacagctccgggtgctttaccccaagtggtcttcagcctctgcagcagctccgatgaggtcagctgccgcaccaggtacagtgccaccgagtagctcttgccgtagttcccccaggtgacagtgatgcggttggtggccgaggacaggtacatgaggtgagtgaggttgatggggcggcacggcctcttgggctccaccccgggcttattggaggggtagtagcccgggacggagcagtagctgtggttgaccttcacagcgatgttgggcgggtactggtcctcctgagggcagctggtgtctgagtaacagattctcaggacgacctgcacggctttaactccgggctgcagttccctggagttccggatcaactccacctgtcttggcgtcaatgcgaagatgcacgggctctcctgaagcttctcgttgttctgtgggactaattcggtgggcttcagcagctcatccagcatattaaagaacggcagcttcaccaggcggacttctggcttgagggtcttggcgggcaaccgtcccagtccgtttaagtactttccgtagagcacggggtagtcaatattggggcctgccagcggagtcctgggcacagcgccggcccggtcgtaggtggagtgcatggtcagggggtccaggggccggtgcggctgtggggcaggctccgagttcttcttggcgtagcgggtctcgtacagctccttgatcttcttgaacagctcagggctacagtcaaactgcaccagctggagggccctggtgacgagctcgtgcttcagtccactcttactccggcccacgaaacccaggagcatctgaaggtcggagactcgaaaactcatcaccatgtttttggcctccaccagctccgccgccatcttggtcaccagcccgctctcgacgaattcgagctcggccgatttggcctgatnnnnnnnnnnnnnnnnnnnnnnnnnnnnnnnnnnnnncgccgccccgagagtgcgctccaattcgccctatatgatctatca

SEQ ID NO: 440013 - DNA, 1104 bp, Homo Sapiens
ttttttttaatttaataaactttattcttgttgggggaagagggagggaaaaaaagccacctactccactcaataaattaacacatggccaattcccaggccctaaacaaaccttgggcacttgagccagtcctgctgtttccttatggcccagtctgcttccccttcatagaagggagtttttcctactgctgctaggttatgtcatgaccagggaccacatcccctctgtggagagggtcccaggcccagagaggatattggctgcagcagcagtggccagggaaaggaggaaggggatgctcttcctcaaagcttggggtggagaggacagtgctggaagagagctgtggctgactgttcctccctcctcagcttcccccaaatgtgggtacaggaagagcaagagagaaatgcatccctccttcagggagaatcaagagcccaaagggacccctagagttaatgaggccacccaggcccctagtcaaaggcaacaggctaagcaattcatcagagtgagggggctgaaaccagggctcctcaggggtgggagagcacctcagcagccttcccacctagtgctggggcttacgccttagcccacccaggacctccaccctgacccacacagcaggcccctcggaacccaccagctaccagcctttccctcagcctcccctccattaaacataccgtgtcccccaagtgctctctcggggccagaagaggtttcctggtaccactcctgacccctggagggttgagaactgaggaccctgggtcccaccatgctcagggaatggaagctctttggtcagtcccagcagtcagaggccctccccacaggagaccacttctgcaggtcccctggatagctctgcctcaggcaagggccttactatggcttgagagatggtgtagtccctgtacaacagcctggcttattctgccactgcggccacctcctcttcttcaccctcctcctctgtctctgtcttgatctgagcaaccccaaggcggtagagggtgtcacgaatgaccacctcaccaggctggcagctctgtacaatgtcacctcgtgccgaaatcgccacccaggcc

SEQ ID NO: 440014 - DNA, 1870 bp, Homo Sapiens
  misc_feature (22)..(22): n is a, c, g, or t
acatgtatcagatctctggccntaatgatgatagactcagaagttgttatttctgtctataattacatagtaggaacagttgtcttttgaggctttacaattacaaatgacaatgatgtcaacccatttatcactataaaaatctaagatcttagtgttaataggaatgagagcaggtttaaaaaaaagaataccacaaatttgctatttatttcttctacaacaacaaaatataattacatacatttagtcagtgaaactctttctgttaaacatgagtttatcataatttcctgcctctttccattttctaaaatgcaaaaaggagttcccagatgaactggatacaaggtagtgaaggtgctcagaataaaaagcgtctggaaacagcagcttttaattcacattcctgacattctgcaggccaagtcttggcatcctaatcttctttacctgaccctcttcttagggatgagctgcaggtttcctgaagctcttctccattactcaggtctgaaaagtcactactgctgaaacgtctcttcctgctgggtattctccaagtagatgtacttctagaagtcataggagcttttttgttaaaactttttctgaatgtagataattttctgaaatccatgggctctggtacaatctggggtcgtgagcaagtggcttcttggccctccttttcatcatttgattctaaagggttgtcattattgatcacaggctcacttctcggtgctgagatgaagacttctaagggctcatcaacgtcagtggatccttcagagtcctcactgctgatgactattatgtcagatgcctggttatgatgagttcttgcttgggcttggcactcaacttttgaattagaaaatggcttttcctttgtttatatccaccagtcgcacagaacaggaattaatttggattccatggttgtgtagctctgcctgggctttcttcatcacagggcaacgggcagggcatctcccttccagcatccccattattcacttggacagcaatttgttcgcaggactctgttggctcagccttttgagcacattgttcatttgtttgttggcttcctagcgaatcatctttgtcactggttgtatcttttctctttgcatttatctgttctgtttcacaggggtgctctgagagtccattttcaggtggggttgtaccagcatgagatggggaacccgaaggtggccaagtcaggcttcgaaaagagttttcaccagttccttgttcaagacttagttggaggccagacctctcctccctctcttcttcttcactttcttggagaggcaatttgtcatggattacattttcaaagcctttataaatgtgaattaaatcggggtattcctgcatgttgacatcgctgaacagtgcttccagaactggcaggttaaatgtcttctccagttcactaagaacattgtacaccactctctgtacagggaccaggtttctacaagaatcttgagaatcttcaaacattttatttgtgatgagatcacgatcacggaggccctcgaggaatggaaatgtcttttttattgcatttgaaatctccaccttatttcttttgaagtgcttgaatacaatgtcatagagcagcctgtcatctacaccctggtcttccgtgaacatcctttgcaaatcgtggctgtgtgcaggaagatggttcatctcatttgctactggtgaaatacattcattcagcctcctggtgctcaggtcgccgcccccacctgccatcttcccaccctaggccctgcgtgggcctcagagcctggcctctgagcccctcagtcggcccagcctgcgtgctcgtgccgctcgt

SEQ ID NO: 440015 - DNA, 710 bp, Homo Sapiens
  misc_feature (209)..(227): n is a, c, g, or t
  misc_feature (346)..(370): n is a, c, g, or t
ggtcgttggtttgtttctacctccaagcatatggtcttcaaaaaaatactccactgtaacttgaattttcccaagaaactggcttgtgctttggcagcatcaccttcatacttgctctggtcactcaccagatcaatagagcaccaaacctacacagcaaacctacattcttgctttgtcaacaagaaaagtgcgtgcatatgtttgcnnnnnnnnnnnnnnnnnnngcttcctattatgatctataattgaagtgagaaatccccttccccttctcaatacttcaaaaaggcctggaaatttggcataaccttgtttgactgtgtgctttgaaagtaagtgatcnnnnnnnnnnnnnnnnnnnnnnnnntagaagtaggtggtcatggtcagtgccagtggggctgggaggcaggagcaagttgcggaactcaaaaagaagaagtgagcttgaagtacatggcaggataggggtggggggcctcgctgcctggcaccccaaaggaaagctgtcagttaaaataggaacctcggcttaaaaggctaaatggagtccagtccagctgtagcggggaatactattcagtacacagccatggattatttttcttctctttgtctctcttcagagtctgtgagcctccagcctgggagccctgggactggagcagctcagccgccgtctttctttgcttgaaagcattcacatc

SEQ ID NO: 440016 - DNA, 652 bp, Homo Sapiens
agataggcaacaagatgatgagggcgcggcagtatccttggggcactgtgcaggtttacaggagacatatgaggccaaaaggaacgagttcctaggggaactccagaaaaaagaagaggagatgagacagatgttcgtccagcgagtcaaagagaaagaagcggagctcaaagaggcagagaaagagctgcacgagaagtttgaccgtctgaagaaactgcaccaggacgagaagaagaaactggaggataagaagaaatccctggatgatgaagtgaatgctttcaagcaaagaaagacggcggctgagctgctccagtcccagggctcccaggctggaggctcacagactctgaagagagacaaagagaagaaaaattaactctgctgtttgctgcatgctgcatgagacccagggtcctgtttgggcttcctgtagacacccttttcctgcgcaacagagctgggcctccctttctctaatttcccccttaacatgcctggggggcatacaatccaacccgcgccctctcctctcttcctgccaaggtttatagaaacctgagaatctgagggtgatgtctggcccgctgggtcaagaagccaacaagtcatgttggctcggcagaatgcatccctggcattcccaggt

SEQ ID NO: 440017 - DNA, 1013 bp, Homo Sapiens
acgggtgaggtacagctcatagtgccgggtatgggtctgctcccgcagatcctccatgttgacccgaatcagcatctcccgcagcttcacaaagtcgcagtgggcctcgttttcaacctgcacagtgccccaaggatactgccgcgcccctcatcatcttgttgcctatcttcagttcttctgtgctgccaatgacagcaaacggcaggtggggcgttcatggttcccattgatctctgccacggactcatcatctgtaggaaactgatagatctggactccgttgctgacaagctcgctggtgattttgattttgaactttgttagctcactcttcgaaatggcatctgctttggcaatgatggggatgatgttcaccttactgtccagcttcttcatagtcactaggtccagagacttcagggaatgacccgtgggggcaatgaaatacaagcagacatggattcgggagtcatggtaggtgtgtagcactcttcggatctttagctcttcctgcaggtaggcctcgaattgtgcatcgatgaattccacgataggcttgtagctgtcctctttgttgatctggtccccaaagccaactgtgctaacgatcgtgagctttagcctcacgttgctctcttggaggtcataggtattagactggagctggacacccggctgtgtgtgggtggctggctccccttcgaatttggtgttgaacagggtgtccatgagggtggacttgcccaaacctgtctctcccacgcacaggatgttgaagcagaagccctggctgacggacttattcaccagctggtcaggcaagctgtcaaaccccacatgtccagccagggggacagttcggcaaccttcacccacctggcgagctatatcggtcgctgccatcgctcctgcgtccgccagggctgccacgggtgccgccgcaacgggagctactgcacaggaaacagaggagctcctccgacaaagagaaagtgttacacatccccgct

SEQ ID NO: 440018 - DNA, 1385 bp, Homo Sapiens
  misc_feature (371)..(371): n is a, c, g, or t
  misc_feature (791)..(791): n is a, c, g, or t
  misc_feature (961)..(961): n is a, c, g, or t
  misc_feature (966)..(966): n is a, c, g, or t
  misc_feature (984)..(984): n is a, c, g, or t
gacatccccgaacaaattaaatagagcgagcctttccggggttaagaaaaaagggtgaaaacacttttttctccttaaaaaaggagcacgcccactaacctctttatgaccagtttgtccccacaaaaagttcttaatgggtccggaaagcctggggcaaaaatattttaattccccaaaaaccggcctggctttcatggtccacaaccctagtcgggcactgcagctccgatgactcctgctgggcctctgagccatctctaggggttgtgggctccctactcaccaacaggagactttagcaggagtaagtcctggctgtagcagaatgcaacctctgtgttcctgaagcattgcctgtttcaacagcnacgagagaaagcgtgcaaacacagcgtgcagttagtcttagaacatcacatgagggcacaagtagacacacatcttcacacctacagcagtgcctacggagggacctgaggggagctgcctgagtgggcgggatggagccagagagatccaagtgtcacccagtggtggctctccccagctcccaaagagccccgggagactctggaacactactccgaaataccaagcaccaaatggtacagtaacaatttcaaaatgtacatctgcataaatgacccctacttagagtgatccctttatctcttactaaactctgcattcatagaccaatggggctttctccctgccctaagtgctccatctctaacactggtatgaaggaaacaccaagcggcactgctgatgctgcccagccccanctgagcgcagaggccaacgacgtcgggtacaagaccagtctaagaggagggagagaaccttgctacccagcactagctgggtgtctgggaaggcggtgcccttttctcctggggaggagcaggagcaggtgcagagatctggctgcaggggtggggcgttgccaagggantgggntgaaagctgatctaaaanctgaagcccagtctcagttccttccagaaaatattaatcatagagccgccagatttttggttcttgttcaaagaaacacagttgtggccataagtaagcccgatttccattaacaactgggattttaagtttttgcaaatcggaagcaggtactggctgctcccggttatgttttttgttttcccacaggtataccaggaacacttaatcaacatcctgcatggttccagcaaagacattaagacagttgggactgttggtgaggacagatgatcttcacaaaccctctgactcttaagaacctgggagacctgctggagtttaccccacattcccttaattaaaaagccattaaaatagtcaactttgctgggcacggtggctcgcgtctgtaattccag

SEQ ID NO: 440019 - DNA, 2820 bp, Homo Sapiens
  misc_feature (3)..(3): n is a, c, g, or t
  misc_feature (94)..(94): n is a, c, g, or t
  misc_feature (106)..(130): n is a, c, g, or t
  misc_feature (132)..(132): n is a, c, g, or t
  misc_feature (139)..(139): n is a, c, g, or t
  misc_feature (144)..(146): n is a, c, g, or t
  misc_feature (152)..(153): n is a, c, g, or t
  misc_feature (155)..(155): n is a, c, g, or t
  misc_feature (159)..(159): n is a, c, g, or t
  misc_feature (178)..(179): n is a, c, g, or t
  misc_feature (194)..(195): n is a, c, g, or t
  misc_feature (213)..(213): n is a, c, g, or t
  misc_feature (218)..(219): n is a, c, g, or t
  misc_feature (223)..(223): n is a, c, g, or t
  misc_feature (262)..(262): n is a, c, g, or t
  misc_feature (290)..(290): n is a, c, g, or t
  misc_feature (299)..(299): n is a, c, g, or t
  misc_feature (301)..(301): n is a, c, g, or t
  misc_feature (310)..(310): n is a, c, g, or t
  misc_feature (333)..(333): n is a, c, g, or t
  misc_feature (347)..(347): n is a, c, g, or t
  misc_feature (355)..(355): n is a, c, g, or t
  misc_feature (359)..(359): n is a, c, g, or t
  misc_feature (367)..(367): n is a, c, g, or t
  misc_feature (446)..(446): n is a, c, g, or t
  misc_feature (482)..(482): n is a, c, g, or t
  misc_feature (488)..(488): n is a, c, g, or t
  misc_feature (494)..(494): n is a, c, g, or t
  misc_feature (497)..(497): n is a, c, g, or t
  misc_feature (503)..(503): n is a, c, g, or t
  misc_feature (520)..(521): n is a, c, g, or t
  misc_feature (540)..(542): n is a, c, g, or t
  misc_feature (550)..(550): n is a, c, g, or t
  misc_feature (563)..(563): n is a, c, g, or t
  misc_feature (567)..(567): n is a, c, g, or t
  misc_feature (576)..(577): n is a, c, g, or t
  misc_feature (579)..(579): n is a, c, g, or t
  misc_feature (585)..(585): n is a, c, g, or t
  misc_feature (614)..(614): n is a, c, g, or t
ttntctcataaaaagattcaacttcaagtagcacaatttcttgtctgcttttaatcctgaacattcttgaagcatgaaacagccaactgtttanacaacaaatctnnnnnnnnnnnnnnnnnnnnnnnnngngccgaanctttnnnctctgnngngcangggctgttgtctcagcttnnggagggcccagatcnngccactgtgacctctggntttgnnagcnacaacaggtcccagcttcccagcccttccctcccctggnacctcccaaaagcacaagaatgcaaacngagattggncnaccactgangcaggggtggactcccgcttgantgtgccaacagggngggtggantgtnctggtganttcctggtgggcctggccaaccaagaggccaagtggcctcaccaggccttacctggctgcctggcagcctggagatganggaggaaggacgctcacggtgcgaaagtctggccangctggngggagntangtgatnatcctggcgatggcttnnagggaggggaagtggtggnnncgggcagnatggaggggtttnttgntttggtatnncnattctntagacctgctggggaggtgggggacacangggcagtccaggcccgcctgctgggtggtggcctgccacgcgctcttcttgttcttcttggacttggtgctcagaggcttctcgcggttgcagaagtccgtgtgtgcagacaggagctcctgctgcttggccgtgtcgggcagcaggaccagcagctcattaaagactttctggaaattctcccccagcaggtcccggcaactcttgtaatactgggctgcggagatcaggccctgtctgaactcccctgagtggctcttgaactcgctgaagcgggcctcgtcgctctgcaggaagtccctgatggactggatgagctgaaggttcctctcccggaagttctcggggactaggtaggcccgtggggcaggcagcagcctgggtgcttttgtggtggtggtggtggcggggctggggacactggccgggtgggggttaggcagaagggccagagaaggccaggggggcggcttgctgattgggggcaccaggccccggcgggggtgggggaggcgtgcccttcaggagcaccacagcgctgaagcctgggggcggcggcatccggggtgggcaggggccgccgagcgctgggaagtcctcctgtggcgtggggcaggggaaggaccccaggggccttgggagcccagggggttccttgggggcactccgagcaggggccgggccctccgtgtgtccattaacgacgacggcaactggcccctcggctctgctggcaggagcttccggggcctgcaaagcccctgggggacaggtagtgggcgggggctgtggcaatgtggtgcctggcttctccgagcccactttcttcttcttcccaactttagagggttggatggaggccagccccagtgtggaggagacggagcccgtggggcgtgtgctcagaagctcctgcagggccgggccgccgtccctcctccctcctcctcctgtgtgaagggcgggccgcccttcctgccgcccctgctccccttcccagccttcctggtgggctggccgctgccggtagcctgcgccgagagtgggggctgtgctaccttcttgctgctactgctgctgttccaggcagagacaaggctggtgggggcggtgccaggcttgggcaccgaggacaccagggcggggaagtcctcctcctggaaggcactcctgcctctggcagggatggcgtacggcagcgccaaccccacagggcccggggttgctgcagtggagcaggaggaggaagtggaggcagagaggctggggaagtcttcgtccttgagcttcgggctgggtggtgggagggcgcctggggcggctgggcctgtcaccgagaaggcttcttggcttacaggaccatttgtcgaggtttccttggggcctgggccttcgccctgagtccggggtgagcgccgggggccacggggatcctcaggtccccgcgccgctgcctcctccttcttgggcctaccgccttcctcctgatcctcactcctgcgagcctcctcctgctgctgtgcggccacggaggcccggacagcagctgctacttctcggtcctcttcttcccttttgtacctccagcttcctcggcggctctgctgggctccgcgagtgccagcccgggccactcggccctggcggctgtacctgtccacctcctcgtagtcttcgccaccaacgaccccctcgttccggcgcgagtgccgtggcgcgtagctgaactgcaggtcgatgtggcggttctggcgtgcctcggcgcggctgcgactgtggcaggccgtcctgtgggccttgaggtcgatctcggtgcggaaggcgtgggtgaactgctccgtgctgcagcggccttcctcacacagaaagtgcttctcccggaagtgctcacgcaggtaggcatagtcgctgtagtagtcctgggccccgtccgagtcgcagaagtggcagaagtagtggtcgcggcgcaggtgcttaagcagctcatcattgtccaggtagcgctcgtcacagaacttgcagagcgggtgcccacggtgcgacgtgtcatcggggtcaccctgcatgcgatgccgggccaggtccttgcgcgagtaccacttgcgctcatatgtgaagatctggaggtgctggaggcacagacggcagcagaagagctcatgctgcctccgcatgtgctgctccaggtccccgaagaggctgaaag

SEQ ID NO: 440020 - DNA, 463 bp, Homo Sapiens
ttttttttgcgtggtattgcaaaataaatttatttgaagataaactgtcttataaaaggtcagaggcaatttgagatcccagattcagcttgtctcataaaaagattcaacttcaagtagcacaatttcttgtctgcttttaatcctgaacattcttgaagcacgaaacagccaactgtttacacaacacatctgtgacatctgactctggcaccagtggcgccgcagctttcagctctgaggccccacgggctgcagccctcagctttgggagggcccagatcaggccactgtgacctctggctttgccagcaacaacaggtcccagcatcccagcccttccctcccctggcacctcccaaaagcacaagaatgcaaaccgagactggcccaccactgaggcaggggtggactcccgcttgagtgtgccaacagggcgggtggactgtcctggtgacttcct

SEQ ID NO: 440021 - DNA, 507 bp, Homo Sapiens
ttttgcgtggtattgcaaaataaatttatttgaagataaactgtcttataaaaggtcagaggcaatttgagatcccagattcagcttgtctcataaaaagattcaacttcaagtagcacaatttcttgtctgcttttaatcctgaacattcttgaagcacgaaacagccaactgtttacacaacacatctgtgacatctgactctggcaccagtggcgccgcagctttcagctctgaggccccacgggctgcagccctcagctttgggagggcccagatcaggccttacctggctgcctggcagcccggagaggaaggaggaaggacgctcacggtgcgacagctctggccacgctggcgggagctacgtgatgatcctggcgatggcttgcagggaggggaagtcgtcgtcccgggcagcatgcagcgcctggtggctgctggcatcgccatgcgcgagcacctgctggcaggtggggcacacacggcagtccaggcccgcctgct

SEQ ID NO: 440022 - DNA, 549 bp, Homo Sapiens
gatctgctggctcctgcctgtgaacgtgttgacactcacgatagggttcccattgatgctccacacatggatatatgtgccagcgcaggacacaatgtcccctgttaattcattgatacaaagagcagaaactggagctcgatgccctcgaagctgggttagaaatgacagtttgttcaaatcccaaatgatacaggttcgatcacgggacccactgacaattatgtgataggctaatgatgctgtggcgcaggtgacggtatcagtgtggcccagtaaggcctgtttgagggtgacggtcttggcccttttctttggaggtgcccatctcccacacacacacaaccgtgcttgttccacccgtgatgaccagcttggggttggggcagattgcacagagaatctggccccactcagacaagcattcataaacagtcatggccttgtctgactcataggttcccagtctgcaactgaggtctgcatagccccaagcaaaagttttattccaggttggtgggataagaaccttattctgttccaccgcaa

SEQ ID NO: 440023 - DNA, 764 bp, Homo Sapiens
  misc_feature (602)..(693): n is a, c, g, or t
cagggaaaaaatatcgcccgggtacagatcaaaagggagtttcttaccgcctccttttctacaaagacacaagtaccagcctgatctctctttcccccacattaacaaaccccaccagtgaagaactttgtggcaaacacatgcaggctgtgaaaagaactctgtgcctaaaatcctttcatttctttgctggagtttttttgaggcagattctagaattgctgagtctaagggccaatgccatgtcgttttgttagatgctgccaaatcctcttccatgaggctgcaatgttctgcattccacagtgacgtatgagagtccttgtatcccacagcttcataaacaaagcatgacggcgcatctgcacgtttacccatcacacagttgagaaatcttatcctagtttcacctttgtttttggtttgcatttttgtgaccagcttttttatggtataatgcacagaaggtaatgaacacattctacccacaagcttcttcctgtgcctttggaatctgctcctgccagtctgcaggcaaccacggatctgctttccgtcacgtaggaggcattcttgacaccctctgtacacagcatgcactnnnnnnnnnnnnnnnnnnnnnnnnnnnnnnnnnnnnnnnnnnnnnnnnnnnnnnnnnnnnnnnnnnnnnnnnnnnnnnnnnnnnnnnnnnnnggcccccatcacatgagcacaactgtttcctgtgtgtgatgtgttgttctctggctgtgcatcggtaatga

SEQ ID NO: 440024 - DNA, 662 bp, Homo Sapiens
  misc_feature (9)..(11): n is a, c, g, or t
  misc_feature (19)..(19): n is a, c, g, or t
  misc_feature (23)..(26): n is a, c, g, or t
  misc_feature (35)..(35): n is a, c, g, or t
  misc_feature (37)..(37): n is a, c, g, or t
  misc_feature (44)..(44): n is a, c, g, or t
  misc_feature (53)..(54): n is a, c, g, or t
  misc_feature (70)..(70): n is a, c, g, or t
  misc_feature (86)..(86): n is a, c, g, or t
  misc_feature (89)..(89): n is a, c, g, or t
  misc_feature (91)..(92): n is a, c, g, or t
  misc_feature (96)..(96): n is a, c, g, or t
  misc_feature (500)..(591): n is a, c, g, or t
ttttccccnnnttacaacncgannnnaagaatttntncaaacanagcaggctnnaaaaaaactctgtccntaaagtctttcatttnttngnngaanttttttgagcagattctagaatgctgagtcaaagggcaaatgccatgtagttttgttagacgctgccaaatcctcttccatgaggctgcaatattctgcattccacagtgacgtatgagagtccttgtatcccacagcttcataaacaaagcatgacggcacatctgcacgtttaccaatcacacaggtgagaaatcttatcctagtttcacctttgtttttggtttgcatttttgtgaccagcttttttatggtataatgcacagaaggtaatgaacacattctacccacaagcttcttcctgtgcctttggaatctgctcctgccagtctgcaggcaaccacggatctgctttccgtcacgtaggaggcattcttgacaccctctgtacacagcatgcactnnnnnnnnnnnnnnnnnnnnnnnnnnnnnnnnnnnnnnnnnnnnnnnnnnnnnnnnnnnnnnnnnnnnnnnnnnnnnnnnnnnnnnnnnnnnggcccccatcacatgagcacaactgtttcctgtgtgtgatgtgttgttctctggctgtgcatcggtaatga

SEQ ID NO: 440025 - DNA, 411 bp, Homo Sapiens
ggttagcatttttattcccagcttttttgtggtataatgcgcagaaggtaatgaacacattctacctgcaagcttcttcctgtgcctttggaatctgctcctgccagtctgcagggaaccacggatctgctttccgtcacgtaggaggcattctcgacaccctctgtacacagcatgcgctttatttggcttctcttacgcagcgtagtgactttcagatttattcaagctgctgcgtgcgccaacagtccactccttcctagtgctgaggcccccatcacatgagcacaactgtttcttgtgtgtgatgtgttgttctctgggctgtgcactaagctggattctgtcaatcaccgcatcttgtctcatcagtaggagtgaatgggctgggggggacagtgggcacagtca

SEQ ID NO: 440026 - DNA, 1755 bp, Homo Sapiens
  misc_feature (84)..(122): n is a, c, g, or t
  misc_feature (710)..(710): n is a, c, g, or t
atatcttggttagccaccactcctctgtgcaccataactcactgagcttcctccatcatggtgcctttaacaccatttgataannnnnnnnnnnnnnnnnnnnnnnnnnnnnnnnnnnnnnnattcatctgcataccccactgggctgtattgttttcatgtgtgacttgcttgcccttttaagtccagcacctagaggagataggtgctggccccaatatgcattttcaacaagtatttttgaataaattgagatatcaatttcccctaattttaggtgaggagtgtacctgatacatatacactagcctcattatagtttgtatagataactttgtcttttaatctgagccatttgcagttttgagatacttattaacttctctttgctacttcttcctttgccatttgcatctttcatttcagaattatacaatgtccaggttttttctttctacagtataaagctctgaactcctgattaatctttcaatatgttgaataacatacacacacatacgggcacacacgtacagcctttatgtttggtttctttctttgaatgccgtttgttaaatagttcctttggtagtaatccctctggctttaggtaaagccagttcaaagcatttttagagcctggcaatttgtagctctctttaaaatatcttttcatctctccaactccgtgcttcttaatctgtactagnaaaccaagctatttgaaagaaactaatatcacctgcattgtggctgcttctttgcctttctgcctcccacttgttactgtagtttattcatctttatttttccagcatctagtccatgcctggagcactaggcatgctatcactgcttgttaaattagaatttggaaaactacctagtgcaaatatgtttcccactgctagtagaccacccatatcggtagctatctggcctagttagctgacatggccaataaggctgccatagaggtataactttgtctttaaagtatttattcatttctgtttctcttgtggacttccaatacatgtagaaaacagggacattgaaaactgaaacagttgggggaagattgaagggatgtgggtgtggttataaaaggttaacacaagaaatttttgtggcattgaaactggtgaatatctttattgtggtgataaaattgtaattaatggacactcacacatataccttgattacatgtaatactcgggttatatgaatacgattgggggattgaatcaatatccatatcctagttataatattgtattacaattttgcaaaatgttactgatagcaacaggagacagacaaattctgtcagatagacagacagggacagtcctcagtgaaacctgaccttcaatccaaggacagtttaaagcctaaaaacagagctgccagttctcgatagagtccacgactggagcgaggacctctgtgcccatcttaccctcctctctctctgttggttccttctggatgatgccttttaaccagtcaaatggtgctttttccaaagaccacccatggaccaatcagcatgcatgcttccattctaagcccataaaaaccccagactcagtcctgtgggggctacctgcctttgggcccctactcactgccgaagggtcccctctcgcagttgagagctttgcttctgttgctaaataaaattctttgccttactcactctctgtgtgtgcagatgtattcctctggttgtggacaaggacctgaact

SEQ ID NO: 440027 - DNA, 1436 bp, Homo Sapiens
  misc_feature (252)..(272): n is a, c, g, or t
tccagatttgaggttaatcaactgcaaattccattagcttcatacggagtgaaaataaagaacagacggcttcacatgggagcctgaagtcaggtgcggctcccccaggctggcctgcaggtatcagttttttctcccgcctcaaaggaacggtgcctttgatagggaggcagatcaaagaagggctgttccagaaacgcctctgctgctggagaagctctcaaagtctacccccacgtgcaccacagaccnnnnnnnnnnnnnnnnnnnnnggaaagatgtagaatttgatacttcggatcattatattctggccgctgtgggaacgtttcctaggttcactctggtatgcagctgtggtaggtatgtaatgctgacaactgattcccctgcccactagacaagatggtgaagagttaggttcaaaaaggttgctgtgactttgaggtggtctttacttgagcttgaggcttcttttcacaggtcctgatggagaatggctttaaaacacaaaataaaagccgttttccaaagatcactgatgtttttcaaagaagaacaaaagtgaacttgctagaacatattcaaatgcaagctgttagtttctcattaatctaagttgcccaaacaaaagctttgctggtggaataaaggaagtattatatagcagtattgagaaagttagtaatttccttaaaaatgcacaattctattagtctccttatgggagggtccccatgatcaggtagagttcaatttccgtttgactttttaaatgccatatggccattatctaaactcttttcactttccctgaatccctacccctcaccattggctggattactgttttgcttttataattttcccttttttaattgcttatctcttcctaccccagattaaggaaaatattgtcacagttaaaacggaagaaaaatccaataactctattggtggggacttataagctaaccaaccctgatcacaaatgttccctttctaatcatagtttgtggtggaatgaaagatgcaattgtctggaagggatgaatatgggatccatgctggcttgggggtcaaaggtcatcacatgcaaaggtccctttctctctggcaccgctccctttgtatagcatagtttggcagctatctccttgcacttcggctacctgccagtgcagctggtactgtgtctggtgcaaacaacaaagcgtcactcagcaaccagcagctctgcatgaggccacttttctcagatgacaaagaaagatgggctatacattctaccattgctgcccattaaaaggactcttaaattgcatcactacaagttattgttaattatgtagtagtcactggagctgtaggagctttccagggagaactgttcggctatatgctgggagaagaggaagtagggaggggttaaattg

SEQ ID NO: 440028 - DNA, 1068 bp, Homo Sapiens
ggtaaaaggtcaaggtctcaaaatgctaaatgatgagggaaagtgtagcaagtatgattcaattctattaaaagacagaaaaatcaaggtaggcacttgctcaaaactacgtgagtagtcagagaggagacacaaattagctttgggaactcccgagaactccaatgtgctccagtcaaaatcttttttaaaaggttcctttgtaaacattacccttcccccgatctctgtgaccaaggttgccacctgtgacatggatttgcagcctgcagtattgtacttcccctgcttggggccatctgtgctaggacatgatgatttttctatgaaagcagctgttctcaccatcacaaccagccttgaacttggtggcacaacctggatcctaaatagtggctctggagcaactgggaatagggccccggggaccatccacccaggtggcagcgctgggctgcaccaagggggagtcaggccagaaaaaaagctttgccctgctccctgctgctttttgccagcccagccagaagccctgcagaaaacctgtgctgaccggcccgacatgtggcaggtacaagaagatgccctatttatgaggggacaggtttacaatttacaaaagacaggcgaaaatataaagacataacttaagtcctgccagtggggagttagaatgttcctggccaggacataaagaaatattcctctccacaagctcgaataaaggaacacacagcagaaatagttgggggatgacgtcagaagttctgggctagtgtcctgcacttctccttgaaagtaaaaacagtgggtctagaagaatctacgtggcattgcccttatttgagtagttctactgctccttgcaaaacaagtaggatagctgaagaaacttcctcttatttaaagattataagaatgttccccctgccttttttaaaaaccttattgtccccaaaacacacacattacccaattaacaaatagctttccacttaacctttgtcttttaaagggacagtaatgtttcttgtagaacattcaaggtggtggtggttaggcaagtca

SEQ ID NO: 440029 - DNA, 938 bp, Homo Sapiens
  misc_feature (57)..(57): n is a, c, g, or t
  misc_feature (292)..(292): n is a, c, g, or t
ggccactttgccatacaaatgtgccaaaccaatagtcaattccagttagccctttanttggttggtgtttatccttaaacgtaaagctgactgtttggtatctgccttccccaaaatatgggcatgttgaaccgcacaacaatatgaatttctccaaatgtccatagaatatccgaaccaaatcattttttaagaccctgactggaagcactgggatcttcagaaactggagaaaggcatttggaagggagcaggccatgaagccccttcggaatcatttgtctgatctganctggacgattccctgctgttctgcggtgaatgagacaggctgagcggctccatcaccattgatactgtaatataagaacttgataaagaattgccttttgataccagtgctgtattgctctttttcttcctgtgaccacttctgatcaatgagtctttgataaaactctttcaaccatgtccagtccccagtctgagacgatctcatacagagttcttgaatatctagctcatctagtaagagagtccttcctatgcggtgtactgccatgctcacgtgcgacttgctgtagggaattttcaggagtttttttatgttttcagagtcagagtcaacatcctcatcatttcccactgaatcaataaagtcatatgccatgccaaagcttgaaaatggcttgcttttcttgctgttgccaagaatggtagttcctgctggccctagtttggcactctctcgtaaccagttggcaggtgggagtttcaagtctgttttctcttcaaggcgtgcaaatgctgtgcagaagattcctcggattctccctgggacaggaggctgagccctcctcgagcggcggccccggccggcggaccctcggctccggcctcctggcatcccccatcacttcgatccagggcaggcgata

SEQ ID NO: 440030 - DNA, 2742 bp, Homo Sapiens
gtatgagccactccacccagcccagagttttcatttgttccttaaaataattaagctggaaaggcaaggacaattatgagcacaactgtagtcaagttgagaagacctcaaaaaagtcaagtttagaccttcggattttccatagaagagaaaaagatactaggttttagggtacagagagccagatctgaagagtagctgcagggggaaggtgctgttagaaggaggatatagacacattctctggggggaacatatggtgactgacccatgcacacaaagggggccttagcgaaactgcagaggactgatccttaaaccaatcacatctttgccaatctctgtcactgtggtgaccctgcagatttgacctttgaactcaggggaatagcaggccccactgagtggacacttttctactggctttccacggtagatgggccgatatgatgcagcacaaatgtcaaaggggttgtgcatgtcataattgagctggtaggcatctgtgggattcttctcacaggcagacaggatttttcgggtctgttgggccacctcaggcttgggcccgagttctagtaggcgccgagcaaaggtggcagctgtcttgaagttcttgagcttgaagaacagattgagggctgtacgcagcaccaggatcatgtgcacaggctgcaggtttgagtgggtgaaataggctgccatctcacagatgcgcttctgctgttctagagtctctttgggcagcttcttcctttctgtctccacggacaaacccacaatgtactcacggcaaatggtgatgagctgctgggcctctgcaatctcttgtttattgtccacaacaagaagtggcacactgagaaggatggaacggaatttttccacagcctcctcaaatttgccaactgtggtgagctggtagcacagctgcaaccgttggatgaggtcattaagcttcaggcccacagctggtacaccattcttcagccctgcatccttccagttgcgattaggatagccatacatggagggtaggcagggcagagcctgataggttgtgcggcctcgggcgtatgtctgtaggaacagttgcttgtaggggccaaactggattacccctacttggtcatgaaggagccgcatggctgtttcgaaagagcctgccaggatgtgatcaactggaagctgagagttattacaccagatctgagttggacttgttcccttggttgggggcacaaagaaaccatcttcagccccaccagctgccccaggggatatatccagctcaggagggagctccagatcttcttctacatcccagccacctccttcttcctgtcccttgccaagagcatcatcccccaaaccttctgtagcctccacaaacccatcttcatccaactgcagctctgcatcctctccccagccctctgtaccaacagtgtcaatgtcaatgtcagcagccagtgctcctcccttccctttgctggcaatggtgccttcaaaaaatcctttggatacagtcaataaaggccaattggtatccaatggcatgataggtgcaggtggctggagcagcttggcattagggtcaatgtctgggattgtctccttctctgggtcaaatgtctcctttaggctctcagcttcttcatctaagccatgggtagcagctgtgagataggccagggacttctgtccacagttcttcaggatccgcacacgctctgacacatcacccaggtatagggcattctgatagtggccactcatgtcctttctgatctcagcaatcttcatcatcttgcgaagtttttctaagttgccagtgataagatacaggaaggaaagtttgtcaaagtttttggtacgctgatagcacatttccacaatctggtggttcccctgcagcagggccacttctcccagcttttcccagcagttcttgtcatccagtgctttggctgcttccagagcaatctcaatgtttccacactccagtgccagactaaagcgagttttctcatccttgacaaaatgcagtgccacttcaggatagcccttcttctggagataagcaataatagactggccaactagtttggcattcctcaccatgtgcagtacctcatcatattttctgttgatcagggccagcttgaatttgaactcagtgggatcaatggtgagtacccggggacgacactccctgtctaggcagtatacattgttgcccttcacccgtgtgacatagatgggtaaatccagagttcgaatgatcccgtggtccccagtggtgacagcatatttgatgtggttgcttgtggtatagataaataccccactctcatcccaggccccactcttgacacgaatgttctcatgaatgttacataaagcatccagtttgcggttacagatcacaatggcgtgtttggctagtagtgctacatgtgacatgtctgctgaccagataacgtatttcactttagaaatcttcacagatgccagagtccgcttctgctgtacgtcaaagagtgtgatagagtccgcatctcgaagcaggagattgcctgtgccagcatagaagatctcatcacagttgggcacctgtacctttttggtgatctcattcttcagattcttgatcagaagcgaatgcatccgatctaggacagcaaaccgatttcgagcgacccaaacggctgtcaggcctgaggatcgtttccatcccgg

SEQ ID NO: 440031 - DNA, 483 bp, Homo Sapiens
attgaacccttaaaaccaaaccaacatctttgcccaaatctcctgtccactgtggtgaacccctgccagaattgaaccctttgaaactccagggcgaatagcaggcccccactgaatggaacacttttcctactggctttcccacggtagatgggccgatatgatgcagcacaaatgtcaaaggggttgtgcatgtcataattgagctggtaggcatctgtgggattcttctcacaggcagacaggatttttcgggtctgttgggccacctcaggcttgggcccgagttctagtaggcgccgagcaaaggtggcagctgtcttgaagttcttgagcttgaagaacagattgagggctgtacgcagcaccaggatcatgtgcacaggctgcaggtttgagtgggtgaaataggctgccatctcacagatgcgcttctgctgttctagagtctctttgggcagcttcttcctttctgtctccacg

SEQ ID NO: 440032 - DNA, 914 bp, Homo Sapiens
gaggtcttgcatgtatagtgttcgatatgcaggagtggtaatctgaaacaaaggaagaagaggaagggtgttgatgcgataaagcgggcccgtccaaaataagcggggcacaaaaaggtggtttcctaaaaatggtcttaggggatgaagggcgctataggtacccctcccagtaataatgtttcaactatggtggtcactgaggactgctggggttgcgcaccacactggacattcttgtaatcctttcggacacgctttggccatcctggagtcctggaaggtgacaaagatcaggtccagccgcttgagcggcacgcggttgagctcggacgttgaactacgtccgttagctgctcctctagctcgctgtaatagtgctctgcatccgcctccttgaagcaggtccagcacttgcataagcacagtcgggcacaggggtggatcctgatcatcaccttcccagtcttcttggccttggctgtatagaaagccggccccgcatggcatggcgcctctgatcgtccaagtcgatcaggttcctgacgtcgtagcagaagtggactcttgtcacgacactgcctggataggcctcgtgaaaatgcttaatgatgagttctgggtcttcaatgtccttgggcacataggtgatcattagtgtccttgtgaccttttggctattcctgggcgcaaaccccaggcagtgatgagccatgaacatgaagttggtgatgaagtagaagaaggacagcaggctatgcagccacaggagcttgctctctgtggagacattgacaatggtggtccgagcaaagtgactgctccagtccagaacagatccagtatagttgatgggcaaaatgatgcccagggaggggatacagatgatgagcacaaagatttggggtgggact

SEQ ID NO: 440033 - DNA, 820 bp, Homo Sapiens
  misc_feature (130)..(131): n is a, c, g, or t
  misc_feature (145)..(145): n is a, c, g, or t
  misc_feature (148)..(148): n is a, c, g, or t
tctttctaatctaatgtttccctgatacctattttccatcacaactatacatcaaagttggttcacctttcggtagaacaaagatggcagtaagcatatatagcccagttaatgaataaatcaatgaatnnaaaccccccagggncantttaaaactttaactttaaagctatggcattaaagacaccctccctaaattccactgctgttttaagacctacccttggcaaggtatcgtatcctggtctgggatccttgtattcttcgagttgctgatatgctggtcccacaattcccacttagcctatttcggggtgacggggggtgtccttctgaaggcattcttatggagcatgccacttctttgccttgggctgcagcaagaggatagactcctgtggtgtttgacagcctggcttcctctgtcaggagaagggacctcagggaatgactgggggccgacaaaacttgactccatcattttctccaatgcagtcacaggatgcctttccacctttgttttattttgcagctggacatggctcttcaccaagttctctgactttgccattgtgctggatgctttgagactgtagcttttaccattttgtggcactttcagctgctcttggatttgtttagcttgtttcttgcttttgaagtagaatgctgcacagaacatgcccacgatgacaattccaaagatgatacatgaaattgacagcacctgcctttgataaacttcttcactctccatgaattcaatccccaagtggtctgttggatccgataagatggaatcagttttcggcagaaattc

SEQ ID NO: 440034 - DNA, 1698 bp, Homo Sapiens
  misc_feature (248)..(248): n is a, c, g, or t
  misc_feature (1467)..(1467): n is a, c, g, or t
  misc_feature (1496)..(1496): n is a, c, g, or t
  misc_feature (1615)..(1615): n is a, c, g, or t
tcaactgatgagcgtgccagccttgaggaaggacagagtgcgggaagcagagtgtgggaagttggaaaaaataatctgcaaggtaaacaccttcaagtcaatttcaagaggctggctagaaaccgccaggacttcagggggccctgtctcgcgggtctccctgcgccctcagcactttggcttggtataaggccaccttgtccctgaagagaggcctattttaagctgagcaagaaaaggtgagaaanactaaaatcagctttgtgcagagacgccaatttctgctgcacacatggaaacgatgtgcacatacagcaagctggcccagctcccggccacgtggctcacactgtccgtgctcacccacccgttgccttcacccccagcagcactggttgtgaaaagggtaactgcctgagccaccccaccactgcgggcctgccaaggacaggcaggaactcagccatgccccgcaaggagcccaggggcatctccagggacggctccccagcctatgggctcgctccctgagaggccgtgctcgggctcgcctgctcagctcactccgaaagcctctgctcagacctgcacccagtcacagcagcacagatgtgcaggaggagaccatttccacggaccctccgactcctaggaggcagtcccttagggactggccctaacaacaaatgaggagaagccaagttctctgctttctgcagacagggcctcccctggatgggatcttcctctgaggcgagcttcagatctgctcaagcttcctgcagtggggccaggaggcagggcctgggcaggggagaccagaacctctcggtgatgcctccgaatggcagggctcagacacacacacctggctgggtaagtccctgcagtgaaaaccgagacggtcttttgcctgccacagcaccgggcagactctgctctcaccgtggtgccgacatcccaagttttcagactcaccaggacccagtgacagcatctgggtcctcagagctgcatgcggactgtccccagttcagagcattggacagagctgggaactgacagccctgatcaatagtcccaagaggaaggccagccctcctcctcctcggaatcctgggtttctaggaggcagaaaggttttctgagaaacaaggcttttggaaggaaggtggtgcctggctgcatccagaaagtgagagctaaatggagaggctgaacaaaggacgcatgtggagcgcatggggagggaaggctggggtgcagggctccgggcctgctcttctgcgtccaccccggatcctgcttttgtccagatgggcctcggagcaccagtcacttactccaagaagtcgtttcctgtggccaataatgaagatgacgcactcggaagcttgtgggctctgaggagggggtaaggatgcaggggccatgcattcatcccagcacaggcagcgcatggctccngaagcagacacaggccaggccttggccangagtctgccaggagccaggagcgcctacaccttccctgagggccacacttctttccccagaagctcacacccaacgtctgaagtgcagggcccaggtgtgctggggtgacaaagccccnaactgtgttgaaggaaggggaggaagcccccgcttatagctggttctttgggctggattgcctgcctctggcttgtgccctaa

SEQ ID NO: 440035 - DNA, 1073 bp, Homo Sapiens
gtttaaatttctgaatccaacagttggtcacagaggtcaagtattatcaaggctcctttgtcagttctcaatcgtgtctgactcatccatccttcaagtacatgcaaggctcaatagttttccagaggcagatgcctggggccatttaagatacagatgaaataggattatgaggtgaacccatttgagtaagaactttatccagccactggagggggccgtgcagatgtatctcaatccagcagggggtgctagtaacatcctggcggtggtattctgctccccagcccttcacaaagctcatacgtatagtacacatttttgtaagctcatagactgtctcaaatccatggttcacagactgtgccaataactgagcaaattcttggttgttaaaaattttcagactacacccactagggatcttgcaaacagtagtaggatgaaatccatgatggtagttgcagttccgactttgcacaaagatgctactgtcactaaggcattcggcatacacctcccctccaacataataaagatgaactccttttccaattatgccgcctggtgttttcaatagtggaattccggttaacattggagagcagcccaaggcagaaacggttcttattgttaggaaggatcagtgaagaccatccaccgaaacacacttgatggaggaggcacttgaacgcttcaccccagcacgattgttgagcgtcactagtagacaatatgagcaccagtgttttggttcctcagtaagcccccgtctggtcttctcctctgttgatttctgagggcaggggaggcgccatcatgtttgtgtccatcggctgagagccatcctgggtcatggggtcttcagaaggcaggtaagcaggtgcgggcgtatcagctggcatctggaaagggcttcctgggtctacgctggtggcagagtgagggtaggtgctgctcctgctcccaggagagtttgggcagctgctattgctagagtgagcggacgggtggctgttgagtgctgcatagaatctttcaagggcgttagtgcatgtaggctctttttccta

SEQ ID NO: 440036 - DNA, 1615 bp, Homo Sapiens
  misc_feature (15)..(15): n is a, c, g, or t
  misc_feature (21)..(21): n is a, c, g, or t
  misc_feature (32)..(32): n is a, c, g, or t
  misc_feature (131)..(230): n is a, c, g, or t
  misc_feature (284)..(284): n is a, c, g, or t
  misc_feature (298)..(298): n is a, c, g, or t
  misc_feature (319)..(320): n is a, c, g, or t
  misc_feature (326)..(326): n is a, c, g, or t
  misc_feature (333)..(333): n is a, c, g, or t
  misc_feature (339)..(366): n is a, c, g, or t
  misc_feature (374)..(374): n is a, c, g, or t
  misc_feature (378)..(378): n is a, c, g, or t
  misc_feature (384)..(384): n is a, c, g, or t
  misc_feature (387)..(387): n is a, c, g, or t
  misc_feature (391)..(391): n is a, c, g, or t
  misc_feature (399)..(401): n is a, c, g, or t
  misc_feature (406)..(406): n is a, c, g, or t
  misc_feature (417)..(417): n is a, c, g, or t
  misc_feature (423)..(424): n is a, c, g, or t
  misc_feature (429)..(429): n is a, c, g, or t
  misc_feature (434)..(434): n is a, c, g, or t
  misc_feature (438)..(438): n is a, c, g, or t
  misc_feature (476)..(476): n is a, c, g, or t
  misc_feature (486)..(486): n is a, c, g, or t
  misc_feature (493)..(493): n is a, c, g, or t
  misc_feature (502)..(502): n is a, c, g, or t
  misc_feature (523)..(523): n is a, c, g, or t
  misc_feature (586)..(606): n is a, c, g, or t
  misc_feature (628)..(628): n is a, c, g, or t
  misc_feature (631)..(631): n is a, c, g, or t
  misc_feature (686)..(686): n is a, c, g, or t
  misc_feature (689)..(689): n is a, c, g, or t
  misc_feature (701)..(702): n is a, c, g, or t
  misc_feature (1363)..(1363): n is a, c, g, or t
  misc_feature (1391)..(1392): n is a, c, g, or t
ggcgtggagtgggcngtggcntgatcgcagtncactgcagcctcgacctcctggactcaggtgatcctcgccgacctcagcctcctaaatagctgggactataggcacacaccaccacgcttggctaattnnnnnnnnnnnnnnnnnnnnnnnnnnnnnnnnnnnnnnnnnnnnnnnnnnnnnnnnnnnnnnnnnnnnnnnnnnnnnnnnnnnnnnnnnnnnnnnnnnnngggacaaagaattttagctccaagagttctttaggcccatcacttctagagggngggcagatattaanggggtgagcgggaaagggggnnattganaacaatnaacatnnnnnnnnnnnnnnnnnnnnnnnnnnnntgatgcgnggcnattggncangagncagcccgnnnaagcncaataacaacnctaagnnctttnatccncatnggacagagaaggaaacggagacccacgggggggaaggnaagggccganggggacncagccaggnaacgcgaaggcgagaccggancgcagaggggccagccgccaaaggcttccagacgtcgaaccggaaggccaatagagagcaaannnnnnnnnnnnnnnnnnnnncgcacgagcataacagcattgngcnggccatattctagcaagtgattttcaaatatgaagtgacagagataacatacaanggncaggcaattttnngcaaatgctcttacaggtgtactagggcagagccttaaaaccaatgactccttctaaacatggagttcagacattcaaatacctttacctagtaaagttctaatagaaaaggagttattttagggctagtataagtccatccatgtattcccagtgtccactgtgctcgacgtagtaagtgtgggatcaatgtctagtgaccggttagatgacccgcatagtggatcttttcaaatctcacatggaggatctcatacaaaaacattaagaacattaaagcaagccctgacaataatttttaaaaaataacagtctatttccagggtaaacaattactttgtcacgccgctgcttaggggctcggagaacctgcttctgatgtgggtccaggttgaggaacacttcgccacttgagaacgcaaataaagtccagaaatccaggaccacagcaatactccagcccagggttgcagggcagcctctttaccagccgggcgacccatttctatcttggcgccggcgaagcgccggtttggggcggggaccgctctcagcctgaacagtgggtgggcccgcaatgacaatgcaggaattccgcgcaggccgcagggtttggggacctgtctgaagggtgggagggagcactttttacctgcacacncaactcccctggcgcagcccagggccgnngatgagcggaaggaaagcacttcatactgtcagacactgggcttcattgagataaaaggggccacccccgcggccgcgacgctcaggcctttaaggccggccaggaggcagcccgcgccagcccgtttggctggttcataatcctggccggcccggggcccgccccgaggcccgcccgtttcggggctgaaacccaataccggttccgcggttccccacaccg

SEQ ID NO: 440037 - DNA, 1637 bp, Homo Sapiens
  misc_feature (1183)..(1183): n is a, c, g, or t
  misc_feature (1187)..(1187): n is a, c, g, or t
  misc_feature (1262)..(1262): n is a, c, g, or t
  misc_feature (1264)..(1264): n is a, c, g, or t
  misc_feature (1274)..(1274): n is a, c, g, or t
  misc_feature (1297)..(1297): n is a, c, g, or t
  misc_feature (1338)..(1338): n is a, c, g, or t
  misc_feature (1349)..(1349): n is a, c, g, or t
  misc_feature (1355)..(1355): n is a, c, g, or t
  misc_feature (1365)..(1365): n is a, c, g, or t
  misc_feature (1393)..(1393): n is a, c, g, or t
  misc_feature (1422)..(1422): n is a, c, g, or t
  misc_feature (1438)..(1438): n is a, c, g, or t
  misc_feature (1482)..(1482): n is a, c, g, or t
  misc_feature (1485)..(1485): n is a, c, g, or t
  misc_feature (1488)..(1493): n is a, c, g, or t
  misc_feature (1495)..(1495): n is a, c, g, or t
  misc_feature (1510)..(1510): n is a, c, g, or t
  misc_feature (1513)..(1513): n is a, c, g, or t
  misc_feature (1522)..(1522): n is a, c, g, or t
  misc_feature (1529)..(1529): n is a, c, g, or t
  misc_feature (1535)..(1535): n is a, c, g, or t
  misc_feature (1539)..(1539): n is a, c, g, or t
  misc_feature (1545)..(1545): n is a, c, g, or t
  misc_feature (1552)..(1552): n is a, c, g, or t
  misc_feature (1567)..(1567): n is a, c, g, or t
  misc_feature (1569)..(1569): n is a, c, g, or t
  misc_feature (1574)..(1574): n is a, c, g, or t
  misc_feature (1583)..(1583): n is a, c, g, or t
  misc_feature (1591)..(1591): n is a, c, g, or t
  misc_feature (1594)..(1596): n is a, c, g, or t
  misc_feature (1599)..(1599): n is a, c, g, or t
  misc_feature (1620)..(1620): n is a, c, g, or t
  misc_feature (1625)..(1625): n is a, c, g, or t
  misc_feature (1632)..(1632): n is a, c, g, or t
ctaaagcccctaccttttaaagggggcagaagaaaatggttcaggggacccttgggttaagtctggcctatgttctgtgaaggtgactttggccaaagcgtgtccctcagcaatgttccccctgacacccactgtgcagtcctcgctaccccacttagcagggtaccagttggggccttcactttctcccccctgctctttccctctctgagggctctgacattgggtgacactgaggtcttagggcttaggagtcctgaaaagggcctatatcgtctgcatcttggctctgaaccctgaggtccaaggctgaaaggaattgtgagcagggcagggtctgagttctggctctgtcttcaccctattgggctggtgaggcccagggagggtgggagcccagtcactggtccaagccaccaattggaccatgtgatcatgaggcccagagagaatgtgggtggcataaaagccacagagcaagccaggagcagagccagggctggacagcaccccaccctcccctgccactgttcctcccaccaggcgcttcccaactgcctgcgggatctggactaaacggagcccagggtttaagcaccccatattgaggaccggggcctccaggttacttgtgccagttatgagggtaggactgggatcctggttcacagtgactgctatgacccctgccctgcctcacccctgcagggagccccccagtccctgaggcccacagccctggatttgacggggccagctttatcggaggtgtcgtgctggtgttgagcctacaggcggtggctttctttgtgctgcacttcctcaaggccaaggacagcacctaccagacgctgtgagtacctggccagcagcaagtacctagtcccagctcacctcctggttcctgccccaccgttccccttcagtacccagggtgctgtcttctccatgggcaagccctcaggacggtgacagcgtgctccatgtgagccacaccccttttgtctcctccagttggggtgtttcctttgtcagatgttggctgggaccaggactcagcctgggccagtctaagagcccagctgagccctcctgtgtcttttcccttcatgctgccagcagggaagagaaccagtaggtgccagcccaagcaagcctgtggcccgcgtttctgtggctgtgngcangagctggaccttgtgtctagttgggttttgctctgagaaggggagctgtgcctgaggccctctgtgtgccgtgtntnctgtggggcngatcgccacagcctgtgttaaantgtttgctcttcctctgctgcctcctctcgaggcagggggnccttggctggntgaggnagtgtcaccntcctgagtgtcctctttggcctctgcanaatctgacccctttgggcctggactccancctgaggggaaaggangatgcagagggtggcctctgggcacccttgtgggtaaacagggnccnggnnnnnnanaaaccctggcccccnccntttggcccngcgggcnccaagnaggntcagtntctgatncctgacatctcctcntntcctntgcctggancctgcagnttnnnaantgcgtgaaccacctcgtctcntccgncgccccnggtgg

SEQ ID NO: 440038 - DNA, 2237 bp, Homo Sapiens
  misc_feature (1851)..(1851): n is a, c, g, or t
  misc_feature (2104)..(2104): n is a, c, g, or t
  misc_feature (2129)..(2129): n is a, c, g, or t
  misc_feature (2215)..(2215): n is a, c, g, or t
tgcacaacaaaaggaggaacgggccccttgtagaggggcttttgggggtcccacggaaatatattctgaaaaaaagccaagaactttcgagccatccgcccgttcacggggaagaaggtgggtggtaactccgcactgtaattgtgacccagaaagcgtgtgcctgcagccaaggctgggattaaatgccaggtcagtggttcgcatgtcctttccaatgtggctgctcccagggatggctgtgggaacatggcaggacgccattgaatttaatccaatccgggtccggactcattacctccacgccattatgaagctggagctggagagcaagcggcaggtgagccgcccagcagccccagatgaggagccctccccgactgccagttgcagcctgacaggagcacagggctctgagacccaggacttccaggagttcattgctgagaatgagacagcagtgatgcacctgcagagtgcagaggaactggagcggctcaaggcagaagaagattccagcggctctagtgccagcctggactcgagcatcgagagcctgggtgtgtgcatcctagaggagcctctggctgtccccgaagagctgtgcccaggccttacagcccccattctcatccaggctcagctgcccccaggctcctctgtcctgtgttttaccgagaactcagaccacccaactgcctcaacggtgaacagcccatcctacttgaacagtgggcccctggtctattatcaagtggagcagaggccagtcttgggagtgaaaggagagcctggtacggaagaaggctcagcctctttcccaaaggagaaggatctgaatgtcttctctctccctgttacctcactcgtggcttgtagctccacagacccagctgccctctgtaaatcagaggtggggaaaacacccaccctagaagctctattgcccgaagattgtaaccctgaggagcctgaaaatgaagacttccacccttcctggtccccctcaagcctccccttccgcacggacaatgaagagggctgtgggatggtgaagacctcccagcagaatgaggatcggccccctgaagattcttccttagaactccctctggcagtgtgacaggcgctagaggtcctgcctcttacccattctctatttattcccttattttatctaacaccatttcaaaacaaaactgtagaagcagctgctgctcccatgttattttattggggtctttggggaatgggtgggaaaggattgtttgagtattttttaaaagggaaacagtaccaaggagaccagccctaccttgatctggggatagtcttggggcaaagaaagctgcgtagtgctgaacattaagctttctgggccactggaacaaagaactaggatctcacaggaaaagctgggtaactcaagcagctattctttctgtagggaccagaacacgagaatttgaagagcatggcaaagccctttctctcccaagccccaggcagagtacaagctcatttttctcggtggttattctgatatcccattttggtgtgtcataatacttcaaactggaaagtcacctggtcgagtctagggaggagggagtggaagggtctctgcttctgtacaaaatctccaggatttacaaaaatgtaacctgccttccttcaatcccatatttggtaaataagttaatatttgacatgtttggtgttctctgacctgttccccacactggggattcctggtctgtaacttgaattgtttcttccacatgttcttaagtactagagttaaacttgtctatgtgtcttttttctctccatcctttttccttcggaganagagctggattggctggggatatggtataacgagcctgagccttctgtacgtgtctgacactagcactgtcaggcagctttcggctggggctcacccatcccataggaggcctatgtggagcattaactgtggccaaaggaggcagcgggaacaggctgcttgctatctggaaagatgacatatttgtgccatgcttgttttttttcacccaggtttttccctctttgtgagatctgagctttagtgggaatnttagaatgttgggcaatcttaaggntcaccaatcagtttttggttcttttttcccgggatctaccctcatgggtcgtttttcaacataggcgggttaggagttcttataantgtttccagttcaattccaaga

SEQ ID NO: 440039 - DNA, 1316 bp, Homo Sapiens
  misc_feature (20)..(20): n is a, c, g, or t
  misc_feature (22)..(22): n is a, c, g, or t
  misc_feature (28)..(28): n is a, c, g, or t
  misc_feature (35)..(35): n is a, c, g, or t
  misc_feature (37)..(37): n is a, c, g, or t
  misc_feature (51)..(51): n is a, c, g, or t
  misc_feature (54)..(54): n is a, c, g, or t
  misc_feature (57)..(57): n is a, c, g, or t
  misc_feature (60)..(60): n is a, c, g, or t
  misc_feature (64)..(64): n is a, c, g, or t
  misc_feature (73)..(73): n is a, c, g, or t
  misc_feature (81)..(81): n is a, c, g, or t
  misc_feature (84)..(84): n is a, c, g, or t
  misc_feature (87)..(87): n is a, c, g, or t
  misc_feature (91)..(91): n is a, c, g, or t
  misc_feature (94)..(94): n is a, c, g, or t
  misc_feature (98)..(122): n is a, c, g, or t
  misc_feature (126)..(126): n is a, c, g, or t
  misc_feature (173)..(173): n is a, c, g, or t
  misc_feature (187)..(187): n is a, c, g, or t
  misc_feature (200)..(200): n is a, c, g, or t
  misc_feature (244)..(244): n is a, c, g, or t
  misc_feature (246)..(247): n is a, c, g, or t
  misc_feature (252)..(252): n is a, c, g, or t
  misc_feature (254)..(254): n is a, c, g, or t
  misc_feature (283)..(283): n is a, c, g, or t
  misc_feature (285)..(285): n is a, c, g, or t
  misc_feature (290)..(290): n is a, c, g, or t
  misc_feature (300)..(300): n is a, c, g, or t
  misc_feature (320)..(320): n is a, c, g, or t
cagctcatgaggcaacccananaggcangctgganantagtgtgtaaaaanctnacnttnggantatttagtnaacaaagnaanatntatngcncccnnnnnnnnnnnnnnnnnnnnnnnnntaanaaatccagaatttgcaggggaagtgaaaatgtaataatgtgatgaantaaaaggaatcctnatctctggaagcngggaggaataaaaagtcggtgtaaaaagcagcggcagggacaananntgacnanaaggctgggtcccagaaaaaattaaaganangcagnagctgaggcnccttctctgaaaactatttnaattgcacagtggccatagaaggctccatttgcatggtaatatctctgcagacaatttgtccacaatgaaaataatagcaccggcatcattgctttgggctgcagggaggacaatgacccaccattaaaagagttaaaaagattgtggggaaggggaaaggcgggcccacacggtggcaattcaagatcttttggatgccgtgagcgtgttctttaattaaagcccctttttttcagctcatcctgcagaaacgcacctgcttcccatctgccatccaaaacggcaagcccaagaatgacttcacactgtcactttcagagttccgctgtggcccacagtgattttcaagaaaggcagccacagactcgctcgcgctttctctttctcctttcctctgaaagactctataaaaaccacattaaaaagtgtgtgagccaagcaatttcatttatcaaaggaagaaggtcatccatagcattcattctaagaatatcaggcacacggccagccctggacacaaggcatgaagaccagagggccctttattgacctaatctctattttgtcgccaaactgcatctgtgtctgaaagctgggacacacaatatttccctctaccaaaataattttattttctgcagcagcatgtaacaaacaattaatggtggtaacatgggcttctgtcattttctgaacaacccagttctgtttggtgttactgcagtggttgttattttgggtggttctgtgcttattccattctgccaattggtcccattcgcatgggcgtgagcccgtgccgtcatctaccaccttggaatccatgttattgccagaactgtgtggggccttgcttgagggcctgtcccctgtcctcttcacagatgtttctgtgccttcagggagaggactgattgtgctgtctccctctcccacccgtgtctgctgtctccaaaactaagggaggctcgggtcaaccagcctggcccatggtc

SEQ ID NO: 440040 - DNA, 1476 bp, Homo Sapiens
  misc_feature (91)..(107): n is a, c, g, or t
  misc_feature (110)..(204): n is a, c, g, or t
  misc_feature (867)..(867): n is a, c, g, or t
  misc_feature (1332)..(1378): n is a, c, g, or t
ccaccctcaagcctccccagtagctgggacaccagaggtacataaccgcacctggttaatttcttttatttttattttggtagagacggcnnnnnnnnnnnnnnnnnacnnnnnnnnnnnnnnnnnnnnnnnnnnnnnnnnnnnnnnnnnnnnnnnnnnnnnnnnnnnnnnnnnnnnnnnnnnnnnnnnnnnnnnnnnnnnnnnatcacgcactttttcacaagccatacacagagtggccaacacagactgacactcactgtgtctgtcccacccaggccccctatgtgcctctcatgacacctgcccacaccacctctcagtgtacatcagtcatcagtctcactctctctcacacagaatctacttctgtgacacacacagcaccgtatgctcaccatgttgcacacagccacacacactgccccctcacacgcaccgtcacacacggtctctcactcccacatacggtctctcaatgtcccatacagagccccaaagagtgtctctcccacacccgatcacacataacctttcatcagcacacacagtcacccacaatctctcagcatcaccagtaatctcagtgtcacacacagtcagcgacatgtcatctctgacatatgcagtcccactcagtctctccttgtcgcacataatctcatatcaatcagtcacacacagactcccagcaccacacaccatctcaccagtacaccatcatggcagtacacactcatggtgtcctggttctggcactgcacaccatctcacggcagtcgacactcacacaagtttcctggcgttgtacaccatctcacagcagttcacacttacagaatctccctggagtcacacaccatcacnggcagtacacaactcacacactctccagatgtctcacgccgtctcccggcagtacacactcacacagcctccaggtgtcacacgccatttcccagtgtcaccgcgaacaccagcgtcccccgctccccagcactccccttttggcgctcacacgcagcgtctgccggccacatgagggcgcgcgcagcacgcccaggcgcccaccctgccccgagaggccgcagggaggaggtggccacagggaggagggccaggcgggagatgaaggggagactcgggaccagaggaagcacggcagggagccagggaccggagggagaggacagaagatggacacagagaaattcacagacaggggagggagatgcagggagagtcagagagacgcagggggctttagggacacagatttagagaaggagcgagctagggactcagagagacagagacggggagggcgctgcnnnnnnnnnnnnnnnnnnnnnnnnnnnnnnnnnnnnnnnnnnnnnnnggggtaggagagagacacccaagccgaaactcagagacagggacgaagacgcagacacacagagatggaggcagaggcggccagagagacaaagagat

SEQ ID NO: 440041 - DNA, 2142 bp, Homo Sapiens
  misc_feature (32)..(32): n is a, c, g, or t
acaggtatcgcttgggggctggatttttggtntcgtagacatgggtaacaacgtttattaaaatctggccattttctacatctcaaagaggagataacccaccagaggcttaggtaacataattgtgtttaacgtaaatatacacagataccaataggcggttaagccatgggacagggccgcagatggagactgctcaaggtcaaaggggtctccagctgggaccctgcacctggttcgtagcccctctgcagacgcacagtgcctcacgcctgctgcaacctggaaccttgaggccttcatgtcagtgcaggacaagagtcatgtctgtccatagattggggctggaaaggactttctgccactggagcttcgattgtgagcatgcatccccgccaacagctgtgtctccctttgaaccaagtctggttcctccaagcaagcggtcgttcattccaaagagggcctgatcccagacagttaactccaagcttgactgcctcagctgagctggggttacgccactgaaagacaaatgagtgtttccactggggggcaagcgtgctttctcaaggactggggacttcagtctcagtttttgttggtctggcagagctgagacagcccttaacaaatgagttcaaggtgccatctggccgcacaggtaaattcttggctcctagcactaccaaacaaagttgaccatgaagtgatggctgatctgtcccttcttgagcctcttggagttttctgggccgtgaagggagaaccagcttagcccggactgtgagctctccattactctgaggaacgctgtcttcgtatttctccgccttggcccggagcggatgccagcggaaggactgtgttgtgctgtcttcaaagtcccacgtggccagagaaatgatcacttctccaagaaacactctccgggccagcgtgcccagatgccacaccgagacctgcagctgccgggtcaccagctgggcaggggccacctgatacttcaaggtctcctgaaaggtcgggtccacggtgttcctttggactccagtcttgcgctttccctgggaggatctgtcgggcaacaggtaggtcttcacatacggattgcactttttcttcttttcttctccataggcaaggttcttacaggccttgatgcatatttctaaagaatgggttttgaagcaataatgaatggcaaattctatttctccagtgacattagcattgtcaaaattgcccatctctgtacaggtgctgtcaatgctaattaaacttccgtgtctaaaacctccagagaatatggtactgggtgccggactggatgggagattctgttgcttcaaaatagggttagtagagcatttgggatcctcttgattgagaggtttcagaatatttggtgcactgaccttcctgccaggactgcggctgcactggctctcgctgaacaggaggtggaagtaggaggaaccccagaaattttgttcagcttctgataagattgcaagagctgccctccaactgtctcatgtttgcctccagttggaaatttcttggctcgttcctcatagaaccattctccagtttttattttgacattcctgtcctcgaagcacaccgtgcacttccaggcatgggtccccctcaggaacactcggcactgggcacacacgcggtggctgcagccccggcacacggcgccccggtgcagcaggaaccccagcacctgctggcagcgcgcacagcacttctctttgtgctcccagtccgtgttcttcgctcctttccaccggagatgctgcaggtgtgttttcagtttccgtgtcctctcctcctctgtgttttgaaccgcctggtctcggtacaggacctggagaatggcctcgcgttctaactccttgagagcactcagatctatttcttgggccatttcttctccgttttcgttgacccaggttggaagagcttcactgcatggaccaagcgctcacgcccttccatttaagatgtttccaggtcagcaggaaccatcatgaaaagctcagcccgttcaatacctggctgggctggtacctgactatgccagcaggggcaacgcctcttccctccttagatccaggttccagatgaaca

SEQ ID NO: 440042 - DNA, 1227 bp, Homo Sapiens
  misc_feature (270)..(270): n is a, c, g, or t
  misc_feature (307)..(307): n is a, c, g, or t
ttttaagcccaacggtttttcagattgcaggatagttctccccagatcattggaaatttctggcttgcctaacttgtttccaaatagtttaaggcctatttaaatttctactccccaatttgatcatcccaacacacacaaatcccttgaatatcatgccagtgttcttaggtcaatttaccctaaaagtgaatacagcccattctcaattatccttcacaaatagacgcaggaatgctactaggaattggaatcaaacaatgccacccnaagcgtaattttagccagcagtttcagttatactcanccatgcccttctgagctgttaacaagtgattcaatggacaagttctctttttgttccatctccattatttcctgctctaatgtatagtgggagtggttgtgtaatgaaaggaccaccaaaataataaaaggcagctaatggaaaggagagacaaaagcatggttaatatatatacttaatattacctccaatgactcgggaattgcctgtaaattattatagacaatagattgcatgtcatactccatttggttcaacacaacaacctatgtgttatcattacagctttggctgctgttaaagaatccagctctctattttgataaagataatcttaaagctgaggcaatgctccctcctctatctctctctgtgtaatttaccatagaattaggatgattagattgaaacacatgttgtatgttttaaaaactacattgcttcattactttcattttccgacaacatcaaactaacaagaggcagtgttaaatattttaaatggtgctatagccaatgtatttgaatgcttgcactgctggttgtgtatcatcaatatgaactttttatccaatgactcaactctaattacatctaagttagacttgctcacgttcagtttgtacagttgtgtgttgacttactatgttttgaaagtggtgacttctaccgaatgagtggaagttcccattgtcaaaaaaaataaagacctgcttgcagtattcatgttgacaacagagtaaaagagaatactgtaaagaattactgcaaatatttcctgtttatgttatttgccgttgtttgaagatattataaagggttaattgtatatttatatcatgtgctttatcgttttcccctcatgtatccaagtaatttttatttacatacaactaaataaatgttgtcctctttgaaga

SEQ ID NO: 440043 - DNA, 2632 bp, Homo Sapiens
  misc_feature (345)..(345): n is a, c, g, or t
  misc_feature (361)..(361): n is a, c, g, or t
  misc_feature (461)..(461): n is a, c, g, or t
  misc_feature (482)..(482): n is a, c, g, or t
  misc_feature (490)..(490): n is a, c, g, or t
  misc_feature (540)..(592): n is a, c, g, or t
  misc_feature (2118)..(2118): n is a, c, g, or t
tttttacggtagggggcaggggttacctttaatgctccattttgtgccaaatcccccatgatgccctgtccctgagtatccctgcccaccctccccccagtgcagggtgggcacagggctccaccccctggggtacaaaggaataagttaagtgtcccccccctccctccttccccaataaatagagtgaacatcctgcccagggcctcccccaccttgtggcatggcgggctggggcagggcctggggcgctacattcatggctgcccaggcgggcggtggtgggcaggccttagtgggagccgtgggccccgcacaggggcactgtgctgtcttggttctgcncctccatgtccatgtncagcagtgtgggctgcacgctggggggcccagggctctccggagtgtctggcctgctgggaggcgagatggtgagtgtccggccgaagagaccagtttcnaggggtccaagcgggggcgantggcagcnggccgaggtctcggggcaaaggttagggtggtggggcggcctgggaactnnnnnnnnnnnnnnnnnnnnnnnnnnnnnnnnnnnnnnnnnnnnnnnnnnnnnaagtccagaaggtcacgagggccagggccatggccgcgggctcgggcggcccccgctgccccagcgccccgtccgatggcgtccgccggtgcccgcggctcacagcgcatgcagccgtgacgtgggtgggcgtgagcgactggcgggggtccttcttgaagctctccagctccaggtccaccagggggttggtgctgggcgagggcgtgggtgtgggcgcgggcggggagggtggtggggagggcgcggccggtgcggcctcgtcactgtcagagcgcagcagatgaacgcgtggagttgcagtcggacacggacgacagcgacacgagggtggccgagggcgccaggcccaggccggggcccacgtcttcgcggcggccgtggggacgcgcgggtgggctgaggccccgcgggaagcggccggcgcggggaaagaagaggccgtcgagccagcgccgctgctcctcaccgtcggccgcgcgcgcctcggccacgtcggcgcccaggcccacagcccccagcagcgtggcgcagcctagcagcgccaggtcgcagcgccgccgggcgccgtgtccccaccgagcggggggcgcggacggcgtcggctcccacggcgcccgcgcccccggggagggctcggcaggcagtggcactgagaggtaggacggggtcgagtagggggaagggggcacgctgctgcctccatcctctgcctccgcgaactcctccatctcattgaggctggcgaagccaggggcgatgggtgtgtgtttgggggacttgcccaggttgggggcacttgatgaccactgtttgcttccttcccccagccccttcagcctctcctctcctcccacccgctccttctgcagggtggagctgggcccccacgttcgtcccttcttcttgcccccgaccagttcttccttctttgggggcccaccgcggctccatgtcccacttcctccactgctgctgccactgctgctgccaccacagtccacgggagtcaggcgaatggccctcagccgggggatgatgctggggcttgcaggggggctggccccatcggatcctttccgcttatccagagttggagaggcctggactgtgatcttatgctcaaagccttctccttggtccgaaggtcatcaaacatgtgctgaatctccagcttccagtcttcctgcagcgagtggaaggactccagtggcatctggaacagggctgactgttcgatgacttcaagccgcttcaagatgctaccgaaatctggccgcccgtgggggtctgggtcccagcattcctccaggaggcgggcaaagggctcggggcacgtggagggaatgggcagcgtcagcttattcatagccacgccatacgccacggccaaggcgtcgatctcacggtaggggacctccccggtcagcagctcccacagcagcacccggaagttccaggacatcgctgcttttggagaagagggagagacggataacctccggtgccatccaggcgtaggtccnccgcagcgctcatcttggtggtcttgtgccacttgcgggcgaggccggaagtccgtgatcttgagcaccgtgtctgcgaggttgtggttctcgatggcctccaggatcaggatgttgatggacttgaggtcccggtggatgatgggcacaggggcatcattgtgtaggtagttcatgccccgggccacctgcacagcccagttgaccagcacgtgaggtggcacccggcgacctgccagcaccctgctcagtgcaccaccccgggcatactccatcactaggcagaggtgtggggggttgaggcaggcgcccctaagggcaattatgttggggtgctgcagggctccaaagagccgggcttcctggcacacctgctccgctgtcactgccgggtccttctcagggtccagccgggcggccttgactgccacctcctcgatcccgggaattccggaccggtaccagctgttctttttgcggtccgtggtgtcggtgagaaagcaccatcattttt

SEQ ID NO: 440044 - DNA, 1157 bp, Homo Sapiens
  misc_feature (270)..(306): n is a, c, g, or t
ggaggggagggagtgacgaaaaaaacgggaggaaaaaattgaaggatataggaggatgtgagagaaaggtgggtagggcggggaaaaaggggaatggaggcgcacccccggggaggggatttggcagggcaagtggccgttaagggggtagcagcgggtttgaaattggggaaggggggacaaggtaggggccttgcatcgtgggccttccggagatctcctcccatctcatggaagttggcaaaaaccagggggcagtggatgtatttnnnnnnnnnnnnnnnnnnnnnnnnnnnnnnnnnnnnncacctgttggttcccttcccccagccccgttcagctttccgtgtcctcgcacccggtcgttatgcagggtggagctgggcccccgcgttcggtccggtcttctggcccgcgggccagtttttccttcttgggggggcccccggcggttccatgtcccacttcctcccgtgctgttgccaattgctgctgccaccacagtccacgggagtcaggcgaatggccctcagccgggggatgatgctgggggcttgcaggggggctggccccatcggatcctttccgcttatccagagttggagaggcctggactgtgatcttatgctcaaagccagagggcaggctgatgtggctgccgccttcccgcagcttgagcaggcggctgcgcttgaagttgcccttgcgcttgcggacccggggcttctcctggctcagctggcacatgagcaggtgcagctcccgttccacgatgtccatctcacgttctgccagctcctgctcccgccgccgcagctgctcctcctggaagcgctgctcctgtgccgcccgcagcagctcctcctcacggctccgaagctccttctccttggtccgaaggtcatcaaacatgtgctgaatctccagcttccagtcttcctgcagcgagtggaaggactccagtggcatctggaacagggctgactgttcgatgacttcaagccgcttcaagatgctaccgaaatctggccgcccgtgggggtctgggtcccagcattcctccaggaggcgggcaaagggctcggggcacgtggagggaatgggcagcgtcagcttattcatagccacgccatacgccatcccgggaattccggacc

SEQ ID NO: 440045 - DNA, 1701 bp, Homo Sapiens
  misc_feature (408)..(443): n is a, c, g, or t
  misc_feature (1425)..(1628): n is a, c, g, or t
  misc_feature (1648)..(1648): n is a, c, g, or t
tatgtatagttttcacatttactcccttctagacatacctgtacttatgtacttacaggctgttccaaatgtaatatgttctctaccaaatgtggttaagaaatattcactcacaatttctttctgtgtacaattctgatgcctctgttgtcactgtaattgtcagttgcttttctgttttccaaatgtcttcttgtcataaggtatctgactttaaaaaatgttttcccttttctttttattcttctgtattttccagctgcatgtgtgtgactatggcttttacatatttgcacagaaaaataaaacctttgtttctgtatcttctctttctcatcttctaatggtacttgtacttgtttgccttgactatgtcttgtatgataaaatttccaccagccatgcatnnnnnnnnnnnnnnnnnnnnnnnnnnnnnnnnnnnngaagtactagtactgatcttcctgaatcgtgatctctttctgtgaaagtgtcactgtgagtaaacactgtggtatccaagtaaagttgcatgtactctggcaagtaatcctctagttggcattctaaagttgattacaaccctaattgttcttattattggtttacattgtccctgccaaagctagccatagttcaacctggttctaaagaggggctgttttacctaaatgacagaaatttacactaactcctctggaccaagcttctaaaacatagcctatatttacttgaataaaaactaattccattttgctgcgtttttcagatttaacattaaactaaacagggctatgtctctatgtttggccatgcctccttttttgtgtgcgtacgtggcaagtgggtttttatcaccctcccttttgcaaaataggaaaatagagagaataggcaaatttggaaaaatcagtttttgaggaggagagacaactaagttcaattaacaccactgaggacttactctatgccaggaactgtgataagcctttttaaatactttatcttttcaattatcttttttcaatacaaggtcaaccaaaatctttttatcttccaaattcttcactaaattttcttaaaatatcttttggccatttgtaggtttaaaaatagaaactgttaagctttaattttgcaatattaaaattaaacttcttctgcaaatggtgctgcataaaatttgagtttagtgagttaggcaggaaatcagtgaagaaatctgtttctcaactgccagtattattactaatataaactattttacttctctgcttttgtacttattcaacaaatgtttaatgtatgtttactatttgtcatactgtatactaggtgtctgggaatagaactatgatttagacacaatgcttgctcaaaataagctgaagttatggttaaggaatgtgggttaagctggggtgnnnnnnnnnnnnnnnnnnnnnnnnnnnnnnnnnnnnnnnnnnnnnnnnnnnnnnnnnnnnnnnnnnnnnnnnnnnnnnnnnnnnnnnnnnnnnnnnnnnnnnnnnnnnnnnnnnnnnnnnnnnnnnnnnnnnnnnnnnnnnnnnnnnnnnnnnnnnnnnnnnnnnnnnnnnnnnnnnnnnnnnnnnnnnnnnnnnnnnnnnnnngggggctctccatgcgcttntttcttcccctttccctttcattctcggtgcaaaggggcccttttttttaaat

SEQ ID NO: 440046 - DNA, 1679 bp, Homo Sapiens
  misc_feature (101)..(116): n is a, c, g, or t
  misc_feature (139)..(195): n is a, c, g, or t
  misc_feature (477)..(477): n is a, c, g, or t
  misc_feature (491)..(491): n is a, c, g, or t
  misc_feature (498)..(498): n is a, c, g, or t
  misc_feature (521)..(521): n is a, c, g, or t
  misc_feature (560)..(560): n is a, c, g, or t
  misc_feature (562)..(562): n is a, c, g, or t
  misc_feature (568)..(568): n is a, c, g, or t
  misc_feature (574)..(574): n is a, c, g, or t
  misc_feature (579)..(579): n is a, c, g, or t
  misc_feature (583)..(584): n is a, c, g, or t
  misc_feature (586)..(586): n is a, c, g, or t
  misc_feature (595)..(595): n is a, c, g, or t
  misc_feature (598)..(598): n is a, c, g, or t
  misc_feature (600)..(600): n is a, c, g, or t
  misc_feature (602)..(602): n is a, c, g, or t
  misc_feature (604)..(605): n is a, c, g, or t
  misc_feature (607)..(608): n is a, c, g, or t
  misc_feature (612)..(612): n is a, c, g, or t
  misc_feature (657)..(658): n is a, c, g, or t
  misc_feature (662)..(662): n is a, c, g, or t
  misc_feature (672)..(672): n is a, c, g, or t
  misc_feature (680)..(680): n is a, c, g, or t
  misc_feature (686)..(686): n is a, c, g, or t
  misc_feature (1046)..(1233): n is a, c, g, or t
  misc_feature (1475)..(1485): n is a, c, g, or t
aaacttcctttttccttagtacatccttggtctgcatatgggtttgataacccatttttgataattctaggaccctgccactcatagaattagagtcttcnnnnnnnnnnnnnnnnaatttgagacagggccttgttcnnnnnnnnnnnnnnnnnnnnnnnnnnnnnnnnnnnnnnnnnnnnnnnnnnnnnnnnntgggctcaaccaatccacccgcctcagcctcctgaatagctaggactactgatctgcaccaccacacgtagctgaattataatcattcttgggtttacttggtgcaaagtgaagtgtagagaccttaaataatttggtcatttgagccaaatgccaatttcctccttctgccttgccctctttttccctaagaaatttggcagtgtataccgaactgtttgcttaattctgttcctggatctacaaagttaaagcgaggcccatggattactcaagcaagtnacatcctttgagtnatctgantctgtgtctgttttctgactgantaagatgcagagacctggctaaatattcaagttagccangnctagancagacnggtcntggnntnctctttganctntngncnngnntggncgtggcgtgtgtgatctatgtccttcctcttgcttgggtagccanntccngttttctacntataacantctaanggtaagacagacaataggctagatttaagataggcccatacaaggatctcagcaaggatcagaatgtgttatttctgtacccattgtagtgatgtccttgctgtcaaagctacagaagatcaagaataagtcttcaaatgcaagtctgtactactgaatgaacaactttaaactaagatgagggacttattttctttttgacttgagcaaaaggctgtcacccttgttgttctgtttctgttgtaccctaccaagtaaggaggataataatggcgtaaacatatctccttgtcactagttaatcatgtccaagctcttggatgaatcccactttattttatatatttttttgaggtggannnnnnnnnnnnnnnnnnnnnnnnnnnnnnnnnnnnnnnnnnnnnnnnnnnnnnnnnnnnnnnnnnnnnnnnnnnnnnnnnnnnnnnnnnnnnnnnnnnnnnnnnnnnnnnnnnnnnnnnnnnnnnnnnnnnnnnnnnnnnnnnnnnnnnnnnnnnnnnnnnnnnnnnnnnnnnnnnnnnnnnnnnnnaaatcccactttataagttcgaagagatagacaaaaatataagtggagtcatactctatgcaaactaggtttcctggcgagcatctcacaaaatattgagtgaatagataaggaagtaaggtgttaaatctggtgacatactcacagctcgtaggtttgaactcttatttggctaaaatagtactggccagccatgttttgccccccattcacttactgggtgcagagaatgttaaccttgnnnnnnnnnnnaaacaaaggaaaaagagttcctttgcatgaaaaatgacacttttaaatatcaaacccattgctttggcttcctcttattgagaacatagggactgaaaagcctaaattctgcctttggtttcaacaatgggaacctttttttccttttgtacaagatattaaaatgggctctttataagcccaagtgagatgga

SEQ ID NO: 440047 - DNA, 2037 bp, Homo Sapiens
ttccagttgcctcgttttatagaaaaacaggcccagggaactactagggcttatccaaatgtacagtttgaggcagagttaggaatggaacccagggcctcctggcgctgtccagagtggagtttcttaggacccctgcaagccagccaagtccaaatctctgggccggggcctggagtccgccctcctcgttacctcctctcctctcggggtgactgaagctcgtggtgcagagctcccagctcctgtcaatgggggcccctgggcctgaacatatagagacccccatttaggtgaacttggcctgcccccccaagtgccaccctgccccagcctgaggcttcctgcagtgtgacccgcccacctcagccaccaggactttctttctccctttattgcctttctcattctgcccctcacaacaggctcctcagctagggtagctgcagggagggtggctccctcctgctcctcagaaggtgtaggcccctacaaagacggtgagcctcagtacagagctggcccggtagctcatgagggaattcatggtgaccatctccaggtccagcacgtactcccgggggcccgtcaccggccgggcgaggaccagcatggcgctgacgttgttgatttgcctaatgtaaaagtccccctgcgagtttccagcacggatctgaaaggcattgtaggcaccggggtagacggaggtcgcctggatctggaacacgtcagcgggcacgctccgctccgaggtgatggtcatgtagcggtgcacaatggatgaaggctgctctcgacatagagggttggaggccgggcagagacagcggttctcagagacctggatgtagggctccacgcagcggttggtgtccacgcagcggtagcccccatggaagttgacacaggtttgggcctcggagcactggtgcgcaccagactcacactcatcaatgtcttggcagaggcgtgtggccagcagctggtaaccctgtgggcagtggcaggagaaacggcctggctcgttgacgcagcggtactgacagaggtagctggagtagctacactcatcaatatcactgcaggagaagccatcccgatgcagctcatagccctggtggcagcgacacaggaaggtcccataggagttgaagcagcgctgctcgcatggggcccccatgtcacactcgttcacatcaacacaggagcggttgttaggccccagctggaagcccggctcgcactggcagcggaaggagccaggcaggttcacgcagcggtgctggcagtagcggtagcggcactcgtctatgtccacacactcgggcccgatcttgcggtaaccatcagggcaggtgcactgataggagccaggcaagttatggcagtcctggctggggcgacagtcgtgcagggcctgggcacactcgtccacatccacacagctgtcctgatcgtcgggctcatagcctggtgggcaggggttggggtgttgagcgggaggcactggtggcgggggtccctcgccgtgtaggtcgttgatgacggcagcggagcggggcaggcacaagtagcccccgtagtggttgatgcacttcatttcccccttgcaggcctcagggatggtcagacactcgttgacatcccggcagtgctggctgtctgggtcccactcatagccatctgtgcattccgtgtagctgtcgggctcttcagaatcctgaggagaagctgatcccaagagcaacagtagcagcgcccagagcagtagagacccgggtaggcaggaggcgcaggggagcatcctggggttgggcccgcgacacccccgcggcccgcggctctggcggctcggctggctcgggcaatgcctgcgggcagacggacgggcggacggcacagctccctggacgcgcggccccaggaagcgccaccccgcccgcccgcctgccgcggcgcggcccacccacggcgcctccgcccgcccttcggcggattcctgagccagcgccagggggagggaccccgaccccccgc

SEQ ID NO: 440048 - DNA, 418 bp, Homo Sapiens
ttttccagttgcctcgttttatagaaaaacaggcccagggaactactagggcttatccaaatgtacagtttgaggcagagttaggaatggaacccagggcctcctggcgctgtccagagtggagtttcttaggacccctgcaagccagccaagtccaaatctctgggccggggcctggagtccgccctcctcgttacctcctctcctctcggggtgactgaagctcgtggtgcagagctcccagctcctgtcaatgggggcccctgggctaaaatggtaaaagtccccctgcgagtttccagcacggatctgaaaggcattgtaggcaccggggtagacggaggtcgcctggatctggaacacgtcagcgggcacgctccgctccgaggtgatggtcatgtagcgggtgcacaatgga

SEQ ID NO: 440049 - DNA, 2019 bp, Homo Sapiens
  misc_feature (1788)..(1789): n is a, c, g, or t
gccccaagcccagcctctcgccagctgggagtcgcgcgctgcccacctcgctgcccaggcccccgacgccgcggcaggagccccccaagagcgcgggaagccccgtggacctggcgctcccggctcgggcgtggacggggcgggcgccggggcggggcgcgcgtcctcgcgggtctgaatggaagggtcgaggtcgtcgtcggcggcgagcagatcctgaagccagaactccaccccggcgcccgcgccatgcggcgggagaggtgcggcgccccccacccgcgtcgccgccatggaggtgctgcggcgctcctcggtcttcgccgccgagatcatggacgcctttgaccgctcgcccacagacaaggagctggtggcccaggccaaggcgctgggccgggagtacgtgcacgcgcggctgctgcgcgccggcctctcctggagcgcgcccgagcgtgccgcgccggtcccgggacgcctggctgaggtgtgcgcggtgctgctgcgcctgggcgatgagctggagatgatccggcccagcgtctaccgcaacgtggcgcgtcagctgcacatctccctgcagtctgagcctgtggtgaccgatgcgttcctggccgtggctggccacatcttctctgcaggcatcacgtggggcaaggtggtgtccctgtatgcggtggccgcggggctggccgtggactgtgtgaggcaggcccagcctgccatggtccacgccctcgtggactgcctgggggagttcgtgcgcaagaccctggcaacctggctgcggagacgcggcggatggactgatgtcctcaagtgtgtggtcagcacagaccctggcctccgctcccactggctggtggctgcactctgcagcttcggccgcttcctgaaggctgccttcttcgtgctgctgccagagagatgagctgcccacctggcagtggccgcagcctggccctctgggcccaacgcaggaggccctcagcacccgaacacatcttcctcctccccacccgagcctggagcactctaaccctcggagaccccctaagccccgttcctccgcagacccaggccctccggaaggggtgagtggggaggggctttcctgagcctggagctgggctttggggcagcctgcgaccctccccgcttgtgtcccttctcctgtgatctctgtgttttcccttttctttctggggccaggaagtcagggtcaactcccaggcctcagatgcaggggcccagaacacctgctctcacctgagccccaggtgaaggggcccgggaacacctgctctcacctgagccccaggtgaaggggcccgggaacacctgctctcacctgaaccccaggtgaaggggcccggaacacctgctctcacctgagccccaggtgaaggggcccggaacacctgctctcacctgagccccaggtgaaggggcccgggaacacctgctcttcacctgagccccaggtgaagggtcccgggaacacctgctctcagcggaacccccggctgaatggtgcccggaaccgcctggctctcaccctgagcccccccgggtgaaaggtggcccctggaaacaatgctgcctcctcaaccgttggagccccccaagggtcgaaatgggggcgcccctcgcggttaaacacccctggcgttactcccacccttggggaaagccccccttggtgctagtaaacagcaggggcccccccgccggtaaaacaataacattgaggcccttctctctcccgcgcctcttgttaatgcgtcnngcctctcctattgggggtctgtgaatgaagtgtcgtgcggctcctccatgggggggaaaaataacacacctttgagcacactatcacccgcgtatatctgtaggaagcgcccccccgcctcagcggtgaggtgaaacgcggggggggcccccctgggcagaaaccaccaccctatggtggggtatcctatgtacgtccgtggggataaactagctcacccctgggacctt

SEQ ID NO: 440050 - DNA, 2030 bp, Homo Sapiens
  misc_feature (131)..(142): n is a, c, g, or t
  misc_feature (550)..(614): n is a, c, g, or t
  misc_feature (1833)..(1833): n is a, c, g, or t
cggcggctctagttgggccaccttcccaggattgtggaggctcccccagagggacccccaagagaagggccagccccccctcttatcaatggtggtgggcaccccgtccacatcccttgtttagaggccannnnnnnnnnnngggaagacgtagggccccaacccctttctcaaagaaaaagctgccgcccccagaatatcttcacccctctaggtcgctcaagtccacctcccctagttccattagttggagggtaaatcggggaacgtcctccacggggggtcccctcgccgtcgtgtgaaccccacccccctccggctttgatggtggaccattttcccaggttcccctttttccgggacgcgaggcgtgttatttccgcgcccaaggccccccccgtttgtttacccccaagggggtcttgattgtgcggcgacacaacggaaaactctccgccccccgagggggccagttgtcccaaaggaggaggggtgttgggacccccctgggccaggggctggaggcctctgtcccctccaccaacggttnnnnnnnnnnnnnnnnnnnnnnnnnnnnnnnnnnnnnnnnnnnnnnnnnnnnnnnnnnnnnnnnngttgatgccctgcagagaaagatgtggcccagccagggccagggaaggcatcggtcacccacaggctcagactgcagggagatgtgcagctgacgcgccacgttgcggtagacgctgggccggatcatctccagctcatcgcccaggggcagcagcaccgcgcacacctcagccaggcgtcccgggaccggcgcggcacgctcgggcgcgctccaggagaggccggcgcgcagcagccgcgcgtgcacgtactcccggcccagcgccttggcctgggccaccagctccttgtctgtgggcgagcggtcaaaggcgtccatgatctcggcggcgaagaccgaggagcgccgcagcacctccatggcggcgacgcgggtggggggcgccgcacctgcgggcacaagcgctcagccgggtggagggaggcggcgcggggaacggggcgcgcggggcgccgggctgggcgtggccctcgggaagggccgtagccggcgccgggtccgctctcgttttttgtgccccaaatctttaaaaacccagcgccaccttctttcagagcccgaattcagctacagacattccccgaggctgccagggaccggtggggccgcggggagacggcggtttgctccggggccgccgggcccgccctcgaagacgagtgcgtgggcggcgggggcggagggcacagcccagcgcgtcccccacggcgactgccaggacccggccctcccggccccggcccggggccgcccacctccgctgctggcgtcctgcgcgcgtgtccccggcctcgccgttcgccgtggcaccccgggcaccccggcacggacgccacgcccgccgcgctcacctctcccgccgcatggcgcgggcgcctggggtggagttctggcttcaggatctgctcgcctgccgacgacgacctcgacccttccattcagacccgcgaggacgcgcgccccgccccggcgcccgccccgtccacgcccgagccgggagcgccaggtccacggggcttcccgcgctcttgggggggctcctgccgcggcgtcgggggcctgggcagcgaggtgggcagcgcgcgactcccagctggcgagaggctgggcttggggcttgggccttctaacgggaaaaggcaaaccctggggagcggagtcgggggagacgctttccgagcttccccgctttaaggaggaccgagcgagtttcctgngatgcgcccggagaaggcgaccacggcctggagacggctccctcgcaaggacagaagcagctggggacagtagagccagccccagccgcctgggtgttccccggggtccatttgaaaattgggttgtcttcttcgctcgtagaggttctttccagagtctggagacgtgttctggtacgcacggtgccctttgtatt

SEQ ID NO: 440051 - DNA, 928 bp, Homo Sapiens
  misc_feature (904)..(904): n is a, c, g, or t
ctgtctaaaatgacaacgatcgtttggagaagtttattaccacccctaccctccagtgggatctcaatgtcacgatgagtccggggctggctttccgccgggaccctcctgtcctggcacatggcccaccccagcacgaagcctggccgggagggctcaggtgggtggctgctaggccaggcctccccagaacgactgccccatgtccagcctgtatctcctgagtgccatgctgcactggggagggacagggctggctcggggctccaggaaagatgcctcacatgtgcctagaaatgtaggcgtcaagggaaggctgtgtgtgggggcacctgaggggctgggcttcccaggcatctgagttcttacggagccctaataggcacatccccaaatggttgtatgaggatgagcacaaaaatagcagatggggtcaccctcaccctccactgacaatggactgggatccgactcatgcaacattccttctcggccgtaggttccacatccatgggttaggtgtgctggcctggagcccgccggccccggtccccaccgcacaaggaccccatcacaagtgggtgtcatactcttcctccagaaacggattaagcaaccagcatgtgaaccttacgctctgtttacaggctgagtccccacagctcttccagcttcagccaggccagggtcaccttcagattgaatgtgcagggcccctgaggactcatgtcctgagatggcccttcttcctgggatgggacccccgggttcaggtgagaggtgttcccgggccccttcacctggggctcaggtgacaggaggtgttccgggccccttcacctggggctcaggtgagagcaggttttccgggccccttcacctggggttcaggttagagcaagtnttccgggccccttcaccaggggtt

SEQ ID NO: 440052 - DNA, 608 bp, Homo Sapiens
ataataaaccaaaagatttatttataacattttctgaattcacttaaaaaacaaaaaggaatcccccttccctcaaaatagaaccgtttcctacagattccatccagtatgacttttcagatatctaaggagattttgctacacttattacaatggtagttttcccacagtgtaattctctgatataggtttgaaatattgcagaaagtcactctacattcatttatacagttgctttttctcctacaagagtattaaaatgtaagtattgcattgtaaatgaaggcattcccaaatcactgtgtttgtatcactttgcttaaatatgaattttctgatctccaaagtgcatcatctttgtaaagctcatcccttgtccatgctttctgtcctggttgacagatgcggaatgagggctaatctctggctttctccaatctattggatatgtattctttcctggtaggaatttacacacgtaaagtaagggactcctaccaaatgaagtcttctcaacattaccagatggaagaatcttctcaacaatattgatttcaccttgttattgcaaaaaaataaaagagtggttattaatggcttttccacat

SEQ ID NO: 440053 - DNA, 542 bp, Homo Sapiens
  misc_feature (412)..(412): n is a, c, g, or t
  misc_feature (445)..(445): n is a, c, g, or t
  misc_feature (487)..(487): n is a, c, g, or t
tattacaatggtagttttcccacagtgtaattctctgatataggtttgaaatattgcagaaattcactctacattcatttatacagttgctttttctcctacaagagtattaaaatttaagtattgcattgtaattgaaggcattcccaaatcactgtgtttgtatcactttggttaattggagattgctccaaagtaaacgttctcaatgttggctgcactcaacaaaaactagagggcaaagatttgatgtagtcaggggttggccaagtttttctgtaaagggctagatagtaaatgtttaacctttatggctgtatattaaactcttcagttatagaggtaaggagccataaactatgtaaatggatacctgggccctgggctgtagcttgatgacctctgatatagntcatgaggtgcatccccacagagtaaacagtangaaggaaagtggatgcggagcagataatgggagaaattgagnatactcttaaataaataaataatgaatttttcatatcctaattttgctgacaggg

SEQ ID NO: 440054 - DNA, 1072 bp, Homo Sapiens
  misc_feature (14)..(14): n is a, c, g, or t
  misc_feature (29)..(29): n is a, c, g, or t
  misc_feature (42)..(42): n is a, c, g, or t
  misc_feature (65)..(65): n is a, c, g, or t
  misc_feature (81)..(81): n is a, c, g, or t
actgaatctggggntccatttactagagngtaactcgagaanggtaccaaatatttcagttcctncagtgcaaggatcctnatacaatatacagttacagacagtccccgatttaagacggttcaacttaacgattttttcagtttgatgatggtgcgaaaactatatgcattcagtagaaaccatactttgagtatccacgtaaccattctgtttttcagtttccatacaatatttaataaattacatgagatactcaacactttattatgaaataggctgtttagatgattttgcccaactgtaggctaatgtaagtgttctgagcacaattaaggtaggctaggctaagtgatggttcagtaagttaggtgtattgaatgcactttctacttaagatattttgaacttaagatgggtttatcaggatgtaaccctatcataagtcaaggaacttctatattatgaggatgaaataaatgagctagtatctctacacacacaatgcctggcctatgataagcatccagtagttacttttaactaattcgatgatatttagtctgtttcttcgatggtagtggtgttgttgcctattcccaggattgtcatgagtgttaaatgaaggtatgtaggtaaagtgtatgtaaaatgtttaacccaactcctggcgtggtagacttggttcccttttctagtaattctctttagatttttaataataatgtcattagttccttaaagttagcatttcttattggaattgggttttgaccagggagatgagccctaagagcttggcagctctcagctgtcagatgaacagcccaggtggcaagaagagatagcagagggagtgagtggtgactggtcagaggagagaggcttcctttctgcatataaaatggcgctcttgacctttacccccctgactagaatgtccatttccttgaatgcagggacttgattttgttcactactgtgtccccagtgcccataacaatgccctgccatggttggtgctcagaaagtatttgctgttgagtaatcagaggctataaagggagataaa

SEQ ID NO: 440055 - DNA, 842 bp, Homo Sapiens
tttacaaattgcagtttattaaggctccagagtgagaaatggcacttggttctgggcaggggcaggggcaggggtgtcagtggaacccaaaggagctgggtccaaacatgttggagggacctcctccatccccctacccccaataaataaagtctcagctccatctcagggtgctggtgcagggcagggatccctcactgaggagaacccagggctgctacctccttcatatttctccccacattggacctggtcacaggtcagtgagcaacagggcttctgtggtcctagtactctgagggggctggggagttcagggtggagagctggggcctggtggtggcctccccgtagccagtcatagtccgaggctgcccagggcaggctcagagtggggcctgcgttggggacactgtgcgcatcccaggtcggggcccagcctgggccacagctagatgtgcagctccgtgtcatcaggtggttccaggccagactctgcgctgagtgcttgaggctgagggaccctgggccaccccaaatggtgagacaacgggtgagcgagcagtcagaggagtcagagaggttgagaagcttgcggacatgtgcgcctgaggacagggagcccttatggtctgatgtgggaaccgccagaagcttctgttaagacggcccgttttgcccttgtgtttgctggctcggggggcacagactcgcctcctgggtgtcccactgtgccacgccgtgtgtgcggctcgccactggccagcttgggacctagcccgtcctctactcttggtcccaagtgtccttttggcatatacacctgcccattggtctggcac

SEQ ID NO: 440056 - DNA, 856 bp, Homo Sapiens
  misc_feature (361)..(361): n is a, c, g, or t
  misc_feature (363)..(363): n is a, c, g, or t
  misc_feature (374)..(375): n is a, c, g, or t
  misc_feature (401)..(401): n is a, c, g, or t
  misc_feature (409)..(409): n is a, c, g, or t
  misc_feature (412)..(413): n is a, c, g, or t
  misc_feature (428)..(428): n is a, c, g, or t
  misc_feature (447)..(447): n is a, c, g, or t
  misc_feature (450)..(451): n is a, c, g, or t
  misc_feature (473)..(474): n is a, c, g, or t
  misc_feature (515)..(516): n is a, c, g, or t
  misc_feature (531)..(531): n is a, c, g, or t
  misc_feature (544)..(544): n is a, c, g, or t
  misc_feature (556)..(556): n is a, c, g, or t
  misc_feature (566)..(567): n is a, c, g, or t
  misc_feature (597)..(597): n is a, c, g, or t
  misc_feature (602)..(603): n is a, c, g, or t
  misc_feature (608)..(608): n is a, c, g, or t
  misc_feature (611)..(611): n is a, c, g, or t
  misc_feature (616)..(616): n is a, c, g, or t
  misc_feature (627)..(627): n is a, c, g, or t
  misc_feature (636)..(636): n is a, c, g, or t
  misc_feature (641)..(641): n is a, c, g, or t
  misc_feature (649)..(651): n is a, c, g, or t
  misc_feature (657)..(657): n is a, c, g, or t
  misc_feature (660)..(676): n is a, c, g, or t
  misc_feature (679)..(681): n is a, c, g, or t
  misc_feature (684)..(685): n is a, c, g, or t
  misc_feature (688)..(688): n is a, c, g, or t
  misc_feature (695)..(695): n is a, c, g, or t
  misc_feature (699)..(699): n is a, c, g, or t
  misc_feature (704)..(707): n is a, c, g, or t
  misc_feature (711)..(712): n is a, c, g, or t
  misc_feature (715)..(715): n is a, c, g, or t
  misc_feature (719)..(720): n is a, c, g, or t
  misc_feature (726)..(729): n is a, c, g, or t
  misc_feature (734)..(734): n is a, c, g, or t
  misc_feature (736)..(737): n is a, c, g, or t
  misc_feature (742)..(742): n is a, c, g, or t
  misc_feature (748)..(748): n is a, c, g, or t
  misc_feature (751)..(751): n is a, c, g, or t
  misc_feature (759)..(759): n is a, c, g, or t
  misc_feature (764)..(767): n is a, c, g, or t
  misc_feature (770)..(772): n is a, c, g, or t
  misc_feature (774)..(774): n is a, c, g, or t
  misc_feature (776)..(776): n is a, c, g, or t
  misc_feature (778)..(778): n is a, c, g, or t
  misc_feature (782)..(782): n is a, c, g, or t
  misc_feature (785)..(785): n is a, c, g, or t
  misc_feature (791)..(791): n is a, c, g, or t
  misc_feature (796)..(796): n is a, c, g, or t
  misc_feature (800)..(800): n is a, c, g, or t
  misc_feature (803)..(803): n is a, c, g, or t
  misc_feature (805)..(805): n is a, c, g, or t
  misc_feature (807)..(807): n is a, c, g, or t
  misc_feature (814)..(814): n is a, c, g, or t
  misc_feature (816)..(816): n is a, c, g, or t
  misc_feature (818)..(818): n is a, c, g, or t
  misc_feature (831)..(831): n is a, c, g, or t
  misc_feature (835)..(835): n is a, c, g, or t
  misc_feature (837)..(837): n is a, c, g, or t
  misc_feature (841)..(841): n is a, c, g, or t
  misc_feature (843)..(843): n is a, c, g, or t
  misc_feature (848)..(848): n is a, c, g, or t
  misc_feature (854)..(854): n is a, c, g, or t
tttcagggtccatgtgcactttattcactcgtgtcgtcgcctctcgggtccatgcgtcgaggcgagcgtctcagccgggcgggaccgctaaaggccccgggaccacccgactgaggactgccgcccaggcctcggcagggctggggcttttgtttttaataaataaaaacggaactctaaaaaatatatatataaaaactggggagaaattaagttttacaacaattggaactcaaaattccaaaatggaaaatgtacaaactcggtcccccagcagctctggccccgagaacgtacagtcccgggcccggcgccttcccgctcgctcgtctcctgcaggtctgggatggggatggggtanancttggtttttnntcagaagccaagaaaaaagatcgganaagaaaanaannaatgacctcaacttnctctgcacggaggacgggnacnnctcagagataaatagcatttannttaaaactatgtcattagcaaatttagttcttatatttttnnctctatttatatctntatacacggtggncttcgattcatnatagattctnnatttacatttacacgaagaaaaaaatactntgggnnggggnccnccctncccccagaatncctgcccanccctnctccctannncaaaanacnnnnnnnnnnnnnnnnncannncanncanctatatncttncattnnnntttnncantttnntttatnnnncaaantnnttatnattcancancttttcancaccnnnntannnantnanaggnggngggganaggtngggnaantntntgggggntngnaagagctgcaggncagnangagnanagganaaaggnaa

SEQ ID NO: 440057 - DNA, 500 bp, Homo Sapiens
  misc_feature (161)..(200): n is a, c, g, or t
tttttttcagggtccatgtgcactttattcactcgtgtcgtcgcctctcgggtccatgcgtcggggcgagcgtctcagccgggcgggaccgcaaaggccccgggaccacccgactgaggacgccgcccaggcctcggcagggctggggcttttgtttttannnnnnnnnnnnnnnnnnnnnnnnnnnnnnnnnnnnnnnnctggggagaaattaagttttacaacaattggaactcaaaattccaaaatggaaaatgtacaaactcggtcccccagcagctctggccccgagaacggacagtcccgggcccggcgccttcccgctcgctcgtctcctgcaggtctgggatggggatggggtagagcttggtttttggtcaaaagccaagaaaaaagatcggagaagaaaagaaggaatgacctcaacttgctctgcacggaggacggggacggctcagagataaatagcatttaggttaaaactatgtcattagcaaatt

SEQ ID NO: 440058 - DNA, 2252 bp, Homo Sapiens
  misc_feature (605)..(640): n is a, c, g, or t
ttttttttgcttactaatagctttgttttattattcagttaattatttcatcttttataatcatacaataattctcttttaaacaacactgttatacctgaagatggtcatattatattctttcttccttctgcagtagtaaagtgtttttcttcatactcagtttttttaatagaacatttgaatatcaagaagtgtagttaactaaaaaataatgaacggaccaaactccatggaaaacgattgcacactcaattaaaagtctaatgctattacagtggttcatgtacattcaagaggaaactccagaggtcttggggacatgggagctgggagagtgttggtgggatataagcacctcccttaagacctgtttggcagcttgaaaactcaaggttgaataccggtccagtaccatcaccctttctagccaggatgggttccttcaggtaagcattaggaaaagtcagcaggttgagatcaatagtgtcttccaaggggaaaaaatcctccagtcaattgtacaaccatcctaagattttcccctgccctgttcatatcagcctttttaacttgaatgtaagtaggagccagtcataggagtnnnnnnnnnnnnnnnnnnnnnnnnnnnnnnnnnnnnacatacatacacacattcagtggggagaactcaacgagaaacaggaggaagaaagtcttggggaaagaggaggccaaaaaaggagggtcacagaaagaagaagtaaaagacaaagataaagaaggtagaggaacttgggagattgagggaaagataggagagaggaagatagtgtgcctaaaataaaaacagaaggagagggtacagaggagtgactctgatacctgcttcaccctctccctggcctgtcaactcccacatcatccacttctgggcaggaaggcatcggcagcctcaccctcctttcactcaagcttaaaacaccgtgttctgcacagatatgaatagaaggatggcaaaacagtagcagcaaagagatgctctgggccctgtctgattggcctgtcacatcttctctggcaatggtgaaatatttgccccttgaggcactttaactgaggctccagcatttgccacaggtgggacagccaatttttctgctgatctttgctttgaaagtaggggaatctctgaggcaggtgcattagagagtttgaaataaatccttcagtgtttggaaagaaggagagaggagagtgaaaccaccctgtgctttatctcagcctcatcacaggcttccttcccagtcatgagggtggggaggagggccatgtgcagtggaactaggggtcccaagggtgctctagctccaaaggctaagggcgtactttcgcccctcctccttccactgcacagaggacatgtccatgccacagatgcttgggaaaggtaaagctctctgggcaggttccctgtggggctgagagcttggacagttgtgtgccagatgatactgaaaacagaactgggtatcccagagtagctaagatcctgtgccctggagaccaacagcctgaaatcacactgaaactcagtgtgagttacagtgcacaagggatttgaggcaagttgtataacctctctttgcctcgttttcctcaacactaaaatggagacaagaatagcactttcctcaggagttgctgtgagaattcaatgatacctaaagtgcttacatcagcgcctggcatacagcaagcactcaataaatgttatctgtcactactactatttagaaaaaaaaccaatatagctcaatgactagccttataggtcttgcatctgtttgctgacctttctcatatgtttccagatgaggagccctggtcaaaggcatggtggctgaaggtgtgtgttcaggccactgagttgtgtgggacagctaaggccattgctagtcaacagggccttgccaggctctttctgaaaggctgggcttcctgttggctgggccaccattcatgaccatgccaatgcttgggcagtgggatggaaacaacactctagatgttaactgcaatcagtggtgcttccctacacagaatccctgtgactggatgggcagtgaccatggtggaatcctcctgcttatggtcatcagagaaacgatttgcaaaactagcaacacaagcaaatttagcaaggtggggatgaacagaagttttttgtgatcaataatagctttagttcactgtaacactgatatgaaagt

SEQ ID NO: 440059 - DNA, 1126 bp, Homo Sapiens
  misc_feature (1019)..(1019): n is a, c, g, or t
  misc_feature (1032)..(1033): n is a, c, g, or t
  misc_feature (1042)..(1043): n is a, c, g, or t
  misc_feature (1085)..(1085): n is a, c, g, or t
  misc_feature (1087)..(1087): n is a, c, g, or t
  misc_feature (1090)..(1091): n is a, c, g, or t
  misc_feature (1094)..(1094): n is a, c, g, or t
  misc_feature (1107)..(1108): n is a, c, g, or t
  misc_feature (1114)..(1115): n is a, c, g, or t
ccagccataacaacatttattagttctctggtaacattttaacatttctgaagatacagcaaagtgggcatgtatctttaatgtggagcactggggacatatctggagacctacaactctgaggaacagagacaagtgatttgggggatattctcgattaacaagccaaagaatcaggaaaatgggctggaagcgggtagccacacacctctttccctgtgtggggcctctaatatgtgactgatgccttccttttctgtgcctttgaaatctcatgcaagattggctataggtgaattgtattacgaaaccatccaagttcttctagattttattgtcctatcgcaagtctctcttctcaattcaaaaagcagttatccagaggttctttcaccacttttttttcttgtgtttcaaaggaagtgggacaacagaaagcttcttccgttgcttccactaaaaggatttctcatctattaatggtatgagttctttcatgttctcgacatgaactggcacgaataaaggctttgccacattgcttgcattgatagggtttctctccagtgtgagtcctttcatgatatcgaatgttattggaaataaaggccttaccacagtgcttacattcatagggtttctcttcagtgtgagttctttcatgatatcgaatggaactggaacaagtgaaggctttgcacataccttacactcatatggcttatctccagtgtgtgtcctttcatgtatatgcaaggaagagaaatacctgaatgcttttccacattgcttacattcatggggcttctctccagtgtgcgttctttcatgtatacgcaaggcagacaaatacttgaatacttttccacattccttacattcatgggggtttctctccactgtgcgtcctttcatgaatttgaagttgtgaagcacatctaaagccttttccacactgcttacatccatagggtttatcctcagtgtgtgtcttttcatgcctttgaaggtccgaggtnatctgaaggcttnncacattgcnncattcataggggttctctcagtgtgagtcttcatgctttgangngtnncanactaaaggttccnnatgctnnatcaagggttt

SEQ ID NO: 440060 - DNA, 290 bp, Homo Sapiens
  misc_feature (128)..(136): n is a, c, g, or t
gtgtgagccaccgcacccggccaagaattgctatttttaatttgactgagaacacaaacgggagtgttgatgaagactaatgaaaaatgtttgggtattctggtacttaaatgcaaaactgtgtgggnnnnnnnnntcttaaaacagggcatctatattcaaattcaaaacattttatcccaataaataagctaaaaagcacatctttaaaaagatgttatgacacataaaaataattttatgtgttatgacacataaaaataatatgaacttcagccaggcgtggtggc

SEQ ID NO: 440061 - DNA, 1049 bp, Homo Sapiens
  misc_feature (6)..(6): n is a, c, g, or t
  misc_feature (15)..(16): n is a, c, g, or t
  misc_feature (188)..(357): n is a, c, g, or t
  misc_feature (483)..(541): n is a, c, g, or t
  misc_feature (550)..(558): n is a, c, g, or t
  misc_feature (924)..(924): n is a, c, g, or t
  misc_feature (965)..(965): n is a, c, g, or t
  misc_feature (988)..(988): n is a, c, g, or t
  misc_feature (1017)..(1017): n is a, c, g, or t
  misc_feature (1032)..(1032): n is a, c, g, or t
  misc_feature (1045)..(1045): n is a, c, g, or t
atttgnttcgtctgnngtttttcttttatcacaagtcacatcaatccctcgggcccctgctcaaatgccacctcttcctgaaagccatccctaagtagtctctccaaagagccatccctgcccctttctttgctttatccttcacagcacttatcactacctgaaattatgccacacagctatttacnnnnnnnnnnnnnnnnnnnnnnnnnnnnnnnnnnnnnnnnnnnnnnnnnnnnnnnnnnnnnnnnnnnnnnnnnnnnnnnnnnnnnnnnnnnnnnnnnnnnnnnnnnnnnnnnnnnnnnnnnnnnnnnnnnnnnnnnnnnnnnnnnnnnnnnnnnnnnnnnnnnnnnnnnnccagtgttctaacattgcctgcatttccatttttcccaaagcggcccagttacttattaacatactgctttttccagtgacacgtgttcacagttattaagtcgatctcccgccaaaatagaagcnnnnnnnnnnnnnnnnnnnnnnnnnnnnnnnnnnnnnnnnnnnnnnnnnnnnnnnnnnntttgagttnnnnnnnnngatgaaagaatgaaaatggcagactgcctagcagaactagcccttcccgatgtttcattgttgctatagtgacgatccagtctgcacgaagatcccagcttccttaaccttgttcctacctccagccagctcacccattggccacctgtatctcctgctgtagcgccagaaagctacaactcccaaccggctgagcgccaccagggctttcgcgtccaagtccctttgctgagtgtgagggcctgcgcagtagaacccgcgggcccagagctccatctgagcatgtgcaggctgcggggtgtttccttcgtctgctggcgggagaggagtggggaggagctctttacccgctgagcattgtggggnccgcttggatctccttgtccaaagggtctgggcgcgggggngcagtctctgtgtgaggagcggncgcgggaaactgcttcggtctcatggttngagcgctcacgcgcngagggggatcaangttg

SEQ ID NO: 440062 - DNA, 1394 bp, Homo Sapiens
ttgttttttccaatttatttagaaaaatagactctggattcacattcaccccagggctatgtgggatgacagcaaggagacacctgagatgaaatgaggaaggtttgaattactggtatccaaggggctgggggcaaaagccagaagcctttgtcccttcagagccagagtggcatgagtgtcttggctcccctcctctccctcccttcagtagtcttcagccatggccagtaagacaaggctggtccagccgtggaaagggcggcagcccatgcctcgcccatcgcggtcactgtactgctcccaaagaaagcctgtagcctggtactggcgccatacattgcctaccacgttggcacggagctcaccgtggagtttggcagcccgagcctggtgaggaccctccagatgcccatagtggtggagtgctcccaaagccaggtagttgacattgagccacacagcaccccgccagtaggggggatcatgctctgaattgcgctggccataaaaggagctggaggctgcaagggagcgtaaaccaaaggggctccagagatggcggctgtcggctagaatgtccagcaggggcccaaggcgggatgaggtggggtccagcagtcgcagcagcaagggaaaaagactgacatagccaagagcatctacatactgcagttgaggttgggggccgacccaccacccgaacgagcccctgagggggcctgggcttcagctgtactgcttttgtgtggttcccaaagtctgcaaagactcctagctctggggcccagtgcagctcatccaggctctctgctgcctccagtgaggcagccagtgggcccagctcagcagctacctcagcctcacccagatgctctgccagccgcgtcagcacacgggcacccagtgccacccaacatcgcaggtccaggtgccgctcggttactgaagggtgtgaagcccgggggtagtcatccagcccagagggtagggtcttggggttcagtaaggttggtaaggcagggtcccgtccccgccagcggtaagatagtggcagtgggcctgcctggctctgatggagccaggaaaaccaggcatgcaggcggggcaaggcctttcggaggaaagccaagtcgtcagggtcaccaacctctagcatatgggctacaggcaaaagtagggttggggggttggcgtggactgcatcgttgtacataggaattctggaggcacccgggctcgggcctacatcccccagtatctgctccctcccaatccagccatcagcatttagcagccccagccagtggccaagggcttcccgggtgagggagggatcccaccgctgaaccaccagctggtgaaagccttcatcccaaaggaagccatccgga

SEQ ID NO: 440063 - DNA, 1793 bp, Homo Sapiens
  misc_feature (620)..(620): n is a, c, g, or t
  misc_feature (1686)..(1686): n is a, c, g, or t
ggccacccaaccaagctcttttgggggcacagaagaagggccactctccacccacaagtggtccggaagtattggggaaacaacccccttccatgtgtcccaaagagcccccggtccctgtaaaaaaaaggtggtccagtaagggcctaaatcgacgaaagccggaagttggagctccaatccggcttccaagggaagcccgggaacaatagggtcaggtgggaaccagacggtgacctgggcaaaggggggactggccttcttggtcatctctagaaggtgcggcgctgcttctgccgttggtcaaaagcctgcttggccttccaaaggagccccagaagtaagaggaagagtaaaaaccaggagaagaagccggtagaagaagccaaacagggtcaatgtgggcctggtcctgcgggaaagaagagcaggcccttcgagtcggttaacccgttggcgccgggcccacttgggtctcccacgcccagcagcagcaggtagaagcggctcgacttgagggcatggtgctcgtgtgggtaggtgatgaccagccggtcccgcacgccggggaccaccagcactgccgacggctccgtcaccgtcacgtaggtaatcaggcnccgcggccatacctcccgtacccgtggctctgctggggcgcccggcccactgctggcccctgctcctcctggatccccagccccccggggcccaccatctgcagggggtggtggaggtggtggggctgggggtggctggatgtgtacagtatggacgccagtgtcaggggccacacggaccacgaaggtgtcataggaggtggagacatagaggtccacggccccgaaggtcacgtccagcgtcaggcggatgtccacgttggtgaatttgggctgcacgccaaagaggacagtgcggccggggcctagcgcccggcgtttgggctcatgaagcagtggtctggacgtgggtccaggcagcactcctgctccaccgagatgaggcggtagcactgctggccgcccagcggactcccgtgaaatgattcccggcacttggcgcattggtgcacttcccgtccaggaggaagtagccctgcaggcagctctcgcatttctccccatagctgttattctggcagttcacgcacacggcctcgtcttcactaggaccctctgtcacccagttttcaatctcctctgggtccagtgagtacttctttggctctcccttggacatttgtaactccttcctggagatgcagatgtggctatttccacgacaaaaggcgtggcagggccggcaggtcccgcctccgacagctgaacccacaaacagcgggaggcactgctcacagtggctgcccttggtgtggttgcggcagagcaagcagtggtcacgcgccccaacaccagcgcattcactgtggcggttgcagcggcattccgtggagcagttgcggcccacaaagccaaagtggcagcggcagtggtcgggctccacacatgagccgttcacgcagccctgggcgcacacagggcggcacagccctgtcatgttgtccatggtatagccggtcttgcagctgcactcatagccgtggggctggtcgtggcaattctgcgtctcgttgcagtcgtggtgcccgtttgcacactcgtcctcaggggggcaggacaggaaggnccaggaggcccccggacgcccacatgtcagcccatcacgggggccgctgagtccaccctccatgcagcggccacccccatcctggccatcccgggaattccggaccg

SEQ ID NO: 440064 - DNA, 976 bp, Homo Sapiens
tgacacgcacgcctggccaaaaacccttgctttttaacttcgattgacacttaacaaaaatcctccacatcccactttttgacagtttacattaaagcctgtggtctgaatatttgttttacttagagggggaccctttgggcaacttatttgcaaacacatctaaccttcctgggcttattccacagtattttcatagacctgtatatattagacatcacactgttctcttgggatttaaagtagtactgggtactgcatattgtgcagtaaatctggcttgctttcttaacctttttgctgccattctttcaaatatttttccagggcttaggggaaaccattaaatgatctgacttaacactgtcgtcttgccctccctccaactcctcagtggcaaatgtttcctcatcaaaacagcatgatatgatgcagatgcaaactcaagattctaaacttcagattcgggttaatcttggcttgccgatttctctggctaaaatatcaacagcctggcttgcttatttaggcacttagaagaaaacaccaaacccaagtttcacatttttaaaattacaaatgcctcttacccatctggcccaggaaccaactctgaagggggtgacctcaacccagcccttgtttctgtgaggtcctgcttttgcagaatggcctgcccctgggactggagcaggcttgggtgagctctaggtggagggtggtgggaggggcatagaaataaaccttcctctccatcagaaggaacctgtgatcccagcttttccttcagtcaccaccacctcgtgacactagaaagcctaccgtcacagatttccagcttactcaaaccccacaggttggggtcaaatgcatgttaacctaatttgggggaaaaaaagactcaatcttgaaagcctgagcaaagtaaagggttacacaggacagtgtcaagtatatgccatacttcatacctggc

SEQ ID NO: 440065 - DNA, 2333 bp, Homo Sapiens
  misc_feature (926)..(934): n is a, c, g, or t
  misc_feature (1577)..(1585): n is a, c, g, or t
ttcacaaactatggcattttatttcagagcctttgcttacatttgtacaatatattacataattcttcattgtttgcagatcctaatatatactttatagcttttattctataagcttttttcttcaacattttgctgtcaacaaatctttacagtcctgtacaaatttgaataacttgaaaccattttcaacaaaattagttactgtaagcacacactacaagactgaaaatgcttttcttagaaaagttgaatgtaaaggattctgacacgttagcatctacaacaaaacgcattgaaattcccacgtcgtattgccaggaaacaaagaaaacatgccagccccatccaaaaaaagtacacagaactacaattaaaacagtaaaacagtctgtacaataaagtactgtgtattaacagtgccagatattaaatagcttgaatgaacacatccacaatatacaaatgtcttacaaaggtgaagaattaaatacaagtgccaaacagaacagagattggaatcatacaacataaagtcaatacaagtgaaaacaattttgcattcattttggattttatacaaggcatttaattttataggcctaccacccccattagctatttatatttaaaataaccaccatccttttgagacagttcctatcaacaatcttgaaccatactaatacattacttgttcctgaagtccttttgttgtagctcataataaaataagcaatacaaatgaattatctgtatttaagggaaaagaaacatttacaagaaaacacaaaaatataactgttataattcattatgaataaatatacactttgaactggctaagtacaatctttatacattgtttaagatttaatacagtttattagccattttcttttttcacacaatgtatatcaaaattnnnnnnnnntactgatttatagaaaaatggcacagtacagtagttccattccactttgaagggccatgaaaagccactgcaagaccttttagcctaattcaaacctgtacacatgttcagtcttttttaaagagaatctttaatatttggttaccaggattgatgtctaatatcctgttaactgcaggttttgaatttattacaatgtgcttgacttatacagttgaaagccaccctaaggtgacttgctttaaaaaaccattaccttgtacgcaatgaaaataggttcataatttgtttcataaatgaaatggagaaaatatcgaatgttccagctttaacgaaatacaagggaatacatatacagtaagttatcttaacatgttctgacccacccccttaactatgcttactgtattgtctctacaggcagtgaaaagcctccatttgccacagtggaaggccttccagttaccagacacaccattcccagacaagttggaaacaattattgcttgaggaaaagcagttcattgtacttgtttcgttcataaaaaagtgcacttaagtgccaagtcagcttgtcaagaaacaatttgttaaatataaaatagtgcttgtctgatatttttttgtgccactgtgcagtatnnnnnnnnngtggccctcaacagccattaagtgcaaagtgctttagcaagtcctgcctgtcacctgcactcaactgacattccattttgtgatgcgctggacattgacggttcagctaaagttaacataacagcagctgttatggaactggatgaaggtgaagaggaggatgaggatgtagcagcacctaaggaaaagggagaccaaaccaagagcttaataaaaatttatgtctaactatagacagaaaatactagtcctctgaactaaaattccgctatattgtccaaaatcatttagcttacaacaacagtggtcaattctcacagttctacgatgtgaagaaaggaaaagctagtgtagctcaagaagctagacagtgcccaactacagaagtaatgaaaaggacagaccagggaaggctcctgcgtgggtcaaagagggaaagaactgtgcctagtctacaagacacagaaataaaatacagaatacactttttgtaacagtgaaacaagtatcaaaacaggaaaaatctgcaatccatccaaaaatcatttgtcccctcctaatccctccatctttctgtacttaggagttttcttgtacatgtaaatggtgacaagagtgggaggcttaattgcttcttcaagttggatcaaaacagtgcatagctcaactgttgcattctccgccactaggtttacaaagcaaataacacattagttattttcatcagaggaagtctctcactgtttcc

SEQ ID NO: 440066 - DNA, 1332 bp, Homo Sapiens
  misc_feature (96)..(96): n is a, c, g, or t
  misc_feature (125)..(125): n is a, c, g, or t
  misc_feature (175)..(175): n is a, c, g, or t
  misc_feature (414)..(465): n is a, c, g, or t
  misc_feature (607)..(621): n is a, c, g, or t
  misc_feature (695)..(695): n is a, c, g, or t
  misc_feature (793)..(912): n is a, c, g, or t
gggagagcgtgttggcgccccggcgaatatagtggtatacaacacggcgcgcgggcgcaagaaaaagacgccgcctatcttgtttgtgtccgccgngccagtgttgtttctgctcgcacgggaanaatgggcgttttatatggggggcggggtgagcgaatccgcgcaaggcggntgaggaggattctcccgcgccccgacaggtgtatccatataatgagaatagggttcttctcggcgagaaagtaagggagggattctcctcgctgggtccggggacaaatgggccttggggtgaagaggattatcccccccgccattgtttgggggttaatatatacgcgggcgggcgcggtaaggggcccacgcgttttgtgttgttgaggaacggccgggcgtttttcggcgccaccnnnnnnnnnnnnnnnnnnnnnnnnnnnnnnnnnnnnnnnnnnnnnnnnnnnnctctgatatgggctggggtggaattacgaaaggtggtgcttgtccccgcggggggggttttgttttctctttggggggacacacaccccctattggtatgtcgcgccggtttttgcttatgagagggggcaggggcgccggnnnnnnnnnnnnnnnggggggccccctgcgcccccccgggggttttttcaaattttttcctcgagaggtcgctggggcacattttcagntctggtcggttgcctccgggccttttgtattggtgagagtccaagcccttagtcatgacccccgctttcttctggaacagtttttgtccatgttctcnnnnnnnnnnnnnnnnnnnnnnnnnnnnnnnnnnnnnnnnnnnnnnnnnnnnnnnnnnnnnnnnnnnnnnnnnnnnnnnnnnnnnnnnnnnnnnnnnnnnnnnnnnnnnnnnnnnnnnnnggattcattcagcatttattgtagcaaagagtgggtagggacaggagctctaggactggccagtgggtgttctagaggccagctggggttggaagacaatggtctggacacttcactgggtggcaggctgtgttccaagttccacgaaatagctcaagaagttaaccagttccgttccagccttcttgatcaggggtgtcagctgctcctttgacttttcaaagtaagacttggcctcggcctgaagctctgggctcttgaccttctccatcaggtccttgccatagtcagtcacggtctggaagtacttcaaggctgcagatggtgaggagtagcacagttgctgcgagcagcttcatgttggtaacagtggggagggcggcctagccagcgtctctgtccttggtgtctgtgcctccc

SEQ ID NO: 440067 - DNA, 671 bp, Homo Sapiens
attccccaagccccttgtttcatggaccccggggtttttccttgggaaaaccaggtttatgagccccttgttcactttaccccttctggggcccccggggcccccaaaagaatggtttttgaaaagctttttgaggggcccgaggcggcccgacaaggttttgtttgtgttttgggggggttgttgcttgttttggattcattcagcatttattgtagcaaagagtgggtagggacaggagctctaggactggccagtgggtgttctagaggccagctggggttggaagacaatggtctggacacttcactgggtggcaggctgtgttccaagttccacgaaatagctcaagaagttaaccagttccgttccagccttcttgatcaggggtgtcagctgctcctttgacttttcaaagtaagacttggcctcggcctgaagctctgggctcttgaccttctccatcaggtccttgccatagtcagtcacggtctggaagtactgagaaaccaggctctccacacatggctcctttgcctgtctccgaaccaaagctccttcaaggctgcagatggtgaggagtagcacagttgctgcgagcagcttcatgttggtaacagtggggagggcggcctagccagcgtctctgtccttggtgtctgtgcctcccc

SEQ ID NO: 440068 - DNA, 1739 bp, Homo Sapiens
ctagaacagtgagaagttagcaaatacgggtgcaaacgattttgcctggcacgtcaaccctgctcggggtgtcatctgacgaggatgcccagctacaagggctgcggtgagactcagagacacgctaccaatggcacgcgggccccacctcgccgaagcagctgccggggagacgcgataaaaactgccccacgcggaaaaagaaggaagggcggtgagcaggcgcacagaacagacgccacagtgcggcacgcatgcctccacgcctaaaggacaaaactagcatggagatcccctagaggtcggattttcaacataatctcagtgagcccaggactccaatgtgacaatgtggaactggaaagacgagcaagaaaagcccctccgttcccgccagcgttgggcattccttctgcagtccaggctgtccccgtcactcgggatcacagccaagcggtgggttctgtgtggtgcttggctcctagggcctcgcggaagccatgttcttctccattcagcttcatggagagactttcccaggtttcagcccacgctacgaagctagacaggagagtggcccccacccgccctgtttggaacccagctggggcatgcggtgtttggaacacatgggcagattggggagaggccagaagagcctcatccagagccaaggacaagccttgaggctgaagagctcaccaaggccactacaagagagcaaaaaaaagagcctcagagactcctcgataaataaccagaacagagagcaaaggtggagagcaggagggcaaggcactgagactttagaagcttccagggagaagaagagtcagatgcttgaagatgcctcctcaatgctgcaaagctctgagggaaagtggctttgatggagaattagagatccgggcaagttggtcctttctggaaaagctgcttggggatacactccagcaaaaagagaatccaccagcaaacaggaaggcatgagcagcccaggaagtatgaacacaaccaagggagggctgtggcagtatctgtcctgctgggccgcacctcggggctggaggtgggtagaggggaaagaaggggtaatggctggaaaagtgtcccatgctgacactaagccctggtagagaccacctgctacgggtcagcacatttcactgagcaggagatgcccctagaagacaagggatagaggtataaagaaagtcctctccctgactgcaaggagctagaggggagacaggcacaagaacaacactggaatggggacaatatcagccgtaaaggaagcagagagcagggttccggtggtcagccctgggtggggtcaggagtccacgagtgatgagggttaagtttgaaggccagaagggtgtcggcagccacggagagaacaagtacagttaaccctgggaaggcagaggccaggtggtctcaggaccacggtcaggaagagatgcctcacgtggcggggacacagcgggagcagttcaggcaccacggctcgtccactggggccccagcttctcactgcaagcagtgcaggtggacatctgccccagaggcagcagggagcgtgtgtcccaaagcccccagcactcatgccctgtgcaggcgccgagcagccggccctggccggggcggttccctcctaggcctgtccaggactcggcccccacaaacacatggaccgacagacgaaatccctcaggagtgtctctgcgccgacg

SEQ ID NO: 440069 - DNA, 1312 bp, Homo Sapiens
  misc_feature (77)..(77): n is a, c, g, or t
ggaggagttgaagtcattgaagctcttaatgaggaagttgacaaggcagatggaagaggtggtggaggaggtggggnagtggggctcacaaacacaggtgttctgcctgtagctggtgactgagggcgattttctatcaaacctgtagcagaactgatacaggtgggtatcggttttgcatctcctgctccatgcattggtggaggtggaggtggttcatgtggtctgactaataccctttcctcagctctagtcagaagctcactcatctgactaaatggcaaggcagaaagtgagtaagatccatccatatgatccacgtatgtctgaggtcttgtttcaaaatgagaggctgggccattagcaacttcaatatgcttatgtaagagattagcatcatcttcagccagctctggaccttgggccagcttctgccattctcgccgcctgtcatgaggtgctcttggcactttttctggttcatgaggacgatctagatttttctgcttctgcttcctcttttccttcctcttatcctctgtatcttgcaacattttttctttccatagatcaaagaaatacgaaggattggtataaaacttcagaccttctttaccatcatctctataaggagtgagtatattgagaggtggaggctgttcacaaacatcgtacgtctcctgtaatggaataggcaaagtcttgcgatcgaaaagctgctggtcttgaattgtagaacttcggaaagctttcctcattgttatatcttgcaaagacaattcttcttcctttggatcaagctgtgtaacactaacagataaacggtccacacgttcttgcaatgagttgactctgaaggaaaaactatgtgcttcattgaataattctccaaatatatcttcagcatatttacttaggctacttagttgtctaattatatttgccaaggaaatattggttacacattccagttcattcttaatgcctctaggcagtgctgtgtggcacaagtgcctaggatcgatgtttcttttcactagcggcatcttgagattaacctttgtgccagttcaccgtgaaatcttgggggctcacgccttaccccttcttcatgcttcggcagcggtcgccggtccccctcggctcgcgggactccgcctagagcccccaggagggtcgggctctggggcggaacccgctcagggcagcggcccaggcgccaggccacagggaacgccgcctggggcgccaacccgccgccggacccaccgtgtgctcgacgcgcgagtgaacaacaccgcgagctgccgtt

SEQ ID NO: 440070 - DNA, 1504 bp, Homo Sapiens
  misc_feature (74)..(74): n is a, c, g, or t
  misc_feature (76)..(76): n is a, c, g, or t
  misc_feature (284)..(292): n is a, c, g, or t
  misc_feature (295)..(352): n is a, c, g, or t
  misc_feature (389)..(389): n is a, c, g, or t
  misc_feature (511)..(511): n is a, c, g, or t
  misc_feature (1300)..(1300): n is a, c, g, or t
ggaacccggtccctcctgggacccttccagtagattggatttcactccatggactcctcctcccctctcccccntncccctcaggggagccggcagagccaaacaaagaaagggattaacaagaaaggaagaagctgtaggactaaggactgaggatcctggggtgtcccccaccactttcccctgccctgtcgcaggggcaagtgaggagggggaatccagaattaaggcctagcaggcctataggaaccctcagagatgtgtgagatttaagagatctagannnnnnnnnaannnnnnnnnnnnnnnnnnnnnnnnnnnnnnnnnnnnnnnnnnnnnnnnnnnnnnnnnntactacaaaataataattattaataataataattcanatttatttcatataatcctagagagagaaagaaacaattactagttacttagtagacaatattaagatagcttaaagtttagtagcattgagggcccctgggtccagtagaatgtataaaanttgtaaggaaaagataaatagaggagggaagtggctgagtccaccctgagttgcccaatctttagataccacgggttggatcaggttgctagtttaagattgggagcttccagtctgctggggttgattctgagaatccttggatttttaaattgtaggacaaagaaatgaggggttcatttcccagggtcttggaaaggatgcacactgatcatctcaataagacaggggctgggttgggggcagcagaggaggccaagcacattcacctgcacccctagtacctgggcagcccatactccaatgtggtatgtcccctcctggggctcccagctcaaaccctcccatgcctgcttcccccaggcctaactgaggaagtccttcttgaagtgtgacctcggtccacttctctacagattgatttaagagcctgggaagtcattccacaaacagacacacatgcacacacgcttctcaccttcagagcttcaagagcactgaggcgatcagtcccctacccctgttcccatccagctttccacttagctttgacctccatggcagcagtagcagtaacaatctcagtaattgttctttaaagctgactcgttcttcacctacttgcaaagtgctttcttgtctcataaaagttagattccaagaaggacttcccacggagtggagtggaaacactgtccttgaaggcctgggagaaaggcatccccatgggcacagaggctggggaaaggcacagggactttgggtgaccctaaccctgaccctctgctncagttcacctccatctatatgtgttcagttagggggtcatctactgtaccctggcctgggaacacattgcccttcccacacaaaactggagggcttggccttttgcgggtgagaaataaacatttttaaagcacttgcctttttaccaaccccagctttgaatcactgggccctttcccctcctacccaagggggttgaaaggg

SEQ ID NO: 440071 - DNA, 1627 bp, Homo Sapiens
  misc_feature (104)..(104): n is a, c, g, or t
  misc_feature (135)..(135): n is a, c, g, or t
  misc_feature (151)..(151): n is a, c, g, or t
  misc_feature (162)..(162): n is a, c, g, or t
  misc_feature (195)..(195): n is a, c, g, or t
  misc_feature (229)..(229): n is a, c, g, or t
  misc_feature (857)..(857): n is a, c, g, or t
  misc_feature (907)..(907): n is a, c, g, or t
  misc_feature (1605)..(1605): n is a, c, g, or t
ggtctgactggtgggcttggaagccagtgctggcttttgggccagttggcttttgtttgctgccttgtcgtgcccgaaaacggggtctggctgctggcccgtgnaggcccagggtgggccacagaaacagagcgnctgctgaaaggtacancggagtccctncgggtggaaggggcttgcttccgctctgggggnagggatggaccatgcttgaggggccacacccctncatctctttctctccacgagcgctccccgctgcaggcggccctgcatccgcgctgtctccggtgctgctgtgcctcttcttcttcttctgttctgcctgttggtcgcagttgaagcgcaaggaatagttggtccttctcaattttattccaaacggtgaggctttttcctctccacctggcatcacagggtctggctttgctatcccgtttgcagtctcgctgtccgacgaggtcgtgaactctgtgtgggccaccactttctgcggagggtaaggaaggcttgggacaaggaaagacgggaggtctttggcaaatttgcatccctcggtggtgtctgcgggctcccggtgcatctccgacttctccggacccttcccgagctcgcgaacaccagcaggaggaggctggggggctgtctcttcgctgggtcccagcatgggtctttttcgtatgctttcagcttccgtgctctgtttggaggtctccgtgccaccatcggaaaatttctgccaggcaggcataatagagaactttgcattgactggcggagtcttccgttggttcccgcgggaatcacaccggcccctgggagtggactcatcaccgggcctcaactggtccctctcngctgctgcgcgggtcactctctgcgttcttcaggattctggaccgaatgnaagcccattctgcgagtgcggacgcgctgtctgggagactcctgggggggcttagccttcccgctgcccgccctcgcgtcgccggggcctcggggagggttctccccagctggggcttccgcgtgcttcttctcctccaagcccaggagggacttgcacgcggtgtccttgatctggctcaggttgactgccgggccacagagtgcgcgcccgtgaccagaatggcggtgtggggaacgctcagggacgacggtagggcgtgctggactgggctggctttgggggcctttggttcctggggagcagcggtgagccccgtgtcctttgcgggcgtcacggggctcaggttgactttgggaaagagaatctgcttccctccggaggacacctggaacgtgtagggccggggcatggtctgtctctcgtccacctcctgccaccgcagctcctccaccttgcggccttgttctaagggcggcggcttctttcctctccaccggaggtgcgcggcttccaccggcccctcttgtttcaggagaggctccgtgtccccttcttctctcttttcctcgggcccaggacgatcggccccctggaaatccccgctccttccctgctgctctcttcgccgctcggcctctgggttctgctcctcgcaaatacctggctcctcggagtgttctctttgtcttcgggtntcaggcgttcctggtcttcgag

SEQ ID NO: 440072 - DNA, 1791 bp, Homo Sapiens
tggttaccacctcagacactggtctaagtccagggcagcctgggatccctactcctcttgaccccaaaggccagcaacgtgggctgacacccctccccggggcatctttggacgggtcctgcatccagcagggatgtggtcatctctgtcctctcagggcctgggagccagcgggtctggccgagtgttagggtggcttcctggtctacttccttagcagggagctggccacagccaaggcgcccccctgcacaaacctcacgaagttgtccccggccagcggccccatggcgtacaggccctcctggcgggtgctctggtaggtgaaggggtccacgtcaatggggttcctcttggcgctcagcggctggtcaggatccactgcaaagtcagcccctgccccaggcaggaaggagaggtcggggtgggagccgatgaggaccagcaccagggagaccccaaacaccttctcgacaccctcgaggtcctggaacacggcctggcagtcttccttgaagcacagcagctggtgcctggggaggctgcggtaaccctcataggggctgggcgacaggatggactgctcccgcatcatctggtgcaccttgtggtactcggggtacagcatcttgggcagctggttgaacaccaggccagggtcgtccacggcccggcggaaggcatggatcaccgggatgttgtagtggcgggcgtagaggaccgcgtcggccgctgacagccccgcgccaatgatgaggacagggtctgaggccggggtcaccgcacccacccttgtggcggcctccagggcagacagctcatggtggatgaagggcagggcctccccggggatgcccagccgggccgggctgtcgaacgtgcctgtggcgaggaccacgttgcgggcccacagcgagaagggctgctgggcctggttcctggtcaggaagccgctcacctggaagaggggcctggagtcctgggccccacagctgctgggatcgggggtcccccactccacggctgtgactacagcaccggacacaaagttatgccccagacccttcttgaccacgtagtccctgtagtagtgggcgatgtccccggcagtggcccggctgttgcgaagacctcttcgcttcttctgcatccagtccttgacctccaggtccgggagccccatccactggccttggctcaggatcaccatggagccttcgatggagtgccaggctcccccggggaggttccggcccagaaccacgtgggggatggcgtgctccttccggtgcttccaggtgaggaccgacttcatgtttcccccaaagtctgtgtctgggcgtagaagggcatcaaagagcagggccacggggctttgggatcggccttcgaggccttcggacaggtagtccaggtcctggtccaggatggagacccccggggcctcggtgagcttcctctgcagcagggggtgtgggtggatggcatctggcttcgtgtagggtgtgtagccggagagcaggtaggacaggcagataccagaggggccgttacccacaatgatgaccgggaggggctctgagctgctggcgccgaggtggtcctttctggaggagctcatggctggtggggggcttggggctggcagcggacctgacaggcagtggtgcaggagcccagtgagcccggccaagttgtgcactaggagggtcaggggaacacggatcacagagtcccccgtgacatcggacacccattacctgtggggatccctagactccggccgtacca

SEQ ID NO: 440073 - DNA, 932 bp, Homo Sapiens
cggggtcgcccactccacggctgtggaacgcctcgggacacaaggttatgccccggcctttcttgaccaccgtagtccctgtagtagtggcgaatgtccccggcagtggcccggctggtgccgaagacctccttcgcttcttctgcatcccagtccttgacctccaggtccggggccccatccactggccttggctcaggatcaccatggagccttcgatggagtgccaggctccccccggggaggttccggcccagaaccacgtggggggatggcgtgctccttccggtgctttccaggtgaggaccgacttcatggtttcccccaaagtctgtgtctgggcgtagaagggcatcaaagagcagggccacggggctttgggatcggccttcgaggccttcggacaggtagtccaggtcctggtccaggatggagacccccggggcctcggtgagcttcctctgcagcagggggtgtgggtggatggcatctggcttcgtgtagggtgtgtagccggagagcaggtaggacaggcagataccagaggggccgttacccacaatgatgaccgggaggggctctgagctgctggcgccgaggtggtcctttctggaggagctcatggctggtggggggcttggggctggcagcggacctcttgtctgcactgcatatttccccggcagcagcctctcagtctccacttccccatcccacggtgcctggtctgtggcttcccagtggttttgaatgtgtaaactgttaggtgattatcggtaacagaattgctgagttgctcctcgaaagcttgactaagacaaaggccgatactgacaacgaaggggccgggtgcagcagaggtgacagaggtgcccagtttggccggggaggagtggacacactggggttggccctcccccaggggacacccc

SEQ ID NO: 440074 - DNA, 2342 bp, Homo Sapiens
aaaaaaaaccatgaatcatttattctttggttgtctacacagacacttaagtactgtatcgctgttatgcagcggcctgtggaggcccctgggggtggctgggcctgtgtcctgagccctcagccagatccagggggtgcggtgtctggtcatgtccactccaagagcagtagcaccatgtagaaggcttcgattcactgcctgagagagactcttgtgcaggttcgggggggccctgctgggcatccaggggctgctccctggtgacagccttcactccatgtgggttttcagtgcctgaagagaatcccacggctcttccacactgaggctgcacctctgccgtcacggtcttggcatccagttcagtgaaataaaagtttccgccatcgaagtccccatttaggtaaaggatggcgctgtagtcgcggaaggtgtaggctggaggctctttgacacacacgagggtctcggcattcaggatgcagttgtccacgtggactggatgactatcatccttcctctctgcctggacctcttcgatggcagtgcggcacaccagatgagagtaggaaaagtagaggggcgtatccaggcggaagtaggactccatgatgcgccgcaccttctccgtcacgttgtagtacaggtgggcactctgcagaggaactttgccttcttgccccagcttgagggctttgaagacagtgacaccatagaacttttcattgggagtatgtggggaggtctgaccccggtagccatctcctgaggttgctgccacattggtcagtctctgcagctcctgacactcgtggtcagagattacgccgtccatcaccacccgctgggaaccattcaggagtttggagttcatggtgagactgatgccttcatacagcagggggccaccttcccgggtcagtctgctcacatccagtgactccttggtcttctcttccacaagggtctcgatttccttcataaggttcccaatctcctgggagatgcgtacggctgtttcccgttctgacttctgtttctcttgcaatctcttgggaatcacttcttctggagtccatgaatccggatccacaaagggaattccaaaaacatcataagcgaagaaaagcagttctttttccagtaggcttcgctgtcggtactccttggcactctcacgggggccgatggatctggtgtgttcttctccaagcatagctgcataataggccaaattttggttcatcacctcgtcattggggaagaagagaagataggtcttggcacattcaacagcctgtgtataattcccaatgttatagtaggcaaactgcagataattataatgcgatgggaggaagtcttcaaagggcttctctcgacttgggtgggaagcaagctccgtgacacagttctgcttacagttgaggacctggatgtaatgatctgtgatggcctggaagaggtcagcgttgtactcaaggtagttgtagccatcgtagtcatagggcccttcgcagagggcacggcactcctcataggccacaaagtattctgcagcgccgcctctaggtggggcacagcttcctgtggctgttcctctgagtagagtcgcactcccagtcgaaattcttgcatatggggttgagtctcaagatccttgaagtcggcctccttcactccagacatggtttggtaatagtctaggttctgctgcatttccatgtgctcaggattgcccacgaagaaggtgtgtgctgcagcaacagctttctccaacttgttgatcttgaagtaggcgacctgcaggtagttgtaggggctccgcttgcggaactccagctccatctcttcgctgagcgagtgggcggccggcggcccgaggcagcggcgcaggcaggcagcgcgacgcagaaggcccccgaagaagctcaggtcgcgcagggcggcggcgcccgaggcctgggccgggctgggggaccagtcggggtccagctcccacgggaagtcggcggcacactgggtgcggcagcgcaggcgaagggcgcggagggctgcccgggagcgcagcgcccgttccatgctcaggaccaccccgggccagtccccgcgcgcgtaggctgcggtcccctcggcgaagagcagatcaggcgtcaccatgccccatcctgcctcggactcgacctcggcttgggaggcagcggccacgacagccagcagtgtggtcagcagcttcaacgcgcgtaccgccatcgctccctcagacctaacggaaccctcgtgccgattttccacccagcctcgtaccatagaccgtatatttttctctctctctgaaa

SEQ ID NO: 440075 - DNA, 449 bp, Homo Sapiens
tttttttgacagaatgggcaaatttccattgtctgaacaaaccaagtaaaaaaaaccatgaatcatttattctttggttgtctacacagacacttaagtactgtatcgctgttatgcagcggcctgtggaggccctgggggtggctgggcctgtgtcctgagccctcagccagatccagggggtgcggtgtctggtcatgtccactccaagagcagtagcaccatgtagaaggctgtgagcagggtcccctcggctgagtggcagatgtaggctcactgctctgcagccccgaggggtgggcccagttcagagtgcagaagagttcctctccatggggtctagtcacccatccgtctgacctgggacgctgtcatagctcatccttggggctttcgattcacttgcctgaggagagactctttgttgcaggttcggggggggccctgct

SEQ ID NO: 440076 - DNA, 1038 bp, Homo Sapiens
  misc_feature (741)..(741): n is a, c, g, or t
  misc_feature (932)..(932): n is a, c, g, or t
  misc_feature (957)..(957): n is a, c, g, or t
  misc_feature (968)..(968): n is a, c, g, or t
  misc_feature (972)..(972): n is a, c, g, or t
  misc_feature (981)..(981): n is a, c, g, or t
  misc_feature (984)..(984): n is a, c, g, or t
  misc_feature (997)..(997): n is a, c, g, or t
  misc_feature (999)..(999): n is a, c, g, or t
  misc_feature (1001)..(1002): n is a, c, g, or t
  misc_feature (1004)..(1004): n is a, c, g, or t
  misc_feature (1009)..(1010): n is a, c, g, or t
  misc_feature (1015)..(1015): n is a, c, g, or t
  misc_feature (1023)..(1023): n is a, c, g, or t
  misc_feature (1032)..(1032): n is a, c, g, or t
aggctggtaccggtccggaattcccgggatgccgaggaagccgccctgtggagggatctggtccgcaaagtcctggcatcctacttggagacagccgaggaggcggtgaccctgggcgggagcctggatgaaaactgtcaggaggtgctgaaatttgccacccgggagaatggcttcctgctgcagtacctggtggccatccccatggagaaaggccttgactcccaaggctgcttctgcgcaggctgctcccggcagatcggcttctcctttgtacgacccaagctctgtgccttctctggcctctattactgtgacatctgccaccaagacgatgcctcagtgattccggccaggatcatccacaactgggacctcaccaagcgcccgatctgcaggcaggccctgaagtttctgacgcagatccgggcccagcccctcatcaacctgcagatggtgaacgcgtctctgtacgagcatgtggagcggatgcacctcattgggatggagccgggagcagctgaagctcctgggggattacctgggcctgtgccggagtggcgccctgaaggagctcagcaagaggctcaaccaccggaattatctcttggagtctccgcataggttccgtgttgctgacctccggcagatcgcagatgaggtatatgaaggattcctcaaggccctgattgaatttgcctcccagcatgtctaccactgcgacctgtgcacccagcgcantttcatctgccagatctgccagcaccacgacatcatcttccccctctgagtttgacaccacagtcaggtgtgccaagtgcaagaccgtcttccaccagagctgccaggctgtggtgaagaagggctgcccccgctgtgctcgctgacgcaagttccagcaacagaacgttttcgcctgatgccctctgctnatcccactctgaaggccgggggcgngggctggccanaggngaaaggaancangacgccggggatntntnncnaacgnncccancccagtcnggagaagtntgcggg

SEQ ID NO: 440077 - DNA, 976 bp, Homo Sapiens
  misc_feature (56)..(56): n is a, c, g, or t
  misc_feature (80)..(80): n is a, c, g, or t
  misc_feature (86)..(86): n is a, c, g, or t
ttgaggttcgcccttgttgggtgtgcagccgcacgtagccctctttcttcacaaantggtagccgcagcacatcttcgtngattgncagctgcttcatgtgtgttctccgggaccatcgcgtggaggtgaaagaaagcgctgacctttcccctgtggaaatagtgggcagcgttcagcttgtccactttcttcttctcccggggccttcatggtggctgccagaatctcgtcccctttgaactccttgtagagctcctgcagggtctctcgggtctcggcatttgtatttttcagataataagacgggtcctgtttggccttctcttcatctgggtctattattttcatgttattcttcacatgatagaagttagagacattgaacttgtccaaattggtggggtcctggagggtgatgatgtcctgccgggagaagggctcgtcggtcagcaggtcccggaagttcttggccttgatatttagctgttccactgcctcataggcgtagacgttgccggtcgtcctcacagccacgatgtgggtgttgttggtgaacacggtaaacagcactgggcagtggtacttcccctcactgttcttggaaaagttcagcttgatcagggacctcccgtccagcttctctccattgctggggttggtcccgtacttcttaagccatggaacaatgttcagtaagtcaaagacgatgccatcgggagtgcagactgggtagacaaagggctgcagagagagactgcagtggtcaaaaggtaaacgacgaaaatttgtttgtgggagatctggcttcttgccaccataaaagtgagtgtattcagcacaggtaatgtacattttgtccttttggtgctgtcgcttccccatggcggagcggcggcggcgactagcgagcacgaaaaaacaacggctgacaactcagaccctcgtgccgaattcgccacccaggcctcgctcctt

SEQ ID NO: 440078 - DNA, 1165 bp, Homo Sapiens
  misc_feature (286)..(286): n is a, c, g, or t
  misc_feature (411)..(411): n is a, c, g, or t
  misc_feature (537)..(537): n is a, c, g, or t
ttaaaataaatgctccaacataacgtagttttgaaggccgcagtacgatgttatacacagagctatatttggttaccaaactttgtatgctaaaaaggaagagaaagcactacttatgttcagcttttgatcgttcagcctgatcttccaggtaagaggcagaatggcacggcctgtggcaacccccagtttgccccctcccagggcatggcagcagtgagttttcagtgcaggcggtcctgttgcacccctctccttcccacccgccctatcctggtcagggcgncaggtcatagctactggaatgctttgtgtcaattggcatttttttcctgaaggctacacattccccggtatatgcttcctgaagggtttgttagttgaggcttgttctccatgggttgaagttcntctgatactgtcccatcctgaaaagtgggtatcttgtgagcttagatatcactggatttgtacatatctgaaagcagtcttgtaattggcacattgcccgatggtttttttgaaaaaacacttctntctatagttgatgggctaatagaacgtaaagctggcaaaagcaacaggagttttccaaagcgacagggttgagtgggatatctggtatggatgtagctgttgagcgttagctgagcctcatcttgaagggctgcaatggcggcagcattccggaaacttctcagttcagaactactatgtgtaggaacggctttgaaagtgacgatgcattttagacaggcaaattcagtagcatctaaccggagttgtctaaatcgagccaccacctcttgtaaagcctgtatttcagatatgatcttgttcagcttctgggaatctgtgttgtcaccgttcatgccagatacagccagtagagtgttagcatcaaccggaatggcccattgtgctattcctagaacaaacagttctctccaagcatcttccaaaagcatcagctggtcttgcaaagacagcgtggagaaggctggcacactcttagcccacttgatgctcatgaagagaagtctggcagctgattcacacaccgactccgtggccacttcatagagatacattggggtcccattcacttcatgggggtacttgggcgtgggctgagccaggctcacgagggtctgccgctctggag

SEQ ID NO: 440079 - DNA, 897 bp, Homo Sapiens
atgggtgttcgggacacgccctcggggtccttggggcgtagcttcgccccatgaaacccccgggggggcacgaaggatgccccacggcacccttggcccgagggcggccccggggttaaaagccacaaaagcccgcggtcccgggaaggacggtccagtttttagccaggcgcccgggagggttcgcggcgggcccggagccccggctgggcccgtgaccaccagggggcctcatgagtgcggcacccacgcaagcagttgagcagcaggccgcccaggatgaggaagccgccccgccaagccgtagcggtcctgcagcagctgccccagcgggctcagggcacacaggaagacagggctacctgctgccgccagcccgttggccatggggcgccgcttgctgaagtagcggttcagcatgatgagcgagggctggaagttgagtgccaaacccaaccccgtgatgaccccagtggtgaggtagacctggatgatgctccggcaaaaggacgcagccaccatgcccagcgacgcaaagagaccccccacaagcatgacgggccggcagccaaagcggttcacgcacacactgcagagcggacctgtcccgtagagcatggccagcaggatggaggagatccaggctgtgtcgctgtagccgatcccaaactcctgtatgagctccttgaagaagacactgacggccttggggaaggcgtaggagaagccagtgatgacgaaacagccgaagagcacggcccagccccagccgccgtcaggggccttgacgcctgtggggccctcgtccaccacggcccctcccatggccaggagggttggttccgcctcacctgccgccgctgggccgcctcagcccgcctctcgccgcctctgccc

SEQ ID NO: 440080 - DNA, 886 bp, Homo Sapiens
gcggcgagaggcgggctgaggcggcccagcggcggcaggtgaggcggaaccaaccctcctggccatgggaggggccgtggtggacgagggccccacaggcgtcaaggcccctgacggcggctggggctgggccgtgctcttcggctgtttcgtcatcactggcttctcctacgccttccccaaggccgtcagtgtcttcttcaaggagctcatacaggagtttgggatcggctacagcgacacagcctggatctcctccatcctgctggccatgctctacgggacaggtccgctctgcagtgtgtgcgtgaaccgctttggctgccggcccgtcatgcttgtggggggtctctttgcgtcgctgggcatggtggctgcgtccttttgccggagcatcatccaggtctacctcaccactggggtcatcacggggttgggtttggcactcaacttccagccctcgctcatcatgctgaaccgctacttcagcaagcggcgccccatggccaacgggctggcggcagcaggtagccctgtcttcctgtgtgccctgagcccgctggggcagctgctgcaggaccgctacggctggcggggcggcttcctcatcctgggcggcctgctgctcaactgctgcgtgtgtgccgcactcatgaggcccctggtggtcacggcccagccggggcttcggggccgcccgcgaaccctcccgggcgcctgcttagacctgaagcggtcttccggggaaccgcgggcttttgtggcttttacgcccgtgggccgcccctcgggctcatgggggcctgggggggcttctttcgttcccccgccccgggggttccggttgggtgggagccttacccccccaaggggaacccttggggcg

SEQ ID NO: 440081 - DNA, 904 bp, Homo Sapiens
gaggcggcgagaggcgggctgaggcggcccagcggcggcaggtgaggcggaaccaaccctcctggccatgggaggggccgtggtggacgagggccccacaggcgtcaaggcccctgacggcggctggggctgggccgtgctcttcggctgtttcgtcatcactggcttctcctacgccttccccaaggccgtcagtgtcttcttcaaggagctcatacaggagtttgggatcggctacagcgacacagcctggatctcctccatcctgctggccatgctctacgggacaggtccgctctgcagtgtgtgcgtgaaccgctttggctgccggcccgtcatgcttgtggggggtctctttgcgtcgctgggcatggtggctgcgtccttttgccggagcatcatccaggtctacctcaccactggggtcatcacggggttgggtttggcactcaacttccagccctcgctcatcatgctgaaccgctacttcagcaagcggcgccccatggccaacgggctggcggcagcaggtagccctgtcttcctgtgtgccctgagcccgctggggcagctgctgcaggaccgctacggctggcggggcggcttcctcatcctgggcggcctgctgctcaactgctgcgtgtgtgccgcactcatgaggcccctggtggtcacggcccagccgggctcggggccgccgcgaccctcccggcgcctgctagacctgagcgtcttccgggaccgcggctttgtgcttttacgccgtggccgcctcggtcatggtgctgggggctcttcgtcccggcccggggttcgtgggggagctaccgccaagggaccttgggccgtggcccgaaccccaagggcccgcctttccctgctttaaccaatcctggggcttttc

SEQ ID NO: 440082 - DNA, 940 bp, Homo Sapiens
  misc_feature (847)..(855): n is a, c, g, or t
gggtccggaattcccgggatggcgggcagaggcggcgagaggcgggctgaggcggcccagcggcggcaggtgaggcggaaccaaccctcctggccatgggaggggccgtggtggacgagggccccacaggcgtcaaggcccctgacggcggctggggctgggccgtgctcttcggctgtttcgtcatcactggcttctcctacgccttccccaaggccgtcagtgtcttcttcaaggagctcatacaggagtttgggatcggctacagcgacacagcctggatctcctccatcctgctggccatgctctacgggacaggtccgctctgcagtgtgtgcgtgaaccgctttggctgccggcccgtcatgcttgtggggggtctctttgcgtcgctgggcatggtggctgcgtccttttgccggagcatcatccaggtctacctcaccactggggtcatcacgggggttgggtttggcactcaacttccagccctcgctcatcatgctgaaccgctacttcagcaagcggcgccccatggccaacgggctggcggcagcaggtagccctgtcttcctgtgtgccctgagcccgctggggcagctgctgcaggaccgctacggctggcggggcggcttcctcatcctgggcggcctgctgctcaactgctgcgtgtgtgccgcactcatgagggcccctggtgggtcacgggcccagccggggctcgggggcccgccgcgaaccctccccggggcctgctaaaacctggaaccgtcttccggggaacgcgggttttgcggcttttacccgagggaccccttcccccattggagctgggggctacttcgtnnnnnnnnngggttcaggggtgacccctccccccaagacacctggtacccgttccccaaacccatagggccccctttccttggacccacaatcg

SEQ ID NO: 440083 - DNA, 1369 bp, Homo Sapiens
gactaagctggcggccgccacctcaggctgtggctctttgggcttcttcctaatgcagaagaagttgcccagcagcaaaatcagggaggaggtgagcacctcggcccccgccaggatgaacacgtacatgtagacgtgggtcgcatccaggagtttgcctcccgaagggggcccgacgagcacggccaccgcctccatcagcagcaccaggccaatggcactggagaacttgtgggtgcccacgatggccatgagcacctcgaactgcagggcccccaccatgccgtaggagatgccaaagaagatgcagaagaccacgaggccgccgtagtcgcccgccgtagagcccgccaggtccgcgaggccgttgaagaacatggagaagctgaagaggtagacggagtagggccgcaccttcccaagccccgccacgaagcccgcggccggccgcgcgaagatgtcaatgaagcccaggatggtgagcaggaaggcggccttggtgtcgggcacgcccaggtccttggcgtagctcaccacgaacacgggcgggacgaagagccccagcaccatgaccgaggcggccacggcgtaaagcacaaagccgcggtcccggaagacgctcaggtctagcaggcgccgggagggtcgcggcggccccgagcccggctgggccgtgaccaccaggggcctcatgagtgcggcacacacgcagcagttgagcagcaggccgcccaggatgaggaagccgccccgccagccgtagcggtcctgcagcagctgccccagcgggctcagggcacacaggaagacagggctacctgctgccgccagcccgttggccatggggcgccgcttgctgaagtagcggttcagcatgatgagcgagggctggaagttgagtgccaaacccaaccccgtgatgaccccagtggtgaggtagacctggatgatgctccggcaaaaggacgcagccaccatgcccagcgacgcaaagagaccccccacaagcatgacgggccggcagccaaagcggttcacgcacacactgcagagcggacctgtcccgtagagcatggccagcaggatggaggagatccaggctgtgtcgctgtagccgatcccaaactcctgtatgagctccttgaagaagacactgacggccttggggaaggcgtaggagaagccagtgatgacgaaacagccgaagagcacggcccagccccagccgccgtcaggggccttgacgcctgtggggccctcgtccaccacggcccctcccatggccaggagggttggttccgcctcacctgccgccgctgggccgcctcagcccgcctctcgccgatcccgggaattccggaccggtcca

SEQ ID NO: 440084 - DNA, 724 bp, Homo Sapiens
tccccttcgccctcccttcgttcgtcctcctcgggtctccaagtgccactccttggccatggctccctcgagctcaaggccattgatgacacgtgagcgtccgcctgcttggtgcctccttgggtccctgcagctcaggaacagccacctttttcaggaacggctctcaggagcctgtcctctgagacggtctataaatacagccgacccgtttggacaggggtccaggatggacttcgcagccctgcctggtttggccccggtggagagcatgttgctgcccagccaaggatcctggccccaaagggcttccctccagggtttccctggggagcaggcggaaggccctgttgctgagcccaagctacacgcgcccagcaggatccgccagcagagccccggacagggggcccggtgtgaggccaccctcacctgtcccgtagagcatggccagcaggatggaggagatccaggctgtgtcgctgtagccgatcccaaactcctgtatgagctccttgaagaagacactgacggccttggggaaggcgtaggagaagccagtgatgacgaaacagccgaagagcacggcccagccccagccgccgtcaggggccttgacgcctgtggggccctcgtccaccacggcccctcccatggccaggagggttggttccgcctcacctgccgccgctgggccgcctcagcccgcctctcgccgcctctg

SEQ ID NO: 440085 - DNA, 1513 bp, Homo Sapiens
ggcccacggagaagagttccggaaaccgggagaagaggcctaggggctgccaacggtcactggcgaatggctaacctggtacacttagggaactggtgccccagcgataatcgccagctgaaagggccccatcaaccttgatgagcacagccatgtagtcacggaccaaagaactgacggtagagcaggacaacaggggcggagctggtgctgaagctgaaggagacctcctctcccgtaacgttgtagacaggcccacggtaaccgggcacaggccgaccaggccgggggtattcgggcaggcggtacccggggccatggtagccaggcacatagcccggagtatcatagcccgggatgtagccaggttcatagcctgtcactgtccggctcagcatgtgggagtactccctgtctgcagagctcagcgctgactgtaggttatagcgcatccaggtgcccggctcaaaggaaccacctaatatcgtggttgcagtatggcccatcaaaaagccgtgaggtcacagtcacacgtgtagtagctatagcgctccacgcagcggcctccatggaaacaggggagccgagggtgggcacagtggcctgtgcagttgggtgaggtaccctcagaggcattggcacggccctccaggttcagagtcactccgttcagacgcatggccctcaagcaacccacaaaggggcgtctcttaagctctgcagatcccacatagaggggctggtcatactccatccagatgtaggtctgcagtggcataggccgcagaacccagggccggtgatccactcggagccgggcctgcttcacgttgatttcagcccggaccaggtgccactcgtcatcattgaactcaaagtcgtctgagtgtactgtgaggttctcatccccattccccacatcaaaggcgaagaccacatcccgggatgtgttgagttccacccgcacataaggtcggcgccactggcagtaagggccccccatattctctaggaagacccccgagggagcagaggtcctgaagtagaaggagacatccaggctgtggttggcacggattggggggaagcgtagtgcagccccggtgtggaaggaaatggtgttccaggaatttcgatcgccatagcagcgcagaggcctcaggaagaactgggcctcagaagtggagcggttcgtatcccctatcactacctgagtgacaggcagatggtccacaaaggtcagcagtcccttgtcagttctccactggggctggtcagcgtcacagttgcagtacaaggcagggtccacacagctccggtccagaccacaggcacagcgctggatcccaggctgggagcctccccagtagaagtgctgctcctcatttcggccaatccaaaagctgtaggggtagcctcctgcagtgttgagcagccgggaattgtagcaggagaactcgatccactgttcacaatgctgggaagccctcgtgccgaattcgccacccaggcc

SEQ ID NO: 440086 - DNA, 1525 bp, Homo Sapiens
  misc_feature (24)..(24): n is a, c, g, or t
  misc_feature (39)..(39): n is a, c, g, or t
  misc_feature (74)..(74): n is a, c, g, or t
  misc_feature (82)..(82): n is a, c, g, or t
  misc_feature (95)..(95): n is a, c, g, or t
  misc_feature (97)..(97): n is a, c, g, or t
  misc_feature (113)..(113): n is a, c, g, or t
  misc_feature (121)..(123): n is a, c, g, or t
  misc_feature (129)..(129): n is a, c, g, or t
  misc_feature (138)..(138): n is a, c, g, or t
  misc_feature (140)..(140): n is a, c, g, or t
  misc_feature (152)..(152): n is a, c, g, or t
  misc_feature (170)..(170): n is a, c, g, or t
  misc_feature (182)..(182): n is a, c, g, or t
  misc_feature (203)..(203): n is a, c, g, or t
  misc_feature (289)..(289): n is a, c, g, or t
  misc_feature (333)..(333): n is a, c, g, or t
  misc_feature (350)..(352): n is a, c, g, or t
  misc_feature (354)..(354): n is a, c, g, or t
  misc_feature (358)..(358): n is a, c, g, or t
  misc_feature (360)..(360): n is a, c, g, or t
  misc_feature (371)..(371): n is a, c, g, or t
  misc_feature (378)..(378): n is a, c, g, or t
  misc_feature (380)..(380): n is a, c, g, or t
  misc_feature (382)..(382): n is a, c, g, or t
  misc_feature (384)..(384): n is a, c, g, or t
  misc_feature (389)..(389): n is a, c, g, or t
  misc_feature (395)..(395): n is a, c, g, or t
  misc_feature (397)..(397): n is a, c, g, or t
  misc_feature (413)..(413): n is a, c, g, or t
  misc_feature (476)..(477): n is a, c, g, or t
  misc_feature (479)..(481): n is a, c, g, or t
actctcccctcccccaatattgangctctctcccaactnctgcctattcggcattctctatctaaccctccttncccttctncttcctatactanantacccctggtcagctnttccccannntcaggncctcagctntnggggcgtgtgcngagcaccaagcagagggngctgagcccggngccagcttctccagttctgancaggacacaggtaccagggtgacatcagagagcttctgcagtgcctcctggctgttgggcagatccccacctccacggtgcaggangaaagggggcacccaggcaacccaggacgaagaaagagacagtnagcagctgcgtcatctnnntnggtntnggtggcatatnggtgatntntnancactnccattncncggacagccttttggncagcgtcgctgctgcctgccacaacagtgcgaggtccccccatgccgcagagaccgcgcaggnngnnnggacccgagactggcacagtggagacggcgaagtcctagggtgagcgaagggaggtattcaggggcgcgggaggggtgatggggtatcttcaaacataggctgctctctgcctctcatttcctcagcgggcgcccaggcccttccgacccccacctgcaccccctccctccctaggctggtcccgctccgcacccggaacgtgtccgccacgatctcagctcctcggtgattggtccatttggagaggcctacgaaaaactcccggcctgagtccgggaggccgcggaggtttgagggcgggagtgagttagaaacaaggctccagacggccgagtctcccaaactctacttccctgtgccaagacctatgcctccccccagcctcaccggtgaagagaacgtcagtgccatccagcgtcgcgttctcgtctcctatttccacaattcggagccccaggtcttgcagggctttgcggactccatcgacctctggcctacgagcggggctccagggccgcgtgattagggccgtgtccccttggatcacggccgtgtcgccaagcagcggtcccagcggcaatgactcctcaggtggcagttctagcagctgtagccccagtcgttgcctcagtttacctcccagcaccccgtgctccctttgagctttggccagatccagagcgggaaggccagcccccgcaccttcccccgacgccaggctctctgggactccccggatcagggcatgggagcagcggcccagcccctcccccggcgtccccatcccatccacacagactccccctccaaccgctcggatttcttagttttcttgtttcttcacctgtctccagcggccacccccactcctgtcgcgctgtgatctcggctggggccccaccccccgaggacagagttggtggagaagggagtccccgtcttcaagcctcggggactgggagctctggcttttagcgggggtccttgtgtaggcgagctcatatactacgatggggcaggggcgcgacggtctggcggctccg

SEQ ID NO: 440087 - DNA, 1359 bp, Homo Sapiens
tttaaaaggtcaattctattttattggttctgagagggaggattcacccagtggatccttttccctacactctcccctcccccaatattgaggctctctcccaactactgcctattcagcattctctatctaaccctccttccccttctacttcctatactatcctacccctggccagcagtaccccaaggccaggccctcagctgtgggggcgtgtgctgagcaccaagcagagggagctgagcccggcgccagccttctccagttctgagcaggacacaggtaccagggtgacatcagagagcttctgcagtgcctcctggctgttgggcagatccccacctccacggtgcaggaggaaagggggcacaccaggcaacccaggacgaagaaagagacagtcagcagctgcgtcatctgggagggtcagggaggcatatgggtgatctgtcagcactgccattgcccggacagccttttgggcagcgtcgctgctgcctgccacaacagtgcgaggtccccccatgccgcagagaccgcgcaggtgggagggacccgagactggcacagtggagacggcgaagtcccggaacgtgtccgccacgatctcagctcctcggtgattggtccatttggagaggcctacgaaaaactcccggccggtgaagagaacgtcagtgccatccagcgtcgcgttctcgtctcctatttccacaattcggagccccaggtcttgcagggctttgcggactccatcgacctctggcctacgagcggggctccagggccgcgtgattagggccgtgtccccttggatcacggccgtgtcgccaagcagcggtcccagcggcaatgactcctcaggtggcagttctagcagctgtagccccagtcgttgcctcagtttacctcccagcaccccgtgctccctttgagctttggccagatccagagcgggaaggccagcccccgcaccttcccccgacgccaggctctctgggactccccggatcagggcatgggagcagcggcccagcccctcccccggcgtccccatcccatccacacagactccccctccaaccgctcggatttcttagttttcttgtttcttcacctgtctccagcggccacccccactcctgtcgcgctgtgatctcggctggggccccaccccccgaggacagagttggtggagaagggagtccccgtcttcaagcctcggggactgggagctctggcttttagcgggggtccttgtgtaggcgagctcatatactacgatggggcaggggcgcgacggtctggcggctccgcgacgcgtggtcgacgatatcccggaattccggaccgtaccag

SEQ ID NO: 440088 - DNA, 1738 bp, Homo Sapiens
ggaattcccgggatcgccagaccgtcgcgcccctgccccatcgtagtatatgagctcgcctacacaaggacccccgctaaaagccagagctcccagtccccgaggcttgaagacggggactcccttctccaccaactctgtcctcggggggtggggccccagccgagatcacagcgcgacaggagtgggggtggccgctggaggtgagtcttgcgtggggggccctgaaccgtgtgggggccggagtttgggggtgccgggcccatgcctgcaccagacagagagtatggggagccggtatttgggcgcggagctaggcggggtggactttgggacatagacggggaaccgggtcctggagccgggagtagtgccagcgccccggaaccacgccccctgttaccccgcccctcgcatttcgttttagacctctcccagtccttcgggactcggtctggtttatactaggtcgtgctaggggcagcgtgaccagccagggcggagagaggatgcttaactccttaggctcgaactcctcccttcctacccacctctctcccttctcgttcgggtattcaggacttccattccccagcccctgcctctccagctttctccttctgtcccataacccctgcgggtcgcgggctggacttccagtccctgcggtagcgagcagctgagggttaagggggcggggctgctgcatttttggggagtgagcgcatcctagtggctgccaagaggggcgcccgacagggacctcacaagcccccaagcaggggcaacaggtgttttggagattagagaccctagccttgttcctcaggctcctcttaaagaatctgacccctgagggtgctgggtagagtgaggtcgacaggagcggaaggtctggagtgggtggggcggagtgggagggacgcctagagatggcaggaggaagacctgggcgctcttaaccacccccaacgcccttgtctgcatgtctttttctctgtctcctccttttctgtttcttctcccagacaggtgaagaaacaagaaaactaagaaatccgagcggttggagggggagtctgtgtggatgggatggggacgccgggggaggggctgggccgctgctcccatgccctgatccggggagtcccagagagcctggcgtcgggggaaggtgcgggggctggccttcccgctctggatctggccaaagctcaaagggagcacggggtgctgggaggtaaactgaggcaacgactggggctacagctgctagaactgccacctgaggagtcattgccgctgggaccgctgcttgggcgacacggccgtgatccaaggggacacggccctaatcacgcggccctggagccccgctcgtaggccagaggtcgatggagtccgcaaagccctgcaagacctggggctccgaattgttggaaataggagacgagaacgcgacgctggatggcactgacgttctcttcaccgggcgggagtttttcgtaggcctctccaaatggaccaatcaccgaggagcctgagatcgtggcggacaccgttcccgggacttcgccgtctccactgtgccagtctcgggtccatcccaactgagcggtctctgcggcatggggggacctcgcactgtttgtggcaggcagcagcgacgctgcccaaaaggtgtccgggcaaatggagtgctgacagatcaccatatgcttcctagacctccagatga

SEQ ID NO: 440089 - DNA, 872 bp, Homo Sapiens
caaagccccttgggccattttgcccccgggaacaaggccttttttgggggaaggggttcggttggtttgcccttgccacaaaacagttggggagggtccccccccatggccggcagaaggaccgccggcaggttggggaggggaccccggagaactgggcaccagtggaggacgggcgaagtccccggaaaagtgttccggccacgatttcaggctccctcggtgattgggtccattttggagagggcctacgaaaaactccccggccggtgaagagaacgtcagtgccatccagcgtcgcgttctcgtctcctatttccacaattcggagccccaggtcttgcagggctttgcggactccatcgacctctggcctacgagcggggctccagggccgcgtgattagggccgtgtccccttggatcacggccgtgtcgccaagcagcggtcccagcggcaatgactcctcaggtggcagttctagcagctgtagccccagtcgttgcctcagtttacctcccagcaccccgtgctccctttgagctttggccagatccagagcgggaaggccagcccccgcaccttcccccgacgccaggctctctgggactccccggatcagggcatgggagcagcggcccagcccctcccccggcgtccccatcccatccacacagactccccctccaaccgctcggatttcttagttttcttgtttcttcacctgtctccagcggccacccccactcctgtcgcgctgtgatctcggctggggccccaccccccgaggacagagttggtggagaagggagtccccgtcttcaagcctcggggactgggagctctggcttttagcgggggtccttgtgtag

SEQ ID NO: 440090 - DNA, 1723 bp, Homo Sapiens
  misc_feature (440)..(442): n is a, c, g, or t
  misc_feature (444)..(445): n is a, c, g, or t
  misc_feature (447)..(447): n is a, c, g, or t
  misc_feature (453)..(453): n is a, c, g, or t
  misc_feature (455)..(455): n is a, c, g, or t
  misc_feature (472)..(472): n is a, c, g, or t
  misc_feature (474)..(474): n is a, c, g, or t
  misc_feature (480)..(480): n is a, c, g, or t
  misc_feature (492)..(492): n is a, c, g, or t
  misc_feature (494)..(495): n is a, c, g, or t
  misc_feature (522)..(522): n is a, c, g, or t
  misc_feature (524)..(525): n is a, c, g, or t
  misc_feature (527)..(527): n is a, c, g, or t
  misc_feature (1619)..(1619): n is a, c, g, or t
  misc_feature (1624)..(1624): n is a, c, g, or t
  misc_feature (1631)..(1631): n is a, c, g, or t
  misc_feature (1637)..(1637): n is a, c, g, or t
  misc_feature (1642)..(1642): n is a, c, g, or t
ttttaaattttatattaattttatttaagtatacacgtcatataaaagtttcatctcataattttaaagacacataattacttatatatataatgcttcaaactactttattaattatcattaatccttttggtccctgaatctgcctttgcttcctcttctaaggcttgatgcagaatataactgcccatggagggcaggggacaagaaattaagggtcccagggagacccagtttcagttatccttgatgatgctgagaggcattcagcaccacgaacatgttgttcaaacataaatgagaaaataaagtatctgaacaatcttcatgaggtttttccacacaaagtgtatttcacatttctatagatttaactactaacaagctacatccaaggaacttaactactactggaatcctcggggggtatcatcaatatnnngnntncaattngnactctctaaaatatttntncattgngctcctagattngnnggggcccacatttacagtaggtatgantnngnggggcttcagccactggacaaaagcgcttcatttctaggtagctgctgtgttcactgtaaggaatttccatatattgaaatgtttcctttggtctggggaataacatctgctatttctgagtgaacttgttagagtgtgtccatcctgtaggtcgaaatgccaaaatctgattgtatttcccaccacacttcttcaaatgactctgtaagcccttaaaattaatttgcatcattgggagaaggtgaaccaatgaactgcacatgtcggtagtgatgagtgaattaatttctggtatattgaggcactgtagagttttatatttttcctgggacatgcccacttttgaacctaaaacatcagcaatggctaggaagactttctcttttccaatagagtaagtgccacagacaacaagagcatgtgggtttagagttacagcctcaaaggcagtgttgatggcaaaccggataacctcttgctgagatggaaaggtgtattctgggctacaatatgtggtatctaagtacagcatatggactttctggtccgcaagaagagaacgttccatgctgggatctgctctgaagtctcccgtgtgtaatatgacagtaccattaggaagataaaagaggatcatgacagcacctggacagtgattggcatcaagcaaaacaactttgacaccattcacaatacattcagtgtccagtggcaatgggtgaatatattgttcttgcacatgaagcttgttcttcaacaaattgccagttatctcactacaataaactggaaatgtgaagtgtttagacaatccagcataatgatcagaatgaaaatgtgtgagaaaataggctgtgcaaccttcaaccacgccatactgaaaggcatcaactgtaaagccggttccaggtattttcttatagaatggacatgtcttttttcttgatcctcctacattagatgactctgggattttcttgttgcccctttgcagcccaccatgagctgattttgtgaagactttgactttacttaaattgactgcttcagattctgtattaataaggtgatctgatctcttctgacacgcntcttnctgcagngaattngactnttctacatctctttttttgacgctgtgacctctcactagaaagttccacagaaagctgactctcatgtaaagtacttgcat

SEQ ID NO: 440091 - DNA, 861 bp, Homo Sapiens
gtggagacgagtatggcatatggtcaagctcgctggacctgtgctaagttggggtcgcagcctgtcgtctgaacctgcattggggagggctgtctactgatttcctgtgtttcctggacccttcttaagcctagaatggctcaaattgtctgtttaaagctggcaatcttggaaagtaaccccagtatcattatctatggaatgtcaatttttctaccatagtggactgcaaagtaaaagatgcagaaactctcccctttgaatactttgttacaagaggctctttctggctgaaatgcaagagcttgtttgctgagctgagctccttaagatgctccaaagctcagctgtgtcacagcctctttctgtgttccaagcagtatgcagggatcccatcaatgaattctggaggcatcccaggggcttctttctacctctcctgtttctaccagctcaccttagattccaaaacctgagccagtctggtaagcactggtgaaaaaagctggagaaacacaagcacctttcatgagctctacaccaagttacgcctgaggttccaaatgcaggggagctcagctgccaggccaggatcctctggagcctttggatgtgggcagcatcctctttcaccagctcatccacgccacctcgcccaagactgtattccactgcaccaagagaggctgcaggaatgtggcatctttcagaccaagtctccttcccgaggcagagcccgagagcgtggcggcccgggcgcgagccgccctttgtctgcggccgcggcgccggcgcgctcggccaggccaggtcccagccacggcgcacggcgagctcccgcggtcgccccgacagcccgct

SEQ ID NO: 440092 - DNA, 872 bp, Homo Sapiens
tcttcaaggagctccagctccagcaaaacaaactcttgcatttcagcccagaaagagcctcttgtaacaaagtattccaaaggggagagtttctgcatcttttactttgcagtccactatggtagaaaacttgacattccatagataatgatactgggttttctttccaagatgccagctttaaaagaaatatgagccattctaagctttaagaagggttcaggaaacacaggaattagtagacagccctcccaatgcaggttaagacgacagcctgcgcccccaactagcacagctcagcgagcatgaccatatgccattctcgtctccagagagctggtggcagtgacctcactaggagaaaacacatccctcaggcgtgggacttgacagaatgaggtgcgcgagggaggccgctagccgagacgtggcctttcctgactgcccctgtgttacctggcagctccagatcactgagcccacaatggctgagaagggtgactgcatcgccagtgtctatgggtatgacctcggtgggcgctttgttgacttccaacccctgggcttcggtgtcaatggtttggtgctgtcggccatggacagccgggcctgccggaaggtcgctgtgaagaagattgccctgagcgatgcccgcagcatgaagcacgcgctctgagagatcaagatcattcggcgcctggaccacgacaacatcgtcaaagtgtacgaggtgctcggtcccaagggcactgacctgcagggtgagctgttcaagttcagcgtggcgtacatcgtccaggagtacatggagaccgaactggcacgcttgctggagcagggcacgctggcagaagagcatgccaagctgttca

SEQ ID NO: 440093 - DNA, 1058 bp, Homo Sapiens
  misc_feature (10)..(10): n is a, c, g, or t
  misc_feature (12)..(12): n is a, c, g, or t
  misc_feature (16)..(16): n is a, c, g, or t
  misc_feature (27)..(27): n is a, c, g, or t
  misc_feature (32)..(32): n is a, c, g, or t
  misc_feature (61)..(61): n is a, c, g, or t
  misc_feature (94)..(94): n is a, c, g, or t
  misc_feature (97)..(97): n is a, c, g, or t
  misc_feature (104)..(104): n is a, c, g, or t
aatgaaagangngggngcctcagtttntcggntttcgagacactgatacacacactgaganaaccctacgatgcaaacatgtgggaaaccttcnttntctccancctttcgaagactgaaaggattcacactggagagaaaccctacgaatgcaaacagtgtgggaagaccttcatttatcccccattcctttcgaagacatgaaaggactcatggtggagagaaaccctatgaatgcaaccagtgcgggaaagcattcagtcacccctcctcctttcgaggacacatgagggtgcacactggagagaaaccctatgagtgcaagcaatgtgggaaaactttcaattggcccatatctttacgaaaacatatgagaacacatactagagagaaaccctatgaatgtaagcagtgtgggaaagccttcagcttgtctgcttgctttcgagaacatgtgagaatgcaccctgaagacaaatcctatgaatgcaagctatgtgggaaagctttctattgccacatatccttacaaaaacatatgagaaggcatacgcgcagagaaactctataaatgcaagcagtgtgggaaagctttcagttggcctgaacttttgcaacaacatgtgaggacgcacactgtagagaagccctatgaatgtaaggaatgtgggaaggtcttcaaatggccatcatctttaccaatacatatgagactgcacactggagagaaaccttatcaatgtaagcattgtgggaaagcattcaattgttcctcatccttaaggcgacatgtgagaatacacactacagaaaaacagtataagtgtaatgtaggacatcctcctgcaaatgaattcatgtgcagtgcttcagaaaagtcacaccaggagagagatctgatgcaaagttgtaaatatggtgttgcctttatgagttccttatcctgaaagtggacactcaaggagtgtgtctgtagttcatttgcaaataaacatttagttgaaaaataattctccaaatactctctagctatcctacatgaattttacagatagttt

SEQ ID NO: 440094 - DNA, 1003 bp, Homo Sapiens
  misc_feature (523)..(523): n is a, c, g, or t
  misc_feature (535)..(535): n is a, c, g, or t
  misc_feature (539)..(539): n is a, c, g, or t
  misc_feature (547)..(547): n is a, c, g, or t
  misc_feature (552)..(552): n is a, c, g, or t
  misc_feature (560)..(560): n is a, c, g, or t
  misc_feature (563)..(563): n is a, c, g, or t
  misc_feature (571)..(571): n is a, c, g, or t
  misc_feature (602)..(602): n is a, c, g, or t
  misc_feature (643)..(643): n is a, c, g, or t
  misc_feature (916)..(916): n is a, c, g, or t
  misc_feature (940)..(940): n is a, c, g, or t
  misc_feature (954)..(954): n is a, c, g, or t
  misc_feature (978)..(978): n is a, c, g, or t
  misc_feature (983)..(985): n is a, c, g, or t
  misc_feature (987)..(987): n is a, c, g, or t
  misc_feature (991)..(991): n is a, c, g, or t
ctgtggagtgctccttgtgtcatctgatttgaggacaaaaggaaccagtgctggaggcttgtcttctcacctgcgggtgaactgcacctgcccggccaccccgtggttgaccagcttgggaaatggcctggcgctgaatggaaagcagtgagcactgtggcaggcagacaggctgcaggtggcgcgctccaggtgcggccggaatcctccaggctcttggagggattgctgcattcgtaggaccaggcagcctttcctgaatttgcaggtcacttgcacaggcagtgggggtggtcacaggactgtgaggccaggcagcctggagtcctggaggtgtggctgccctgagctgtggctcccctagaaaagggtgctgttgctgctgctgcgaggattcatccgcgggcctaggacagggcccggccctccgcagtgctcactctgcaggggtgcccgcctcttctcctgtcatttctttgtggtttgtgccttttttgtccctaccaattcaccttccctaaanggtcctgcagangccngggactanggcanggcctcangangtagccantgtgagggagtatcacccgtctgttgccaantcacgttgcccggggtttcccaagctgcggtttcttgaacnggtctgttctctgtcctgtttgcgagttgctctgtccagggttcaggggcagagcctgagtttgggccttgtgggttcatgtggtcctcctgtctgtcccttgaagtgtcactcagtctttggaaagagtcctggagtccaggtcgagcctgtcctcccctcgtgttctgggtgccctacagaaggctgggatgtgccctgatccacagttttggtggcagggcttccctcggctgagatgtcctggactttcacagagctctgtaggggagngggtgtctagctccttatttatgngattattatttttnaatcatcatatcatatatattganagaannncncctnttcttaggtgga

SEQ ID NO: 440095 - DNA, 1087 bp, Homo Sapiens
  misc_feature (740)..(762): n is a, c, g, or t
  misc_feature (906)..(914): n is a, c, g, or t
tctctggtctccagccacaacctctctttccccaatctccatttgcataactgtctctgatgagatttagggcgcttacggtggtatggctgtagacaactgtctcaggaaacagacccatgacccacccagttgccaagtcagaaacaggatgtatactcttgacttgtctctctcccctacacagcaaaacaatcccaagacatgtcaattctatctcctgagcaacccataaaacgatttctcttctttccatcttccattaccctaattctggtgttcattctctctccctgggatggctgtaaaagcctctgatttctcccctttccaaaccagtctccacactgcaaccatagtgatctaaggcacaattctcaccttttcagtcttaggcttaaagttcaacatccctctggatacagtctaaatctttaacacggctgaaaaggcccagcaagagctggaccaagcccacctctccagcttcacctttcctcatttctcctttgcaccctctgcctctgaacaagttacagtcttccaaagttgtcatgtttcttgacctttgctgtctcctctgcccagaatgcaatttccctgtctggctaactcctgtccagcatttggcctcagcatggacatctgttcctctaggacgcttcccctgattcaccaagaccagcttaactgcccctactggctgttcctatagcaattctttaccacagactactgannnnnnnnnnnnnnnnnnnnnnngcagtctgacataactttatactaatgcagcttctagccctgtcccccactccttcctgatcagtatcccaatgtccctcctatatggagccaccactaccccacaggatcctgtaccacccttctcccagaacttatcacacnnnnnnnnngtaattgtgtttccattctccaataaattgtgagcgccacaaagaaccatttctatctcacttaccacttggaagtgactggcaggtagtaattgctcaacaaatgttctatgagtgaatgaatccttgggataattatagtactaaccatcctcgtgccgaattcgccacgc

SEQ ID NO: 440096 - DNA, 1702 bp, Homo Sapiens
  misc_feature (43)..(43): n is a, c, g, or t
  misc_feature (81)..(81): n is a, c, g, or t
  misc_feature (94)..(123): n is a, c, g, or t
ttatgaatactccaattggccttagttaaaatcctcacatttnagcccagcttagctgaaacatttccagacctatgtttnattatacaagggnnnnnnnnnnnnnnnnnnnnnnnnnnnnnnagggtgagatgaaagaggcaagatttaagaagctgggcaaaaactgagctgatgctggcctttaaagtacctcccaccttgctcaaccccagcaggagaggaataagaagagtttggaagggataatgataccatatgaagcaagagaggacagaaacaggagagtcgagaagcaggatctctagcagtatgcccttgaaggcagagactgcagtcagcgatcggcctaagctctgcacacacggcaatggcaatttgtccaatgagccctgttgaaggtggagtgctgctgcctgtacctcctcatcatcactgttgcttgagcaccgaagaagagtggcccagccttttgggtgcagctgtaaggacgtgatgcagtttccgtggtcactctcaccaagaacttcaggggttacgacttcaagactatttcgtggtgaaactcctgaacttgaagtagttcttcttgctcttaaaatgggatagctgcctacttctaaagacttagttaagtcaaggtcatgcaaaattaagagatatccagaggacgttgaaatcaacattttggaactatctggtgttaacctcattcgcatgagaaaacgtgtgtgaaagaatttcttatgtggacacccatcttctgtatacctgttagtgtcccaaataatgacatttccatcaaatcctgatgttactaagagtcttgtattagtatcatattcgatgttcttcacccagctagtgtgaccatgtaaagtgcatactttggtgttcaattttctcagatcccatagtgctattgtagtgtcatcagagcaggtagcaaacagccggttatcaagaaatctgatattatttacacagtcttcatgagcttcagaaagtgtttttatgtgctttgaagatatagggtcaaaaagcagaacttcagtttgttcacaagcaactgtcagcactgacccgtcgggcgagtactcgaggttgaagacggcgccgtgggtgcgggtgctgaggtacaccgagtccgcggggtggatggaaccgtagaggctagtcatggtgcgaaaattgtcccgcgccgggtccacgaacagcccgcggcccaggctgcgttctttcagccacccgaacagcctagcgccagggccgcccaggcccgcgccgaggccgtgtcggccccggctcttggccctgcagtctggcccgggccgccggcacggaggggagggaggtgacggttctcccggggcggaggcagttgaggactccggagctccaggcagccctagctctccggagcgcggggccggggacagcgatggggcgccggggcggcgagggcttcgggcgggtggagggggatgggtcgcatcagccccgggatgtagtggcgagggcggcccggtggctgctgcctgcccctcgtggggcgtcggctcctcagccccggctccggccgatccgtcccctccagggctatggggcccaaagggaaacatgatcaacgcccccgccccccgctccgggccactgccccgccggccgacacctcagtgcccctgttcagctgccatcccgg

SEQ ID NO: 440097 - DNA, 1956 bp, Homo Sapiens
  misc_feature (230)..(239): n is a, c, g, or t
  misc_feature (906)..(906): n is a, c, g, or t
atgtaaagaagtttcttcattttcatttattcatacaaaattagtgatatgattacccccgctgttgttccacgaagggagatgttcaccaatgtgtaatgaaaatatgaagctcatttacttgttatacgtgtaatctaatccagattgaaaactgttctatggagattgacaaatattggttgtgataaattattacatagacatattcccactaatgcactaacagnnnnnnnnnngtgaaaattgacaaattcattttgaataatcactttaaaagccagaaaatagcagaagggaagggattttaaaagtatccattttttactacatgtcatttttagggaaaagtaagacaccaaaacattttaaaattaaagcattaactggttttccatttgctaaactctttttgatatgaatgataaatcattttttccttaagactacagcattgctaattttctccatatgtgtacaatttgtctttgacctttaacaaatgtcctctaggcagtccacttaccatccaagaacaacgccacaacatcattttacttgcacacaaagacttgaaagcttcataaaaataaatgatccgtggcgtaagatacattaaccagcagaataataagctatttcagccctgtaaattttagcacccgtctattcaaaaacctcactgggtcactttagtattaaattcataggagtaaaatggtaactacacatgctttatttgttaaggtgccagccatatattttgtgaaaaagtttgttagcctaggatatttaaaagcaatgtctctttccaataaatgattttatgtgttacagacacattttagtattaagcatcatgtatatttaatatcacaatgtctacttcagtgtcccaaaaagccntttattcacttttatagtttccattactggaagagccaactttcggttctcccacaattgtgtaaagtgcaggcaagccacaagagcttctagtttttagcttgcagcccgtgggaccacgataattgttatgaagccattaattctacctcagcagtttcaactgtcaggtacatgtaacaataattgcacttaatgaatgctgctcaatttattaagtacaaaatgaaaacaagtattcttttatatgcagcactgaggcacattatttatcatttgtgtataccatgttgaatattctactatcatttattggtcagggtatatagccatagtttttctaaagcttctttttattaaaaaccaatgcaggaaattgtaccactctaattaaagaataattaaaataattagtaccaaaccaaatatttaataagaatctatgtctatggaaagcaatccagcaaaaccaagatcaagttcctgctttagataaacaagattctttctgtggctaccctcccctccccaaatctttactagaatatgaaaaaattcaaaagcttccagttgcttgaaatatcagtgttgtttctttctcaaagtttttggcagtaaaacttttgtgtacagacatacagcctgcctcagaattttcaaaagtaagagctagatttcttattttcaatcactcaaggtaaactgcatagacatttgcaagagcgaagagagaagaatttctgaaaacataagatgaaaaggtatcacttttaggatcccagaggcatctgcttccaataagtatgctctgcctgttcagttgtccaatgtgaacaatcacaattagtttataccgtggaatcatcaagtccttgacctgggctttaataacctcagaaatggttttagtcatctgtctacagagctctggttcatattcttctacttgtagatagctggttactacatctttcaaaatatgattgacggtgaccacaggaaaatgtttgggaggacctgaaaatacacataaaatttatttctaaaaag

SEQ ID NO: 440098 - DNA, 645 bp, Homo Sapiens
ctcaaggtaacctgcatagacatttgcaagagcgaagagagaagtatttctgatatcataaagatgactaggtatcacttttaggatcccagaggcatctgcttccaataattatgctctgcctgttcagttgtccaatgtgaacaatcacaattagtttataccgtggaatcatcaagtccttgacctgggctttaataacctcagaaatggttttagtcatctgtctacagagctctggttcatattcttctacttgtagatagctggttactacatctttcaaaatatgattgacggtgaccacaggaaaatgtttgggaggacccaactgataggtgttttccatctgaactgtaaggcgagagatatcatcacgctgactgggttcttccatataagacacagtactcatagaatctttgatgcgcccatgaatttcctttcgccaaaattcatgattacttagagaagaaatactccctcttttcttccatgaatgagctgctctgcctttagcattgtctgacatcatcataacctgcagcagggaggcttcgcccggagcctcccagacctccggcactgcagacactgcgcgcggcgcggctcccgcgtcccaggcttcattcagccggcggccgc

SEQ ID NO: 440099 - DNA, 1717 bp, Homo Sapiens
  misc_feature (485)..(505): n is a, c, g, or t
  misc_feature (528)..(582): n is a, c, g, or t
  misc_feature (620)..(767): n is a, c, g, or t
  misc_feature (1606)..(1606): n is a, c, g, or t
  misc_feature (1609)..(1609): n is a, c, g, or t
ctgagatggaattttgtgcctagctcagttctccagatctggctaggagcagtcaatgactaatgttctgtcctagccaaattctcaggacaatttggggagcagaaagagttatggcagaggttccactcatctacaaagtcacagtcacatgccacatttgatctcctaaccctggtgtagtttctttcaagagtgagaactttatttgttgggcagaggctgttccattgagaggaatgtttacagcagtttcaaaaatgacaaagtcagtttggagacagaaaaagacaaaaggtccagtctcatccatctctatatggtacatttgcctcacttatggttgccttaaaggcaagagggaaggtcaccatcagtgaacgcaatgcaatctcaacagtgtattgattcatattctcctagggctcaaactactctctattggttccaggataatgacaaattgaaccatatgtaagtaatcnnnnnnnnnnnnnnnnnnnnngagacagagtctcactctgtcannnnnnnnnnnnnnnnnnnnnnnnnnnnnnnnnnnnnnnnnnnnnnnnnnnnnnngttcaagcctcctgagtaactgggactacaggcgcccnnnnnnnnnnnnnnnnnnnnnnnnnnnnnnnnnnnnnnnnnnnnnnnnnnnnnnnnnnnnnnnnnnnnnnnnnnnnnnnnnnnnnnnnnnnnnnnnnnnnnnnnnnnnnnnnnnnnnnnnnnnnnnnnnnnnnnnnnnnnnnnnnnnnccaagtgatcatttttataggttaaaatgataggtgaaatgaatatagacactttcatatggttcaacctaatgacttggtaaattattgccttggtgtattaataatatgttgcattctgaacaaataaccatggcttccaaagggccctaacctaaaatcggagagtaatttatgctttggagaatttgactcaaatatatacttgaccaagcaccatgatccctaggggcatgagaaaagcacataatggatgtggatgtgataggtggtcttttcctgttaacaagctggcagcaaagcttcagaaaatatatatgcaagcacaacttgaagctgaattcatttctgtattatattctcaactcgttatctaaagcatcagaacatgtgttttcagagatgagtcctttactataaggttaatatttattttcattttctgtattatatatgaaaagtaaattaatgtgaaacctggcccagcttgctggaaagcaggttttaaattgtaaatattccttagaggagcaaatggattgtttaataccatagtctcagtaatctagcttatataaggtcattacattttttaactgaaaaacctagttacctgattattgcacattataaaattgtttttctaatactttatagggcccaacttcagaaaatacttcgcttttttctttttatgctttcgtttgtttaccagcaagcaacttccctggggaagccaaacacatattcataaaaaaattcaagtgctgatgtgcagttgagaaaactgaggactgaaaaaacaatttttactaagcaaagctgtgaaattactcttnctncccttctctgaaatgggtaaagaacaaattgggaaaaaacctatgccctttgaaaggaataggaaccattcctttggcctctgttcctggccggctgagaaccgcagc

SEQ ID NO: 440100 - DNA, 1175 bp, Homo Sapiens
  misc_feature (747)..(747): n is a, c, g, or t
  misc_feature (821)..(821): n is a, c, g, or t
ttttgtagatacattgatttatgtcttattttaaaaagatctatcaagattatttggctagctagaaataagagtagtttgttggatgtatcttaaatattctaaatctacttactggccaggtaaccatttttgcttttctcggggagggggaagaaaagaggcaactatgtttttctagaggaataaaatattggaagcatcttccattggaaatatgccatggatggaagttgttctttgtcagttacttctttgacattcactttcttcatcaacatggaactctgtctccatttgatgtttggcatctatgtctccatctccattctaaactcttttattttcattttatctatatcccctttcaggtggctatctgtactgtctcctgccatatgtctatccacttctcatagaaacaataatttctacatagataaccttcaaaataaatttcctcacttgtctctggagttccagacgtgcatttctatctgcttgttacatgactgggaaatgggaggctctcctgtatcccaaacattgtattttgtaaacccaaaatactatcttccatccatatctatttctcttttcttcatacttcatctgagttatcccttgattagaaaccttggtgtcatccctatctcttttcttccttttgttcttatcctcaggcaattttgtagattctcctcctgtaatcttttcactttatttcctttccatttctacctttcntacgtgttctgcactccatacgcagcttcttaggtggtttttgtgttttctcatttctcctctttgagtcttcntaatttttgctttatgaaaggcaaacttgctcaggtctacttgatcaagtgctcaatactcaacacagccatcagagccctttgcagtctgctcccaaattgcatgtctagccttctccctcaccatagccctgtgatactctgcccttgtgcagtatcacattccctgcagtcattgaggaggctgtgcttttgggcacctctttatttttaccaatactgttcctggaatctcctttctcttaccagctgtcctcacttgtatccattgaaatcctattattctctcattttctaatgctcagttcaagtgctattccttttcgttgaattgagttcaactaaagaatgatg

SEQ ID NO: 440101 - DNA, 788 bp, Homo Sapiens
tttttttgggtcctcagaaatgctttattgggcagcaggaggccagggccagggagccccatggccagcatggcgaatgtccggggccagtgcctccagcgaggtcaccccctgccctcctggctgggctcctgagggtgtggtggccagggtggcccccctgaggcccacagaatccacctgggctgccccaccccgacatgtccacaggagagttggccaggccagggcagctcagacgaaggtggcgtggtgagcgctggtcttgggcttagcaggctcacccgggacggggcccaagccagggaggtctgatgtaggaggcccaccactggcctgcgacctcccagggccagcctgtgcccccgctatgccaccatcccgcccgggcgccgagccagttacaagatccacatcgatgattctgttgactgggaggtctcggctgccatgggtcccactttctggtctggaaggtcctggcacttcctggggggtggctggcgccggcagcctggtgctgttggggctgctgatgtccccctccccccttagggttctgttcggccagtgtggtagtggtacaccgtttggagtgctccggcctcaatttcattggcagctggctttttcccgctttgggcgttccgtctctgggcatgtacgcccaggggaggtgaagtgttcccagagccctgcacataacacctgccaccaagtggggggagccgacccattcagaaaccctaccaccctgtttccccactgcagcttaggaaccgagctgg

SEQ ID NO: 440102 - DNA, 489 bp, Homo Sapiens
ggatccctagcattttttccattttctccttttattttaatagaattagacttgcctagtgttctttcctctcccgtagccgagtggtttctggagctggaatttacagctgtgttctgtttcactggcacacctttctgtttatctgcggatgcctttcctctggaaggatccttctcctccaagacaacccgctgtccgtccagactcgatataggggcgccaaggtccaggggctccttctctccactcagcctcaccagcaggccactgaggtccaggccgtatctggccaccacgggccgcagcacctccgtgacgggcttggtgggcttggccttgagtcccactgaccggttaatcggaacaagatccagccgaaacaaggtgcgcttttctaggcgcaggtcccttgactccaagatgctactgtcttggtgcagcaccagaggcttgtccccgcccaccaggaagaggtccgcggccgct

SEQ ID NO: 440103 - DNA, 1438 bp, Homo Sapiens
  misc_feature (298)..(298): n is a, c, g, or t
  misc_feature (770)..(1010): n is a, c, g, or t
  misc_feature (1012)..(1079): n is a, c, g, or t
  misc_feature (1081)..(1091): n is a, c, g, or t
  misc_feature (1093)..(1100): n is a, c, g, or t
  misc_feature (1102)..(1102): n is a, c, g, or t
  misc_feature (1104)..(1109): n is a, c, g, or t
  misc_feature (1114)..(1117): n is a, c, g, or t
  misc_feature (1120)..(1120): n is a, c, g, or t
  misc_feature (1126)..(1128): n is a, c, g, or t
  misc_feature (1131)..(1364): n is a, c, g, or t
  misc_feature (1370)..(1384): n is a, c, g, or t
gggttccgattaaccggtcagtgggactcaaggccaagccaccaagcccgtcacggaggtgctgcggcccgtggtggcagaatacggctggacctcagtggcctgctggtgaggctgagtggagagaaggagcccctggaccttggcgcccctatatcgagtctggacggacagcgggttgtcttggaggagaaggatccttccagaggaaaggcatccgcagataaacagaaaggtgtgccagtgaaacagaacacagctgtaaattccagctccagaaaccactcggctacgagtntttttgaagcttatttccaaagctcagagcaacaagagcaagatgaccaacgtggggtgctaaggaaggaagacctggtgttgccagagttcctccgtttacctcctggttccacagaactcaccctccccactccagctgctgtggccaagggctttagcaagagaagcgccacaggcaacggccgggagagcgcctcccagcctggcgagcagtgggagccagtccaggagagcagcgacagcccgtccaccagcccgggctcagcctccagcccccctggacctcctgggacgaccccccccgggcagaagtctcccagcgggcccttctgcactccccagtcccccgtctccctcgcgcaggagggcaccgcccagatctggaagaggcagtctcaggaagtggaggccgggggcatccagacggtggaggatgagcacgtggccgagctgaccctgatgggggaggnnnnnnnnnnnnnnnnnnnnnnnnnnnnnnnnnnnnnnnnnnnnnnnnnnnnnnnnnnnnnnnnnnnnnnnnnnnnnnnnnnnnnnnnnnnnnnnnnnnnnnnnnnnnnnnnnnnnnnnnnnnnnnnnnnnnnnnnnnnnnnnnnnnnnnnnnnnnnnnnnnnnnnnnnnnnnnnnnnnnnnnnnnnnnnnnnnnnnnnnnnnnnnnnnnnnnnnnnnnnnnnnnnnnnnnnnnnnnnnnnannnnnnnnnnnnnnnnnnnnnnnnnnnnnnnnnnnnnnnnnnnnnnnnnnnnnnnnnnnnnnnnnnnngnnnnnnnnnnncnnnnnnnngngnnnnnnggggnnnngcngggggnnnggnnnnnnnnnnnnnnnnnnnnnnnnnnnnnnnnnnnnnnnnnnnnnnnnnnnnnnnnnnnnnnnnnnnnnnnnnnnnnnnnnnnnnnnnnnnnnnnnnnnnnnnnnnnnnnnnnnnnnnnnnnnnnnnnnnnnnnnnnnnnnnnnnnnnnnnnnnnnnnnnnnnnnnnnnnnnnnnnnnnnnnnnnnnnnnnnnnnnnnnnnnnnnnnnnnnnnnnnnnnnnnnnnnnnnnnnnnccccgnnnnnnnnnnnnnnngtggtcgtgcgtgtgcgcctggtgcttcggttcgttgcgctgtcccgtgcggtc

SEQ ID NO: 440104 - DNA, 1539 bp, Homo Sapiens
  misc_feature (126)..(126): n is a, c, g, or t
  misc_feature (159)..(159): n is a, c, g, or t
  misc_feature (215)..(215): n is a, c, g, or t
  misc_feature (232)..(232): n is a, c, g, or t
  misc_feature (277)..(277): n is a, c, g, or t
  misc_feature (535)..(535): n is a, c, g, or t
  misc_feature (566)..(566): n is a, c, g, or t
aaatgtgccgtcggaagatacaagtctacaggtgcaaccgccagcagtcgcttcgccacggctgtcgccgcaggcataggcacctcaaccatttgttgaaagcggcggacatatcgtacgcgtgcngtacacacggcagacaacgcggagagtcttatntttgagcaagagctcgcgacgttgtgagcagaccggtgcacattattactgtcganggtcatcattctatagnagccactctgaggtatgttaagaatagggcgcggcgcgcaaggancacattatcgtacggctagctgcgtgtatgaagatgcggaggcggcgcgcatgtggggagtcgtgaactgcggtcgtgcgtggacaagtacatgcccgcgcgcaggtcgcgcgtcgcgtatacgcgcgaccgtacacggaaacataagtaggcagggggggtggtatccggcctgcctctaacgtccagatgaggagatgtatgtagaaacggagagtggcccgctcgaccccacgtatagctggaatgcacacagtngacgcgtcgtcctcgcggatcctcgcggagngcgcgcgtgtcacgggatcggttctctacacacgggtgaccagcgcggacagtgtggcgcatagctcatatacgacgctcgcaggcgcctggactctagtgtccgacaactccaatatactcaccaccttactactcatccacacctcggtgccacagagaaagacgcgctgccttggacgcgtagccatggcgccgatcgcacagtctgcccgcgaatgccggctcgctcgcccggccgaaccgctacttgctgaggtcggcacccccccgggtggttgccacggagcctctcctctcgcctcaagcgctttcattccgacgcgatctggctcagtgtttcagggcagcccctgccgcctggttaggacacagcatgcggggcttcgagttcgctcaacacagacacaaatgcccatggttgtcccagtgttgatgccagaaacattgaaaacgtatcgctgtccagatttggaaaggaatgcctcccttttcggaaacccccaggcctcacccagggtgttcccagacctcgctgcaggcactgccacgtatcattcctgcaagagcctctcaggacaccaggatgcctgcccagagcgcctcggggggaccatcctgacagacactggcctggggccacacgagcccctcctttccaagagggccaaggaagcccccaaccagcaggtgaggagggggtcacggagaccaccagcaaacagtggcagccgggggcccactgtcctttctgactggaagctgagcagaccacgcttacggggccaaggtggagggatcagaacctggaggtacctggtctggaaggtcctggcacttcctggggggtggagggcggcggcagcaaggtgctgttggggctgctgatgtccccctcccccatcagggtcagctcggccacgtgctcatcctccaccgtctggatgcccccctcgtgccgaattcgccaccca

SEQ ID NO: 440105 - DNA, 3008 bp, Homo Sapiens
  misc_feature (466)..(466): n is a, c, g, or t
  misc_feature (469)..(469): n is a, c, g, or t
  misc_feature (660)..(660): n is a, c, g, or t
  misc_feature (668)..(668): n is a, c, g, or t
  misc_feature (1418)..(1418): n is a, c, g, or t
  misc_feature (2262)..(2262): n is a, c, g, or t
  misc_feature (2270)..(2270): n is a, c, g, or t
  misc_feature (2557)..(2557): n is a, c, g, or t
aaattttggcaaatgcaactttatattgaagttcacacatctgtatcttaaagaatgagactcacagactctaatgtatttctaaaataccagaaatcataatataagctttcacaagttaaaactgaaataatttaaattaccaatacactgaatgtgcagaaagtataaacaagactgtgccttcagtagaataaatgcttcacaaattgtgcaggatgtcatactaaggctgtggtctccccttgacagctgacttaaaatataaacatacatcaactgcctgcttcttagaacagtttagaaagggtagcacaccgtagaagaaaatctcattatttcagtgatgtgcactttaagtttcaaaccatgtgagaaaaaaggaaaaagtaataaatgatcttccatgcactttttagatgcatgaccatggaccagttactgatttgatttcccttggctattngcnccagtgctaaataagatgaaggatactagataaccctttaaggcaacatgtatttattctgcattattagaactgctcagttgtgacaggctggtaccattaatgttgcctcccagaccaatatctagcatttgtaaaatataaatgaattggaaaaactttataccaaatcaacaaaaaaccacataatnccagttcnaatgctaggcaatcttactagtaggttgaggaaagtggtatttagaaatagcaatgtattaatacaaaaaaagtaaactctaattggaaccaatatactgctttggaatgctccccagaacgttacaaggcgggtttttaaagtgtgatattccaataattcattggcacgtctttagtggattacagtactttaagtccccaaatattttagtctttgcaaaacaatagtagtatgaaatgttttaaagtcttcaaacttctaaaattagtttttatcaacacatttacctcatgtcaacttaatttattaagatgtccaatgctaattgttttttgatgttttttcatatgtagtgacatacagagcatttagcactgatacttagcacctgctactttcattatctagtttttgaccacataaagaaacttagggcagtggttcagtcccttcttaattacaaacctttgctggcagtcagcaggatcactctgagatttaaaataggattataggtgaactattgcaaagactgcagaatgttgcccaaatccttaaaactgctgattccattcttgaatttcttctcaaaatatggctatgggccacaattgctcagcagagaaggttagttttcacaaggctaaagatttccagatgctccctcattataccccagtaaggttcccttggtaacctggattttctgcagtaaaagaaggggttgtgctgaaacagcgcctcagnctccctgtttgaggaaaatgcagacaaaagggattgattcctgcttgggcaaaactcatccagacagcagctgttagaaatccccctggtactacaggccctcttgcaaaaactctcccaataacaggccaccaggtaggggccccacaaggttagaaacagaaaagtcattatatagaacattctgctgattcttttctccattttgaactcgtctaagaccaatagccttcttctgcctgtggtgtttgcattttgcctgatgcccagcaaggtgggtggtgtgggaccccttccaaatcctgctagccaattggcagctgcctggccactggctccaggaccatgaaaagtccagttctggctgactgctgctacaaactggactggcttcatttttcttcgatcgtggacgaaaaatatcagcttgaggtagacaagctgtgtggctaggaggatgagagcaagaagcagcataaatcctaaggaatcattagccctgaaggagcggtgttggaaggtgcattgatcttcctccctaatgaatgagtaagtgcccacgtctaaaaccgggggaaatgccatggccacagacagagtccacaccatacagatcacagccagacacgtccaaaaggtcagcctctttgtatagaagcggtgatgggcgatagctaagtatctggtgacactgatgcagaagagcatgaaagcagtgtggaaacaggacaaaacccccagaaaggcaatcactttgcaagtcagagtcccaataagtccaggtagagccatttttgacagagttgaaccccaaatgggaaacaaatttgcagatctgaggatntctgaacngcaaagatccaacaggaagtagtaaggtgctctatgcaaggtcttatctttcactagcaaaatggagatcagggggttgcccaccacgctgactcctattatgaaacccaaggaagtcagtttcagaaaggctgttagaggcgagagattttgcaaaatgttgtcagctgcatggctatagttcgccatagatggatggaggataaggatacagcctcagtcaagtctcatgatctagatataagaacaaggaaaagatagatccatacattttactgaaaatatantccacaaagagaactgatctgatctgcagtcatgcttcctcttttcttccacttgttttgccatcagaatatgcgaagatggggagagagattgcttctgtgctgcaaaggaaccgttcccggtgattcgcagtctgatattcctcagtcttgtaaggctttccagaaatggagctctcagtaagccctaaccagtccaaacggtcggatgataccacagacaccacaaagcctgacacgtgggtgcttaggaatgcctctagaatcatgcattttcttattttaccatttccgaagagttttgtttgtggaggtgatataaaattttaagcaacaacttcccagttctcctacccaaaactagcagacacgctttcattaattcccaatgtaaaacgtctgcttctttttctgcatgctttttgctttataataatctgttaatgaaaca

SEQ ID NO: 440106 - DNA, 1351 bp, Homo Sapiens
  misc_feature (64)..(116): n is a, c, g, or t
  misc_feature (960)..(960): n is a, c, g, or t
  misc_feature (1112)..(1284): n is a, c, g, or t
  misc_feature (1303)..(1303): n is a, c, g, or t
  misc_feature (1317)..(1318): n is a, c, g, or t
  misc_feature (1328)..(1328): n is a, c, g, or t
  misc_feature (1339)..(1340): n is a, c, g, or t
  misc_feature (1348)..(1348): n is a, c, g, or t
gtgtctctgtgactttgtttccacatctgcgaggatgtacactttaatgcattttttatgcacnnnnnnnnnnnnnnnnnnnnnnnnnnnnnnnnnnnnnnnnnnnnnnnnnnnnnagagatgtaaagcactaagccactatttccagagcggtggtcctggcactatttcaatacaccaccaacattttatattcgtatcactaatagttttggtgatttgataccacttttacctctcctcataaatcaaggcattttgtggtctctagagaagtagggttcatttgagccccagaatacagcttctggctttggatctatgcttttccagcaatcttttgatcactcacatgttgtcccctcatttgagcctaaagaattggtttctctcccctctcatattggtggtgttcataagttctacccactagcagttgaaatttgggacaaaaacatcccagatgtcccgtgactcttcctaattccttttcctgttgtcctctttctttcttaaaattatccccctttgccatggtactggtccactatttaaaggtcagtgactcatgttgtgcctcaacactctgccaatccctgtaccggatgctggggaggcaaagtgaataccacttcaggtttttgttactggagatttcatagagtgttagagcaggaagggctcacaaagaaacaatctcatctagcccttttattttacagagaaagaagccaagacccaggagagtgagtgacctgcttaagacccataggctcagaactggagccaaatcccctgacacttgcccacactacaaacccagggacagtagaactaaggcgttctagataggtcatttgtagacagatttcttcagtcgtttcacacttgccaggtggagaaaacccaaactccccttttagtcaccgatcttgtgtttaggaccctggacactggttnatttatggtgaaaagaatctcactgttggagctgggctgcagatggaatgaatcaagtttaacttaggtcctcaatgcagttggatattttatggtaagctaccctttgtaagaaatgtgagcgcttgggtgggtgtggtggctcatgccgnnnnnnnnnnnnnnnnnnnnnnnnnnnnnnnnnnnnnnnnnnnnnnnnnnnnnnnnnnnnnnnnnnnnnnnnnnnnnnnnnnnnnnnnnnnnnnnnnnnnnnnnnnnnnnnnnnnnnnnnnnnnnnnnnnnnnnnnnnnnnnnnnnnnnnnnnnnnnnnnnnnnnnnnnnnnntgcttgaacccagaggttncagcgagcagaganncgccactgantccatcctggnnactgcaanact

SEQ ID NO: 440107 - DNA, 805 bp, Homo Sapiens
  misc_feature (51)..(51): n is a, c, g, or t
ctaaatttattgggacccgtttgtccctagtataggcaggaagggtttgtncaggggaacaagggagcacagtttcttgatatcaaatgaaaataagttgtggggaaaaccctatattccttgaattcattaacccatccatatagaagattctgtaaagaaagggtacttggctagagtaagtcatcaagggaaatttatctagatggtacaatcaaaaatctttcctgggttcataattgttgcccccccaaaattttattagaatataagcaaacataaaagcaaggtataaatatttccagtgtggggccaactagttcaaatgaagttgagtttatttattaattcaattagcctggggaaatcacttaacttttaccatttttcatattaaggctggttctcttttctccttcattagtgcaagacatatataagtagtttaccctagaattaaaaagatcataggcagatatgaaactctctgaaattgagtggaaatctcagttataatgtggttattcagctcatctattaatagattcaatttgtagtttcattaaaaattttttctaaataagcacatacacttgctcacacactcagagataactgagaatacatccatataccgctctttgagaaacactactctttgcaaccatttgcatgtctccagttctcagcagagtatgtgacatacagatcaataatttgtacttatatctgtaaaacgctttgcagtttgcagagcaccactacatcaattattttttcatttgacctttataacttatgggca

SEQ ID NO: 440108 - DNA, 1605 bp, Homo Sapiens
  misc_feature (1372)..(1464): n is a, c, g, or t
  misc_feature (1487)..(1487): n is a, c, g, or t
  misc_feature (1575)..(1575): n is a, c, g, or t
agggtgccttagtggacgggtttctttgtatcagccaaagttttaggcacaacttacatcaaataaggaactcttctggtgtttgacttaggaattgcttcaatttagatgaagtattttctttttagaagatcttataagtttgggtccaagatcctggttcttatgggtccatgaacacacttgtgaccttagtacttggtcatccagcatcatacaggcatctcccaagttagactctatgcagcatcatcttttgcagcattcctctgctcctgctgatctgtgccactgaactccagttcttctggtcattttgcatggtagctcttgtcacgttccttccttcctcactctctatttctctttccctctccctgtccctctctttctttgtgtttgttgattttggtgtcaattttgtggacatttggcaggagttttgactggggtaggagaaacccatgacattagaattgaataaaacctagaagttggatattggcatattggttgttgaaaaataaatttcatcctcacttatgagtatacttggccttttaaagttactgttatgtttatctatattgagcacagataatggcattattcttataattgttaagatagtcttgcaacaaaatgtcttttaagtttcctgttaaaattataaaaagattttcatggtgagagggattttattgtgaaattctagaaaaaaatattaccacctctctttgtaatttactttacttgtatgaatttaacatctctagcatgtatccttacttgatattttgttcctatcaacagcattagaaaggaaaggagacagaatgagctttggttatttctattgcacagaaaaggatttttaaaattagattagtataatatctggccatagagtgataagaacaatatgacttagattttctgtatttcatctgccagattatttgaatcacacaggatgatgtgttaacagtattagggtggaagaggaatcaagagtaaagaggtaggggtttactcatttttcttccctgagccaggtgtgacaagccaactctgtcaccattcgtgaggggagagttgcagtcctcttcaagctgttatcataagtacagtagtcagctacttggatatcaagactaagtgctgatatgaagacttgccctttgtgttttgttataaacacgcaagcataaagcaggactcaagcacaaggctgactgttctactttgaataacagcttccttgcagtctcctccacatgggtggtactgtgtttagaagggattaccaaaggctggagcgatttaagctatgcactagccttgccctcttaggttgcattctctttaggcnnnnnnnnnnnnnnnnnnnnnnnnnnnnnnnnnnnnnnnnnnnnnnnnnnnnnnnnnnnnnnnnnnnnnnnnnnnnnnnnnnnnnnnnnnnnngccagggggaggacaggaatctntatttttcatagcaacctcaagtaatctttattctgagggtctcgggattgcaggttgaaaaacacaaccttaatcagcagtaaattnttctctactcggccaggcgcagtggctcat

SEQ ID NO: 440109 - DNA, 825 bp, Homo Sapiens
  misc_feature (22)..(22): n is a, c, g, or t
  misc_feature (37)..(37): n is a, c, g, or t
  misc_feature (55)..(55): n is a, c, g, or t
  misc_feature (206)..(206): n is a, c, g, or t
  misc_feature (218)..(218): n is a, c, g, or t
  misc_feature (334)..(334): n is a, c, g, or t
  misc_feature (339)..(339): n is a, c, g, or t
  misc_feature (367)..(459): n is a, c, g, or t
  misc_feature (601)..(780): n is a, c, g, or t
  misc_feature (790)..(790): n is a, c, g, or t
  misc_feature (803)..(803): n is a, c, g, or t
  misc_feature (821)..(821): n is a, c, g, or t
atcaagagtaaagaggtagggnttactcatttttctnccctgagccaggtgtganaagccaactctgtcaccattcgtgaggggagagttgcagtcctcttcaagctgttatcataagtacagtagtcagctacttggatatcaagactaagtgctgatatgaagacttcgcctttgtgttttgttatgaaacacgcaagcataangcaggcactcangcacaaggctgactgttctactttgaataacagcttccttgcagtcccccccacatgggtggtactgtgtttagaagggattaccaaaggctggagcgatttaagctatgcactanccttnccctcttaggttgcattctctttaggcnnnnnnnnnnnnnnnnnnnnnnnnnnnnnnnnnnnnnnnnnnnnnnnnnnnnnnnnnnnnnnnnnnnnnnnnnnnnnnnnnnnnnnnnnnnnngccagggggaggacaggaatctgtatttttcatagcaacctcaagtaatctttattctgagggtctcgggattgcaggttgaaaaacacaaccttaatcagcagtaaattcttctctactcggccaggcgcagtggctcatnnnnnnnnnnnnnnnnnnnnnnnnnnnnnnnnnnnnnnnnnnnnnnnnnnnnnnnnnnnnnnnnnnnnnnnnnnnnnnnnnnnnnnnnnnnnnnnnnnnnnnnnnnnnnnnnnnnnnnnnnnnnnnnnnnnnnnnnnnnnnnnnnnnnnnnnnnnnnnnnnnnnnnnnnnnnnnnnnnnnaacccgggantcatagggtgcantaatccgagattcaccantcac

SEQ ID NO: 440110 - DNA, 505 bp, Homo Sapiens
  misc_feature (367)..(367): n is a, c, g, or t
acacactgtcagatcgcctcagggtgccttagtggacgggtctctttgtatcagccaaagttttaggcacaacttacatcaaatgaggaactcttctggtgtttggcttataaattacttcaaatttagggtgaaagtattttcttttttagaagatcttataagtttggatcaagatcttggttcttatgggtcagtggacatatatatgtgtgacctgaagtacttggccttccagccgtcatccgggcatctccatttcaaccacgcagcctgttctgtcagcattcctttgctcctgtctgtgcccgctgagcttgggttttcctgggtcattttgcatgtggctcttgttctccccatcccntgtctccaccattcctctctgcctccgtcctcgttttttgaatttttggtatgaattttatggacatttggcaggagccttggttgggatgagaaaacccatggcactagtgttaaataaaactcagaagttgaaaaa

SEQ ID NO: 440111 - DNA, 1871 bp, Homo Sapiens
  misc_feature (157)..(157): n is a, c, g, or t
  misc_feature (216)..(216): n is a, c, g, or t
  misc_feature (287)..(287): n is a, c, g, or t
  misc_feature (290)..(290): n is a, c, g, or t
cgggatgaaatcagctaatattctatttttaaatatgggcattaatttcatttcagttcgttcactcattccattcatttatcatttcacaaacatttgaaatcctaatataagcaaggtgctctgtttaaggcagaaatttgaaaatgtacaaganatatggtcttgtctttaaggagctgttcatctagaatggaggaatttacactgataatnattcctacacttgaaacaaagaaattaactctcaaattgcgtggcaagcatatatagactttgctataaanatntatgaaatgagttactgttttccttaaaaaagctaagactaagggctggcaatcaaataagagcaaatttagtggtgaacgtagaactgcccactaccagctagagtctccaacctaaaagtcccatgttgctagtgatccccaggggttttatagaaggaatccctgcattggcagtaattttggattagatgatccctaagagcaccatcaagtcttaggattctatgaattaggaaataaaccaaattatatattttctaatactgatcagctcatattttatcatcatgtcatgtctggctttcatacttagtcataatttactttctgggtcatttagaggctagcgttctctaaggtcacttctgcttgcacattgtaggatattatttagtatggctttaagaattcaatctttccccctctcctttatggaatgtgtgtttcctctatttgtacacttaaccttttgtcctaagtttttatttttatggatactaatgagtaactttgaggttgacactagacccaaacagatgcaaacagccactttctgtcctcttgtgacacagttgaaacactttatctcttgtctgctgtttggagtgtcctgaaagaaacactgaagtggcagtcaacagagcaagggtaacaggatctttaaataatttaaagttgtctgatcttgacataaaagtgaaccctttctttaaaatttctagcaactgctcttaagtcataggttcctcattttttctttgctggtagtgggagaaaatagttgatctgtgatttttcttttcatctccccaaactatgttataaaggcagtaatttgatgctgaagattatgattagaaatcctcagatgggttatatattggggctttatcttttaatattaaaaagaatgtctttcctggactactttattcagtagtaagcactattcattctatgtatattccttattcagccttgcagactcctgtgggatctgatctcttcctgcttcaactcagtaccatactcaccaaggcttagtatgtcttcacccactctcccttctcttgcattcctcaaacatgctgagtttattccagccttaagcctttgatctacgcatcagaaatgttgggccccacttcagatcttctctgccctgccttctactccagtcactgctgtggtaactaattccatgaagtctttgaccaggttctcagagaatatgatagtacctctctttggattctagctgtatacctttcacttcagccttcctgacgtggaatgtttgcagaccttgtttggtactcccaattgcacagcccaaaggtgcaggggagttaggtgcccatggggccatccttgacctaggtggaaagttgctagtggataactgattactcttttcatcacctgggcagacagttctgaaatgcatttcgtaagtctcctcaaaagaggaggagacttctgtggcgggtttggcaataaccatccttatattggctttcctctttttttcactcctgtgcatctctcttgcatcctgggatcgcttctcaaataaat

SEQ ID NO: 440112 - DNA, 1192 bp, Homo Sapiens
  misc_feature (25)..(26): n is a, c, g, or t
taaatgaaaattaaataaaataaannattcagctttccactcatagtaggcacatttcaagtgctcagtggtcacatggctgctgaattggactgttatatctttgtaagaagttctgttgggcagagctgctctgaagttttgaactttcaacagagtgaattatggcaaggcagatttcagctcatttctaacaaaactgttctattaattttaactgttcagtgccagagctgttgaactggctgcctcaaagaacagtaagctttctgtcatttgaagtactcagacagagactagattcctactttttggagtgatgtagaagagttttctacccagaaccttaggttgtttaagttggaagaagattcagcaattcaatgtttcttttactgcagatgaagacccagactcagagtcagacagttttgcccaaagacccacaactggttaatggcaaatgctagctgtcctcatgaatcctagcttagtacttttcccattccacccattggctaatgttttaacaacaaggtcctcacggttcttgttgagcaacacatttccgcttctggcattcaccagcttttccacttattctctcccactcttctgcagtgaaaactacactgcagccaagctgaactggctatattgaaatacgttattctgattcctgcctctgcgtctttgctattgctttgccctttatcaaagtgacatttcttcacaaacttaattctacttattttctaacttctcctcaggtctcagaatattcaaacccataccatctcttctctttgctaaactaccttgttacaatgcactcagacatttatactctctgtgatgattatattttgtcttatcccttttgatgagcttcttaaagactgtgattactattttcatgcatatatcctttttctgtctccctcactagaatataagttcctcaagggcaggcactatagctgtctttttcgccataccttactatccagttgctatccagcaagtgtcttagcaccataataggtgctcaacaaatatttattgaatgagtgaatcaatttttctcttcccaagcatgctattattctccttaagtttgccatgaattctcaataaatacttttctaagcaaacatttctgtttctataaagtaagtattaaaataggaat

SEQ ID NO: 440113 - DNA, 2033 bp, Homo Sapiens
  misc_feature (4)..(4): n is a, c, g, or t
  misc_feature (35)..(35): n is a, c, g, or t
  misc_feature (37)..(40): n is a, c, g, or t
  misc_feature (53)..(53): n is a, c, g, or t
  misc_feature (59)..(59): n is a, c, g, or t
  misc_feature (62)..(63): n is a, c, g, or t
  misc_feature (65)..(65): n is a, c, g, or t
  misc_feature (80)..(80): n is a, c, g, or t
  misc_feature (103)..(103): n is a, c, g, or t
  misc_feature (122)..(122): n is a, c, g, or t
  misc_feature (133)..(133): n is a, c, g, or t
  misc_feature (171)..(171): n is a, c, g, or t
  misc_feature (232)..(232): n is a, c, g, or t
  misc_feature (286)..(286): n is a, c, g, or t
  misc_feature (361)..(362): n is a, c, g, or t
  misc_feature (395)..(395): n is a, c, g, or t
  misc_feature (569)..(569): n is a, c, g, or t
  misc_feature (583)..(583): n is a, c, g, or t
  misc_feature (642)..(642): n is a, c, g, or t
  misc_feature (1768)..(1913): n is a, c, g, or t
  misc_feature (1984)..(1984): n is a, c, g, or t
agcnttgaaattcattagcatctataaatacaagnannnnttctcatacctanctctancannancctaaatctaaacantttcttatggggcttcagttttnccagaggtaaattccagtncaatatttggnatgctattaagtagagtgggtgctgaaatcctacttcnttttccttttctttcaaagaaggaaaataaggactgtgcatatcgaaaatcagcgtttctnggaagttgaaagtctgggacagtcttcttggacactcaatcctaaatacatganaggcagctactagcgccgcaaggctgtgacacagtcgtccacctttgtgagcctctccctttctaaatataaagnnaattcgccgacctccatgttgaaagggtttttnacttccaacacaggtgtgggcacttgcacctgttcattcatgatgacaaaaaggctgggatcatccccaaaaacatctgggaggggtaaacatgtggctgtcatcttcatgtatttcaacatgtcttcatctgtgtaatgtttcattttttcttgcgatacaatattgattggnttgtccaccactgngaaagaagtcagtgtattttctgaatagggattccaaaaatgtgccttgttttcttatnaaatatctgttcttgtaggaagttggaattcttctgaacatctgataagggcacttcaagaaagggaacagttttaagaatgtccttcagaggtgttcggctgccaatcatcttttttcttatttccaaagtttgggtcattctcttgtcaatttctctccagtccttttctgttttcacgtattcttgctggaaccacttaatatgttcatctagctcagaatcaaaacaaacagcttcttcttttatctggacaagtttaatttcatcaaatcttatatcagcaagagatttccttgtctggcctcttcggtgtccaaatttacacttatttctaatcacttgctcatcatcttctatgggtcttcgaacatatttaaagcgatctttgagggctcgtttccataaaaagaagccacagccatcctcatccaggaaagggtgggcctgcagcagggcattaaccacgtcattgtactgctgggtgctggggtacagtgagccttccagatacttagtcatgtcggcctggagaaactcaatgatccttatcctcatgctgtgatccgggcacttctgctctgctaacatgcatttgacatcatagggaaactctggtaaaacataggacttcgtccactgtaatgctttgcttcttgctagaatttgtttcacatttcttctctgtttcaatactctttggtcaattagtccattatcaaggttttcagctggatagaaagatggcatctgctccccatgcctggctggactggaggactcttcatccctgtaatctcgagctgcttctgtttgcatgaccagggctgcctttttggggttttctggggacttcagtccttgagtgttctgcttgtattttttaattaaatccatcagaacagcctggtgcccaattttctttaccagttgctgaaccatccgatcattaagtgcaagaagagcggccccacttacttcttcctcttgaaatctatgaactagctctcctaaatttttctccaccaaccaactgcagacctgctcaactgaccaggtttccattgctgtctcctgtaaatacaccttgcatatgtgacaagctggaaagatagtcttcaagaannnnnnnnnnnnnnnnnnnnnnnnnnnnnnnnnnnnnnnnnnnnnnnnnnnnnnnnnnnnnnnnnnnnnnnnnnnnnnnnnnnnnnnnnnnnnnnnnnnnnnnnnnnnnnnnnnnnnnnnnnnnnnnnnnnnnnnnnnnnnnnnnnggattattgctggagaggcttttggtccatctcttccagaagagaagatcaaaggagagagcacccctccnccccaggcaaatccgatcagtggatgtggttctggttcctttgttttat

SEQ ID NO: 440114 - DNA, 2486 bp, Homo Sapiens
  misc_feature (85)..(148): n is a, c, g, or t
  misc_feature (246)..(246): n is a, c, g, or t
  misc_feature (270)..(314): n is a, c, g, or t
  misc_feature (471)..(524): n is a, c, g, or t
  misc_feature (1741)..(1741): n is a, c, g, or t
  misc_feature (2074)..(2074): n is a, c, g, or t
  misc_feature (2082)..(2082): n is a, c, g, or t
  misc_feature (2089)..(2089): n is a, c, g, or t
  misc_feature (2104)..(2104): n is a, c, g, or t
  misc_feature (2108)..(2108): n is a, c, g, or t
  misc_feature (2113)..(2113): n is a, c, g, or t
  misc_feature (2115)..(2117): n is a, c, g, or t
  misc_feature (2121)..(2121): n is a, c, g, or t
  misc_feature (2358)..(2412): n is a, c, g, or t
ctcactatcatcgtcgtccgaccttgagaaacaacaggctggtaccggtccggaattttcgggatggcgcagccgccgccagggnnnnnnnnnnnnnnnnnnnnnnnnnnnnnnnnnnnnnnnnnnnnnnnnnnnnnnnnnnnnnnnngcaacgagccgtccggcctccgtcaagggagttggagggaaaaagttctcaggcgccgcaggtccgagtgcctcgcagcccctcccgaggcgcacgcncagaccagtggagccggggcgcannnnnnnnnnnnnnnnnnnnnnnnnnnnnnnnnnnnnnnnnnnnncagcccccggccctgagagcgaggacagcgccgcccggcccgcagccgtcgccgcttctccacctcggcccgtggagccggggcgtccgggcgtagctcgctcgcctgggtcagggggtgcgcgtcgggggaggcagaagccatggatcccgggcannnnnnnnnnnnnnnnnnnnnnnnnnnnnnnnnnnnnnnnnnnnnnnnnnnnnncccgcagcaagggcccgccgtccggacccgggcaaccggcacccgcggcgacccaggcggcgcgcagacccccccgccgggcatcagatcgtgcacgtccgcggggactcggagaccgacctggaggcgctcttcaacgccgtcatgaaccccaagacggccaacgtgccccagaccgtgcccatgaggctccggaagctgcccgactccttcttcaagccgccggagcccaaatcccactcccgacaggccagtactgatgcaggcactgcgggagccctgactccacagcatgttggagctcattcctctccagcttctctgcagttgggagctgtttctcctgggacactgacccccactggagtagtctctggcccagcagctacacccacagctcagcatcttcgacagtcttcttttgagatacctgatgatgtacctctgccagcaggttgggagatggcaaagacatcttctggtcagagatacttcttaaatcacatcgatcagacaacaacatggcaggaccccaggaaggccatgctgtcccagatgaacgtcacagcccccaccagtccaccagtgcagcagaatatgatgaactcggcttcagccatgaaccagagaatcagtcagagtgctccagtgaaacagccaccacccctggctccccagagcccacagggaggcgtcatgggtggcagcaactccaaccagcagcaacagatgcgactgcagcaactgcagatggagaaggagaggctgcggctgaaacagcaagaactgcttcggcaggagttagccctgcgtagccagttaccaacactggagcaggatggtgggactcaaaatccagtgtcttctcccgggatgtctcaggaattgagaacaatgacgaccaatagctcagatcctttccttaacagtggcacctatcactctcgagatgagagtacagacagtggactaagcatgagcagctacagtgtccctcgaaccccagatgacttcctgaacagtgtggatgagatggatacaggtgatactatcaaccaaagcaccctgccctcacagcagaaccgtttcccagactaccttgaagccattccttgggacaaatgtggacccttggaacactggaaggagatggaatgaacatagaaggagaggagctgatgccaagtctgcaggaagctttgagttctgacatcctnaatgacatggagtctgttttggctgccaccaagctagataaagaaagctttcttacatggttatagagccctcaggcagactgaattctaaatctgtgaaggatctaaggagacacatgcaccggaaatttccataagccagttgcagttttcaggctaatacagaaaaagatgaacaaacgtccagcaagatactttaatcctctattttgctcttccttgtccattgctgctgttaatgtattgctgacctctttcacagttggctctaaagaatcaaaagaaaaaaactttttatttcttttgctattaaaactactgttcattttgggngctggggnaagtgancccccctccatgacngatnccatncnnnttgnccagttaaatgttcaccaatcattttaactacaatactcagactctagaagctcagatgcttcatgtcacagcatttagtttgttcaacagttgtttcttcagcttcctttgtccagtggaaaaacatgatttactggtctgacaagccaaaaatgttatatctgatattaaatacttaatgctgatttgaagagatagctgaaaccaaggctgaagactgttttactttcagtatnnnnnnnnnnnnnnnnnnnnnnnnnnnnnnnnnnnnnnnnnnnnnnnnnnnnnnnggagcttataaggcatgagacaatttccatataaatacacttacattattgccacatactctaatatagatttt

SEQ ID NO: 440115 - DNA, 508 bp, Homo Sapiens
caagcttgctttcaatgtctatcactttactaagaaaaacataataaattcattgtatagataaaaatgacatgtacactattccaatatctgtttcctgttgaagaaaccatcaagagaaaatcttttctggttcatcatcattaacacaacccccaaaatagaatacgattttaaaatagttaatagggtggtatatatatatacatacacatacacacataatttttatatttcctgatttaacaaagacatgctcttgggaagctgtagaccttattgaaaagtctggtagcctttccttcttttattttctgcagtacttaaacagcctgtatgaattatttggcatgggtgaattgtcttgtattttgtcatgcatgtattctttgtctacacaactagcaaagtgagcctttgcaaaggatatctcctctgtggtgcttacgcccagttgttttcgtccattaaccctggtgtgcatttatattcatttgatgtgaacatt

SEQ ID NO: 440116 - DNA, 1243 bp, Homo Sapiens
  misc_feature (314)..(389): n is a, c, g, or t
  misc_feature (1216)..(1216): n is a, c, g, or t
ggtttctcagtaaggttgctgaattatacagtggtgccatccctgtctaagttgtgtgcaggttttcaaactgtttttgtgaaactggtaaaacatggctataaagaggacagtgtgtcagggtccatctgccctcaatagaaaatgtctctggctcataaaatgagactccctcagggactaaatatgaactgacagcagtaactctgatacagaataatctaaattgcatcaaatggccttattcagagtttgttaggcttatcagtatgttgcttttaattggggtgggaaagtagagggagagaaagcannnnnnnnnnnnnnnnnnnnnnnnnnnnnnnnnnnnnnnnnnnnnnnnnnnnnnnnnnnnnnnnnnnnnnnnnnnngaatcctataaagaatgttactagcatttacacttcccaaatgaaggtaccaaagctcaaacgcaatgttgtgaagctgtttccttcagatttaggttatgtgggatgatgtgggattgaagaggaaagaaaggtgggattatccccctaggaagactttcaggcctgacttcataggaattcatccatcttatcatgtggagtttatctcaccctgctgttgcaggatgctatttgcatgtgtccccaggtgatgttttttctttggggagtaggggtttggcttcctcattcatccctcttgctaaaagaggagatagttgatgttgcatctaaagatgctataagacaatgaaagtttgatgttgtacatacctacaagtaccatttttgtgcatgattacactccactgacatcttccaagtactgcatgtgattgaataagaaacaagaaagtgaccacaccaaagcctccctggctggtgtacagggatcaggtccacagtggtgcagattcaaccaccacccagggagtgcttgcagactctgcatagatgttgctgcatgcgtcccatgtgcctgtcagaatgggcagtgtttaattctcttgaaaggaaagttatttgctcactatccccagcctcaaggagccaaggaagagttcatttcacatgggaaggtccggggactgggtcagccactctggacttttcttaccacatttaaattcttcccatttacatcttcactatttgggtaatgggctttaagtgttaaaggggccatggatgtgtattatttaagctatggtggcccacatattttnttttttaggacttttccacaggcattc

SEQ ID NO: 440117 - DNA, 1127 bp, Homo Sapiens
  misc_feature (4)..(4): n is a, c, g, or t
  misc_feature (9)..(9): n is a, c, g, or t
  misc_feature (15)..(15): n is a, c, g, or t
  misc_feature (59)..(59): n is a, c, g, or t
  misc_feature (101)..(101): n is a, c, g, or t
  misc_feature (167)..(167): n is a, c, g, or t
  misc_feature (175)..(176): n is a, c, g, or t
  misc_feature (178)..(178): n is a, c, g, or t
  misc_feature (212)..(212): n is a, c, g, or t
  misc_feature (225)..(225): n is a, c, g, or t
  misc_feature (244)..(245): n is a, c, g, or t
  misc_feature (247)..(247): n is a, c, g, or t
  misc_feature (252)..(252): n is a, c, g, or t
  misc_feature (263)..(264): n is a, c, g, or t
  misc_feature (268)..(270): n is a, c, g, or t
  misc_feature (293)..(293): n is a, c, g, or t
  misc_feature (313)..(313): n is a, c, g, or t
  misc_feature (326)..(326): n is a, c, g, or t
  misc_feature (338)..(338): n is a, c, g, or t
  misc_feature (342)..(342): n is a, c, g, or t
  misc_feature (357)..(357): n is a, c, g, or t
  misc_feature (360)..(360): n is a, c, g, or t
  misc_feature (368)..(368): n is a, c, g, or t
  misc_feature (376)..(376): n is a, c, g, or t
  misc_feature (385)..(409): n is a, c, g, or t
  misc_feature (413)..(413): n is a, c, g, or t
  misc_feature (415)..(415): n is a, c, g, or t
  misc_feature (417)..(417): n is a, c, g, or t
  misc_feature (423)..(423): n is a, c, g, or t
  misc_feature (432)..(432): n is a, c, g, or t
  misc_feature (439)..(439): n is a, c, g, or t
  misc_feature (446)..(446): n is a, c, g, or t
  misc_feature (452)..(452): n is a, c, g, or t
  misc_feature (459)..(459): n is a, c, g, or t
  misc_feature (462)..(462): n is a, c, g, or t
  misc_feature (478)..(478): n is a, c, g, or t
  misc_feature (482)..(490): n is a, c, g, or t
  misc_feature (873)..(873): n is a, c, g, or t
  misc_feature (898)..(898): n is a, c, g, or t
  misc_feature (918)..(918): n is a, c, g, or t
  misc_feature (976)..(977): n is a, c, g, or t
  misc_feature (980)..(980): n is a, c, g, or t
  misc_feature (1000)..(1000): n is a, c, g, or t
  misc_feature (1002)..(1003): n is a, c, g, or t
  misc_feature (1011)..(1011): n is a, c, g, or t
  misc_feature (1020)..(1020): n is a, c, g, or t
  misc_feature (1025)..(1026): n is a, c, g, or t
  misc_feature (1029)..(1030): n is a, c, g, or t
  misc_feature (1040)..(1040): n is a, c, g, or t
  misc_feature (1044)..(1044): n is a, c, g, or t
  misc_feature (1053)..(1053): n is a, c, g, or t
  misc_feature (1056)..(1056): n is a, c, g, or t
  misc_feature (1062)..(1062): n is a, c, g, or t
  misc_feature (1072)..(1072): n is a, c, g, or t
  misc_feature (1075)..(1075): n is a, c, g, or t
  misc_feature (1085)..(1087): n is a, c, g, or t
  misc_feature (1095)..(1095): n is a, c, g, or t
  misc_feature (1097)..(1097): n is a, c, g, or t
  misc_feature (1106)..(1106): n is a, c, g, or t
  misc_feature (1109)..(1109): n is a, c, g, or t
  misc_feature (1116)..(1116): n is a, c, g, or t
  misc_feature (1125)..(1125): n is a, c, g, or t
tatnacttnactaangaaaaacataataaattcattgtatagataaaaatgacatgtanactattccaatatctgtttcctgttgaagaaaccatcaaganaaaatcttttcttggttcttcatcattaacacaacccccaaaataaaatacgattttaaaaaaatnaataaaanngnatatatatatacatacacatacacacataattanaaaatttcctganttaacaaagacatgctctnngnaagcngtagacctttnncccnnntctggtagcctttccttcttttnttttctgcagttcttaaacngcctgtttgtttnttttggtatggntganttgttttgtttcttntcntggatgtnttcttgtntacacaacnnnnnnnnnnnnnnnnnnnnnnnnntgcncngnggggcnaagggcagngcgttgnacataancggggngcattantcnttgggtgggatgtgcntttnnnnnnnnnagcctggtaagatacactcaaaacctttattcattgatttacaaactgtacaatatttacaaagtttaggcattaatcccatattgacatgaatgctgtggagagtctaaaaataaatatgtggcacatagcttaatatacacatcatggctctttacacttaagccattaccaatagtgagatgtaatggagaatttaatgtggtagaaaagtcagagtggctgaccagtcccggaccttccatgtgaatgactcttccttggctccttgaggctggggatagtgagcaaataactttctttcaagagaattaaacactgccattctgacaggcacatgggacgcatgcagcaacatctatgcagagtctgcaagcactctntgggtggtggttgaatctgcaccanctgtggacctgatccctgtncaccagccagggaggctttggtgtgggcacttttcttgtttcttattcaatcacatgnngtnctttggaagatgtcagtggngnngaatcatncacaaaaantggtnntgnngggatgtcanaatnaaacttttnttntctttntgatctttgntcnacacaaactnnncctctttngnagagggagnagngggagcncaccctatncc

SEQ ID NO: 440118 - DNA, 548 bp, Homo Sapiens
  misc_feature (407)..(407): n is a, c, g, or t
  misc_feature (444)..(444): n is a, c, g, or t
  misc_feature (479)..(479): n is a, c, g, or t
  misc_feature (510)..(510): n is a, c, g, or t
  misc_feature (517)..(517): n is a, c, g, or t
ttttttttaagatacactcaaaacctttattcattgatttacaaactgtacaatatttacaaagtttaggcattaatcccatattgacatgaatgctgtggagagtctaaaaataaatatgtggcacatagcttaatatacacatcatggctctttacacttaagccattaccaatagtgagatgtaatggagaatttaatgtgggtaggaaaagtcagagtggctgaccagtccccggaccttccatgtgaatgactcttccttgggctccttgaggctggggatagtgaggcaaataactttctttcaaggggaattaaacactgccattctgacaggcacatggggacggcatggcaggcaacatctatggcaggagtctgcaaggcactcccgggggtgggtnggtttgaattctggcaccactgtgggacctggtcccntgtaacaccagccggggaggctttggtgtggtcanttcttgtttcttattcattcacatgcagtantgggagnttgtcatgggagtttatccttgccaaaatgg

SEQ ID NO: 440119 - DNA, 916 bp, Homo Sapiens
  misc_feature (16)..(16): n is a, c, g, or t
  misc_feature (734)..(743): n is a, c, g, or t
  misc_feature (763)..(807): n is a, c, g, or t
ggcttggtgttttgcngaacaaccccatattttctttaccacatctggtagccgaagttcaagacaggagccagcaagttgggtttcttctgaggcctctttctggctcgaggacagccaccttcttgccccgtcctcccatggactcccctctgtgtgtgcacatccctggtgtctctcctcttcctataaggacatcggtcatatgatactaggccccactattttgacttcatttaacttaattacctctttaaaggccctatctatctctaaatatggtcacatcgagggtgagggctttaacacatgaattttggggttggtgacacaattccatccttaacacctttatggagtacttttcatgtgatggtcactgtagatacagaagaaaatgacagtaacctcgcctttgggaaattgggagtcttacagacatgaaaaaaatgccatacgatatgcaatttatacacatgagggcactgagggagagaattgacttggttttggggaatgtgggagaagaattaaaagaaggcttcaaagacaaggagctgggtgagttaagttttgaaagaaagcctggcataagtgtgatagcaggaaaaagaataaaggagacatcctcatcatacacatgaaataagctgagtctctctcctgagttttgaaagattctatctaaaaatactgaccgaccctaacttcaaaagcctacaattagagataannnnnnnnnnacaattagagatgagttttnnnnnnnnnnnnnnnnnnnnnnnnnnnnnnnnnnnnnnnnnnnnntattgaattggttgaattggtccttagttattaaacatcagaaaccatgacccaagctggttttgaaccaagggagcctcaattaatttttgttccgaccagacgaacg

SEQ ID NO: 440120 - DNA, 1557 bp, Homo Sapiens
  misc_feature (35)..(35): n is a, c, g, or t
  misc_feature (1212)..(1212): n is a, c, g, or t
  misc_feature (1285)..(1285): n is a, c, g, or t
  misc_feature (1415)..(1415): n is a, c, g, or t
  misc_feature (1417)..(1417): n is a, c, g, or t
  misc_feature (1419)..(1419): n is a, c, g, or t
  misc_feature (1432)..(1432): n is a, c, g, or t
agtggtaaatctcctttattgcccctggagactantatatgtgggtacaatataataggtgaaattaatgatgatgtccattaatgctttaaaaaacattaaaaatattaagtatcttgttttaaaagtagagaaatatttttaaagaactatttctatttcaaatagttacaatgaagtaagttttagtgcttaaaaagataagctttgattatgtggataatccatttgtgtggacatctcatttattttccaataatgtaggataagatgaggcatatcaaagtaactcaaaatcaatggactaatcaatttatgtataatgatatggttcatcagaataaatgtcatgaatttaaaaatcaccaccaattcctttattttctatattatattcttttaaagttcccttttctcctgtacttgagtatgctataaaatcatgaactttttcttttagaatatccagttcattttgcatctttaatatgctattatcatactgaattccttcaagggttttctgcatctccattatttcagacactgctttcagcatatcatcttccatattaaacatctgcatagtcaagtcttccattctcttttctgcttctatcagatcctgagagactctgagaacagagtgaatagcactttcaattgttggcaaatgtgtcttgcattcttaaactttgggttcgtagtcggaaagtttattagtcagattttcatcttttgcaaagggggcatgctgttcctcttctaacttttccattgcctttgtatcagagcctagctgctcctttactggcaggagatcttcttcttcttgtctttttactgttctaatatttcttagtgtgctatcttccaaatcttttagccgttcagtgagcaattttatttcctgctcagctgagttaatttggacagttacttgagaatgtatatgttttgcttctgatttgaaaatgtctgtattaatgttcatttcttctaggcttctcttccagaaatccgtaatattctgaaatttctcattaaggctttgcatcctttgagtgagcacctcttcattattttgaatgtcatgcatgatatcttggaggttggatacttcctgctcaaactgggtcatcaaagacatggatgatgtagcttcctgcaggatgctttcagtagactcaagcttttctgaaattaaactgnttttactttgaagttgttggaattcattggtttctagtttcagtaactggtattggttttccacctttgcaantttttctgactgctgaaatacaaaccaggccaggcccaggcacgtccccagcgacagcaggctcaggcacgttcgggggtctgcccagcccccgcctccgctgctccgggccacgggggtcttcccgccncnantccgcttcccggntccgcagcaggggctcccttgggccccgacttcttccggctcttcacctcagacatttttggtgaccctaggacgacaagcccagggcagcttcttcaccagggggagcaggacgtggccgcctt

SEQ ID NO: 440121 - DNA, 1115 bp, Homo Sapiens
  misc_feature (358)..(358): n is a, c, g, or t
  misc_feature (560)..(600): n is a, c, g, or t
aaagttttatttttactgtacaaaataggattaaatataaaatgacttttgctccaaaatatcattatttttgatttaccagtcttctcatgagaggtcccattaaaaaaattaccttagtctaaatctcaataatgtcaaaacttacttcatatctgaaatgtgtgctatttcatctttaatatccttaatctcagcttggactattgttaaattagatattttttcacttaagaaagcaaatttctttctctctttgtagtaagtcggtaaccaatctcccaatgcgtagtgttaaatcatttactaatggttctaaacgggaaaagtccttctttagattatacacctttggttntagatcatttgcaaaagtcactgtcttcagaactttggctctgtcaccttctaagcttagaaatctatctgtatgtttgtcgaagtcactctttagttcggttagcgtcttcttaacagagttaattctttgtgaattttcagatgctgtctttcggagcgttgctgttcgatcaatactgcttgaaagaagatcacctatnnnnnnnnnnnnnnnnnnnnnnnnnnnnnnnnnnnnnnnnnctagttcttgcacagaatctgtcaatgatattacatcagttactaaacctgaaatccgtcgtatatctgtttttacacttgtaatcttgagaccaacatcttttgccatggaagttgtactttggtctacttttgtaatgtcttgagaaagcgtcgtcagactgttgttcagtatatcctgtttttcagttatcctattggaccaagtttttacctcattaatttcttcctgtagacgctttagatgagcaattatttgaaaagacttcaattgttccatgatagcttcagatttctgccacaggccaggcccaggcacgtccccagcgacagcaggctcaggcacgttcgggggtctgcccagcccccgcctccgctgctccgggccacgggggtcttcccgccctcgctccgcttcccgggctccgcagcaggggctcccttgggccccgacttcttccggctcttcacctcagacatgtctggagaccctaggacgacaagcccagggcagc

SEQ ID NO: 440122 - DNA, 828 bp, Homo Sapiens
  misc_feature (452)..(478): n is a, c, g, or t
gggatattgataaatctttattgacgaaatattgacattgacatacttcttggaagtatatagtgtgttagaattctaacaaattaacacaaaacacaaaaatatttacattctggtatagaagacattaaggaagcatttgtcactctctttagtaagtctatgatcttggaatagaaactcagtgcttgaaaacttgccgccgtgcgcttggccacacttaacatcatccccgctaactacagtccttcaggttttgcaatagatagatttaaagtttggaataggcattgcagtgaatggttgaactcggccaatttctccaaccactgaaaggagaagtttgcatcagggttttaagcctcaggatgttaggaaagggaatgtccaagaaatataattaatttaggggtttttttcccagtacaagtcctgattctttttgtgggcannnnnnnnnnnnnnnnnnnnnnnnnnngtcgtcctgctccccgtttctttgtacgaggaccactatcgctgagcctacttcatttagcttgcacaatcactttgacatcagaaggtattaaaaagtgtttacagactgcacatttctttggaaaaaaattcaaataaaaaggccaccataccccgtctttaaaagggaaaagaaaattccaatggcttttggggagctttaaacacccttgctgcccacaacctgtgtaattgcttttacaaggtttttggaaccaggtcgtggggatgggggctctagatattgtaatatatgagagttagtttttaccctaattactttctcaaaggtgtgtggtgggataaaca

SEQ ID NO: 440123 - DNA, 1036 bp, Homo Sapiens
  misc_feature (7)..(7): n is a, c, g, or t
  misc_feature (13)..(13): n is a, c, g, or t
  misc_feature (19)..(19): n is a, c, g, or t
  misc_feature (26)..(26): n is a, c, g, or t
  misc_feature (28)..(28): n is a, c, g, or t
  misc_feature (35)..(36): n is a, c, g, or t
  misc_feature (39)..(39): n is a, c, g, or t
  misc_feature (43)..(43): n is a, c, g, or t
  misc_feature (53)..(53): n is a, c, g, or t
  misc_feature (64)..(64): n is a, c, g, or t
  misc_feature (68)..(68): n is a, c, g, or t
  misc_feature (75)..(75): n is a, c, g, or t
  misc_feature (77)..(77): n is a, c, g, or t
  misc_feature (88)..(88): n is a, c, g, or t
  misc_feature (95)..(95): n is a, c, g, or t
  misc_feature (108)..(108): n is a, c, g, or t
  misc_feature (491)..(491): n is a, c, g, or t
  misc_feature (647)..(647): n is a, c, g, or t
  misc_feature (1004)..(1004): n is a, c, g, or t
gaaggcngagttncatggngggagtngnccaacannaanacanctcgtgttantaaaggcccanatcncttgctntntcaactatgangaagatngaagcagtttcangaaacaggggctcaattcaaagaataccggcctgaaactggttcttgggtgtttaaggtctcccatttttctaagtatggccttcaggattctgatgaagaggaggaggggcatccgtctaaaactagtacaaagaagttgaagactgctcctttgcctcctgcaagccagactacgcccttgcagatggctcttaatggcaaacctgcacctccacctcaggtagagaaaaaaggacagtgaatttgaatggaatccgtgataccgaagttgaaagcaagtcattcagctaatacaaagctgttttatgacccttggaactttgaagagtacaaacattggcaatcacgttgaaacaagtgcaagggagggcgtgaggtctngcaggcatctgtcttttaactggagagatttaaagaattctcttgctgtttggattattcctctacagattgtcatttttaaaccctttgttctctctcatttggacttgctgaattctctgctcagtgattaacttaagattggctcatgtgggntcatgcacagtaaattctgcctttattgactacctgatgtgcagtttaatctttttctttacctccatggttttttaaaagttaaattagctttctgaaagggtttttaatctccatttttttaaagttgtttgcttatacttcgggtaaccttgatatttgtattttaatagtacataatctttatgaaaaatagtttgggaatgtaaatgaattattatttggcttggggagattagggcctacattgtttatcgcaattacttgtatcattgatacgggatttctttgtaaagcatcctctacctctcagctgctgaaagctagacctttggtattttccatgctataattctntatggctgctgaaatgtgtggtttttatgatt

SEQ ID NO: 440124 - DNA, 1154 bp, Homo Sapiens
  misc_feature (93)..(102): n is a, c, g, or t
gcgcccccggaaggtccccatttgggggggaaaaaagaaaaagacgttgtgcaagccttgtttaaaaatttttcgaaatagtgataagttaannnnnnnnnntcaactttaagatgataacggagtttttttcactcacgcaagtggagataaatggtcgaatatgggtgggaatttattggggacgaaaacaaaaatgtttcttggaggaaaggtcttggcgtctttgggaaagggcaagggtgaaatctaaaaggcgggggatatccaaggtggcccatattctaaacattgtttgttgaacccaggtaaggcaaatgaatggccttttcaatgtttccgggtaaagggcatggtgggatttaaatttcccaggggaaagaatgcaaaataatgtggtggagggcaggaccaacacggtttcctgattccctccaagggcaatgcttctctttttaaccatgggatcccaaaacctggctcctggggggataatttacccatgttccactgtccccagtttccacaaaccccttccctaactgttccccttctgggctttggctgtgaggtggagggtgcaggttttgccattaagagccatctgcaagggcgtagtctggcttgcaggaggcaaaggagcagtctttcagcttctttgtactagttttagacggatggctcctcctcctcttcatcagaatcctgaaggccatacttagaaaaatgggagaccttaaacacccaagaaccagtttcaggccggtattctttgaattgagctccctgtttccttgaaactgcttccaatcttccttcatagttgatatcagcaaggcgatctgggctctttattaaacaacgagatgttttatctgttggccaaactccatccaatgtaacttcagccttcctatttagcccttcacccacaggtggtttttggttatcatctaagtagacaactacttctttcctccggatatgcacaatatcatccaaatttagatttgtcaaattcacatctccttcaaaatagattgaaccataacctttccgaccaatagtgaaatcagagacaatgcactctcccctcgtgccgaattacgccacccaggcctcgcttcgtatgaagtgtgcaggcctttacacat

SEQ ID NO: 440125 - DNA, 1734 bp, Homo Sapiens
ttgaacagcaaaactgagtatgtttactttacacaaagtacaatccagtatatgcagaaaggtactcagcatcacactcgtgatcaatatcctcttatttccatttggtatgtcactgaaaacctggcacaccacttagctaaaaatcacataaaagaacccctagagaaatcaaactgatgttttttttcccccaaacaatagatttcctcttcattagtcaaatctgatagtgatattcattaataaggaaaactaaagttttcaagcatcaactctgaatggcagagaccctaatctgactgttattagccaccaagaactcagaagagcaaagaactcaagaagaggcaagcaagagcactatggaaattatattcttttctgtgaaattcagtcccacagctatttgagcaagggcccaagacgatggagaggcggcaaagctgctgggagggcctgttcgcaggcaggaatgcactggctgtgcctcgccccgccatgtccttccacaggtgggctcttcactggcttcacttcagcttgatcctctggtctccccacagcttcctgggagactttgggttgtaatctttacagttccaagaatcaattttggttgaacgcaagggtaacatccccatccaaaacagaaatgttctcatggtatgaaggccattctgtagagtgcacgtatatatgtttatatttatataggctcctatgcgagacagtttccttcctcttagcaagagaatactgcatccagcaacactgctttggctagctcttttttctgtatggcctcatgtgtgtggcaattgaagcagctatttctcccttcctcttgttctggccaaaataatctagaaactcaccatctggtccaatcaagtacattattattgtgtgatccactatgtagtcttcatcttcgtccttggggccagggctgtaatacactctgtatgctctggccacttgatcgacctcttctctcgtgccagtcaagccaaccagtttgggagaaaattctttcacataatttgcgatggcttcttttgtgtccctctctgggtcaatgctgatgaaaagtggagttagatctggcagagttgtaatgctatctatttcatccacgacttgaatcatcttttctagttcttctggacagacatcagggcaatgagtgaagccaaaataaatcaataaccactgacccaagtagtccttgtcagttttacgctccccagtatgagttgtgagggaaaacggtcccccaagtaaaggcttgccgatgtgtcgctgccgttccttctctaacttctctgccttttctttcttgacgtgcttcattccagccagtaaagctcctccaatagcaaatgtgattgctaaagacttccaggaaacaggcccgggcttcgaggggcgcgtggagtctccggggcccttctgcgaccacgggggtggcggcctcgcagtgctgaggggccgggttcccaggcaatagccagggcgccccgaggcacgccacgcctccgcttgccgcgcgcagaactgcctcagcaagactctcgcagtcccctcggctgggccccaaaactcgagtccgcgaggcaagaagcgccaaagttggccacccagaggccgcataactcgtccgggtactaggaccagcatcgccatgagcctcggagaccgggtctcctttgaccctccccgcgatttccg

SEQ ID NO: 440126 - DNA, 1133 bp, Homo Sapiens
  misc_feature (1125)..(1125): n is a, c, g, or t
aaggggaaggaggtatttctctaactatctttgcaaaatacaattcatccattaacaaatcacagtaaattaggaagaataaaacttacatttcgacaaaaacctatgccatatttgctgaaagcatcttccaaatcctattaaaaacatctttaaatatatttctctgcagcttcttgcccttatattttttattgggtgcatcatattttaattttagtaatttaatttctttctccttttcttcctctgatttatgcttatcctcttctactagtttaatttcttcatttaattggtcagtgtagattttcctcaaaacctcttcccgttgtttcagcctttcctctgtgtccttgtatatgtcatcagaaaagtaagccccttcgttgcactgcaccattttctctatcagctccaccaactcctgcacttgactttccttctctgccttactggttttcttgctgttgctaaaggcacagcagcggttcccgcactccttgacgatgctttttaggcccacatccgcatctgctatgaagtcatggaagctctggccctccaactcttctttgcgagtgaacaagatgaccatgtgcttcatggctgacttcccaaagacagccttgatcaatgcaacggttttctgctcctcctctgtgtagcggcccagcagcagaactaggacaatagcatggggccctgggcaggaggagatgatgcagcggctgatttccttgcaggtggtgtccaggctctccttggtgtcaaagagccctggagtgtctacaacaagaaggtctctcccctgccattcccgggatgctttttgacagttcttggtaacagcttgggcagcaattctagaatcaaagatttcctctccaaggatggtgttcgctgttgcacttttcccacttccagttttccctaccagaacgatcctcagggagcggtcctcactctcagccatgctcacgtcaggaggctctagaacttaggcacgtacaagaccttctcttgaacaagttgaattttcaggttttctccaaggaggctgcttgagctgttgcttttgcttttactgtgagttaaaagtgtctgtaccgccaccaaaacctntcagtcag

SEQ ID NO: 440127 - DNA, 776 bp, Homo Sapiens
  misc_feature (184)..(222): n is a, c, g, or t
aaggggaaggaggtatttctctaactatctttgcaaaatacaattcatccattaacaaatcacagtaaattaggaagaataaaacttacatttcgacaaaaacctatgccatatttctgaaagcatcttccaaatcctattaaaaacatctttaaatatatttctctcagcttcttcccttatnnnnnnnnnnnnnnnnnnnnnnnnnnnnnnnnnnnnnnnaatttctttctccttttcttcctctgatttatgcttatcctcttctactagtttaatttcttcatttaattggtcagtgtagattttcctcaaaacctcttcccgttgtttcagcctttcctctgtgtccttgtatatgtcatcagaaaagtaagccccttcgttgcactgcaccattttctctatcagctccaccaactcctgcacttgactttccttctctgccttactggctttcttgccgttgctaaaggcacagcaacggttcccgcattcctcgacgatgctttttaggtccacatccgcatcggctttgaaggcatggaagctctggtcctttaactcttacttgcggggaacaagagaccatgggttccttggttgacttcccaaagacattcttgatcaatgcaacgggtttctggttcttcctcgtgtaacggcccatcatgtgtattgggaccattgttttggtggtcctgtgttgggtgggatatatcacagcgcatggtatactttgcaggggggggtcaacgcccgtcttgggggtgaaa

SEQ ID NO: 440128 - DNA, 642 bp, Homo Sapiens
  misc_feature (8)..(8): n is a, c, g, or t
  misc_feature (12)..(12): n is a, c, g, or t
  misc_feature (14)..(15): n is a, c, g, or t
  misc_feature (17)..(17): n is a, c, g, or t
  misc_feature (19)..(19): n is a, c, g, or t
  misc_feature (21)..(22): n is a, c, g, or t
  misc_feature (24)..(24): n is a, c, g, or t
  misc_feature (26)..(28): n is a, c, g, or t
  misc_feature (34)..(35): n is a, c, g, or t
  misc_feature (37)..(38): n is a, c, g, or t
  misc_feature (41)..(41): n is a, c, g, or t
  misc_feature (43)..(43): n is a, c, g, or t
  misc_feature (45)..(45): n is a, c, g, or t
  misc_feature (47)..(47): n is a, c, g, or t
  misc_feature (49)..(51): n is a, c, g, or t
  misc_feature (53)..(53): n is a, c, g, or t
  misc_feature (273)..(328): n is a, c, g, or t
caacaccncccncnncncnanncnannnaacagnncnntcncncncncnnncnctggcatctgtgccagacgggccctgtcttcctcatctcccatgaggtcttctccatagccatcatggaactcttcatcttctgaggaagagtctgaatctgaactggaagaggagctgttgctgtcagagtctgacacttcaccttcctcaggggctgagctctcagctgaactgtctttgtctgaactgcctgaggaggcagttttgttggcctgttnnnnnnnnnnnnnnnnnnnnnnnnnnnnnnnnnnnnnnnnnnnnnnnnnnnnnnnnttgctcccaaatgtccactcatcgtcactgtcagacgtctccgagtctgacgaggctgcaggctgactcacaggcggctccttctcctcagagtcactgcgctttcgctttgccagggacaagagctcctgatccaggttctcgtcgctgccgctgtcctctgtgtccgagtcgatcacgacgcggcctttccgcttctttaccatggtggtcccccggctcccacgccggccgccgcccggactcccctcttgcccgcctgccagtgggaccggcacaacccccgccaccgctcgttgctagaaccacacccc

SEQ ID NO: 440129 - DNA, 1152 bp, Homo Sapiens
  misc_feature (935)..(935): n is a, c, g, or t
gcctaatttgcgttacaacttctggagtcgctactctcggttttactaccaccggattggccctgggtctgatggagccagtctccgtaaatacctgccccagaattttactcaacacatccggttggacaacctgccagaattcgggaaatgtcgcacggccgggccccgctgtgagctagctctacaatcttctgccgggtggagtccggcagtggccgcccgttgacacaagacaccaccgagctgattcactccgctgtgactgttctgcatgctggctctggctgggggccgcgggattccacggggctcgaatatggggctctgaaatctcggatgtctgtccactctcacaataaaaggcctcacacatctgcgcgcccctagttaaagtcttccccctttatgaggcatcctttctggttgtcacagcttctgtcaagagttttgtttggttggggttttttgtgctgctgttgttgcttgaagaccacaatggtttgaaatgacggtgttttaaaggagttgctggtgagagttttctccacggatgttgctgggttggtgtgtgagagcaattctcagattcctatgctgattggtgatggctcaagtgtgttaatgtgtgtgtgccggcgcccggcctcgcctccaccgctcctcactggcccattagcgaagcctgacctctgtcatcatcctccagcaaaacacttcctcctgcgcctgaaccagagcgggaaatgaggccgagccacggttcccttttcaaacccactaatcactccgcaacatgcaaatgcaccgctcgctctcacacaaaatattgctttatgcaaagcagcgccggggcctcgcgccagccgattggatgctccctctccccgcctggtgcaattggtccgtttgtttgaatatgaatacacttgttnttgctccgccggtgggtcccggctcctctccccggcgcagggcccccgagcccgggctctggcgctcgcctgcatctcccctccgcgcacgccgagattcggcgcggcccgccctgctgccgcgaacttgagcggtcaagtgaaggtttctgggttgggggtcgcgcccccactccccctaagctggactcgggactcccagtcctcggagggtgca

SEQ ID NO: 440130 - DNA, 1421 bp, Homo Sapiens
  misc_feature (449)..(449): n is a, c, g, or t
  misc_feature (703)..(703): n is a, c, g, or t
tgagccaccgtgcccagccccaaatctgcctttttctaaacataaaattccaattctcccattaacagtagatactcacatataagctgcattctaagggactgtttctgtctagtgcaccactgtaatttgattgatttagcaacaaaagctgttctgctcgtgctcaagagttttaaaaccacaaaatcaataaataacccacaaaaatattcttaaagaatatattctaatgtttaaaatgtagcaaaatctttttaaggaggaggaaaggacaggtagtctgaactgaaaccctatcaggcgcaggtactggcggcactgtcttggtcatgtgtgcacacagatgctcccatggtatgctgctttctgcctcctttcaccagctttaagaaatgtgctcaggtttctgagtgtccccttctctccttctaaccgcatgataggtnttgtttttctctaagttcctaggttttgcccatgttggaaatgtatctaagtttctgtctcagatattttctaaactctatttccatttttttaaatagtaatttcttactaaatgaccttaattccaatccagtgcagaaatgcaagtctttactgtaacaaacttctaggctcccaagcaaaagatggatttaaccagtaactcttccagaatcaacttggttgtagtttctccaacatcagtattaataantcattcggtgtggtgatggtggtagatttctttcactgtctgtccacacagctccacagtactctaacaggattatttcaagctccgaagcctatttaagtgccacacctacacaagtactttaattcactagaatttgtgattttaaaagctgtttggtgaccctaaagcagagttgccaaggtcaacaaataaaaatatgagttaaatttgaatttcaaatagtaatttttagtatatgcaatatttgagacatatgcatactaaaaaattatttacctgaaattcaaatttaactgggcatcctacatttcatctggtaacccaatctaaaaaaaggttcccaagaatctattacctataacaataaagggatcacttcctgctgtgcatgagaccagagccattttacaacagaaggcaggtaaagcaacatatcctaaaaagattcagtcattaaattgtcacagaatcttaaaatgtctgtatgagtagggaggctatttttgaaataattcactatcagtgagggtttggtccaagttttctgggtaacgggctcttggttttatgactcatagcggatccacgagcatgagagtaaaatgtatctgtcctatcaaataggaagtggcaaatgggttgcatagacaataaagataagtcaagtggcacattctggcagggtgaagtaaaaagagaacatttcattactttt

SEQ ID NO: 440131 - DNA, 1695 bp, Homo Sapiens
  misc_feature (1665)..(1665): n is a, c, g, or t
  misc_feature (1681)..(1681): n is a, c, g, or t
tgtcatggaggccgcggcggtgacggtcacccggtcggctacacggcggcggcggcggccgggaaggagcatcaaagatgaagaagaagagacagtctttcgagaggtggtcagtttttccccggaccccctgccagttagatattatgacaaggacaccaccaaaccaatcagcttttacttgtcttcgctggaggagctcttggcgtggaagccccgcttggaggatggctttaatgtggccctggagcccctggcgtgtcgccagccccctctgagcagccagaggcgccggactttgttgtgtcatgacatgatgggcgggtacctggatgacaggttcattcagggctcggtggtgcagactccctatgctttctaccactggcagtgcatcgacgtctttgtgtacttcagccaccacaccgtcaccattcccccagtgggctggaccaacactgcccacaggcatggggtctgcgtgctggggactttcatcacggagtggaatgaagggggaaggctctgtgaagccttcctggccggggatgagcgctcgtaccaggcagtggctgaccggctggtccagatcactcagttttttcgttttgatggctggctgatcaacatcgagaactcgctgagtctggccgctgtggggaacatgcctcctttcctgcggtacctcaccacacagctgcaccggcaggtcccagggggcctggtgctctggtatgacagcgtggtgcaaagtgggcagctcaaatggcaagacgaactcaaccagcacaacagggtcttctttgattcctgcgacggcttcttcactaactataactggcgggaggagcacttggagcggatgctggggcaggctggggagcgccgggctgatgtgtacgtgggcgtggatgtgtttgctcgagggaacgtggtcggaggccgattcgacacagacaagtcgttggagctgatccgaaagcatggcttctccgtggctttgtttgcccccggctgggtgtatgagtgtctggagaagaaggatttcttccagaaccaggacaagttctggggccgactggagcgttatctgcccacacatagcatctgctccttgcctttcgtcacgtccttctgcctgggcatgggtgcacggagggtctgctatggccaggaagaggcggtagggccctggtaccacctgagcgcccaggagatccagcccttgtttggagaacacaggctgggaggggatggccggggctgggtgaggacgcactgctgcctggaggatgcctggcacggaggcagctccctgctcgtccggggtgtgatcccaccggaggttggaaatgtggctgtgaggttattttccctgcaggccccagtgccacccaagatttacctgtccatggtgtataagcttgaggggcccacggacgtcacagttgctttggagctgaccacaggggatgcctgcagctgccacatcggtggcatcttagtgttgaacgcagtaacaagctcaagacacagccttcggccccttcgggtgccccccaccaagctggccagatgggtgggccgttgggggcggcatcttaatgggggctgggtccagcactgctacgaggtgagcctgggtgggtgcctgttgctagactnctcgtttgcttttagnggcgccggtaatcg

SEQ ID NO: 440132 - DNA, 574 bp, Homo Sapiens
ccaccagggattgtggcaggttacaggaactgatcacaattctctctccactacctgggtttcctcctagctcagacaaatggtataaaatcttgcaaccctgaacttacaggatttctacccggctcctaaaccaatgaacaacttcctttgtcttggagattaatccctaggagagactcccataggccaggctcattcttccaagccgagcataatccttgggtatcaaatggccagttactccaatttccagaggtttgggatcacctccagggaggagggcctcgtctgaatggtgaatgtgggtgcaggccatgggcatgctcagctcagcactctggggtctcctcctctattgcatacacgcctgtctgctttctattctttaggaccagtccctactggggagcctgtttcaaacagcaggagcctgttttcctgagaagcatgaagaagccacagcagccactgttggtacctgcccagatccactcagcatctcttccgcaggtttaaggctgctcacttgatcccattatactctgcttacggccctcttctgatggcagaa

SEQ ID NO: 440133 - DNA, 766 bp, Homo Sapiens
  misc_feature (86)..(86): n is a, c, g, or t
  misc_feature (129)..(129): n is a, c, g, or t
  misc_feature (140)..(140): n is a, c, g, or t
  misc_feature (177)..(177): n is a, c, g, or t
  misc_feature (252)..(252): n is a, c, g, or t
  misc_feature (260)..(260): n is a, c, g, or t
  misc_feature (266)..(266): n is a, c, g, or t
  misc_feature (290)..(290): n is a, c, g, or t
  misc_feature (296)..(296): n is a, c, g, or t
  misc_feature (313)..(333): n is a, c, g, or t
  misc_feature (340)..(340): n is a, c, g, or t
  misc_feature (342)..(342): n is a, c, g, or t
  misc_feature (354)..(354): n is a, c, g, or t
  misc_feature (364)..(365): n is a, c, g, or t
  misc_feature (371)..(375): n is a, c, g, or t
  misc_feature (380)..(382): n is a, c, g, or t
  misc_feature (385)..(387): n is a, c, g, or t
  misc_feature (684)..(721): n is a, c, g, or t
ctgcaattagaaggaggatcaagggttattacagctagctccttctgaattcttttagcactagtggataacttagcagtagtttngctagaaagtttatgtttttattctgctgggtagcagaagatnttctttcctcnttatcttacaggctctggagcggatgggtctcgctgntccgcatctaaattgccactgatggtgatggagctctaatcatcggacctttgcctatcactggacatcttggtnaagttatntcttgnaaaactcggccgcccgcccggccnctcgcncgccgatacggtgtggnnnnnnnnnnnnnnnnnnnnnccttcgntnaaggaaatggangcagctgtgnnggcaannnnntggannnggnnnaaaaaagaagccgaggaggctctggccggggagtgtggaacattgaaagtcggagggggttgtgcagtgccgggctccggccggagggtggcgccgcccagcgccttcggaaaaaagcgggggtgggagctcggctgggcgagggcgcgagctcccggcgaggcggaggggacgcgggagacccccgcgcgctgtagcctcccgccgccgccgcccggctcggctcctcccggccgcgcagtcagcaagttcccagccgctctcgacgaattcgagctcggccgatttggcctgatnnnnnnnnnnnnnnnnnnnnnnnnnnnnnnnnnnnnnncgccgccccgcgtgagctccgttcgccctatagtgagtctatctc

SEQ ID NO: 440134 - DNA, 1299 bp, Homo Sapiens
ttttttgccttcaggagcatgtttattgtgtttgagatgatacatcaggtgctctctgagctacaaagggtaaaaggaaatcctctcattacaaactgacaaaggtaaaaggtaaaacatttttcacaacagcatgaaccacatactcagaaatagatctgggtttaatacaaatgacataattcctagccatctacagctacttttataacttcatacagataatgaattaggctaaaatgcactataatatttggtagacttcaggaccagtatccttagtacatcacaaaatacattttgatatcccaaagaagcaagacttgcaagtaggcgttttaaacataactaatctacagctacaaagttctactcttgatagcatttacctttttggggagtctcccaggctccaaaggataaaagcagagtagaatcagtataacatatacacagaagtccgtattgtaaaggctataaagatttgcagcacagtgagaagatgccttctgctccttcacactgcatacaaattatgtgaattatgttgcgtatctcttggtccactgtctggctatcctgtcgtgttctgctctgttggtcaaatactgagtggctatgcttccaaccagaggatccgcagggttgcagtctgtcaaaagggaacaaatagacagcaaaacctttgaaatagtcaaagcgggactccagttgtctttaaggatgtccagacagatgactccctgactgttgatgttgcagtgatagattctggtgcggaaagtaacctttggtggcttaaatggataatctgatgaaaatgtgatatccagaaaaaacacaccaccttcatatacagaacccggtggaccaagtatagttgatctccattcataaatgttatctcctttaggcccagcactgcaattaggaggaggatcaagggttatttcagctagctccttctgaattcttttagcactagtggataacttagcagtggttttgctagagagtttggtgtttttcttctgctgggtggcagaaggttttctttcctcttgttcttcaggctctggagcggctgggtctcgctggtccgcatctgaactgccactgctggtgctggggctctcatcatcggacctttgcctatcactggacatcttggtgaagttatctcttggaaaactcggccgcccgcccggcccgctcgcgcgccgctacggtgtgggggagggagagagaaaaaaacccttccttaaggaaatggaggcagctgtgggagggggaaggggg

SEQ ID NO: 440135 - DNA, 393 bp, Homo Sapiens
atgccttcaggagcatgtttattgtgtttgagatgatacatcaggtgctctctgagctacaaagggtaaaaggaaatcctctcattacaaactgacaaaggtaaaaggtaaaacatttttcacaacagcatgaaccacatactcagaaatagatctgggtttaatacaaatgacataattcctagccatctacagctacttttataacttcatacagataatgaattaggctaaaatgcactataatatttggtagacttcaggaccagtatccttagtacatcacaaaatacattttgatatcccaaagaagcaagacttgcaagtagctgtagattagttatgtttaaaacgcctacttgcaagtcttgatagcatttacctttttgggga

SEQ ID NO: 440136 - DNA, 1675 bp, Homo Sapiens
  misc_feature (141)..(149): n is a, c, g, or t
  misc_feature (389)..(389): n is a, c, g, or t
  misc_feature (1206)..(1206): n is a, c, g, or t
  misc_feature (1298)..(1352): n is a, c, g, or t
  misc_feature (1374)..(1374): n is a, c, g, or t
  misc_feature (1486)..(1486): n is a, c, g, or t
  misc_feature (1524)..(1524): n is a, c, g, or t
  misc_feature (1526)..(1526): n is a, c, g, or t
  misc_feature (1573)..(1573): n is a, c, g, or t
  misc_feature (1610)..(1610): n is a, c, g, or t
caaaagccttggtggaatgtcctttatggccaagaattccaccctccagtggacccaaggattttaactccggtattcccccctctgtggcgtgccccctaatgttgaagacagccccccgctcctcgtccagtgggccgnnnnnnnnnagtgataggagtttccaaaagcattcagtcgaaaaggcagtgggcctccagacccaggctcccttccgggtgggggctgagtcttggtcattgacactgagaacgcccacaaatggtgttgggtgtagcattctcaggcactgggctatacaggtccgtgagcaccacctctggggcattgtcattcacgtccacgatgtccaccagcaccttgcagtgacctgccatgggcactggacnccggtcagtcgcctgcacatagatctggtaggaggaggcttcctcataatccagccccccaattactcgcacttccccggtactggcatctatgctgaagagctgcctctcccggtccgacgtgtagctgctcaaggagtacctgagctcaccattggagccctcatccgggtctgaggcattcagcttcaccaccaatgtgcctgggggtgagtcctcccgtagctggacgcgataagtggactggtcaaaggcaggagagttgtcgttagtgtccaggacacgcacagagatctgtgccgtacccgagcgggctggaatgcccccatccacggctgtgagaaccaggtggtgcaaggctgcctgctcccggtctaggcccttacgcagcaccagctcaagcactttactgttctcctgcaggggcttaaggtccagctcgaagtgctcgctggggctgagctcgtaggtctgtactgagttggcgcccacgtcggggtcctgcgcactctctatgtgaaagcgcgctccaggcgccaccgattcgcttacctgaagctggtagttgggccgcgggaaacgcggtgagttgtcgttgatgtccaatatttccacctcaacggcgctcaccgccacggggttgtgcgccagcacttccaggctgagcaggcagcgaggccgctgttcacacagcgcctcccgataaatgcgctcgttgacgaagagcgctccactcgtcaggtccagctccaggtagcgcggactgggcgcacccagatggttgatgcgcaagcaacccggccccaagcgccgcagntcaagccccagcgcgcgagccacgttgcccacgagcgcgccgggtgcctgctcctctggcacagagtatcgcagctgggaggccgctgggcnnnnnnnnnnnnnnnnnnnnnnnnnnnnnnnnnnnnnnnnnnnnnnnnnnnnnnngggccgccggagccgtggatgntctgtcgccgcaggtctggtgcccgcctgctccatagccactggccgcggcggaggcagccgggcagggccggaggcggcagcttccccagccgtgccccacgcccgggccnccgcctccgctcgtgccaccctgcgcctgctcccccancntcacgctctagaaagcgcctggggccgctccctccgtaggccctccnaagggctcctggccccaccgtcctcgctgactccccntattccagctcctccgctcgcctccgagtcgctcaacccggctcggcttcctgctgctgctgccg

SEQ ID NO: 440137 - DNA, 894 bp, Homo Sapiens
  misc_feature (315)..(359): n is a, c, g, or t
acatgcacacagacccggcctgcaagtgatcaacacagggtggtatctacagaggagagaagtggtcccagccacactgtgagcactccagcgtcagacgctgggtgaaggaggaggcaccagcaactccaactgagaatcagggcctggagaaggcggaagcctggaggaggttaaatcaagaagactgagagagcagtgagggcttttagtggtgagagaaagtccataagtcgccaaagaaaagtcagataaactagaatacatcaaaggaaatcagcaaaaaccacatcagagtcaaaagacaaatggccnnnnnnnnnnnnnnnnnnnnnnnnnnnnnnnnnnnnnnnnnnnnnctctccacaggcaaaaggctaattaacctcctaagtaaagagctacaataaatcagtaagaaagatcaataacctcatagacacatgggcaaaggatgtgaacaggacaggaaatgtagctaatgcttatatcccataaaatacactccatctcctcctagtaagaaaaatgcaccttagggctgaagtcatctgccatttccacaccctgactgcagggacccaagtgttcctatgtattgctggtaagcataaatgggaagacagtgtggtaaaatccatcaaaacagcaaatgtcccacactttgttcaagtaattcaatttttaggtacttcttcaacagttgtgttcctccttgtactaagtgacctacatacaaggttttcaatggtgtgtccacagtgagccacagtggggttctgtgtagctacccaaagatgtagagcacttgctgctgtgtacttaagttggaagatgcacaaaaaatgccagatgtggaacagggtggagaataagcatccatgtgtgtgtttt

SEQ ID NO: 440138 - DNA, 1119 bp, Homo Sapiens
  misc_feature (11)..(11): n is a, c, g, or t
  misc_feature (17)..(17): n is a, c, g, or t
  misc_feature (27)..(28): n is a, c, g, or t
  misc_feature (32)..(32): n is a, c, g, or t
  misc_feature (61)..(61): n is a, c, g, or t
  misc_feature (129)..(129): n is a, c, g, or t
  misc_feature (133)..(133): n is a, c, g, or t
ttttttacctntttgangagtttgttnngagngggatggccagtagatggaggtatctganagccctttctgtttaaaatataatgatcactgatgttatagtatcaacagtctttaagaacaatgagnaatnaaactacaggatacgtggaatttaaatgcaaattggcattcatggatatacctacatcttgaaaaacttgaaaaggaaaaattattcccaaagaaggtccttgatacttaagacagcttgctgggtttgatcaaagcagaaagcatatactttcaagtgagaaaacagcagtggcaggcttgagtcttccaagcaatcaaatctgtaaagcagatggttactagtaagtctagttatgggagtctgagttctaactcatgctgtgcttgctggatttgctggctcttttccgctctctgtgatgctggactggcttggcaggtgacatgctctcaaagttgtgactggactcgttgtgctgccgggtgtacctcttgcacttgcaggcagtgactactgtgattttgtaggtgcgtgtgctgccatcttggcactgcagctggattctctgggtacgggttttgtcattgacacaccgccactcctgggagctcctcctgctccagtactttgttccatagcctcctccaatccagttagggagcactggcaggggcaagcactcgccagcacacaccagctccttcagagggctgatgctggtgcactggccatcagagatgtatttggtggaacgcagttcccggcaacccacttgaacccgagtgttccgatccagtccagtgttactgaaatgcctgcctccatttctggcttgattcaacgtgctgttgctgctggggtgtgctggaacaggtttaaccacatgtgaataaaggatttctgtggcatcatttttaaaagccaaacagcttttcattaggatgcatgcaaggggaaggagatagaaatgaatggcaggaggaagcatggtgagtagaggatttgcttgactgaagagctggttaattcttttgcctctgcttctgcactgtaactgtgaaattcctcctcaagcttccctttatatatccatagaggttggc

SEQ ID NO: 440139 - DNA, 1143 bp, Homo Sapiens
tttttagagtgggctggggccacgggacatttatttgtagccatcaagtgcctgcccacctgggggagggttgagactggcctgcaggtggccaacagatggggcagtggaagatactggctaccagccctctgcccatggccctttcctagttgggctgggggctgtcctgggtgggagtttgcaggggctggaggagagaccctcctggccccagcaacccatccccctcagctcctcaccagggctcagcaccaaagcttgggggtgggggctgctgctgcaggactgcagggagagactgggagaggctgaggcgtggctggttgggatttggcacagcagcttggactgggctgggcaaggaggccctgggggaggtcaccggacactcagggagactgaaccatgcgcttgtgggtgtcgaagacataacgcttgaaagtcaggctgagcaccacatgctgtgagggctcgctccgctcggcgctctcctcctgcctggtggcctccccacggccagcccgggcccgcttcttgagggcgggtgtcaggatcttcttggactcggggctgaggccacctgggatgtggatcttgaacttgccgctctggccgaaggcactgtcgatgatgcccagttccccagtggacaagtgcaccttgagccccacgaagagctggatgttggtttcctttttgaacagggagcggccgatcacactgtagtcatccatcgcccgctccacaaggccatgcttgtgcttcagcttgtacaccttcagcctgggcaggaagctgtcggcgtagttcctgtcctctagcccgtggagcaggatgccatggaaggctagccggcacgtgttggtgtgaatgtccgcatctagcctggagccaatcaccaggcacagccgagggcaggtgacgggcttctcaaactccaccagggcccactgctgccgaggacaatggccctctgtggcctggccggccttcttgtcggcctcatcattgtctgtcactgctggtgtcaaatccttggacaggtactgctcctggaaaaggcattcttgagagaagttgaaagagtccagtataggctcctggtcaaagttacctcgtgccgaattcgccacccaggcc

SEQ ID NO: 440140 - DNA, 2543 bp, Homo Sapiens
  misc_feature (117)..(193): n is a, c, g, or t
  misc_feature (691)..(705): n is a, c, g, or t
  misc_feature (1454)..(1484): n is a, c, g, or t
  misc_feature (1574)..(1575): n is a, c, g, or t
  misc_feature (2387)..(2444): n is a, c, g, or t
aagtaaagcagaatgaatacaaaaacaatacagagtataatatgagctaagataacatgcacaaaagagtctttgtatgtataagaggataaagaaatatgtgtaaacatgtatatnnnnnnnnnnnnnnnnnnnnnnnnnnnnnnnnnnnnnnnnnnnnnnnnnnnnnnnnnnnnnnnnnnnnnnnnnnnnnatattgtttgaaacaatatacagaaggggatatattgaaagctgagccatgctggatcggtagtgtatatttgtgacttcctattcttagcaaaatactcctggtactgggatggcagagaacagtaaatataagtataaagggaatgctgaccaagtaggtagtatcactaagtgggaagagagagtggtcaacagagactttgcagattctcaggactaagccattctcaggaatgaatcaaaaatggaaggagatggctctctgggggcaagcagccttctggagaccgccactctgataccacatccgtcaggtgaccacagcgcagccacagtagccacagagatatgtccacgtagacttcaactgcgccatgccactggggtgtaaacattagcaaccaatcagctgtttccagaaagcactcgacaatattagcagctgaggctctaagaacatggatctttcaagctggtggttctgcagacagcacgnnnnnnnnnnnnnnngcctccccatcacagaggatcaactccaggtggtccagcttccctgacatccaggaggaaggcttcaggatggcacacgtgcccaacatcacacactgagtttcttagacttggcccaggcatgtgtactgactgctgggtgggctggttaaaatattttcagaagtacacatggcaccccagtctataaaccacgcaccacgcagctgcaattgccaacagcacctcgtccttctgatggcctcttgctctgccagtccctgagggcacagagaacacaaggttgcctgtaccctcaacccccttcaaggcttttcagggaaagagaaggagaggtgggagcagttcctctgggggctgctgccgggctgcctagagcccacagaccttggtctcagctccacacgaggttgacgacccactctggccatggaaagacaagagtcagagctaccttttcagaggctgatgtgttcaaaccaatgtttgatttaactggagtagggcctagagagtggggccagatggccccagactgaagcctaattaatttgctcagttaattgttttaatttattgggctggggataggaggaaggcagaggtgatgaacggttcaaagagaacaggaaggaggaggtatgtggaaaaggttctctataagtttacaaatatacaaaaacaaaaagcacatctttcaaataaaaatgactacatttttatctggcaaaaaattgtatacacatgannnnnnnnnnnnnnnnnnnnnnnnnnnnnnnggcaatcttaataaagtacaatatattacaaccaaaccaaaaaatagttgtttaagtaacagccgttaagagtgatgtgatccctgatgnncagcctccctccccatcccaccctactcctaaagacagagagaaaagaaaaatcctcccatcttgataactcggttccctccccccttaggaagctagccaataggaagcaacacaacaagcaaggagtgtcatgggaagccacaggtcggctctgcattagcaggagcagccgccctcgctggccgggggctcctggggtttgtccagcttgatgtcaatcatcccttctttgcttttctcctggacattctccattccgggtagagccgacgccacacgtcgaaaaagctgcttcacgttgtagccagtcttcgcactggtctcaatgaacatgacgctcagttctttggcgcgctgctccccctcctcgatggttatctgcctcttatcagccaggtccgtcttgttgcccaccagcatgatgataacatcactgcccctctctgtcctgacgtcgtcgatccacttagaggtctgttggaaggagttgagatttgtgatgtcgtacaccaccacagccaccgtggagtcccggatgtagctggggatcaggctgcggaacctctcctgaccagctgtgtcccagagctgcagtcgcaccgtgcggtcctccaagtacatggtttttgacaagaagtcaatcccaatggttgcctggtatgtgttgtcgaagctgtcgtacatgaacctcgtaatcagagacgtcttcccgacgctctgctcccccaagaacaccaacttgaattttctcagtggattcccaaaatctccccctgcggacatggtgctggcagccggggccgggagagnnnnnnnnnnnnnnnnnnnnnnnnnnnnnnnnnnnnnnnnnnnnnnnnnnnnnnnnnngccggcggtgcgggagccggagggggaagggctggctgcgcgcgtccctgactccccagctgcgtcccggtcccggcctgcggctgcgtgtccggcggc

SEQ ID NO: 440141 - DNA, 619 bp, Homo Sapiens
  misc_feature (93)..(102): n is a, c, g, or t
  misc_feature (136)..(166): n is a, c, g, or t
  misc_feature (183)..(218): n is a, c, g, or t
tgagccacaacacccaatcccaagatttaatcccaaatataaaaagcaaaaaccttctccaacagtactctgacttaacaggatataaagttnnnnnnnnnnttactatgtgttaataattcagtaattctcagannnnnnnnnnnnnnnnnnnnnnnnnnnnnnnaaaggcttcaaagtggnnnnnnnnnnnnnnnnnnnnnnnnnnnnnnnnnnnnccaaatttctccactcccaccaggaaaaggaccagaaagtcataataaatgtttgcacagcttggtatatctattgggattggattaccaagggcatagttactttttaaattataattcgtgaactactacttttataaaagggaaatacttatttttaaactttaaacattacccaacattttggctttgcgacttgtattggtgctgaaactgggcccacggcaagcttagctgtgtggatcttttaaaggcgcctattgggaatcttaaaaatcggccccactttaccggattcttttggttgtcccaagcccctgggtctaatattcttttaaaactttatttaacccttcttataaaacaccttaagctgaaacctgggttttaactcctttttg

SEQ ID NO: 440142 - DNA, 1955 bp, Homo Sapiens
aaaaaagttttctatttatttaaaaataagtttgtagttactacattgcagggacaggtattcttacacatacattctagtttgtataaaaggattcaaagaattatgcatcaaaactaacatagaaagtgtccacgtaacagtaaagaaaggtccaatcagtatgtacaaaaagaaagggcactgctattctggtgtgaaactgctgtttataatatgatactccaggttcggaaggaaaaaaaccaacttcaataaagctaaataattaatttgttttaaaactctggtgttacttattacatacaacagatctgcttgtgtttaaacattgttttctgtacaaaataagcataatcttaatttgaaaatgtgtcagtttcaactttcaccctctaggtcagttactttttaaaaattgagctacattctacacatgtctaaatatcctgtgacaggatttaagttttctaaaagatcttgagtaagacccctgtcttcttgcatttttaatatggtccaaaaatgtaacctttgtattgtctcatgttatagtctatcatttgtgactaatcaacacacacaatcttaaagttaccagtatgtgtgcatctgccttatttgcatgtcctatttttcattttgaacctattttcttggctccttgaattgtagaaactcagccatgcactaagtatttggtctgtgccataaggttaatttcctgataatttttatctgcattaaaaaagtatttcaacacagagctatcaaaactaaaaataatatctatttatagctcatattttctactcactgttctactgcagtgtgtacaaggtttatctctggagcgccaaaagtggtacttacagtcttctgactcaatttgaccttttcttgggtactatacatagttcgtaatgacttttcatttggagcaaactttgctcagtataattaacaaaaatagtttcttagtaagtgtaatattaattttagttcagatcacttggaaattaggggaactaagggaaactgcaagggtagaagcaaagaaaagtgtatttttcaaattttaatgggaaaataaattcttgcctaagtgtaacaaaaccactgctcaatctgttatgttagaaatactttttaggttaataggagtaatcagatgataaaactacttcccctattatgacttttaaaatcatgtaactcctgcatataagcagaacacttacagtcctttaatcactcaagtatcttggtcctttcaacctactcaaaaataaatttcaggtaacaaaaacattcagaatatatccgttttcattagatagaaaactgaaaaagttgcttctagctgacatttgagagagatatacagtaggtatatatgtataaaatggaatgtcagaattgaagtaaacattgttaactggagaaattaatttatattacaaatcatatctgaaaacatgtaaatgctgctaacatataagataaaaatatttgaatacatttcttaaaatgtctgattcctctactgcactgcagatgagggacagttctagatgttaacatacatgctgcataaagatattttctctgattactgtatcttatgtaattcatttccaagtgataactaaatttagtcaatcccaagtctcagatgttacctaatccagctcacaaatattccacatacttatttacttggattggaggaagacagttttataataatgccagcagtctttaaatttgtagtgaagttgtgcaataaaaacaattgaaataaggccaatctttagttataatacatgcagaaaatagtccaatgccactatagcaggtcacaaaggataaaattttaaaaagctatgtatctattgcccagggctgtgagtctctgattagactaaatatttaaactaatgctccactgaaac

SEQ ID NO: 440143 - DNA, 932 bp, Homo Sapiens
cggtacttgtattttctgtttaacttaaaacacttgtttacactgtaataacgacttaccattttttcttggacgtccgaaggtatggtatcaataaggtcaaacctccatcatctaaaagcccccagacttcaatagtattcttcccttgttttttctgaaactgtgtattagcttcaagaagcttttggtcagctacatttaaaggcacaatagggcctttggattctaaaggattaagcaaaatataaaatgtaagcaaagtaaatattaaagccccttttgctgaattcctatcatttcctaatgtttgtatattcagatgtttatactacagataattcagacaattgtatacggcatctaccataaactttcagttgtttataataaaagtatactttataaatggctagagagaaataactctttacaatagctaaaccaatccaaattatctgcctacttactaatattttcaagcattctgaatgaatgtaagagaatcataaataacaataaaaaaaattacagtgagctgctagattttgttttgaaaagctgttttagtcaaactggacaaatcaagtttatacctgttctgtgaaactatttctttggtaatctggtatctcaataatttaaagctcaaaactttttaaaagacaaagttgttatctgcaatataaatgaaagatgggagttgaagacatactaacacattcttacaattatcacagtgaaaccttagtctaaggaaagacttctcatttttacctatgttttgtccccaatatgtggcacccaattctaaagccatataaccacatctttctctgaaccacagaaagatggtgggagctccttcaaagggcacccatctgctgcaggtctgagaacaatacaccaaggagttcccatttatattccca

SEQ ID NO: 440144 - DNA, 469 bp, Homo Sapiens
  misc_feature (30)..(30): n is a, c, g, or t
  misc_feature (38)..(38): n is a, c, g, or t
ctccgacaggttttgtatgttctctgtgtntggggggntcgggacagaccagcatttgtttattttggccaaatgcatgccttgtttgcatctattctcttaatcagcagcagcatctgctatgctgtaaacactggctatgttgtaaacactgcaaggaaggaggctagaaacaagggccagagtctatctcctgcccttaaggaaatctattagattactaagccagaaaaacaaatgcaacaagctgcttcaatgtattctttcagatgtcaaacacagaggtaggcatttactgctgtgagcataatggaacacactagcttgagacatgcttgtaaactggctggtcctgaaggacagccttatgcccacctgccgttagaaggcaaccaagatttgcttcaggccgtttttttcccctttttagccaatcatgctgtccaaccagtcttccagctcttcctcg

SEQ ID NO: 440145 - DNA, 1436 bp, Homo Sapiens
  misc_feature (138)..(341): n is a, c, g, or t
cgggtgggcagaaggtgtttgctaggaaagcatgtttctgggggggtccttctgggtgcacacgtgcagtagctgcacctgcttgctcatacgtcgcatgtgtcattagcatcttaaatctccaccaggggtgtgttnnnnnnnnnnnnnnnnnnnnnnnnnnnnnnnnnnnnnnnnnnnnnnnnnnnnnnnnnnnnnnnnnnnnnnnnnnnnnnnnnnnnnnnnnnnnnnnnnnnnnnnnnnnnnnnnnnnnnnnnnnnnnnnnnnnnnnnnnnnnnnnnnnnnnnnnnnnnnnnnnnnnnnnnnnnnnnnnnnnnnnnnnnnnnnnnnnnnnnnnnnnnccactgttttacaccaccctgtttgtggctgccccaggaaactctacagaccatctgctgcagactatgttgcagtactagtgataaaagggaggtggaagtgctaagctgacagcagaggactctcaacgaagaggtgggctccaggggagatgggttcctaaggggccagctggagaaagggccactggggaagcagctactcaggcgctgggagcctcaccctgcagagatcttgctgtagtgcatgtaggcagaaacgatgaccccaagcttgcccttgtttccctgacagacagagagacagggatgagggtctgggagctccaggctgacctggaacctccaggcaccagggaacccgaggtcctggcccaccttgcagtatagtacgaccacgtgctgtgggtcagcactgagccatgtctccatggctttgcagatggagcacagcttgtccaggggtggagcatgcagctcaggccagccgaagtcttgaaccttggggtttaagcgggtcaggtcatgccttttcgtctgaaaggttgaagagcaggtacttgtcccggtgcttggattgcagcacatgggccagctcgcgcaggtggccccggtgccgctgttcatcgggccgcgcggggaaggcggcggccaagatgcgctccgtcacgtaggtgaggtctaagtcccagcgccgctccatgagcgggtccaggctgaagctcctgggcagagtgctgcgctgctttgagtggttcagagatttggtggatcccaggtgctctatgcgcctgactggggccgtgtttcgccgcaactccacgggaggcaaggcctgacaggctgaagtcacctttgcttcacattttctgtgcgtcgccaccttgcagactctgcacgaaacgcctgtcccatcgatggtcaccttacatactgcacagactggaggttttttccggaaaaccttctcccggaagctatgaggctcagctttcctaggaaagagccgaggggagagagggtgcgcagacggccagccgggccgcgccagggacatactggagacaggaagtggctgagagggggagagagttg

SEQ ID NO: 440146 - DNA, 845 bp, Homo Sapiens
ggaatggttttcttgaatagaaacttcaagagccctctggtgagctcccgggtggtcatgagcgccttcctctgggtttctagccgaaaggtgtttccaatttttacagatacatccccaggggtgttcagtgagagtagagaaggtggttcccgtggtgccgagagaatcagcggggtgggcagaggtgttgctaggaagcatgttctgggggggtcctctgggtgcacacgtgcagtagctgcacctgcttgctcatacgtcgcatgtgtcattagcatcttaaatctccaccaggggtgtgttttcttgccctctctcccagctcagggtctgcgctgctacagatgcttggcggtcttggaaggggcctcctgcagcgtggtctcgtgccccttcctggatggggtctgtgtctcccagaaagtgagcgtctttggcagtgagtccctggggtgccagggcagagggcaggttaagtgccgttgtggactcccagatctcttgctgcaagggagacctctgcaatgcggtggtcctggcagccagcagcccctgggccctcacagctgcaggggtcggggctcggaagtgctgggggcagttcaggttgaaggctgggcagcgtgcacttctcccccagcctcctggggcccgggcatcaccggaagcggagtttgttcccactttgtatcagtcgcaaagaaagagcacccaattggacaaaaggcaagcaggctgcgttcctggcccggagtggagaagagtgagcccctgccctgtcagggaagctgaggctgggggttgtgaggagtcccgtgccgggaggaggctcggacgcgtgg

SEQ ID NO: 440147 - DNA, 1553 bp, Homo Sapiens
  misc_feature (270)..(272): n is a, c, g, or t
  misc_feature (288)..(288): n is a, c, g, or t
  misc_feature (398)..(398): n is a, c, g, or t
gctctggaaacccattgtgctgttatttggaaccttaattccagggaccctcccccctggctcgtagaaaagctgcaaaccacgtggtttggtccaaggcaatggctaagggagtgcgggacatcccttaccgctgggccccccgtcctctgggcctcagacttccctgctcatcaaaactgtcggctgagctccaggggtgtctgcccagttctcagcctctccctcagccaaggaatgaggaaacaggtacaggccaggggctggggnnnccatccaaggctgggngcctctgccccccacccggggcctgctgcctcccacagcgatggctcctcacgtcctcagagccctgttgctcccaggatgaggagccagggacaggaggatgcccgggngcacaggtgagtgaccggggcagggcggccccggccagctgcggcgcccctcagtacagatctgcaaagggcttggaatagttgaacatcaggtaatccatgtagtagaagtcgtaggtgcgctgcctttgcagggccgagagttgggcgaagtactggtgggcgatcctcgctgtggtccgcgcctcctgcgagtgccggtccttgaaccgggggaaggtcaggttccgcggcgcgcggatgaggctcaggaagaagttggcatcgtcctccatgctctcgaacttgcctacgaaatcgtagtcgatgaggcaggggctgcagagccggctgacatggtcccagtgaatgtccatccccacgggccggtgcacgtccagcaggtactggacgaactcgggaaaacgcaccccatagccggtccgcagggcctcccgagaggcattggcgcggtaccgggccaggatggccttgccgaagaccgggtgatagtagctgttggggtgctcaaacttgtcgcggaaggcggacaccagcctctcgaagggctcgcggacaaagagcatcttggtgtaggtgctgagacggtgcaagataccctggcggtcgaaggtgtccaggcgcttgagagcgctgccatagtggacggagttgtgctggatgtcggcagtggacgaggccaggccggacagcaccatgagcacccgcttacaattggagcagtcggtcttgggcaccttgctatatagcacgcggtggcggtcctacacgaagatacgggacacgtggtggtgcgtgacggtccggtggttgatgctcgtccggaacttggcgcaggcctactgaataacccgcttgcgctactgctggctacggagcaggctgacccaacggtcattcatcgttccggattccggacggatgaagggcacgatcaaactgaaggacggtatggacatcgtatttggtatattcttgatgagcatacggttactgtactggtggatctcaatacggttatcccttttgtttcggtggtttgaggactgtatagtcactgtaaggaagctgatccctcggtttccgcctgtataagtatttagtgcccctcattgaggtttgctgttactcacccttctggttatcctcctgttg

SEQ ID NO: 440148 - DNA, 778 bp, Homo Sapiens
gatccccaatgatgcggagaggtttgtccacattcgtattctgagatccgtcctgaataaagatcatcttcactccagcgcgttcctgcagctgcttaatggtctccccgcccttgccaatgaccaggccggccttgcccgcggggatcatgatctcctgcacggtgccgttctggcccccgttggcgttgtcgtggaaactgtcctggggggcccccacgaccccgagacacaatgtcatccagcatcatcttggctttctggacagattctggggctcctgtcaaggacacactgcgctcgggtaggccaccgctgtctggagaaatctgtactttgcagcctgaatcctgttggattttgttaatttgttcacctcctctgccaatgatcaggcccaccatgccgtctgggaccctgtactcttctgtcattgaagtccttgggggaggatggatgggtccaagttgagaactgattgagtctccctgggaagccagcttcttgctctccggttgatctccatcgttccaactgtctcttttggcccccaaaaccaaaatcaggagtgctgttattcactgtcgtggcagcatcgcctccaattttggctgcaatctggcgggcccgctgcacggcgtcggcgaaagcgtccttgcggattcccgggccgcctccgccgggtggctgagaggggcccccggccgaccccccgcccgggctgtagtccgacatggcgcggcggggccgggcctggcgcggaggctgaagctgagga

SEQ ID NO: 440149 - DNA, 973 bp, Homo Sapiens
tatttgccattcttctcggtcccgtccgttatactgctgactttattcccacgctagcatcattctggatcttcttatcattctctccactccggccaatgaccacgccaacagaattcctgggcacttggcacatcgatgcatccgcccatcccgaaatccgtactcattccggtccccaaagccgcttgtcacgttcccggaggatgtccatcaccatctcacaggcttgctgcactttgtaaggatccccaatgatgcggagaggtttgtccacattcgtattctgagatccgtcctgaattaagatcatcttcactccagcgcgttcctgcagctgcttaatggtctccccgcccttgccaatgaccaggccggccttgcccgcggggatcatgatctcctgcacggtgccgttctggcccccgttggcgttgtcgtggaactgtcctggggggcccccacgaccccgagacacaatgtcatccagcatcatcttggctttctggacagattctggggctcctgtcaaggacacactgcgctcgggtaggccaccgctgtctggagaaatctgtactttgcagcctgaatcctgttggattttgttaatttgttcacctcctctgccaatgatcaggcccaccatgccgtctgggaccctgtactcttctgtcattgaagtccttgggggaggatggatgggtccaagttgagaactgattgagtctccctgggaagccagcttcttgctctccggttgatctccatcttccaactgtctcttttggcccccaaaaccaaaatcaggagtgctgttattcactgtcgtggcagcatcgcctccaattttggctgcaatccaggcgccgctcctggtgacccccagtgcgcccctactccctgcaggggggtcacccgttgggatcccactcgaggcgcagcgggagggccaggcccccgcctaccgccc

SEQ ID NO: 440150 - DNA, 444 bp, Homo Sapiens
ttttttcagtataaaacttcagtgagttcattcattacgattagcacaatgactggcacatacaagagcccaataaatgttaggttttattattattattacccaaaaaagactatcagttagggtgtactcattgcctctttcattatagcaagtgggacccttgtcccttactgaagacaatgactttgtttccaaacgaaagagggttagcatcccccagccaaattcaccaggtggggcatggggcatcaatatggttgtggcttccaccatctttgcagtgggagtagttttgtccagcctatgatacaattcacttattattgtgcagtggtgattcggtccgtctttgaatccttttattgacaggatatccactccctaatgaaataagcccgttcccttttgaacacctcttataattaggaagtatgttttctc

SEQ ID NO: 440151 - DNA, 996 bp, Homo Sapiens
  misc_feature (759)..(759): n is a, c, g, or t
  misc_feature (828)..(828): n is a, c, g, or t
  misc_feature (843)..(844): n is a, c, g, or t
  misc_feature (867)..(867): n is a, c, g, or t
  misc_feature (884)..(884): n is a, c, g, or t
  misc_feature (915)..(915): n is a, c, g, or t
  misc_feature (934)..(934): n is a, c, g, or t
  misc_feature (949)..(949): n is a, c, g, or t
  misc_feature (977)..(977): n is a, c, g, or t
  misc_feature (987)..(987): n is a, c, g, or t
ccgggctgcagcggcccttcggccagcgcgtggaaagcatcggccagtggcagaaggtgatggaggccatgggtgtcctagcgattgtggtcaactgctacttaatcggccagtgcgggcagctgcagcgcctcttcccctggctgagcccggaggcagccatcgtgtcggtggtagtgctcgagcacttcgctctgctcctcaagtacctcatccacgtggccatccccgatatcccgggctgggtggccgaggaaatggccaagctggagtaccagcgccgcgaggcctttaagagacacgagcgccaggcccagcatcgctaccagcagcagcagcgcaggcggcgggaggaggaggagcgacagcgccatgcagagcaccatgcccggcgggagcatgattctggtggccgagaggaggcgagggccgagggctctgggctggaccctgccacctcctccgagaaggcctctgccaaggccaagggcagcactgcgggtggccacgggcctgaacggcccaagcgcccagggtccctgctggcacccaacaacgtcatgaagttgaagcagatcatcccactgcagggcaaattcctctcgtcaggggccacatcctcactggctgctgcaggggccggaggcaccacccggcctccccctgcccagtcacccacagggagcgacacccgcctgcctgccttcctcagcttcaagttcctcaagtcacccgagacccggcgggactctgagcgcngcactcaccgcccaaagccttccatgctggcaactcttccctttggtggcaccgggctgagctgggtcnacggggcgggcgggnngccggccagatgggaccccagcntggcacagcgggttcanagagtgggcggtggacgagcctggctgaganctggaacccccggcccganaggaaggtcagtcanaactttaatcggggtggggagcgggcgntttgggatangtaggtggc

SEQ ID NO: 440152 - DNA, 1604 bp, Homo Sapiens
  misc_feature (15)..(15): n is a, c, g, or t
  misc_feature (17)..(17): n is a, c, g, or t
  misc_feature (19)..(19): n is a, c, g, or t
  misc_feature (21)..(21): n is a, c, g, or t
  misc_feature (23)..(23): n is a, c, g, or t
  misc_feature (35)..(35): n is a, c, g, or t
  misc_feature (52)..(52): n is a, c, g, or t
  misc_feature (204)..(250): n is a, c, g, or t
  misc_feature (430)..(517): n is a, c, g, or t
  misc_feature (866)..(866): n is a, c, g, or t
  misc_feature (880)..(880): n is a, c, g, or t
  misc_feature (883)..(883): n is a, c, g, or t
  misc_feature (887)..(888): n is a, c, g, or t
  misc_feature (896)..(896): n is a, c, g, or t
  misc_feature (1579)..(1579): n is a, c, g, or t
tttcagttggatttnangntntnctttcgtttggnaaggaaaacggcagatngggggcaccgaccaatactgggggccctcgggggctgaagcgcattttgcattttggagaccggccgcccctgtgaatgactgatattgcatatgagaagagaaggcagggcgggtagagctaatgccagccgctgggccagcacacggccnnnnnnnnnnnnnnnnnnnnnnnnnnnnnnnnnnnnnnnnnnnnnnnatccgaggtgggcggtagcggtgggggcgggaggctgtaaaagctggcgtctcccggcagggctggggggcgggtgggggcccggccatggcacagggtgggcactcggcagcggccagggcctggcggggggcggcaccctcgcccccgcagccccagggcccgtcccactgccagcannnnnnnnnnnnnnnnnnnnnnnnnnnnnnnnnnnnnnnnnnnnnnnnnnnnnnnnnnnnnnnnnnnnnnnnnnnnnnnnnnnnnnnncccacgggggccagcgctgtccctgcggaggcgagaggggccgttccggggggatgccgcccccgccggaccccgccgggctggcaaccctgcccgcgctccctcccgggcatccaggcacataaaggctttattgcttctgatcagagactgaggtggggcggccccctgggcggcttccggtgcataccctgcctctgggcacggcccctgccggtcacaggggggaggacagtttgaggaagtccctctggcttctgacctatggcccttgtgctgcagctgccacctgttgggctccctgggaatggggttgttggagcccaggttgggattggggcaggggagntggtgggggtgggnggncagnnccgaggcntgcacctctgctcagcacatgtgggagctccctgggtgggcagccccagccccacctcgaggaaggccttcctgaacagctgggctgcagggtgtggatttgcatagaggcctggggggtcaagtcccccccaagagtgagctggagcaggagaagggtgggctggttgggaaacaggcctccctcatctctcctggcaccggagcatggtgggggtccctgggtgcagtcctgggacaaggggctttggcatccctccctggggagggtcaggcacggggctccaggctaacaaaggccctggagatactaagcaggctttaactgagaggctccacgtaccactgacccaggtccccaccaggacctaagaccgggcttcccctgtccccttcagcccctctccccaggcctggccaccctaccctatccccaaagccggcccggcgtccccacccccgagttaaagcttgtgacctgagccttcctcttcgggccggggggcttccagctcctcagccagggcctcgtccaccggcccactcctctgaacccggctgctgccactgctgggggtcccatctggccgggcctgcccgcccgccccgttggacccaggctcagcccgggtgccaccaaaggggaagagcttgccagcatggaaggctttgggcggtgagtgngcgctcagagtcccgccgggtctcg

SEQ ID NO: 440153 - DNA, 1010 bp, Homo Sapiens
  misc_feature (10)..(10): n is a, c, g, or t
  misc_feature (12)..(12): n is a, c, g, or t
  misc_feature (15)..(15): n is a, c, g, or t
  misc_feature (19)..(19): n is a, c, g, or t
  misc_feature (23)..(23): n is a, c, g, or t
  misc_feature (25)..(25): n is a, c, g, or t
  misc_feature (28)..(28): n is a, c, g, or t
  misc_feature (31)..(31): n is a, c, g, or t
  misc_feature (33)..(33): n is a, c, g, or t
  misc_feature (36)..(36): n is a, c, g, or t
  misc_feature (40)..(40): n is a, c, g, or t
  misc_feature (50)..(51): n is a, c, g, or t
  misc_feature (62)..(62): n is a, c, g, or t
  misc_feature (87)..(87): n is a, c, g, or t
  misc_feature (89)..(89): n is a, c, g, or t
  misc_feature (91)..(91): n is a, c, g, or t
  misc_feature (93)..(93): n is a, c, g, or t
  misc_feature (106)..(106): n is a, c, g, or t
  misc_feature (109)..(109): n is a, c, g, or t
  misc_feature (115)..(115): n is a, c, g, or t
  misc_feature (117)..(117): n is a, c, g, or t
  misc_feature (124)..(124): n is a, c, g, or t
  misc_feature (127)..(127): n is a, c, g, or t
  misc_feature (129)..(129): n is a, c, g, or t
  misc_feature (133)..(133): n is a, c, g, or t
aggccccccncnttnttanattntnggntcncnccntgtnggaaatcatnntcttcgaaaantgaggataactaaaggttccgcacntncntnacatttatatggnttnccgccntntgtgttntantntgtnttcgaaacgttgaggaataactgaaagctttcccacattccttacacttatatggcttctctccggtgtgacttctgagatgactagtaagacttgagaagtcaataaaggctttcccacattgcttacattcgtaggttttctcagcagtgtgaatccttacatgccgattgagggaggaagtacgaggaaaggttttcccacataatttacacacatagggtctctctcccattgtgggttctcacatgcattcttaggtgtgaacgacaactgtaggcctgcccacattcctggcactgatatggtttgtgtccagtgtgaactgtgatgggactcttgagggatgtgcggcgatgcatgaagacttttccgtacgtgttgtattcatactgttttactccaggtggaattttcttgtacagattaagatgtggaatctggctgagggcttctccacattgatcattactttcacagagtctctccaacccatgatttctactgagatttctcccctggtttgtggtttgatcttcgatgctaagactgtcccaaatttttcctaaaacagaggcccaggaaacatttctggtgaacgtggctattttagattccttgggtattttctctccataaatatcctgctgagaaactgacccactggccttaaattgagtttcatcatctactgaggccaggttctgaaaggtctccagcatcacatctctgtagaggtccctctgagcagaatccagcaaagcccactcctccagggtgaagtccacagccacatcctcaaagaccactgagtccatgtcccggggcgatttcttcgctaccggcgcaggtgagcgcgacaggaaccgggacgcca

SEQ ID NO: 440154 - DNA, 791 bp, Homo Sapiens
ggtggtttcttaaatgatttattatcgtattctacatgccaactgctttacatttcccagcagcaagatataggcttctttgggcatgttctgacatgtctgtctgagtgaacttacaccaagtaacattggccctcaggtcaaatttctacaattagtcttccaacacccattttttataatgtcacgtactcttcaagttcctagaaaacaccccccaacgccccccaaaatttacatatttaattactgaattgggttatccaacctgaatccaagaagaagccacagctctcatgtggtctgcctcaggctttgggcagctgagacagcccatgactgttgtgtcccatctgtaagaagtagaaactcactggtcagtcaccaccattgaagaatactgtagctctacaacagcaaatgggcatgattttgatgaattctctacaaacattttctgtatgtacatttatgcccaggccagacttaatacatttacctaaaaatattgtaatatatctttgtattaagtagtcaatagcaccatattgtcaggttttaaaaatgaagtgttcacagctccattttcagtgctcttcaaattagaagttgggaaggtagcctataatcttggttgtgtaaacttaaaatatttatactttgtcctccaaatcttacatgctcttgtgtttggctactgacttgcagcctaaactattggagatgtagctttcctggtatgcagtgctgttccattaatctaatcctctatgctgctattagcctgctta

SEQ ID NO: 440155 - DNA, 702 bp, Homo Sapiens
  misc_feature (1)..(1): n is a, c, g, or t
  misc_feature (91)..(91): n is a, c, g, or t
  misc_feature (94)..(94): n is a, c, g, or t
  misc_feature (109)..(110): n is a, c, g, or t
  misc_feature (114)..(114): n is a, c, g, or t
  misc_feature (119)..(119): n is a, c, g, or t
  misc_feature (153)..(153): n is a, c, g, or t
  misc_feature (181)..(181): n is a, c, g, or t
  misc_feature (197)..(197): n is a, c, g, or t
natgagccaccgtgcccggccaatctatattcttatatatagtttctgttgctcctcattctttactgcacttctaagattctatttgggntcnttttccttctgcctnnttantgccntttagtatttcttttagtgcaagtctgctggcgntatattttctcatatttttcttgtctgnaaacctctttagttcnccttcatttttggagggtattcctttctacactttcattaccactgtcatctgctttcctttgcttttgttcagaagtcagctgtcaaccatgctgttgctccactgaagataatccgtcttttttacctctagctgtttgtattttctttgtatttctgcctgtttggggctgattaatgcttcggtctgtggcttgaagtcttttatagtttagggaaattcacagccattatctcttcaaatattggttgtatcccattctctttgttctcttcttctgagacttcaagtagaagcatgttaggcctacttaccctatcccataagtctcttatgctcttttctgtattttccatctgtttatctctctgagcttcagtatgcattgttttctgacgtttcagttcattaactatttattcagcaccatctaatctgctacttgatctacacattgagctcttttagttactgcattttttgtactaaaatttgtttgattt

SEQ ID NO: 440156 - DNA, 1047 bp, Homo Sapiens
  misc_feature (5)..(5): n is a, c, g, or t
  misc_feature (8)..(8): n is a, c, g, or t
  misc_feature (19)..(19): n is a, c, g, or t
  misc_feature (22)..(22): n is a, c, g, or t
  misc_feature (25)..(27): n is a, c, g, or t
  misc_feature (29)..(29): n is a, c, g, or t
  misc_feature (31)..(31): n is a, c, g, or t
  misc_feature (33)..(33): n is a, c, g, or t
  misc_feature (50)..(50): n is a, c, g, or t
  misc_feature (52)..(52): n is a, c, g, or t
  misc_feature (71)..(71): n is a, c, g, or t
  misc_feature (78)..(78): n is a, c, g, or t
  misc_feature (88)..(89): n is a, c, g, or t
  misc_feature (94)..(95): n is a, c, g, or t
  misc_feature (103)..(103): n is a, c, g, or t
  misc_feature (107)..(107): n is a, c, g, or t
  misc_feature (112)..(263): n is a, c, g, or t
  misc_feature (277)..(288): n is a, c, g, or t
  misc_feature (292)..(303): n is a, c, g, or t
aaaanaanactggccggcncgnggnnncncntntaatccagcacttgggngntgaggcggcagatgcctgngtcaggnttcgagaccnntctgnncaacatgngaanccccnnnnnnnnnnnnnnnnnnnnnnnnnnnnnnnnnnnnnnnnnnnnnnnnnnnnnnnnnnnnnnnnnnnnnnnnnnnnnnnnnnnnnnnnnnnnnnnnnnnnnnnnnnnnnnnnnnnnnnnnnnnnnnnnnnnnnnnnnnnnnnnnnnnnnnnngacagtccgtctcnnnnnnnnnnnnggtnnnnnnnnnnnnatactgcagtattataaaatggctttagaactctgcacataacaaaattgtatggaaattagggaagtctgaatcagcaatcccatcacatatgaggacggcccattccatagtttctagcccataactgatttaccattcccaataatgcaagagcaacataccaatcatgctgcaatgggtgtttttattatgcagacaaccgaaaattctattcgcactattgctggcatcctttaactactttaagacctttcttgagcggcaaaacagtgtgaaatttaaaactcagtaaagcaatgcttttgagtggagccaatgattcatcactctcccaggtggtcctggttctcacacaggtgatgtatattttaaaagaaacattttaagataccaaaacagaagcccacccttttcaccatgaaagaatcttggtgctctgttgattaattacattagtaaaaataacatcgatattaagaactaatgttaagctatgtgcctctggcaaacctaaagcagctatttatgcttctagtcttttcctctgcctctcccttttaaacaaattatcaaaattttgtggcgggtaaggggacaagagcaaatcctacgttttcctttcaaatccaacagttaagtcatgggtagggttattaagatactgccctatcagactctaccttgactggtgtggcatcaaccaatctgaccataatgaccattggtgggtcagaacataag

SEQ ID NO: 440157 - DNA, 993 bp, Homo Sapiens
  misc_feature (6)..(6): n is a, c, g, or t
  misc_feature (8)..(8): n is a, c, g, or t
  misc_feature (16)..(16): n is a, c, g, or t
  misc_feature (25)..(26): n is a, c, g, or t
  misc_feature (28)..(28): n is a, c, g, or t
  misc_feature (33)..(33): n is a, c, g, or t
  misc_feature (37)..(38): n is a, c, g, or t
  misc_feature (49)..(49): n is a, c, g, or t
  misc_feature (57)..(57): n is a, c, g, or t
  misc_feature (74)..(74): n is a, c, g, or t
  misc_feature (90)..(90): n is a, c, g, or t
ctgctntntcttcagnggctgaaanncnttgantgcnnttttgctatcncccaaacngagtctgagtctctccntctgaatccattctgnttgccactaaagcagaatggatcctgctgttgtttctgatcttctggatagtgttttccccaggtggagaggttttcctgcccattaaacttgaaaacagctgagagaagatgactcagccacacatgttggctgagagcttgctgactggagaaaatcagagggcaggagggactaagttgaatttctggcttcgatttctcaaaataagaagagttatctgtgacagacctacagccaacttcatactgaatgggcgaaagctgaaaccattccccctggacagaggtccagtggacattttctctcctctctccagggcgcttcccctcgctccagctgagcaatgagttttggtttagaagatggaatttctcttttttggctctcaggagccctgtggccattttcctggtctcctgagtgctcttcctggagaagggcaaagtctcagaagacagatctggggatgtgaagagaaataagagtggcctaggtggaaacaccctccccacgaagtgaagcgcagtccgctccagagccccacagttggggtctgggatgtcacagaaatcaccagagcagccaattcccatccagtggggggccaggatgacccagccaccctcaagctcagccgcaagctcgggacagggagtgaagcccttgtccccaagcaacggagtgagggttgtctctaaccctgtgggctcgaatgaaaggaaaatggcctggaggtgcccaaaggagagcgccctagttctgagatagctctgcggctcccagccggcgtccccgtaacacagggacacgcagaggggcatgctgactgcctatagggcactcacggaacgcgggtgcacgctgcggatcctgaagccgaaagtcaggtaacaaggagca

SEQ ID NO: 440158 - DNA, 1067 bp, Homo Sapiens
ggtctccatatacatttattttgtgtagacaacaatgacttttcaccatttcctttcctgtggttccatggttctgaatatggtaattttatttatacatagcaaaaagttcacaaaacctttcagcgactgttcacattttcacatttgtttaggaaacagtttttttaggaatacagctagctgattttcttctgatttcttccacttttggaatcccacataataataatgttaaagtataccaagaagaacaggaagttcaagcaagatacaaaacacaccaatacagaaaacaagtccggtagtttctgaggaggatccagtgtgacagtcatcaacgtcagaagcaccatagtgatgactgagataagaaacaaatattgtataattctggaaagaaatgtaaaacatggaagatatttcctcacagaaatggaaaaggatttcaactgcagttcttcttcagaagtcttttcaaatattgaaaaggaagttacacaagctataaaaaatgcgcattgttgtcaaaaaagagggcattaggagttcatccttcaatagaagaggtagcatactgtaaaggaaaatttttaaaaatcacaagagaattatcaattcaaaccataaccacttcataaaaaagtattaaattagtttacaagaattatactgaaaatatatggaaattgatatgacttacctaaatgttgacacaagtaaaaaccaagtagaaataaaaggaatttcacttaaaacaaagcagactggtctaaaatcgtaaagaaaaaaatattttaatattacagaatataacttcaactcctaattgtgaaaaatataaataaattttaactgtctgattttcagcggtagcttaaaaacagccaggaaggtcttcatatggactactgattcattttgttaacagtccagactaaattagcctagaaacaggcacagaggtgtcaactcctcataataattgggaaacagcagcttccagtatgccgttaatggaaatttttttctctatcaaacaaacaagtagcataataaaaggtcag

SEQ ID NO: 440159 - DNA, 1796 bp, Homo Sapiens
  misc_feature (220)..(489): n is a, c, g, or t
  misc_feature (967)..(989): n is a, c, g, or t
  misc_feature (992)..(1268): n is a, c, g, or t
  misc_feature (1336)..(1336): n is a, c, g, or t
  misc_feature (1459)..(1459): n is a, c, g, or t
  misc_feature (1505)..(1505): n is a, c, g, or t
  misc_feature (1644)..(1644): n is a, c, g, or t
  misc_feature (1648)..(1648): n is a, c, g, or t
tgtgagcccctgcgccggctgtaatacattttttgtcaatgcttgtgtttggtaaataaatattgaatgcataaatgggaaagaattaaaccagaaagagaaaacagtatttattgagcaccttcaatgagcttgctattaatatgcgtccattctcaagcagtgaaatggaaagtcctctagtaatttctttctttgagatggagtcttgctctgtcannnnnnnnnnnnnnnnnnnnnnnnnnnnnnnnnnnnnnnnnnnnnnnnnnnnnnnnnnnnnnnnnnnnnnnnnnnnnnnnnnnnnnnnnnnnnnnnnnnnnnnnnnnnnnnnnnnnnnnnnnnnnnnnnnnnnnnnnnnnnnnnnnnnnnnnnnnnnnnnnnnnnnnnnnnnnnnnnnnnnnnnnnnnnnnnnnnnnnnnnnnnnnnnnnnnnnnnnnnnnnnnnnnnnnnnnnnnnnnnnnnnnnnnnnnnnnnnnnnnnnnnnnnnnnctagtaatttcttttagtagttttcagtttataatcccagggtttaaatctcatatattagttgacataggaaaaagtcatccttctgggaaagggggagaatgcccaaatctttatagagcacatttttaaaataaagagattcaaaataatgataacaattattcaacaaccaccatcattaggaaagtttattgtattttaaaaaagtaaacactagatgatacctgcaaagagttctttcaactatttaagaatacagggtattattattatttccatttccacttaagaaaatagattaatcatttgctcaaggtcacacagtaaataaagggcaaacatggggaccaggactcagggcttcacactagcaatgctccttctttgcgcattgccacaattgaatcccgaggtactgggagcaggagttgtggtaaggaggttacagggcttagagctatgaccctaaacaacnnnnnnnnnnnnnnnnnnnnnnnggnnnnnnnnnnnnnnnnnnnnnnnnnnnnnnnnnnnnnnnnnnnnnnnnnnnnnnnnnnnnnnnnnnnnnnnnnnnnnnnnnnnnnnnnnnnnnnnnnnnnnnnnnnnnnnnnnnnnnnnnnnnnnnnnnnnnnnnnnnnnnnnnnnnnnnnnnnnnnnnnnnnnnnnnnnnnnnnnnnnnnnnnnnnnnnnnnnnnnnnnnnnnnnnnnnnnnnnnnnnnnnnnnnnnnnnnnnnnnnnnnnnnnnnnnnnnnnnnnnnnnnnnnnnnnnnnnnnnnctgagccactgtgcctggcccctaaacaattctttgataaagccagtggttctgtttattggcattgngcttcctgttcctatactatttccctttttatgtagctcttcctactaatttcttcctccttttaattttattattatcaatttgttttcctttatcctcttgtctctcttgtcctctccagnggcatgatgatgttgtctgccatatctttagttttaacttagcggnagtatatgtaacatgaaagaacataaaagagatgtttgaaaacaatactgggaattcatatttaccaagtactaccaaatatgtgacaaagccttctcagatttggttatctgatccctttcttagctacttgtttggntganagagaaaaaaggttcattaacggcttactggagcagcaagtttccaatattatgaggaggtgacaccctgggccctggtctaggctatttagctggactgtaccaatgaaacagagtcctatgagacctcctgctggttttagcaccc

SEQ ID NO: 440160 - DNA, 635 bp, Homo Sapiens
tcttgttttagttttctctgatgatagggccagcagcagctgcccttctcaaactccacattcttttcctgggcacctagcccctcccctactcctccctttttcttcccttccctccagggacgccatggcaacgcaaaagcaagggcagttgtcatggaaacagtcctttaaaatttcctgatttggggcacagccctccaggggtgcgggtgggggatgttagggtctgactgactagtggtgcttcttctgtgtctctgtcactatattgctcatctctacagaaacctcccgagtcctgaaccttcgtcccctcctagcctcaagagattcagggacagatcaccagtcctgtcctctgggagccttgagccttttgaaggaggcagacataccctaagggcgtacacagagacagggcccggattcagagtagctggacagagctctggctgctggtgcttttgtgtgtgttctgtgggactgagggcgcgggtactggtgcatgtagagggtaagtggtcagggagggcaacccacatctggctggaagagtcctctctaggtcatcttcttcattcccttacttccgagcccttcttcatggttttggatgtggggatggagtgggg

SEQ ID NO: 440161 - DNA, 964 bp, Homo Sapiens
  misc_feature (340)..(340): n is a, c, g, or t
gactctcctagttttgtttaataggagagagggagggcccaggctgaaccacagcttaaggagtttcccactgctacagcgaaagacaagaaacagttcttcaggcacaaagccaagttagataccttcctggcaaatggcacatccacagtcagtcttctgcagccccagaacgccccaggtccacagtggctgctgggccctctggccacgagacaatgaccagctcacctgcgttggtcacttggctcctggctctgagagggacgggggtcttctgccacttgggatttgcctgcaagcacctgctggaccctctgcatccccaggcaaagccggntggacctggtctgagaagacaaagcgaaaccaaccaggctctttacactcgaaggccttgccaaaggacagcagcaccttgttgtccaaaaagcggcgccagagcagcatttcctcctcaaaggtgcccttgagcaggtactttctcaagtcaacccagatgaagaagccagctccacgactcaagaaggggatccccaatgccctaagctcttctgagacataggtgtgggcagccttgagccgggcatggttttccggcaggtacacctggttgatccagtcacggtcccggagcagctgtgccatctggtactggaccaagccactgaggccgtggtagcggcagagggaagccacggcagtggccacatcctggttttctgtgtacagcgtgccaaagcggagcccagacatcccgaagtccttgctggttgcccacatcacatgggtcctctgggggtcagggagcctttccaggcttaggacactgcggtacccaacagacttctcaaacacggacagcatgtagacctcatccacaatcacatgcagcctgtgcctcttggcaaataccaggtactcctgtagctcttcaggggagtatacatcacccagagggttc

SEQ ID NO: 440162 - DNA, 1156 bp, Homo Sapiens
  misc_feature (39)..(39): n is a, c, g, or t
  misc_feature (41)..(41): n is a, c, g, or t
  misc_feature (47)..(47): n is a, c, g, or t
  misc_feature (820)..(821): n is a, c, g, or t
catctcagactcccaaagtgcagggattacaggcatgantnaccgtncctggcttttttcagcactttaaatatattatttctctgccttcttgcctccaggcttctgatgagaaattggctgatacttgtattgaacatcccttttattttgttgaattgccttgctgttattgcttttaagattctgtcattgtttggctttcaacaatttgattataatgtgctttggtgtagatgtttttgggtttatccaatttggtattgctgggcttattttatctgtatattcatgtctttcttcatatttggaaggtatttggctattatttatcttaccactcttttttacctctctcttctccttgatctgcttgatggtgtccctcagtttccttaggttctattcacttttattcattcctttttctcttctgctcctcagactcaataatttcaattttcctatcttcgagttcactaatctgcaaatccgttgttgatctctgcaagtaattttaaaaacttcagttgctgtacttttcagctccagaatttttgtgtggttcttttatataatttctttgtttgatgatattctcctttagatataatattatgttccaaatttcctttacttctttgtcgaaactcactcttatctagttgagcaaatgtcaagtcactttagtatctgggctttctcagggacagtttatgccaattaatcactttattcctttgaatgagccattttcctgtttctttatgtgtcttgtgaattttgttgttttcgttgttgttgaagattggcatttganntttataatgtggtgactttggaaatcagattctcttcgttccttaggttctctatgttggtgtttctgttttgattattaaagtctgctgtgttctatttgtcttgagacaaagtatttttgcaaagattattccttggtgtgtgtattcactattttgataccttagcttgcactcagctaatactttgacaaatattttcttgaatttcaggatctggggatcttgggaaagtctgttcaacactcccactatgcttcgttttgtttttctcctcccactgccaaacctctgtgaactccaaaggacattcaatctttccagttttcccacct

SEQ ID NO: 440163 - DNA, 1539 bp, Homo Sapiens
  misc_feature (1470)..(1470): n is a, c, g, or t
  misc_feature (1481)..(1481): n is a, c, g, or t
  misc_feature (1504)..(1504): n is a, c, g, or t
  misc_feature (1510)..(1510): n is a, c, g, or t
ctttatcatgctgggtaggaagtgcaatgttctttcctaggtgttgctgcctatgttggctggcaaagctcctcaattctcaagcctctgctgcaacaaggtcttagtgatgctgaggaatttgtcattgtgaaagctctttatgcccttacttgtatgtgccagttaggactgctacaaaaaccccatgtttacgaatttgccagtgatattgcccccttcctgtgtcatcccaatttatggatacgttatggtgccgtgggatttatcacagtggtagctcgtcaaataagtacagctgatgtctactgtaaactgatgccttatcttgacccatatattacccaaccaataatacagattgaaagaaaacttgttctgctcagtgttttaaaggaaccagtaagtcgttctatatttgattatgctttgaggtctaaagatattactagcttgttcagacatcttcacatgcgtcagaagaaacgaaatggttctcttcccgactgccctccgccagaggatcctgccatagcacagcttctgaagaagttgctctcacagggaatgacagaggaagaggaagacaaacttctggcactgaaagacttcatgatgaaatctaataaagcaaaggccaatatagtggaccagagccatcttcatgatagtagtcagaaaggtgtaattgacttggcagctttaggcataactgggagacaagttgatcttgttaaaaccaaacaagaaccagatgacaaacgggccagaaaacatgtaaaacaagactcaaatgtaaatgaagaatggaaaagcatgtttgggtcactggacccaccaaacatgccacaggccctacctaaagggagtgatcaggaggtgattcagactgggaaacctcctcgttccgagtcctctgctggcatttgtgtccctttgtcaacttcttcacaggttccagaagtgacaactgtccaaaataaaaaaccagtaataccggttttaagtagtacaatcttaccatccacctatcagattcgaattacaacttgtaaaactgaacttcagcaactcatccagcaaaagcgggagcagtgcaatgctgagagaatagctaagcagatgatggaaaatgctgaatgggagagtaaaccaccaccacctggatggcgtcctaaagggctgttagttgcccatcttcatgagcataaatctgctgtgaatcgaattagagtctctgatgaacactcactttttgcaacatgttcaaatgatggcacagtgaaaatctggaacagtcaaaagatggaggggaagaccaccacttaccagatctattcttacatacagccgaattggaggacgagtcaagacgctcacattctggcagggcttccactttttagccatagcatctgataatggtgcttgtccagcttcttgaaattgagcttctagctgcccaatctnctaaatccatnctctacaagcagattctagatanaaaganacgttgggttgtggtatgcatacttcaat

SEQ ID NO: 440164 - DNA, 2136 bp, Homo Sapiens
  misc_feature (453)..(453): n is a, c, g, or t
  misc_feature (581)..(590): n is a, c, g, or t
  misc_feature (740)..(753): n is a, c, g, or t
  misc_feature (1664)..(1664): n is a, c, g, or t
  misc_feature (1673)..(1673): n is a, c, g, or t
  misc_feature (1675)..(1676): n is a, c, g, or t
  misc_feature (1681)..(1681): n is a, c, g, or t
  misc_feature (1688)..(1688): n is a, c, g, or t
  misc_feature (1699)..(1699): n is a, c, g, or t
  misc_feature (1701)..(1701): n is a, c, g, or t
  misc_feature (1711)..(1711): n is a, c, g, or t
  misc_feature (1718)..(1718): n is a, c, g, or t
  misc_feature (1720)..(1720): n is a, c, g, or t
  misc_feature (1734)..(1734): n is a, c, g, or t
  misc_feature (1739)..(1740): n is a, c, g, or t
  misc_feature (1747)..(1750): n is a, c, g, or t
  misc_feature (1752)..(1752): n is a, c, g, or t
  misc_feature (1755)..(1755): n is a, c, g, or t
  misc_feature (1771)..(1771): n is a, c, g, or t
  misc_feature (1773)..(1773): n is a, c, g, or t
  misc_feature (1775)..(1777): n is a, c, g, or t
  misc_feature (1779)..(1779): n is a, c, g, or t
  misc_feature (1784)..(1785): n is a, c, g, or t
  misc_feature (1797)..(1797): n is a, c, g, or t
  misc_feature (1801)..(1801): n is a, c, g, or t
  misc_feature (1827)..(1827): n is a, c, g, or t
  misc_feature (1829)..(1829): n is a, c, g, or t
  misc_feature (1836)..(1836): n is a, c, g, or t
  misc_feature (1848)..(1848): n is a, c, g, or t
  misc_feature (1897)..(1897): n is a, c, g, or t
  misc_feature (2017)..(2017): n is a, c, g, or t
  misc_feature (2029)..(2029): n is a, c, g, or t
  misc_feature (2049)..(2049): n is a, c, g, or t
  misc_feature (2052)..(2052): n is a, c, g, or t
  misc_feature (2054)..(2054): n is a, c, g, or t
  misc_feature (2056)..(2056): n is a, c, g, or t
  misc_feature (2059)..(2059): n is a, c, g, or t
  misc_feature (2063)..(2063): n is a, c, g, or t
  misc_feature (2066)..(2066): n is a, c, g, or t
  misc_feature (2091)..(2091): n is a, c, g, or t
  misc_feature (2096)..(2096): n is a, c, g, or t
  misc_feature (2131)..(2131): n is a, c, g, or t
tgcagatcctgaagtgctgttatcggaaaccatcagacatttccgtctgtactctcagaaagcaccgaatgacccacagcaagctgatattttaggtgctctaaagcacctaagaaaagaactgcaaagtctgagaaataggaaaaatgtctgagacagcaaaatatgaaaaacctgctcatcgttcagcttccaaaattctgaagtctggaagtttttccttcaagaaaagaaactgcataaaaaatttaaaactaagtcatctcccagatataagtatcatggtccagcagtactgtttaatggggtattcagtgactaaggtctgctatttatgcaaaattctgtttatcccgtgttaccaaattaccatttcagtgagaagcttttgaaaagtcttctgacttccagtctttcaccagatgactgcactggattagattttagaagagnaatgacccattttcatataactaaatattggtcatgaactgtgtaagggccatgcttattgggatcagttttaagtttaaattcttttgatattaataccagaccaaagacattttctgttttctggnnnnnnnnnntgattcatgttaggctttaggtgagagtacattttttacaaagtagctatagttgttacatagtcttacacttcaagctaaacaccaaatgggtgatattttgaaaaaagtttgtgttttactgtcttagatcgttcttggaaatcactnnnnnnnnnnnnnngttaatttgatgtttgcttatttcagttgcagaaactggcgagtaaaaaagattttgcatttacttaattaattttatatttatgttttatttctatttggactcagagatctagacccaataattagtaggctcctgctgccaaaatgcaaaggggaaaaaaaggcagggattgggggggatggggaagtggcccaataaattcatttctgttacaagcatcttttatacatattactaaagagaacatagtaagaaatgcaaataatagttctttattttattatgacagttaattaatagcaacctgttttaatgaataaagtcactcagagtccttcagcacttcctaagtagaggccagaatctgtagggcttcttttccccccaattgtatagctcctagactccaagcactatataggcccctgtatagaaatgctcactaatgaagagggagggctagaagcttgtctgcattcaaagatcactggtgagtcattcagcaagaaaaggccccttaccaggaatagtcacagttccgtggcattgtactagcaaaagggtctgatcaaaggtctcctgtggagcttgcatggttccctttcatactacgaccataattaaaaccactaattctcttttaaaatgctgcaggatgccatgtaggcatctgtctggagtgtcctttgtgatgtcataagctgttaaggaccagtgccgagggcttttgagtgaaatgccagtcatgaaggtgcttcaagacaagggtgcctctaaaagcttgacagggccttgactgcacatttcgagctgaatttgccccttgtcagctgccagtaaataaatctcaaagggggaaaagctgaagtttcattacctgatccatggggctttgttggttttggcancacacaggncnnccccnccccccncccttccctgnanccgaagatcnccattgnancctgcataacctanacagnnttcagannnnanccnttccaagagtctcaancncnnntnacacnnccgcggttgggngcgnggggaaggggggggccggtgtaagcngnggctggncgggcggggcantttgcccttttttccccgccttattaggctcctactcgatcttgaaccngaaaaaaatgaattgaagttgttgagtactaattggcaagggccttttaatcgtgggccaagaactttcactgacttgaaagtaacttctccccagggaaggaccaaaaacctggtttgnccttaaaacaanaacctgttggggttccgcgnggngncncantttncgnaagcaatgataaattggcaaagttnccccnactgaaaggaattgggtaagatttttgttttgttntttct

SEQ ID NO: 440165 - DNA, 957 bp, Homo Sapiens
  misc_feature (143)..(143): n is a, c, g, or t
  misc_feature (429)..(429): n is a, c, g, or t
  misc_feature (796)..(796): n is a, c, g, or t
  misc_feature (874)..(874): n is a, c, g, or t
  misc_feature (919)..(919): n is a, c, g, or t
  misc_feature (934)..(934): n is a, c, g, or t
gacaggttaagagcatgtttattcagacagattcagacatgtttattcatttgcccatccagcatatactttttgaacacctactccgttctaggtaataaggacacagcagtgaaaaaataaatcaggtttattccaagagncctagagctcacattctagaagggctgacagttgcccttgtgttatggaacacattatggagttatgttatagagtatgttgagtggtggtaggtactatgaagaaaaagaaaactagttaagagaaaagagagagactaggacatgctattttctaaagggtgatccagaaggcttcacctaaagaaaacatttgcacagaacctgaatgaagtgagtgaggcccacagataacccaggaagatcattctagagaggggacagtaaatgcatgcccagcagtggngtgtttgaagaacagaggggaggccagtgtggccaggacccagtgcgtgagagggaagtgtgggagtcagagagccagctggccaaggactttaaatttcattcttggtgaaacggaatcccaggaggtacggcatctggctgctgagtggaggatggactgtggaggggaaaggggaagaaggggccagtcctgagtatgagaagatggaagctcagatctgttaactccttgaaggagagaatgagagagagtgagtgtgcgcgcaggaggggcttcaggaggcacaggtgggttgtagggaggcattgggaagaggatgttcctcaggtgatgccccagggaaggatgggtctgtgataggccnacaggaacatctgacttccaaggcagccaggaggcatgaggagccactgccagtgggtcgctcagcagggagcttggnggaggcagtgcccatgcagccaggggtccaggagacccctgcttngattcgcctgcacangcctgaagccccttcccattctc

SEQ ID NO: 440166 - DNA, 1751 bp, Homo Sapiens
  misc_feature (1107)..(1419): n is a, c, g, or t
  misc_feature (1674)..(1694): n is a, c, g, or t
agcggcttacatttctaaaagcattttataattatttttagtaagatttttcttaaaatttcatatactggtttctacaatttatatttgaaatttctcagtgttatgtaaagagtgatggaaaagcattgatttctttaaaaccgtaatgtttttagaacttaagcctatagggcctttcttacaatgttgatgtacccattatcttagaaaatctagtttaaactgttttctttcaccgcaaaagaattaaatgggaaaatcatttgtttatctctaagttatactaattagtagaaccaaacaaattatcttcttttaaaaaataaatcttataggaaaatagacagtccaaagtcatgtctttgaacagtggattggatctgtgccagtaatgacaaaattatttttttgacttgcttgcctgaataaattgaagaattgctttcagtttgggttttgtatattcttaagtagccattgaaatttatattcttaactaggtcaaaaaataatgagccataagtttatgtcctctcacttagacattttctctttaaaaaggtattttcttctttataaacattttaaaagagccttcccttcttaaactaactccagtgcatgaagtgtgaaaatattttaaaattgacatttttactatatatgagcaagtcatgtaaacattgaagaacttggtaaccatattagtaaatggctattacgcaaatgttttcatcgttaattactttgcgttccaccaaaatatctttactaaaatgtgcttggtgtagtttgtttattgtctaaattagtaccagtcatcttatttctgcaaaatgagtatcaatgtgaaaaagacacgtgaagattaagcatgtttgaaaataaaatggtcaattacatttcaatttacataggccaacaactgttccatactttgtttgtaaacatttaatttctctactggacaaaaattaatatttggctttacattgaattttgagctgtgaagaataaattatgtatcattttagcatattaaacagtagtaagtctagcacatagtctcagccacttaaaacaaaagtttttttgtttgtttgnnnnnnnnnnnnnnnnnnnnnnnnnnnnnnnnnnnnnnnnnnnnnnnnnnnnnnnnnnnnnnnnnnnnnnnnnnnnnnnnnnnnnnnnnnnnnnnnnnnnnnnnnnnnnnnnnnnnnnnnnnnnnnnnnnnnnnnnnnnnnnnnnnnnnnnnnnnnnnnnnnnnnnnnnnnnnnnnnnnnnnnnnnnnnnnnnnnnnnnnnnnnnnnnnnnnnnnnnnnnnnnnnnnnnnnnnnnnnnnnnnnnnnnnnnnnnnnnnnnnnnnnnnnnnnnnnnnnnnnnnnnnnnnnnnnnnnnnnnnnnnnnnnnnnnnnntacataaaaatcgtaaaaacttctagtaaaaacttgatttggtgaatacagttatattttaaaaccttaaggtgacaagcattttctatgcctaaatcttcattggtttgcctggaaagagtctctgttaaaagattttccatattcaaagtaaaaggaaagatttcttgctttctaattgtcttttggacacatgcctattttctttgaggtataaacctttagatgtgaaaaatgtaatttcattctgctatnnnnnnnnnnnnnnnnnnnnnaattgaaaaaactgggaaatcctgctttgttggtaataaatcaatatttttatattc

SEQ ID NO: 440167 - DNA, 1694 bp, Homo Sapiens
ttttttttgcatgtaacttttttattgaggcacaacaaggcattgtaacttgcctggacttgaggcagtcagtttagtaagctgaacgttaatacagttaaggattaagtgcaaacaatatacattcacagcttgactagcgaggctacatcacaatttataaagtgccagattagtgctaattgtcattcagcttgatttttcacctcaggaaggaaaacaaaaaagtaaggacctcctccctctaggaacaaaaacattttcctaaaccaatcagtcatgagggcaaagactacttttccttcaatcccactaattagaacaccatccttttattgtcaatactgtactgactttcaatcttgataaagaagatagcctgaaaacgtagaatatttccagctacttccataaattgctcccctgtgcagacgtaaccatatctggtctccctggaagagctgaagaattgcatgattgctagcagtttcatggtctggagcaccatcattggcataggctgataccaagacctcttcattcttcatgaggttgacatacagtggcacattcactgccagctttagcatgtgaaaaatgaaaacgtaagtgccattcactgggcaattaaatctaccaagctgaagatcaaaagtttctcctaagttgttcagaagaagatcaaacacaataggttggtctaaagttccaggggccagattagaggttctggctgctgagaaggcaactcgcatctgctgaggcagagggtagacgtgtactggcagtatggtggctgctggatttgtcactggcacatccacaggggtcatgctacgggagtctccttgtccagagtcaccactgttaaaggtttcgttgtctctttctgggctgctcacctgagaagaatcactccaccctgctgttttattagcaacagtgagtttctcataatgaagcagttagctctcgaatttgctcgtggaccaccagatgtccctcctcgcttataacactgctggaaattatccctttgggaataaggtgctccagaatactctctagcttggaactgcagctggctataatttccattggaaattgaagggagtcctctataagtatcaaaacctttataaccaccaggggaccgataggaattggttattaatctcccaccacgagtacatcctctaacagatccccggctattgacaaatggctgagtaggtctgggaaatacattcgtctgtgctgggtaaaaggcaaggctaccattgcttacttgaatagttccatcaggatgataatttgctgcttaagaaaaacgattttagggtccaagagttaaatggtaatagtctttatacttaaaagccaatatatatcaaaatcattaatacaatttgctgcctttaaaaataaataggagatacatatattcatgtatataattcatctacatgactcaaatacgtaattcatatatataatggaatattattcagcctaaaaaaggaagaaaattttgacccatgctacaacatgaatgaacccttaagacatgccaagtaaaataagctagtttcaaaagcacaaatattgtataccacttatatgaggtacctagagcagtcattttcagaatcagaaagtagaatggtggttgccagatcccgggaattccggac

SEQ ID NO: 440168 - DNA, 1663 bp, Homo Sapiens
  misc_feature (19)..(19): n is a, c, g, or t
  misc_feature (21)..(21): n is a, c, g, or t
  misc_feature (42)..(42): n is a, c, g, or t
  misc_feature (90)..(90): n is a, c, g, or t
  misc_feature (97)..(97): n is a, c, g, or t
  misc_feature (103)..(103): n is a, c, g, or t
  misc_feature (109)..(109): n is a, c, g, or t
  misc_feature (115)..(115): n is a, c, g, or t
  misc_feature (192)..(192): n is a, c, g, or t
  misc_feature (200)..(200): n is a, c, g, or t
  misc_feature (221)..(221): n is a, c, g, or t
  misc_feature (231)..(231): n is a, c, g, or t
  misc_feature (246)..(246): n is a, c, g, or t
  misc_feature (264)..(264): n is a, c, g, or t
  misc_feature (300)..(300): n is a, c, g, or t
  misc_feature (320)..(320): n is a, c, g, or t
  misc_feature (340)..(379): n is a, c, g, or t
  misc_feature (382)..(382): n is a, c, g, or t
ctggcttcttcttgccaantngtcatggtagagtgttttatnacaccacaaagctaacaaggtcgggtttgtggtttttttcctttcacntggttanggtggngttgtnctcgtngcccgttggagaaaggttgggcccaaattatttcaaaaaggaatcaaaaaagttggcaaagtgcagccctgggtttnagggagcnatggaaaaagatggaaatgcntgttgggacntttagagcagactcnagggaaggcctgtaattnggtaggaaaggggtctttaggaggatgaccaagctntggaaggaggatggggaaanattatactgtggggtatggnnnnnnnnnnnnnnnnnnnnnnnnnnnnnnnnnnnnnnnnttnaaagtttacaaggagctttccacttgcttcagcatgcttaatcctcacatcaaccctgcttaggggacacaagctcagacagaggaagtgacttatccagagtcacacaggcagaaacccaggactgaagccacagcctttcaccacatccagctgtctttccatgaggggtaggggcagatcccccgagccggagcctccagggcagccctcgctcagggcagcactgtggtgacgctggtgagcaccacatgttcagagattttggagatggagcatcggctctgcaaggacaaggacttgtggctggcagaggagcggggactaggggccttcagagagccgcagggacccaggccaggcaggcagcaggagaaggcagccttaaactgctcccggaatttgccactgaggaagttgtagatgatggggttggcagcgctgttggcgtacaccagccagtgggagaaggtgaagcaggcgtagacagcttcgcggtcactggcttggcggaacatcccgaacaccctcttaaggacattgaggacgctgatgggcaggtagcagagggcgaagaccagcagcaccaccatcagcatcttggctgtcttcctccgtgcacgcatctgcttcacttcagccaggaaggcgcgggcccggggctggggctctccactcaggccctgctccaggtcccccagctggtctgaggggcgcttccagttccgcaccagtgctgaggtggtgccggggatctggcggccccagagcttgcggaatatctggaaataggccatggccatgaggcccagtggggccaggtaggtgacaataaagaagcaactgtggtagatcttgggatagaggtcatctgcccagcgttcatcacagactgagaagagccgtgtgcggttggctagctcaggcagcacactgctgcattccatgactgcagcctggggcaccatgatggccagcgacacagcccagatgcccaggatggagccacgggcccgccgggctgtgctcttgaacaatagtgggtggcagatggcataccagcggtccagggcgatgaagctgagagttagcactgccactgacacggacacagccttacaggaccacgatgaggagtaatgagctccgatgcgtgccaagtgcttgaccaaggaccccactgaacgccgggaggcccgttccgttcgcgggaactttctggaccttgggggcttggcgggccttccggaaagccccgggggaaccagggccctcgggagc

SEQ ID NO: 440169 - DNA, 424 bp, Homo Sapiens
  misc_feature (221)..(221): n is a, c, g, or t
tacaaggagctttccacttgcttcagcatgcttaatcctcacatcaaccctgcttaggggacacaagctcagacagaggaagtgacttatccagagtcacacaggcagaaacccaggactgaagccacagcctttcaccacatccagctgtctttccatgaggggtaggggcagatcccccgagactggagcctccagggcagaccctcgctcagggcagncactgtggtgacgctggtgagcaccacatgctcagagattttgggagatggagcatcggctctgcaagggacaaggacttgtgggctgggcagagggagcgggggactagggggcctttcagaggaggccgcagggaacccagggccagggcaggcaggcagggagaaggcagcctttaaactgcttccccggattttttccc

SEQ ID NO: 440170 - DNA, 1542 bp, Homo Sapiens
  misc_feature (584)..(584): n is a, c, g, or t
  misc_feature (586)..(586): n is a, c, g, or t
  misc_feature (673)..(673): n is a, c, g, or t
  misc_feature (684)..(684): n is a, c, g, or t
  misc_feature (742)..(742): n is a, c, g, or t
cccaggaaatgtgtaatctttaatataacagtggtttttgtgattttatctgcagtgtcccatttgaagccatttacattattaataatagtgacaatccctggactctgactcgtgcagttggctgatgtcttctgtagagcagtccaagtcacagaagaaaactccagcttgaccagaacagaattgtcaagtctgttcagacccctctgagtgtcaccacaaggaatcagccaaagttctttttttgaggagtggttcaaagtgtccacctgcactagaccccattggtgtttttgcagggcagaccgtggtgtgtttgcatactggggacagccactcctggctttctatttccaagcttctttgctagtgcctggtggctaggatcctgaccgtgagccccaccatcagtgtggctgacgccgcccccagagcagccccacggcggatgaccagctgtttcactgatagtctgctggtaggagctgaaagggcgtgggcctcctctggagtcctgaagaagtccacgtggcactcagaccttgaatacgttgtcaaggtaatgccaggggaactgcctntngccactgaagataggactgctttctcacgcccaggtctggtttcagtgctctctgctctctgctgctgctgccggcctgaatgtttnttagcctcctntgcagcaagcttccagtccagccgggcagtataagcaacaaaggcagcagttgccagnaagacacaggccagcatgcccagccagaggcccatgattctcattctgaccacaaaggtcagaaggatgcccagtggtaggccgatgatgtaatatgtgatggcattcacagcggcaccaaaggcctgcttcccagttcctctcagaactccgccatagacacaacagatggcctcaaacacgtgaaagacactataaaccggtcagacctggctcaccagggcaatgacatctctatgctgagcacgcccgagacggccgagcgccttggcctgcacagtattcggaggccccagaggcattcccactcggacacaagaccccgatgcttagcccccagggaattatgtaggtcacagtggccacctcatagatgacagcctgggcagagagatccaccacactgagcagccccatgaggaagctcccgatctgataggcccaccactgaacacagatcatgagcatgctggggacagtcagggagaataaggggccccaatcctgcaggcactgagtgaaccaacctggccacgtatgcaggtgcaattgtttcaagacaatggatagaaggaggaagacggactgggcaaactggtagatgatgtggacatatgtcgttcgcctgtcccgcagaggagggcaagaaccagggcatgatgtggcacaccgtgtacacatgggcgaccacaccactggggactttgtgtccgggggtcattaggaataaagaaaacctgaccctggtaaagtgttagaatgaagagtgggagagtgaacaaaccccgaagtgtgaaatg

SEQ ID NO: 440171 - DNA, 948 bp, Homo Sapiens
  misc_feature (41)..(53): n is a, c, g, or t
  misc_feature (227)..(227): n is a, c, g, or t
  misc_feature (230)..(230): n is a, c, g, or t
  misc_feature (743)..(743): n is a, c, g, or t
  misc_feature (753)..(780): n is a, c, g, or t
aaagtatgaattgttttattttaaaagcaaacatactaaannnnnnnnnnnnnattgcttataatttattaagaatgtttacacctgtataaggatttcatatatacattgtatgtgtgtatatataaatacatatatgactgcctaaattgtttataaattttaatttttctttaataggtttcattccttcagagctccattaatgtaatcaaaattgaaatatnagntttagtttaaatgtgaattcagtgactctagggccaaagaaatattaggtatgtttgggaagaatttttgtatttattcctgttacagttttgactttcaacttctctccccgtgcatggaagtcctggtaaaggatctaacatctttattcccttctttcctcttccagctgagcagagttggataattgaattagtcattctgacattctttggaccatatcatcttagtggtttggggtcagtgctcatctgatatatctttcttaccacctcttctacttactttctcttacttaaattatctggcataagcagttatctccagcttttgttagaatcttgcatgttgattactaaaactatactttgtttcccatttatttattacccttttgcatgtatttgtgtgacagggaactctgcagcagggggtgactgacacaccaaacaagatgtttcactgggtactctgccctagaaatggcagattaggaggattgactgtacctnacattatatnnnnnnnnnnnnnnnnnnnnnnnnnnnntgtactttaggacattaaagaaaactcaagttagaagcataccattttcctttcatggaagggtacagtattacaaagataatttgtttaacttgatttattaaattctagttatgtgccctataatgatgtttcagtcagtgacagacctcatatatggcagtggtt

SEQ ID NO: 440172 - DNA, 1361 bp, Homo Sapiens
  misc_feature (637)..(656): n is a, c, g, or t
  misc_feature (944)..(1273): n is a, c, g, or t
  misc_feature (1285)..(1285): n is a, c, g, or t
atcacattttctttagtactttattgttttacaagtgaacctttaagtttctccccacctactcccgcagaaaaaggcatattcaattgtcccatactaatttttgaataacctaactctccctttgtttctactaagagaggtttctttttggctacaagtaacaatatacatatacccaaagcaaatggaacaatataaagaatatctcacataacaaaaagtccaaaggtaaagcagttcctggattggttaattcagaagcacaattcaggtgctttctatctacatcccactattctcagtgtgatagctttcatctccatacttgtcctttcatggccatcagaaggctgttgcagattagcttcaaacatcccatatcacatatcttcactggggagcagaagaggggtgctgggcaaatccctaacttgtatcaattgttaagggcaacaggaaatttctttattcaaaggcttcaggcttcctttgtctcgttaggcctaggttccatcaaatgatcaagtaagccaattaccatgattggcacagaatctaatcaacactcaccctctctaggctagggaagcaccctattctatagcacaaggcagccatacagagttttaggccnnnnnnnnnnnnnnnnnnnntggggctttgtcagcaaggaagggagaacgaaatggctgatgagtaggcatatgaatgtctaacaaaccaacttatttgaacccagctttttcacacacacaattctcacacctgttttattttgaagttctctattgtgttctattttgatctacttctgtgtcattagctattcctgggtcattatgacttttaataaactttatacatgtatatttggtaggaactttcctaaattttttcaaaattaaaattttttccccaaaacatgtgagaattaggattgnnnnnnnnnnnnnnnnnnnnnnnnnnnnnnnnnnnnnnnnnnnnnnnnnnnnnnnnnnnnnnnnnnnnnnnnnnnnnnnnnnnnnnnnnnnnnnnnnnnnnnnnnnnnnnnnnnnnnnnnnnnnnnnnnnnnnnnnnnnnnnnnnnnnnnnnnnnnnnnnnnnnnnnnnnnnnnnnnnnnnnnnnnnnnnnnnnnnnnnnnnnnnnnnnnnnnnnnnnnnnnnnnnnnnnnnnnnnnnnnnnnnnnnnnnnnnnnnnnnnnnnnnnnnnnnnnnnnnnnnnnnnnnnnnnnnnnnnnnnnnnnnnnnnnnnnnnnnnnnnnnnnnnnnnnagaatttaatanatcaagttaaacaaatttatctttgtaatactgtacccttccatgaaaggaaaaatgtatgcttctaacttgagtt

SEQ ID NO: 440173 - DNA, 2182 bp, Homo Sapiens
  misc_feature (233)..(235): n is a, c, g, or t
  misc_feature (1369)..(1369): n is a, c, g, or t
  misc_feature (1744)..(1744): n is a, c, g, or t
  misc_feature (1758)..(1758): n is a, c, g, or t
  misc_feature (1768)..(1768): n is a, c, g, or t
  misc_feature (1782)..(1782): n is a, c, g, or t
  misc_feature (1785)..(1785): n is a, c, g, or t
  misc_feature (1839)..(1839): n is a, c, g, or t
  misc_feature (1845)..(1845): n is a, c, g, or t
  misc_feature (1849)..(1849): n is a, c, g, or t
  misc_feature (1857)..(1857): n is a, c, g, or t
  misc_feature (1878)..(1878): n is a, c, g, or t
  misc_feature (1895)..(1895): n is a, c, g, or t
  misc_feature (1899)..(1899): n is a, c, g, or t
  misc_feature (1902)..(1902): n is a, c, g, or t
  misc_feature (1923)..(1923): n is a, c, g, or t
  misc_feature (1941)..(1942): n is a, c, g, or t
  misc_feature (1961)..(1961): n is a, c, g, or t
  misc_feature (1965)..(1965): n is a, c, g, or t
  misc_feature (1995)..(1995): n is a, c, g, or t
  misc_feature (2025)..(2025): n is a, c, g, or t
  misc_feature (2029)..(2029): n is a, c, g, or t
  misc_feature (2032)..(2032): n is a, c, g, or t
  misc_feature (2040)..(2041): n is a, c, g, or t
  misc_feature (2043)..(2044): n is a, c, g, or t
  misc_feature (2048)..(2048): n is a, c, g, or t
  misc_feature (2050)..(2050): n is a, c, g, or t
  misc_feature (2054)..(2054): n is a, c, g, or t
  misc_feature (2058)..(2058): n is a, c, g, or t
  misc_feature (2067)..(2068): n is a, c, g, or t
  misc_feature (2075)..(2076): n is a, c, g, or t
  misc_feature (2099)..(2099): n is a, c, g, or t
  misc_feature (2126)..(2126): n is a, c, g, or t
  misc_feature (2128)..(2128): n is a, c, g, or t
  misc_feature (2130)..(2130): n is a, c, g, or t
  misc_feature (2173)..(2173): n is a, c, g, or t
ggccgccacgcccgacgccaacgcaggcgcacgctccgattcggcgcggctcatggtccggttcgggctcgcgagtctccgtctggggtagggcaggttcttagactctgtgagtaaagacagcttcatcttcccagttcatcatggcttcaacatccagagatgtcattgctgggagaggtatccactcaaaggtgaagtctgcaaagctgcttgaggttctgaatgctatnnnggaggaagagtccaacaacaacagggaagagattttcattgcacctcccgacaatgctgcgggggaattcactgatgaggactcaggggatgaagacagccagcgaggtgctcacctacctggcagtgtgctgcatgcttcagtcctgtgtgaggactctggcaccggggaggataatcacgacctggagctgcagccagccaagaagaggcagaaagcagttgtgaaacctcagcgcatttggaccaaaagagatattcgtccagactttggcagttggactgcatcagatcctcatatgaggatctgaaaagccaagagctgagtcccgtgggcctttttgagttgttttttgatgaaggaacaattaatttcattgttaatgaaaccaatcgttatgcttggcagaaaaatgtcaatttgagtcttacggctcaggaattgaagtgtgttttgggcattttgattttaagtgggtacatctcttatccaaggagaaggatgttctgggaaacctctcccgattcacatcatcatcttgtggctgatgcaattagaagggacagatttgaactaatcttctcatacttacattttgcagataacaacgaacttgatgcaagtgataggtttgccaaggtcagacctctcatcatccggatgaactgcaatttccagaagcatgcacccttggaagagttctacagctttggcgagtctatgtgtgagtactttgggcaccgggggtccaagcagctgcacagggggaagcctgtgcgacttggctacaagatttggtgtgggacaaccagcagaggctacttggtgtggtttgagccctcacagggcacactgtttaccaagccagacaggagcttggatctaggaggcagtatggtaataaaatttgtggatgcgcttcaggagcgtggttttctgccatatcacatattttttgacaaggttttcacaagtgttaaactgatgtccattttgaggaaaaagggggtgaaagccacaggaactgttcgtgagtacaggactgagcgatgtcccctaaaagaccccaaagaactgaaaaaaatgaagaggggttcatttgattacaaagtcgatgagagtgaggagatcatncgtgtgccgctggcacgatagcagcgtggtcaacatttgctccaatgctgtgggcatagagccagtgaggctgaccagtcgtcactctggagcagctaaaacgcggactcaggtccaccagccatcactggtgaagctgtatcaggagaaggtgggtggcgtgtgtagggatgggatcagaatattgccaagtacaaggtgaagatccgaggcatgaaagtggtagtcaagctttattggctatgtcattgatgctgccctcaacaatgcatggcagctgcatagaatctgctgcccagatgcccaggtggaccgccttgcctgccggagatacattgcctgtgtgtatctggagagcaaggctgacacaacatntcaagggaggcgangcaggcggtnggagactgagagcngcngcgatatgattgggcactggattatccatcaggacaagaggacccggtgtgccngctgcnactnacagaccnacacccggtgtgagaagtgcnagaagggtggccatgcnaaangcntcagggagtaccacatccggngacatcatgagacatgcnnctttggtttataatgagangttnacagttaaatacagatggcagttgagcacntctgttttgtgttggaaaaaagacctgaancccnaangaccgganngnngatngncggnggancgacaatanngttatgnnttggagggtggtgtgttatgccnacatgtgatataaattaatatttatantnanttatatttatatttgtggaggtatttatttaaagttatggatnactttttat

SEQ ID NO: 440174 - DNA, 1987 bp, Homo Sapiens
  misc_feature (52)..(52): n is a, c, g, or t
  misc_feature (62)..(62): n is a, c, g, or t
  misc_feature (66)..(66): n is a, c, g, or t
  misc_feature (75)..(105): n is a, c, g, or t
  misc_feature (107)..(224): n is a, c, g, or t
  misc_feature (226)..(226): n is a, c, g, or t
  misc_feature (725)..(725): n is a, c, g, or t
  misc_feature (748)..(748): n is a, c, g, or t
  misc_feature (756)..(756): n is a, c, g, or t
ctctttgggggggcgggccgccccaaagaaatgtttttaaaaaattttttcnggggcccagngccnccccccaannnnnnnnnnnnnnnnnnnnnnnnnnnnnnntnnnnnnnnnnnnnnnnnnnnnnnnnnnnnnnnnnnnnnnnnnnnnnnnnnnnnnnnnnnnnnnnnnnnnnnnnnnnnnnnnnnnnnnnnnnnnnnnnnnnnnnnnnnnnnnnnnnnnntntgatgtagaaaatgttccagcttccataattctttattaaatatttgacaagttgcatcgcttctttacaatgacttcattttgtcacattagtcttttgctgtcaggaaaacaatctacagtttctctttagatctctcaagaaaaaagaaaagcgaaaggattgttcttcaagaaaacttcctgtgtgtatcaaattcaaccatattttaaagctattctgactgtgaaaatgagcattattcataagttgccttaaaaaaattcaaggtagtttggtttttaccactgtatcaaatagtacttggcttcctattagggggtgggtttataataaaaagttatgaaacattgataatttatttggaatgcttgaaactcttttcaccttaaaagtcactgtttttttcatgtttcatttgttggtgggtcctgggtttggggatggcggctttttttcctcctcttcctcgggttttctttggctcctagggttgcngttctcagggcgctgcttggggntaactgcngttgggtctcagctctcacctcctttcgggaccggattactcaataaaggtgtaaaggtgctatacgggtgtatgcaggtgtgtttgggcagcatatgtacgtatatatgtatatatattgcatacagagtagtaaaggaagaacaaagtcacgcaaagttaacatgaaggaaaccgtgacaatctaggtgaaatcagtctgagtaaaagggggaaactggcttacacgggaacacatatctgcagacacagagttatggtcacgaggaaggcttctgatgatgcactggtacggggttgagaatgcagtgcacgcgaggttaggcgccaacagcaatgctactccttacacacagaaaaccaacgaacggaaagacgtgcctttgaaacatgcgttgctttcagtggaacatctttaacaaacaacagatgtttaatgaggtttgcttggaaaatttcatgccaacaggaagctaacccttttctagaaaacgttctccaagctcccgtcctaatgctgtggcactttctctgacatactgagaacactctggggtgggggtgtgtgtatgcaaatgtatagacactgttcattaaggcttatataaattaaaaaagtggtccaaagaatatcacatttttccccagttttaaaatctaaagtacaaagtggagtttataaggatttgttttttaaaaacacatctcagtcctgaaattggcagttctgacacgacttatcaggatgtaccccaatgcctgaatgacagaggtagtgatcttcggggtcaggggaggtcaggaagggagcaggcgggcagttaccctgcacagcggcaccctctactggcgaggcagcaaatgataccagacagcacctcccacctctccctcttaagtacaggggtgcagggccagggtaaggaggagacagaagaaggagaactagcacagtgtcacgtaggggctgcagaactgattaacccaggctctctttatacgtttttaaatttcagaggtgagtacaagactctcagaaatacaggagtcgactgttaatgggtaactgttagaataattaaaaagttgctgtgtatgaacctggctttcgggaggaccagtgtggatctggcaagatagcagcggtgcacactctctatgcaacaatgggagatgtagaaaatggttcaaatgttttgcatgctgtttcctcagaatctgtcactgtgag

SEQ ID NO: 440175 - DNA, 888 bp, Homo Sapiens
  misc_feature (260)..(318): n is a, c, g, or t
ggaaggcacgtctttccgttcgttggttttctgtgtgtaaggagtagcattgctgttggcgcctaacctcgcgtgcactgcattctcaaccccgtaccagtgcatcatcagaagccttcctcgtgaccataactctgtgtctgcagatatgtgttcccgtgtaagccagttttccccttttactcagactgatttcacctagattgtcacggtttccttcatgttaactttgcgtgactttgttcttcctttactactcnnnnnnnnnnnnnnnnnnnnnnnnnnnnnnnnnnnnnnnnnnnnnnnnnnnnnnnnnnnttgtatagcatttttacacctttattgagtaatctggtttcgaaaggaggtgagagtttagtcccttctgcagttttctccaagctgtgtcctgtgaatttcaacccttggagcctaagaaaaccctaggaagatgatgttaatttgctgtcatttcctaattcaggatctatcatcaaatgaaacatgaaaaaaacagtgacttttaaggtgaaaagagtttcaagcattccaaataaattatcaatgttttcataacttttttattataaacccacctcctaataggaagccaagtactatttgatacagtggtaaaaaccaaactaccttgaattttttttaggcaacttatgaataatgctcattttcacagtcagaatagctttaaaataatggttgaattgatacacacaggaagtctctgtgaagaccaatcctttcgttttctttttgttgagagatctaaagagaactgtgatgtttcctgacagaaagatatgtgacaaatgagtcttgtaagcacgatgcatgtcaattttataacgatttgcagtggacttttcgaag

SEQ ID NO: 440176 - DNA, 514 bp, Homo Sapiens
  misc_feature (49)..(49): n is a, c, g, or t
  misc_feature (61)..(61): n is a, c, g, or t
  misc_feature (115)..(115): n is a, c, g, or t
atatcacatttttccccaagttttaaaatctaaagttacaaaattggantttttatcaggnatttgttttttaaaaaacacatctcagtcctgaaaattggcaattctgaacacnacttatcaggatgtacccccaatgcctgaaatgaacacaggtagtgatcttcggggtcaggggaggtcaggaagggagcaggcgggcagttaccctgcacagcggcaccctctactggcgaggcagcaaatgataccagacagcacctcccacctctccctcttaagtacaggggtgcagggccagggtaaggaggagacagaagaaggagaactagcacagtgtcacgtaggggctgcagaactgattaacccaggctctctttatacgtttttaaatttcagaggtgagtacaagaacacagacaatgaatgcctcactgctgccggctccagggccagcagtggagaggcacaggctgttggaccttcatcccgccaggtgctctttccacatcct

SEQ ID NO: 440177 - DNA, 996 bp, Homo Sapiens
  misc_feature (318)..(605): n is a, c, g, or t
  misc_feature (674)..(674): n is a, c, g, or t
aaaggtgggctttttaaataaaggagtctttaaccgcttaaggtttcggccctacataaaaggaggggtctaagaagggtaacccgagctggggtatagtttccttacctgcaaaaagggaataatgctgtaccacaaaaaagctaataatacttttcaaaggctggcagtactaaatgagccctttcctttaaagtgccagcattttgaaaagcatcaacacatcagctatgtgctttaaatctggcagtcttatagctatacctgtagtcagtatagagtggttttttctatatgtttcatcgatgttgtcttttnnnnnnnnnnnnnnnnnnnnnnnnnnnnnnnnnnnnnnnnnnnnnnnnnnnnnnnnnnnnnnnnnnnnnnnnnnnnnnnnnnnnnnnnnnnnnnnnnnnnnnnnnnnnnnnnnnnnnnnnnnnnnnnnnnnnnnnnnnnnnnnnnnnnnnnnnnnnnnnnnnnnnnnnnnnnnnnnnnnnnnnnnnnnnnnnnnnnnnnnnnnnnnnnnnnnnnnnnnnnnnnnnnnnnnnnnnnnnnnnnnnnnnnnnnnnnnnnnnnnnnnnnnnnnnnnnnnnnnnnnnnnnnnnggcagtgtatatcttctaaagttgcaatttttgttcactccagaatcacttttcaaaaagcatgcagantttaatgccacccagtttgtgttatgtatctatcccgcaaaacagctctaaaggtgatttactaaaagattaacagcatttatctctggtgggataatttttctttgcttgtttacctgtgtcttgcagattttacacagtgaacaatgactgtataattttaaaatacagatatgcacaattgtgtaatgtaaatatgctcagcttcaatacatttaagaacacttttttaacttttcgtaaggagtcttcagtttaaaagtacagtgtcattacagagtgcttattctgttacaaaattagtaaagctgattctgcctct

SEQ ID NO: 440178 - DNA, 960 bp, Homo Sapiens
  misc_feature (182)..(195): n is a, c, g, or t
  misc_feature (303)..(325): n is a, c, g, or t
  misc_feature (768)..(768): n is a, c, g, or t
acagaagaaaaccctttatattttattttggtcaacaaaaagtctgtgcataactcagcagcaggcctgaattaaattaaaccaaagctgcattgtgatggccatcaatgtacagactgcctgtctggcttagcacatcaaaagtctaatcaaggctcaaaccaccatccttagaaatccannnnnnnnnnnnnngaaaaaggctttctttctcagttaaattagataagtcttaaagttgggaaactactaaaaacaataaaaatttaaaactgtattttgctaaagggtatagagtaaatnnnnnnnnnnnnnnnnnnnnnnnaaatgacaaaccagaaacactaaaatgtgtttacatgtgaaagaatcatcacgttgatttacgtcaaagaacatcatatttgtttatcttaatgcttggcatagttggttttaaggttttagaaatatttttgaatttattattaaacaataggaacgtactgtacagaatatttcaaaactgctaccaagaaaacaagtacaaattctacctagcaatataggtttcttatcaacataccttttttcctcactggtttcaaactgacaaaggtgtagggagaaaataattgaatggtttctgaaggccacactagccctttagccaagagttctgcttctgaattacatagaacatcttggtccacagacaatggaatggatttttggagagagtgtcaatttagggctaaagaaatacagggtgagaatgaagccctcaancaaagctccaaaagggcacagaaactggtaagtgacctaaatatggagagacaggtgaggagaaaatacatagtaaatgctggcctcgttattgcattttattctctcccttctctcatccattcatcttcttaagactgccttctgtgtccttttgcagggaaattatcttaccctttaacatttgttcct

SEQ ID NO: 440179 - DNA, 682 bp, Homo Sapiens
  misc_feature (218)..(218): n is a, c, g, or t
  misc_feature (222)..(222): n is a, c, g, or t
ttgttcataacagctttattcataatagcctgaatctggacataattcaaatatccatcaacaggtgaaatcagtaagtgaattgtgatatccatacaatgaaatactactcagtaatttaaaaatgaactatagatacatataatatggaagaatattaaaatccagccgaggaaaagaaattagatgcaggaaatacagtacatgcatacagttgngtgnattttcctggggctgctgtgacaaccacactgttattggctaaaaacaacaggaatttattctctccattctagaggccagaagtccaaaatcaaggtgtcagcagggccacattgcttctggaggctgtggaggagaacctgttctttgcctcttccgacttctggtggctgcagccttccttggcattccttagcttgtggctgcatcactccagtctgcacctccatctttacatagcctatcctttctgtgtgtgtggtgttgaccctccctctacctctctcttataagggcactaatgatggtatttagggcccacctggatagcctagaattatctccttatctcaaaatcctgaatttaattccacctgcaaagacacttttttcaaagaaggcgacatttacagattccaggaacaggacatataatctttggggccaccattcaactcac

SEQ ID NO: 440180 - DNA, 1703 bp, Homo Sapiens
  misc_feature (22)..(22): n is a, c, g, or t
  misc_feature (30)..(30): n is a, c, g, or t
  misc_feature (57)..(58): n is a, c, g, or t
  misc_feature (151)..(151): n is a, c, g, or t
  misc_feature (158)..(158): n is a, c, g, or t
  misc_feature (189)..(189): n is a, c, g, or t
  misc_feature (451)..(506): n is a, c, g, or t
  misc_feature (573)..(599): n is a, c, g, or t
  misc_feature (1446)..(1455): n is a, c, g, or t
  misc_feature (1487)..(1495): n is a, c, g, or t
agaacatttctgcagtctaggncagctatncaaagccttaagacattgtattacagnnacttatcatgtagggatccatatcctacccataactctgccagagtcttaatagcatggtggagtggctcccttaagaatctcattttcttcntaagtgnaaaagctagtagttctaaaaatatttcctgnaagaggttagaacggttattatatatcaattgaatataaagtatgattatgtaagccaagcttgcatgctaatattgcacagggtagaaagcaataaaacaggacgatgtgcttccttgggccatctggtagaagcagaaggaagttcttgattcagtatcattatgatgcctcaaattccaggagtccacctgtagctggccttcccgtgtcagtgccatcttgaattctcaaaagggcacatatcttccttgccgttagnnnnnnnnnnnnnnnnnnnnnnnnnnnnnnnnnnnnnnnnnnnnnnnnnnnnnnnngggtacaccagccgtctcaaactgtggtactgttcatttcttgaagagaatagataatatttcaaannnnnnnnnnnnnnnnnnnnnnnnnnnttcaaatggtacaaagtaactatagattcaaattagaagatagttgatcgttcttcatgatgcccaaaaatttcactgagaaaacccttttttaagcccactttccacggtgttgccaaaacgctgtgtcttctcactgtaggatattttcgttacacacaagtaaacgcactgtgattatctggtagccagtcaaagtgcaagtaagaaatcccatttggcttgtatatatgtgagatgttttgagattcccaaaatgtattttccagagggttggttttccctttactaccacaaatgcttctgttaggttcttgggtgaattctcgtggtcttaattttgttgcctgttgcgcacatccatccagaattgtcagggagtgtcttacattcttctccttctaggcaaggctccatctcacaccaccatttcccaatcactatggaggcatcgacgcaagaaggccggtttcttgttgttccagccacttttccaggtagacaggaacactttactgtttgtgaccgctcctcaatgcgattcttgttacaacatcggtgtgctgctatcacttcacacgtccctccttctggtctgtgcaggtgatgctgctggaaagtgtgctgaagggatccatggcagagtagcattgcacaagcacttatccacaaatacaggacccaggacatcgcagagaccattgccattctctgaaaaatccagccaagagcagagtactctattagtgttcattggaaagatctaacactttttaaaatccatctgtgccaccatttaaaatttttgtttcaaagagcttcccaacaatcttctttatcaggattnnnnnnnnnntgttactctcttccgatcctatttccacagtnnnnnnnnngacatcgggttcattcagactgtattgtcagaaaaggagccaaggtttgaggggtggaaaccttgtcattttcacctttaaatcatctcctggcgtcacctctgcctgacgagacctttgaagtgatggggagataatgtgcagtttcctgatgagaatcagtttatagttgccgatggaccatccccactccagtgcattcggggca

SEQ ID NO: 440181 - DNA, 998 bp, Homo Sapiens
  misc_feature (793)..(793): n is a, c, g, or t
  misc_feature (804)..(804): n is a, c, g, or t
  misc_feature (808)..(810): n is a, c, g, or t
  misc_feature (812)..(812): n is a, c, g, or t
  misc_feature (816)..(819): n is a, c, g, or t
  misc_feature (821)..(821): n is a, c, g, or t
  misc_feature (825)..(826): n is a, c, g, or t
  misc_feature (836)..(836): n is a, c, g, or t
  misc_feature (839)..(839): n is a, c, g, or t
  misc_feature (844)..(844): n is a, c, g, or t
  misc_feature (846)..(846): n is a, c, g, or t
  misc_feature (849)..(849): n is a, c, g, or t
  misc_feature (857)..(857): n is a, c, g, or t
  misc_feature (874)..(874): n is a, c, g, or t
  misc_feature (888)..(889): n is a, c, g, or t
  misc_feature (900)..(902): n is a, c, g, or t
  misc_feature (911)..(913): n is a, c, g, or t
  misc_feature (915)..(915): n is a, c, g, or t
  misc_feature (920)..(920): n is a, c, g, or t
  misc_feature (922)..(922): n is a, c, g, or t
  misc_feature (925)..(925): n is a, c, g, or t
  misc_feature (931)..(931): n is a, c, g, or t
  misc_feature (936)..(936): n is a, c, g, or t
  misc_feature (941)..(941): n is a, c, g, or t
  misc_feature (952)..(952): n is a, c, g, or t
  misc_feature (954)..(955): n is a, c, g, or t
  misc_feature (957)..(958): n is a, c, g, or t
  misc_feature (968)..(968): n is a, c, g, or t
  misc_feature (974)..(974): n is a, c, g, or t
  misc_feature (981)..(981): n is a, c, g, or t
  misc_feature (983)..(983): n is a, c, g, or t
  misc_feature (989)..(989): n is a, c, g, or t
  misc_feature (994)..(994): n is a, c, g, or t
agaaagaagttgtttaccactttaatagggctgtccaacatttggtcacatagatcatcttgaaatctaattgttttcatggccttcctatctcacaagaggagacctgaatactcttggaaaaagcaaaccaaacatagaaagagatgccatgataagacttgttgctacagcactatgtagttaacgatgccagactttggatttaatcagaggacatttctgcagtctaggacagctatacaaagccttaagacattgtatttacaggacttattcatgtagggatccatatcctacccataactctgccagagtcttaatagcatggtggagtggctcccttaagaatcctcattttcttctaagtggaaaagctagtagttctaaaaatattttcctggaagaggttagaacggttattatatatcaattgaatataaagtatgattatgtaagccaagcttgcatgctaatattgcacagggtagaaagcaataaaacaggacgatgtgcttccttgggccatctggtagaagcagaaggaagttcttgattcagtatcattatgatgcctcaaattccaggagtccacctgtagctggccttcccgtgtcagtgccatcttgaattctcaaaagggcacatatcttccttgccgttagaaaaagaaatgactaacaaaacatagcaatacagacaaaacatccaaaactcaaaggggtacaccagccgtctcaaactgtggtactgttcatttcttttagagaatagatattatttcaaaatattntatatatatanagannnanatgnnnnangggnnaaagtaactntantttcnanttngaagatanttgttcgttcttcttgntgcccaaaaatttnnctgagaaaacnnntttttaagnnnantttcnanggngttgcnaaaangcggngtcttctcacngnngnnatttcgttanacacantaacgcncngtgttntctgngagc

SEQ ID NO: 440182 - DNA, 631 bp, Homo Sapiens
  misc_feature (36)..(36): n is a, c, g, or t
  misc_feature (41)..(41): n is a, c, g, or t
  misc_feature (132)..(132): n is a, c, g, or t
ttccttccttgttccaagccaattttccccaggtanaacangaaacactttaactgtttgtgaaccgctccctacaatgcgaattccttgttaacaacatcggtgtgctgctatcacttcaacacgtccccntcctggtctgtgcaggtgatgctgctggaaagtgtgctgaagggatccatggcagagtagcattgcacaagcacttatccacaaatacaggacccaggacatcgcagagaccattgccattctctaaagagaacattcgacaggaaaggttacctccggcttcaagcccccagctcagtcagccccactgatgagggaagggaggtctcagacgtcatgttcctttgctacttctctggctagaactaatgatccagcagaggtcatgccatgaagtgggattgagagaaagcccttttcagatgatcatacattcatttttttcttaattctgcaaaacaaaactccaaggattggcaaaatgcaaaaataaagttttaggctatcagttagtcggtttaaaacaatgcatgctgactaaaaatcctattttacacaatgatctttaaactatagttatcccaggcactgaaaagctgcagactcctcctgttcaatc

SEQ ID NO: 440183 - DNA, 440 bp, Homo Sapiens
  misc_feature (418)..(418): n is a, c, g, or t
agaaagaagttgtttaccactttaatagggctgtccaacatttggtcacatagatcatcttgaaatctaattgttttcatggccttcctatctcacaagaggagacctgaatactcttggaaaaagcaaaccaaacatagaaagagatgccatgataagacttgttgctacagcactatgtagttaacgatgccagactttggatttaatcagaggacatttctgcagtctaggacagctatacaaagccttaagacattgtatttacaggacttattcatgtagggatccatatcctacccataactctgccagagtcttaatagcatgggtgggagtgggctcccttaaggaatcctcatttttcttctaaggtgggaaaaggctaggtagtttcttaaaaatatttttcccgggnagggctttagggacggttattt

SEQ ID NO: 440184 - DNA, 1018 bp, Homo Sapiens
tcagtggatcctttgttccatattattttaaccaaccaaagtatcttgccacaaagaaccacagtcaaggcacaaaggtaagaggaggagagtctggacaaagtcctgttgaggtggtaggaggaactgaaatgccctcagtaaactgcagattcttctctcagtcatttctgtgaagattacccgaatagcagataatccaaattggtttagtttggtttggcatgcatcacttttaccttttatgacaacatatgtaccctataagttgtttattttggcctaacatgaaaatcatttacattctctgaaaagggaaatggcaaagggtgagggatggcaacaaacaagcaaaagcctggcttaacaccagttccaggccagatgcacacaagccaaatgaagttgcctatctggcccttccctatataccaccctcttccaccctgtccttagggtgagaaagactccataaccttttttcctttctggcttggacaccttggccaggtaagaaggctgacaatttgggagtagctactaagtaacattctttaaggccagggctttgtatacaaatacccttctctttcctctaatacctgactctcctttccaagttcccttgggaacactgtgaaaggatagatgtgtcttgcaggatctcttccactttgcctctggagaggagcaaggtgactgacttattggtatagaggcaggcaataagccaactctgctgaaggctgaggcagggacctgggttctcctctgctttcttttcagcctctccttctccccacattcctacctctggccaatcttacccataatcgcaaccttacccttggaatagaagaccaaagaaacctccctcctcttcattaatctctaggaatctgttcctttagcccacttccctgacccttctagccttgttgatgtccaatctctgccctcagaaaaactcctgaatatctagacccatgagcctcgtgttggaatcgccacccaggcc

SEQ ID NO: 440185 - DNA, 479 bp, Homo Sapiens
aaaataaacagtgtttccaaaaaacattgactacaagggggaaatgaggcaataaggttggaagaagggaaggactcaagaagaaatgctgaacctgcaaacacaatgatcagggagtatgcagagaggcccttgctgtgacactgtcctctcactgctactcctatgaagcccattgactatgctgttacactggagctaaaggtttaaagagaagcattttattcctaaaaggtgatgtcaatttgttcttagccccagcactgtgaatccctttctttacagtccaattctatgatttctttctttagacatttcccaagatagacccaaagaagattattccaaaaaactttttttccaccattatttgtttttcatcacttttgtaatctacctttaatttttcatcattttgggcccctgcaccaggttcgaacctatttttaacctttttttctcaaagattctaaaaacat

SEQ ID NO: 440186 - DNA, 1080 bp, Homo Sapiens
  misc_feature (4)..(4): n is a, c, g, or t
  misc_feature (8)..(8): n is a, c, g, or t
  misc_feature (13)..(14): n is a, c, g, or t
  misc_feature (18)..(18): n is a, c, g, or t
  misc_feature (29)..(29): n is a, c, g, or t
  misc_feature (31)..(31): n is a, c, g, or t
  misc_feature (59)..(59): n is a, c, g, or t
  misc_feature (64)..(64): n is a, c, g, or t
  misc_feature (67)..(67): n is a, c, g, or t
  misc_feature (70)..(71): n is a, c, g, or t
  misc_feature (76)..(78): n is a, c, g, or t
  misc_feature (84)..(84): n is a, c, g, or t
  misc_feature (104)..(104): n is a, c, g, or t
  misc_feature (142)..(142): n is a, c, g, or t
  misc_feature (163)..(164): n is a, c, g, or t
cctntggnctggnntacnaaggaaagccnantgtctgggtggtgtagccggccaaatgntgctnagnggnngtatnnnctgatntgtggccaaagagaccaccnggatttgtccaaatccagtgtactagttccaaaggcantttgttctgaccatatgcaanncctgaattagtggtggaggagctgaagagtcctgttgcgctggaagtggctggagaagacccaaacaagccagttgtggtacctgctcccacctggttctgtgggcccttcctgttagcctgataatcctctaaacgaagttcctctagtgacttgctttcatattctttcatagcagtaatacactggtgcttggtacttatgttagtgctaactccagctttgaccatagtatctgtaccagttggagggttaaatttaatagtagtcccagtaggagcagctgtaaaactacttggcccaaagagggagccagatgtgctgccaaaaggattagaggtggtatttgtggttccaaagagtcctccactgctagtactggttccaaaattgccaaagccagttggtttattttgtgcaaaggcattgttttgggatgagaagagactggtccctgtgcttgcagttccaaacaaggtatttgctgttcctgttgacgtaccaaacccaaagccagtgcttgtggaggtagctggctggctaaatgaactggttccaaacaatcctcctggtttagtctgtgaatttccaaagaggcctccagtattgttgctagaaccaaatgcagatgttccaaatgcccctccactagtagtgccaaagccagtattctgtccaaatgttgaagttgtgccaaagccacctgtgccacccccaaagggtgttccaaatgatttgttaaacatcttcaaaatgagtctttgtttcagaaagcgcggttcggtggggaaggggaagtgtcaggagtcccctgctgccacccgccgctcacagagcagcgcgcggcccccacgaaaccgtcgccgccgccgctaccacccctgccaccgaccgccgcttcgggcgcagcgcgcag

SEQ ID NO: 440187 - DNA, 586 bp, Homo Sapiens
tctggccccctctttggcccaagtagtttcacagctgctcctactgggactactattaaatttaaccctccgactggtacagatactatggtcaaagctggagttagcactaacataagtaccaagcaccagtgtattactgctatgaaagaatatgaaagcaagtcactagaggaacttcgtttagaggattatcaggctaacaggaagggcccacagaaccaggtgggagcaggtaccacaactggcttgtttgggtcttctccagccacttcaagtctgcctcttagccccaccctagcctctaattcacagggttctcaaggtgatcagaggactgatcgctccgctcctatccgttctgcttcccaagctgaagaagaacctagtgtggaaccagtcaagaaatcccagcaccgctcttcctcctcagccccacaccacaaccatcgcagtgggacaagtcgcggcctctccaggcaagaggcatttgactcggaaacccaggagagtcgagactctgcctacgtagagcccaaggaagattattcccatgaccacgtggaccactaccaccgtgactagt

SEQ ID NO: 440188 - DNA, 1077 bp, Homo Sapiens
  misc_feature (31)..(31): n is a, c, g, or t
  misc_feature (38)..(38): n is a, c, g, or t
  misc_feature (270)..(287): n is a, c, g, or t
  misc_feature (339)..(339): n is a, c, g, or t
  misc_feature (384)..(384): n is a, c, g, or t
  misc_feature (755)..(755): n is a, c, g, or t
  misc_feature (757)..(1005): n is a, c, g, or t
  misc_feature (1014)..(1014): n is a, c, g, or t
  misc_feature (1021)..(1022): n is a, c, g, or t
  misc_feature (1032)..(1032): n is a, c, g, or t
  misc_feature (1037)..(1037): n is a, c, g, or t
  misc_feature (1046)..(1046): n is a, c, g, or t
  misc_feature (1060)..(1060): n is a, c, g, or t
  misc_feature (1072)..(1072): n is a, c, g, or t
  misc_feature (1074)..(1074): n is a, c, g, or t
ttattttaatttaaacttacacaggctctgntctcttngagagacaagaatagttgaaagcactggtttcaaatcctgcctctctttcccatgtcatgtggagcaacttatttaatctctctgcacctcatttttctcagaggtgaaacagggataacagttatgcgtatatttagcattgttgtgagattcgatttaatgtaagtgtttagatgagtacctggtacatgttaaccatcatatatgttcatgaggtactacatttgctannnnnnnnnnnnnnnnnnaaagaaaaataagtttcttgccaggatatgcatacaatattaaatgcaaatncatgtattttaaacttaatcacaaagcagttaaaatatgtttgtngtaggaaactgaatactgtccacttgagttttaacaaactgttaattcaacccagcatcacatacactgttaaagctcttttaatagctatgtagagccagacacctctgttttcctattctcactgtaaatgagttacaaataacatggaccatccatagcagtttgaaatcagattgttttgacaatggttttgccatgagtgttttagaatttatatccagctgtcattaaagaccggtaataacagagaagtcgaagaaaaatataacggtcactgaattatacagaaagatgaaggtgctttatagtggtacttactgtcaaagcacaaagcagacatttagctagtttttagaaagacagcgcanannnnnnnnnnnnnnnnnnnnnnnnnnnnnnnnnnnnnnnnnnnnnnnnnnnnnnnnnnnnnnnnnnnnnnnnnnnnnnnnnnnnnnnnnnnnnnnnnnnnnnnnnnnnnnnnnnnnnnnnnnnnnnnnnnnnnnnnnnnnnnnnnnnnnnnnnnnnnnnnnnnnnnnnnnnnnnnnnnnnnnnnnnnnnnnnnnnnnnnnnnnnnnnnnnnnnnnnnnnnnnnnnnnnnnnnnnnnnnnnnnnnnnnnntgaataagngtgaatnngtatttgganaaaanaaagaatgnaagaattaagtaangtgatgtataantntat

SEQ ID NO: 440189 - DNA, 1621 bp, Homo Sapiens
gtcccaggacttcctccctcaagggacagaggacagccagagaggcggtttcagggcctgaggtccggcttctccaggagaagctggctttgaaccagggtgtgtacacgttgcagaaggcctgtcaggacactcaggcgcccaacacactccacgtagttggcagggtacaggccaatgcggcccactctgcaactggccttggcaccagccctgctcgtcctcctcactcatcttcagcagctcctcccctgctcggaagctcagctcatcagcttcctggccagcgtagtcatagagtgccctcacccgaaccccggtggcagccttccggggactctctttcattctgaccactcctcattcctgccccgtgcctggggacccgggggactggggtgggggtgcggtgccatctcttgtaggcacaatgctggtcagggtaacctcatcagggctccggccacccttctctttccggctgattgtcctctgtgtgtccaaggaccactcctcgaactgtggccagttcatggccatgcctggcccgtgggtgctgcgccaccagcgcagatcctcttcgtcactggctgcctcaatgccctggtgcaagtcacggtggagttcatggaacttctcactgctggaaaggtccaggtgctggtgtaaggtgagcagcatatccttgaagaaaagaagccgctggcgctcggcggcctggcaggtctcaaaggcctgttccatgtcctccatgtagcgtggagtgtagcgatgcagctctgccagcgtctgctcatactgagcttttgtcttctcggcctccttggcacagcgttccacccgttcctgcagtttgcgcagctgctcctgggagacggcgctgtctgcctttgcgtggctctccctcgtctgggcggtcttctcatccttccgggctgcgtggtagcttttcttggaagcctcaacctccttcagcctcttcagccagggcttctgggccttgcggaagccgtcctcggccgcccggctctcgcggaagccgcccagcacaggccggtggaaagccccccgctgccaggcgcgcacccgctcactgtcctgcccttgcagcttctcccgcacctccaggtgcagcgcgctcagccgctcagccgccgtgaaaaaggcatgccaggccttctccagtgtgccatactgggggcccttctccacggtccccctccactttcgggcccagtcagccaactgctgggcataagccttctcgatgcgggcgcgctcctggaagcagctgaccaggtccccgcacagccggtgcccgtcctccacccgctgtaccgtgcgcctgtagttgccagcctcccagaaactgccccctaaggcctcccctccagcgtcctcttctggagccatggtgtccccgcagcacggaatggtggcggatttggggctggggcctagagatcacttcaaggacccgggtgtccaactctcaatgctgccaccgtgactctgccgcgtcctcctgggcccctcggcgggtgggggtccggccacgctccggcccgagtcctgccgctcctgggcccgcgccgcggcctcccggagcgcgccgggccct

SEQ ID NO: 440190 - DNA, 1202 bp, Homo Sapiens
  misc_feature (113)..(125): n is a, c, g, or t
  misc_feature (169)..(169): n is a, c, g, or t
  misc_feature (199)..(255): n is a, c, g, or t
  misc_feature (272)..(307): n is a, c, g, or t
  misc_feature (663)..(692): n is a, c, g, or t
  misc_feature (694)..(971): n is a, c, g, or t
  misc_feature (1152)..(1152): n is a, c, g, or t
  misc_feature (1168)..(1168): n is a, c, g, or t
gaccaaatggttcatgcttgtatcccaacactttgggaagccaggtgggagaatgtcttgagccaggaatctgagcccagcctgggcgacaaagcaatacccctatctctacnnnnnnnnnnnnntagccaggtgtagcgacacacacctgtagtcccagctgctcagnaggctaagcaggaggatggcttgggcccannnnnnnnnnnnnnnnnnnnnnnnnnnnnnnnnnnnnnnnnnnnnnnnnnnnnnnnngagtaagaactgtctcnnnnnnnnnnnnnnnnnnnnnnnnnnnnnnnnnnnngaattacccatattctctttgtttttgtttattcacattaacctttattctatctggaatttatttgagtatacttttttctcaaataatcaattgtcctagaaccatgtgtttctcatttatttgaaaggccatctagtgagagatttctccaaatgttggggtagggaagggaggggaagcactttaaagtctgagcctttagaggtgattcctcaagaccctgcttaatcctaacaattttcctcattagtaaaagtcagcccaaactgggggcttgttaagatccttaccagccacatccatctgaaattatgaatttcaaagtatcttacaaatttggtgccacattatcnnnnnnnnnnnnnnnnnnnnnnnnnnnnnngnnnnnnnnnnnnnnnnnnnnnnnnnnnnnnnnnnnnnnnnnnnnnnnnnnnnnnnnnnnnnnnnnnnnnnnnnnnnnnnnnnnnnnnnnnnnnnnnnnnnnnnnnnnnnnnnnnnnnnnnnnnnnnnnnnnnnnnnnnnnnnnnnnnnnnnnnnnnnnnnnnnnnnnnnnnnnnnnnnnnnnnnnnnnnnnnnnnnnnnnnnnnnnnnnnnnnnnnnnnnnnnnnnnnnnnnnnnnnnnnnnnnnnnnnnnnnnnnnnnnnnnnnnnnnnnnnnnnnnggcctttttttaagttttaagtacctataaagaacactgaaaggtgatgtgtgtggatgagctaggaagacctgggaataggctctcctctaatttaatcaaattaatccctgaagcctttctgcaatactgtctttaatgtataactcacttgttatagaagccaggggttttttccccnaatttgtatcattggnataatgtgttattttaaccaaactacaatgtttt

SEQ ID NO: 440191 - DNA, 897 bp, Homo Sapiens
  misc_feature (118)..(129): n is a, c, g, or t
  misc_feature (152)..(209): n is a, c, g, or t
  misc_feature (224)..(285): n is a, c, g, or t
  misc_feature (306)..(409): n is a, c, g, or t
  misc_feature (751)..(816): n is a, c, g, or t
agagacccccgctaaggaacacccgcgttataaaaaatagccccagaagaacaatccacaaaaccgccccatagtggtattttttttaaaaaagacttggggtttcccccccgggggnnnnnnnnnnnngggggggagaatcacggcgccannnnnnnnnnnnnnnnnnnnnnnnnnnnnnnnnnnnnnnnnnnnnnnnnnnnnnnnnnctagggggcgccgcnnnnnnnnnnnnnnnnnnnnnnnnnnnnnnnnnnnnnnnnnnnnnnnnnnnnnnnnnnnnnnataatattataaaattaatannnnnnnnnnnnnnnnnnnnnnnnnnnnnnnnnnnnnnnnnnnnnnnnnnnnnnnnnnnnnnnnnnnnnnnnnnnnnnnnnnnnnnnnnnnnnnnnnnnnnnnncattttaactatgtttattgtgcacttagtaggccagatactcttctgatatttgagaatacagtggtgaataacacaaactccatgctttcaagattcccacacccagatactaagacatattaaaatttacagcaattaaaacagtgtagtttggtacaataacacatatagcaatgatacaaattaggggaaaaaaccctggcttctataacaagtgagtatacattaaagacagtattgcagaatggcttcaggattaatttgattaatttagagagagcctatttcaggtcttcctagctcatccacacacatcacctttcagtgttctttataggnnnnnnnnnnnnnnnnnnnnnnnnnnnnnnnnnnnnnnnnnnnnnnnnnnnnnnnnnnnnnnnnnngtaatcaggcccagtatatgggactgcagtttattttgaagttaggtcggttctgctgtgatttgtctttggtggaagtgg

SEQ ID NO: 440192 - DNA, 1960 bp, Homo Sapiens
  misc_feature (463)..(478): n is a, c, g, or t
  misc_feature (1436)..(1437): n is a, c, g, or t
  misc_feature (1440)..(1440): n is a, c, g, or t
  misc_feature (1442)..(1442): n is a, c, g, or t
tgtgcagaggcggtcagtgaaagggtcaatgtttagtatgaggtgcaagcctagaatccaaaaaggaccactgagtacttcacagactcaggagaggaggaagtgttttctacagcaggcagtctgggacacacggatgaccatcgacacggatgacatcgagtgctcagtccgcctgatgtgcgctggacctgccttgtctcctcaggggacccggtgatgacactttcacaaaaggcactgtgtgaagcgcgaaagggctgccaggacgagcccgggtggactgagggcccaggaaggagcaggtgggggcgtgtgtcccaccgtctcagtggcctgcgcggggtggggagggggagcgatgaggactgacccgagccatgggggtgggcgctggcgagacttgtcccccacgaggtggcccgggctgggcgggagggcagggccgcagggagcatgctgnnnnnnnnnnnnnnnnccgccccgcagggatggggctgcggaggggtgggctgtccacagggcagggcgctggaggcctgtgggaacaagcagacggaggctcctccaggaaggctcacccgaggctcgcaggcactcccctctaggaatctttggcatttttgtccaaacagacttcgacatatgaagtggggacataaccctcttcatcttcatttctccgaatgcgggtccagccatcgcctttgtcttcctctatgacatacaatgtttctccttcaactacggaaatcgttccttcattctgaccttcaaatgtgtagagagctttgcacgtccctatggcagggaggggctcctcatcatcaaactcgtcgtcaaaatccgtggccagcaccttcatctcactctcctgactctgctcctctgtgtaactgccatctgggctctcacggtcctgggcgcagttgttgactgtgggtgggttctggctgtcgtacagtccgctctgccggcgcgcctgctcgttgcgtgctgggagccggccttcaacctcagccagccaggcctcaaatttctgggtctctactcgcagtttctctatattttggctgacttctgctaatttgtgatccaaactggctgggtctcccatctgaggattctttaggtagacatctttcatttttgttatggcatctctttgatccatctccttctgaatttctttatttaactcatcgactttctgctgcagctttttccttctttgttcaggtgggaggttgctgaaatcctccggtgttgcacccagcttgagagaaagcccacgctttaggctcctgaagcagtggattttgggtttggaggtcatgaactcgttgaagcggtgggagaggggttccttttgctgcttgggagactgggggccgttgggaacagcagagggtgaggcagaggcaggagggggaggnngangnttattttttttgatgaacggccataactttcctttggatttgccaccaaatttgaggtctggtttgccttctcctctggaatttgaaaggctgttatctgacacagtgcgcttcattggctgagtgtaatcctcagattcaatgtctccaggaggctcaaaccctgatttataagcttctattaccagctgtgaatcagtttttctgatcaattgattcggctggcttttactattccatccatgcacttcccaatgattgggatcacctgccgatcaacctctgcatatgtcttcatgggactctcccattctcactatcctcctgttcctccatctcttgtattttctggaagatgttggggatgtgagtatggtaatattcatgctgctcatggttgaatttctggagaatggatgagtaatctgctgtgctgtcctctgccatttggtgacgtatgtgagcttgttgtcggccttttcacatccgctttgtttccgggatcctctaggcaccta

SEQ ID NO: 440193 - DNA, 883 bp, Homo Sapiens
  misc_feature (208)..(242): n is a, c, g, or t
  misc_feature (247)..(444): n is a, c, g, or t
  misc_feature (465)..(489): n is a, c, g, or t
  misc_feature (877)..(877): n is a, c, g, or t
gtgtggggacgtgacttctatctcaggacgttaaggtttctcttgtcccaaattccatcccacaggaaatgggctcttgaggtggggatctgactgcagtcccctccctatgaatgtgtggaggagaggaaatagaaaaatggtgaaatgggaaagaagaatgaaggagacccataaacagacggcagctgggtgcgatgctcacgcnnnnnnnnnnnnnnnnnnnnnnnnnnnnnnnnnnnagatnnnnnnnnnnnnnnnnnnnnnnnnnnnnnnnnnnnnnnnnnnnnnnnnnnnnnnnnnnnnnnnnnnnnnnnnnnnnnnnnnnnnnnnnnnnnnnnnnnnnnnnnnnnnnnnnnnnnnnnnnnnnnnnnnnnnnnnnnnnnnnnnnnnnnnnnnnnnnnnnnnnnnnnnnnnnnnnnnnnnnnnnnnnnnnnnnnnnnngacgagcaaaactccatctcnnnnnnnnnnnnnnnnnnnnnnnnngatggcaaagtagatggtggatgagggatttgcagagacagtgcatgaagatgctgagaaaggagcagggggagaaaagcaactagagaaatttagagaaaaactgggtttctagagagataaagttcagcaagatagggagaggggcagaaaaggggaggctcctcagatggagagttggggagagaaggagggatttggagccagggcagacagagcagcatggtgctgggagagcaagaggggcagccagtgataaggagagcacagggagaaccacagcctggggagaactgggatctggggatgccagagaggggacaggtggatatagcagggaagaggggatttaacaggggaagctagggggcagcagagacggggggangaaaga

SEQ ID NO: 440194 - DNA, 849 bp, Homo Sapiens
ataaaactcaggatattttaattggacattagcacaaagttttgataattaatgtaaatgaaccttgtctacaaagcgaagcacggcctgctggtgagccacacagatactgctccttcagattgaggttgtacatgcccccaaaggctcgcttcattgctacgattctctacttaaatccccattcacaggctattgcctcagaccctctggaggaggggccagggggttagctggctttgaatagcatgtagagcacaggcagtgtggccacaaatgtcacacaggtgaccagggtgctatagatggtgttcctgttgacttgggcttctagtctctgtttcgtgtctgccagtgccaagatcatgctcccctgttccagcacgaagctgtgcatagccccgtttgctggttccaccaggcctgggtgtgctgcagactttacaagctgaaccaccccagccatttggctacaagtcttttctaggccatcaagctgctctcgtaagccttctagacatgaatggacttgcctggaatgactaagctgctctttcaaggcagctgaaaggacatctacatctctgtctctggtcgggggactacctgcctgtgacccagagtcctgccctggcccagcagcatgtaccaggcccctcaggtccaccatgagattgtggaggtccctctgctggcgggagtagctagacgcctgttctcgaatggcctcttggagactcacaggccccttctgcgcctccaggagtaaagccttcagctcctgtagtcgcacacggttcacataggtggagccagccacaccaatcagggcccccaggactgagcccc

SEQ ID NO: 440195 - DNA, 1531 bp, Homo Sapiens
  misc_feature (3)..(3): n is a, c, g, or t
  misc_feature (41)..(41): n is a, c, g, or t
  misc_feature (92)..(92): n is a, c, g, or t
  misc_feature (114)..(114): n is a, c, g, or t
  misc_feature (122)..(122): n is a, c, g, or t
  misc_feature (124)..(124): n is a, c, g, or t
  misc_feature (132)..(132): n is a, c, g, or t
  misc_feature (134)..(134): n is a, c, g, or t
  misc_feature (142)..(142): n is a, c, g, or t
  misc_feature (154)..(164): n is a, c, g, or t
  misc_feature (223)..(223): n is a, c, g, or t
  misc_feature (1505)..(1505): n is a, c, g, or t
tgnggtgaccttgtctacaaagccccgctgcctgccggtgngccacacagatactgctccttcaggttggggttgtacatgcccccaaaggntcgcttcattgctacgattctntacttaantncacattcncngctattgngtcggggcctcnnnnnnnnnnnccaggggttagctggctttgaatagcatgtagagcacaggcagtgtggccacaaatgtnacacaggtgaccagggtgctatagatggtgttcctgttgacttgggcttctagtctctgctccgtgtctgacagtgccaagatcatgctcccctgctccagcaagaagctgggcatagccccgtctgctggttccaccaggcctgggtgtgctgcagactttacaagctgaaccaccccagccatttggctacaagtcttttctaggccatcaagctgctctcgtaagccttctagacatgaatggacttgcctggaatgactaagctgctctttcaaggcagctgaaaggacatctacatctctgtctctggtcgggggactacctgcctgtgacccagagtcctgccctggcccagcagcatgtaccaggcccctcaggtccaccacgagattgtggaggtccctctgctggcgggagtagctagacgcctgttctcgaatggcctcttggagactcacaggccccttctgcgcctccaggagtaaagccttcagctcctgtagtcgcacacggttcacataggtggagccagccacaccaatcagggcccccaggactgagccaatgagggaccagttcttggtcctctcagcccttgtgcgctccttctcatgactttcccgcacagctgcagagaagagggagaacttctctcgctcagagtcttctgcacgcagataggctgtgcgaagcctcttctcctcctgcagcatcctgtgctcgagagtagccagttccaagtactgactgtcctccctggagacacggtccaagcggtccctcacctccttcagcttggcctggtgaacttccaagtcctcccgagcctctcggacaagccctcgagccaccatgaacactttctcagcctctgtcacctttccctgggcctctcgaacctcgttgagtccaacaaactcttcatatctgtcccaccaagtcttggctgtggaggtcgctcgttgctgaatgctgtgccccagggctcttcccagtgctgggaggcggtggtgcagccccagggccacctcctcaggtcttttctctccgggctggcttgggcctgggctgcagagagtcctggtcatgaagaggtcccttccaaggaggcccctccgaaccagtacgtggggcacacccacgatgtgctgcatggcaaacccagggctgcgccccatcatcctgagatctgcagtgctcttcccgcgcacggccacaggcctgggaggccgtccggttaagtacccctcctacggttccgattctacctggcaggacnaccctagctcctcgtacctggcgtgc

SEQ ID NO: 440196 - DNA, 501 bp, Homo Sapiens
tcgccttagcctccagagtagctagggcgagagtttccgtcgaactagttcgtcggagactcatcccggcccaagccagcccggagagaaaagacctgaggaggtggccctggggctgcacacatccgcactcccagcactgggaagagccctggggcacagcaattcagccacgagcgacctccacagccaagacttggtgggacagatatgaagagtttgttggactcaacgaggttcgagaggcccagggaaaggtgacagaggctgagaaagtgcttcatggtggctcgagggcttgtccgagaggctcgggaggacttggaagttcacccggccaagctgaaggaggtgagggaccgcttggaccgtgtctccagggaggaccgtcagtacttggtactggctactctcgacgcacaggatgctcgcaggaggagtagaggcttcgcacagcctatcatgcgtgcagcagactctgacgagagtctccgtcgaact

SEQ ID NO: 440197 - DNA, 1985 bp, Homo Sapiens
aggttttagcagcacttttacttccacatccaaactccctgggtcctcacaacagccctgtgaggtaggtagggtaggaaggtttcagagatccccatttatagatgaggatgctgaggcacagagaggtgaagtgacttgtccaaggtcatacaaccagcagtgtagagggctcaaagccagcattcctccacttgaactcctgcgctccggccctctggcagttcccacatcctctctattctctctgtgtcccccaccctctcaactctcctgggtctacagggaccctaaaggcagcctggcagctgagatttttcaggaatggcaactggggtaggcctggtcaactccagataggaactgaccctgaagagcatgaggccagctttgcttctccccatttcccagttggatggaaggcctagtaggtcccagggcaaggatggagctaggcatgattcatgaacgaatggtgataaaggtaggtgtaagcatatgtgtgtcctgcactaaagacaaaggctcccttaacccaaggccccaaggcagtgtttcaagtgctcaccccccatgcctctctcatcccacagagccacagtgagtgtcctcagcagcaaaaggagccatagaaatagctgcctctggcaatgagctgctccagtggacagctcccaccaagccttcagaccccatcacgcagacacagtgcctccacggcttgactggggccctgggccacacccccaataacaaacagccggggcccagcctgcagactagagcaggagcagcgggcagtgggcatggcaggcaatgcctcccagcgccgccgtgcaaggctaaagctctccacagagcccaaaggacatggctggtttccaaggcccccaatggccacaatgtggcccccaagggacccaaccacaaagtctgccctcttatccctcatgcgcaggctgcggggcaatttggtccaggacccatgctccaggtcaaacatctccacagtgttgacaaagtgtgggcgagagtagaagttgtggggcccaggctgctgcaggccacccaggctaaagacgctgccttcagccatggcgcagccagcaaaggcccgacggctgggtaggcttggatgccgggtccatgtacgggcctccagatcaaaggcttcaaaagcagtcaccgggagcttgccctggcggccccccaggacatagatcttgttcccgtgcaggaaggtggaggccccatagcagggtgtgggcatggagggtagcgaaagccagcagtcccgacggggctcatacacacgtacctgggcctggggggccgtgtcagggcccattccccccagagcatacaccataccatctctctccacagttgcaacccccatggctgcttgagggagggtggcccgacgctcccagcggccctcatccatcaggaaggcctctacagcagctaccgggctctggacctcatccacaccacccaccactagcacctgcttgcccagaactaccgcagctgcaccagcccgggcagtgggcaggggtgccagtgccagccatgtgtgcgaggccatgtccagtgtctcagcagtgtccaggggcagtccagcccggccacaaccccccaacaccagcaggtgcccatcttggtgtgccactgtgccatagacccggcaagtgggcatgggggggaacacttgccaagcaaaggcccggccacctcctgcagacatggtgttcactgccagtggcaggccatgctgtctgctcagactgtaggcctcactggggaggcatgacagggcctcatcttgattctgccagggccacaagaggtatatgaccagtccagggaccttgccttcacccgccggtgctccgatgctgccagggtacggggtccgccgttccgcctccgttgacgcgggatctggctggggctgaagtcgggctctggcggggctccgg

SEQ ID NO: 440198 - DNA, 434 bp, Homo Sapiens
agcagcacttttacttccacatccaaacgcgctgggtcctcacaacagccctgtgaggtaggtagggtaagattgtatccgggtgtgacaatgtagggtaaatctgtagctctcagtagataaacaccttatttaggtctggaggcattttgctatgttattgagtcatggaaacctattaaaagagctctatgggaaatccagtctatattttgaacaaaacaagctgtctttttcattgtcactgaccctttacagacacacagtacataatcttgattgtgcttcattggtatttattgcacatggaccaattcctcacacagtagttagttgcaccagagtataaatacttggtaaaacacacaagaggaagtagaatttacacacaagtgctaactttcaccagcaaattcacgtgggcacttggacat

SEQ ID NO: 440199 - DNA, 1752 bp, Homo Sapiens
  misc_feature (868)..(930): n is a, c, g, or t
tttttcaaagaggaaaaaagcacgtttgttgttggtaggcgggcgtgaatgggagggttcttcaccttctccaacacctcgtatagatgggacgttgcagggcaatagaaaaggcagcagatgggggcgtgttttgccccactctgtacaatatagaagaatctcatatagatactttgtataaaagccacgtgtcctcatttgtgtcctcttattggctggctgggctgggggtactgggggacaaagaagctggggtgatagaccaggacacagggataccccatggtccccttcctctggctgtcccctggtggggtcactttggatccttggtgggagcatagcacagctccagtggccgggacaccttccagaatttctcattcaccagctccagggtcagcgagccattcaacgtcgtgaacgccccgcctccaggtgcgatgtagatggtgtactgcttttcactgacgccctccaggctgggcaaagcaggctcctcaggaccgtcacctcctccggcacccccaccctccccgccacacccatcaggtcctccggtgtcagaggcgccccctccaggccctcctggctcccctgcttcctgctgttgcctccgctcgagggcaatgcgccgggccaattactttgagaggtggtccaactgtggcattcccagttgtcttcacatacctctgtctggcagtattctcccttctctcacgagcaggggcgtggggccggaacatcgagctcaatttctccacctggctctggggggctgggggcactcaggagcactcgcggggcccagcgttccccctcccagagtccctccccggtcaccagagtcttccgaaccggnnnnnnnnnnnnnnnnnnnnnnnnnnnnnnnnnnnnnnnnnnnnnnnnnnnnnnnnnnnnnnnctccacggggtcgcttgggagcagggcctggggcagagtcaggggcggagtctgagctcacatcttctccatccccttctccctccccgggctctccttcccccccactcatcgttgtggtctgatctgaccctggtatcggccgcctcacacgctgggccctgtgcatggcctgcatgcgtagcccctcctcaatgctggagctcaatgcctgctggttgtgcaggcggctcaggcggataagcactcggtcttgatgggcctcgtattcctcccggctaggatagatcttagagatcagggcatcaaagttggggtctggccgtagggatcgcttggacaccagcttctttcggcaggtaggacactccttgttcccgctccgtagggctgtgacaatgcagtcagagcagaatctgtggaggcactccttggtggtcatcgtattcttcagcatgtccaggcagatagggcacatgagttctgaatgcagtgaccgaggggaaacagcaatctctgtgccatccattatggcttcctgcggggtccggtgcagctcatacagactcagttcccacgttttgctggcattctgggcattcgccggcgtcgtcatggtgaccgggcgcagaccccccaccagggctccacagccgaggagaaggcgaagaaggccagctccagccgttcgcgctcccgccgccgccgcgcctctccctaggcccgggctcctgggccaagttcgctcggtccgcaaccgctgctcagacagcagctcccgccaccgccgccgccatggcccgggcgctggggccctacatc

SEQ ID NO: 440200 - DNA, 1414 bp, Homo Sapiens
  misc_feature (1075)..(1075): n is a, c, g, or t
  misc_feature (1105)..(1105): n is a, c, g, or t
  misc_feature (1234)..(1234): n is a, c, g, or t
cttcaggggctcccacaggcaggacgggctcccgagcgggctgcagatggcccagctcccccggggcaggtgaggggctgaggcctgatcccccgtggcccctttctcccacctgcatcgcttgcagaaggggttggctgccactgtttaccaaacttccacacggcacagtggtagtcagagcggacggccagcagagctgaggagggatggaaagtgccatggggtcaggtagcaggtcagccagtgagggaggaaagtgttatataagggccttactttctccctggacggtgcattgtcgccacttgccggacaggtccctggagctgtatgcgtccaggtttcccaaggaattggggattgtcacctggggtcagaacgacctcttggaaatctgggcctctcactaaggatcagtgcatgagctatgatcactgcaagccccccaaattcctgcccttctctggaccatgccaagagcacctcctctaccagaggcgagcccgctggaatctcctgtctcgcaagaaaggatacgcagcctgtcctgggcgcctccagcagggtagaccagctgcccgaactggggtgtccttccaggaacccaggccagcgcgcccccagtgcaggcctcatccagaagcagctgctcccaccgcagcaccagctcctcgtgcagcagctctgccaagtggctcgccaccgacgtgcccaggatggggcccccgaggatagagaagcggcgctgtcggttgctgaggtaagcccagggacacccccagggctggtgtccaccgaggtcctggagcagcttcttcacactgaccactgtcttcttcttagtgcggctctgcatggaaaggccttgtcaggctcacacaccctcgagttcacccctgaaggacagcagggagtccccacccctggagtcacgggccactcacccccgctccctccagcttgaaattctccagcatcagcttccccaggggcgcaaaggctacgtctccatgatccaagaggaaccggctgctcagtcacatccagcacgactcggggccgcttccgatancggtaccctccgcggaaaagcaggtcccgngcagtcaggccagggtcccagggatcgatgaggggaggcagcatggggagaggcccaggggttgccggctcccacagcaggtccttggtcacatgcagtgccccattctctgagttctggggctgggcntctggcagagtcagtgcgtctcgccagctgcacatgaaagagaggtcagggacgtcgctcagaccaagggggccggtcagaaacaatgcagggcggagggagctggggaagtccatcctggaaacaaggaccaagcaccacactggccacctcgagagactggaagctggtaaggggcgc

SEQ ID NO: 440201 - DNA, 1097 bp, Homo Sapiens
  misc_feature (83)..(91): n is a, c, g, or t
ctatggggtccggagggccctcctgggaatatcggcgccccttctcgaaagattccttgccccgagtcttattccccgccaannnnnnnnnattttcctgcccttttttgtggccttgtccataaccccctccttttgcaggggggacccccgctgaattctcccgttctcgcaagaaaagaattcccggccttttttgggcgcctccaagcagggtagaacaactgcccgaactgggggttccttccaggaactcaggccagcgcccccccagtgcaggcctcatccagaagcaggggctccccccgcagcaccagctcctcgtgcagcagctctgccaagtggctcgccaccgacgtgccccaggatggggcccccgaggatagagaagcggcgctgtcggttgctgaggtaagcccagggacacccccgctccctcacagcttgaaattctccagcatcagcttccccaggggcgcaaacggctacgtctccatgatccatagatggaatcggctgctctgctcagtcacatccagcacagactcggggccgcttccagataccggtaccctcctcaggaaaagcaggtcccggtcagtcagtcacagggtcccagggatcagatgagggtgaggcagcatgtgggtagaggcccaggggtttccggctcccacagcaggtccttggtcacatgcagtgcacccattctctgagttctggggctgggcctctggcagagtctagtgcagtctcgccagctgcacatgtaaagagaggtcagggacagtcgctcagaccaagggggccggtcagaaacaatttcagggcggagggagtctgtgggaagtccatcctggaaacaaggaccaagcaccacatctggccacctcgagagactggaagctggtaaggggcagccagagttcagtgaccccaggcctcgtcgtggtcgtctggaatatgggcctcggcgtgatgctcgccggaccctggcaccacgagggaaatctcaagtagaacacccagctttggcactcgggacgggtcagccccgccgcagctacccacatcccgggaattccggaccggtccag

SEQ ID NO: 440202 - DNA, 1016 bp, Homo Sapiens
  misc_feature (126)..(148): n is a, c, g, or t
  misc_feature (439)..(448): n is a, c, g, or t
  misc_feature (743)..(763): n is a, c, g, or t
aattcccgggatcatcttctcacaggtagtatgttagtaaaattttgcaattcgctggtcacacagctcccggatgaagataacagttggtagaccaaaaggtgacctcgcttagtatattgaaannnnnnnnnnnnnnnnnnnnnnngaactgaatcataccacgtgctgcctatgggacttcagttactgtttcctgagttactgtttatccgctggcaatggtgtgatttgtctggatcagatccgtgctattccccaacccacctccagataatgtgagaaaatagccatgtcagtatgtaggaactctgatggtgctcagatttgtgtgttcaatcaatgggcttaaatcagcaaaatattatgcctaaagtaaatctgttcttaacaagggctctaccactgcattttcacatgtaccttcagggggttatcnnnnnnnnnncccctcctattttaatcagcaaaatccataccaaaacaacgacaacaacgccctcttaagggaccaccctttggtcaatcataacatgctgtttaaagcagctgtttacaggatgtgtagtggtatgccccttgtcatatactcttagcatatctttttttcctttggctttgcatggcttttcttcaggtactgtctcggtatcattctgctaatcattgttacagaatggtgacttcatttgtgctaacagtacaacagcagatttgggtcaggcttaatctaagtgttaacnnnnnnnnnnnnnnnnnnnnnggattgatgactgtctcactttgactatacccatgttttgcatgcaatgacctcatgcatggttttcttaactagctaatattaacaatttattccatataaaaatggaattttgcaacatcctttaataaggtgagggaagcatgaacctcagacttctggcactattacatagtaagcacatgaagtagtttgataataaatagcagttctagtacttcacatttcacccgtgtgtgcaatgcctttttct

SEQ ID NO: 440203 - DNA, 738 bp, Homo Sapiens
tttttttacattccacatttttaagtttattgtatatttattgtaaatgtgttgcatattgtattagtctgcccaggactgccataacacaatacttcagattgggtggtttaaacaacagaaacttgtcttttcacagttctgttttctggaagtcccagatcaaggtgctggtccgtgtgatttctggggagggctctccttggcttgccgatggcctccttctctggtgcaggcacggggggagagcaggcgagccccttgcgtctcttctcagaaagacgaatcctgttggatgagggccccaccctcaggaccgatgtaaccttaatgacttctgtagaggccccatctccaaatacagacatgctgcagttaggtcttcagctatttagggagacataaacgttcaggccgtaactcctatcaggtgtattaagtatgttcacccctgattttaataacgttctcactggtgctttgtggctgcagtacagttgaaatcataatgatttggactctgtatttcaagtttatctcattatgtacctgctgtctaccttgccctgacttaagtgctttgcaagcaattttcttaaatccttacaaccacttaccaggtagatattcggcagagaagaaaactaaagcttagatttccccaggttacagccagcaacagaggataagaatttgaaacctaggcctgcatggctgccaagcttgcctcgtctgtgg

SEQ ID NO: 440204 - DNA, 453 bp, Homo Sapiens
acattccacatttgttagtttattgtatatttattgtaaatgtgttgcatattgtattagtctgcccaggactgccataacaaaatacttcagattgggtggtttaaacaacagaaacttgtcttttcacagttctgttttctggaagtcccagatcaaggtgctggtccgtgtgatttctggggagggctctccttggcttgccgatggcctccttctctggtgcaggcacggaggggagagcaggcgagccccttgcgtctcttctcagaaagacgaatcctgttggatgagggccccaccctcaggaccgatgtaaccttaatgacttctgtagaggccccatctccaaatacagacatgctgcagttaggtcttcagcatttgttctttaatagaattttcaatgccagcttgcaccattaagtccttgacattcttctgtaagtcctc

SEQ ID NO: 440205 - DNA, 1528 bp, Homo Sapiens
  misc_feature (369)..(369): n is a, c, g, or t
  misc_feature (1107)..(1107): n is a, c, g, or t
  misc_feature (1314)..(1314): n is a, c, g, or t
  misc_feature (1348)..(1348): n is a, c, g, or t
agcaaaccacacattctccaacacatacacattaggtgcggcacatagggggcacacatacacaaaacagtcccgcttcacccaccaaaaggcccgcgtgtcactaaggcgctaactacagcagcacttgtgtctcgagcagtgcacgaggttgcaataggaattataaaacaagaaggataaaacaaccaacttcagttaaaaacccccaaaagctcaggttctgaaatgcctctgagacgcttcacactcagcctgaagggtcagttcactgggctctccaggcggcacaccccaccttcgattgccacagactgtcctgccaccgcaccaggaggaagtcttgaaatgtgagtcttggctttcccnatcctgggctgacatatatccgacacacatgctctccgtcgtgtggctcccacagaaattccactagaagtgtctgcttattttgggaggagtcaggctcggcagaacatctgcatgaacggaggacaatcactccgccaagcacgccatcttcactggcaaggaaaggtgaactgataaacttgttttgcatagtctccaacagggcttggtgagcatcctcagcttgtaaagcatgtgaacattctctagccagtatggtgcgcacaagatgctctccacatcctgaggtactcacagctgtggagtaggggttatgagctccagtattttcagcccagcagccacatccataaagagcagcctgcccaactctccccggatgtttcaaggccaagcctccactggagacagcagcagcaacattcccttcgtggtccacaaccacagcgcctaccgtgtccaaagtgcctgagtcattttcttgtggtcatgatgttaggagggcaagagggtattccatgatctactgcccatctgtaggctccttctccaactaaaaagcagggaggaattctgccagccgagagcttgcccttctgcccttcacataagagtctgttggcaaccgagactgggttcttgattccactcagtgctccaactgctccaaaatttaaggattttccatccattatgctggcatcacactcaatttcacctaacagatttagattngatcccattcctgcatttgtaaaaggagaatcctcaagttccaccagtgctgcagtgactgcgtcagttgcaagagcaccggcctgcagcttttcaattgccttctgacaagctcgtttgcatacatgtttatactccttggctttggattcagaatgataacctgcacctgcatgcaccaacacaaagcctcctcgtttctctttntaggactgctttgtttccaactctttggctgttnttttaccagccgaaacctgagatgatctggaaggcagcccttctccagaactcatccccttctccatggtcattctccaagattaccatcttctactgagaaaggggcatacttccatccaaaagtaattgcaggagaggaattaccccgcttcagccccgagccttcacatcccgggaa

SEQ ID NO: 440206 - DNA, 436 bp, Homo Sapiens
ccccctacatgtaggtgtatggccccttttccaaaaacaatttttccctgaattcctagtgtgaggattcctcccttttacaaatgccaggaatgggatcctaatcctaaatctgttaggtgaaattgagtgtgatgcccagcataatggatggaaaatccttaaattttggagcagttggagcactgagtggaatcaagaacccagtctcggttgccaacagactcttatgtgaagggcagaagggcaagctctcggctggcagaattcctccctgctttttagttggagaaggagcctacagatgggcagtagatcatggaataccctcttgccctcctaacatcatgaccacaagattcagtttagctgcatttaaaagaaacaagaggaaactagagctggcagaaagggtggacacagattttatgcaact

SEQ ID NO: 440207 - DNA, 855 bp, Homo Sapiens
gcattcttaggattaattagataagagccatcctgttggtttcacagcagtcacccatggagaacagctgttccttcctaggtgttttgctgttggtctgctgggtctcaattcataacaattggtttgcgggtgaaaggaaaccatattgtcccgtcggaatctgtgtgccagcttttagagatgttctgaggaagaagtgagtttgctggtgctcacatccggtggacacattactttgatacaatgtaaagaaagtcatagtatgggttctttggtggtgggcaggtttattcaaaggagctgatccagaacggttcctgttccactgtgttagaggttcatcgtccatctgttccatccgtgctgaattctgcagcccacgatgttcccccgaggctgggaggtgggtcggctcctatgcttcttgtgtgcagccttcctctttatcatggtaacagacacactgccgtggccagcgcccgtcctggaccgctgccctgcagctgcctttccaaacggggtcttcatgcccggccaggaggcgcagattccccaccgtcccggattgcgggcctcaagtgcacaaatcggacacctcgccgttgcctccgcagtgagcctatggaggaggaaaatcagcgggcgagcagcccggtgcttgcaaaagctgggagaggatgatccataggcaatgagtgtctctaagagggcggcggggcaggcgaagatgaccgtggcggcgtcccttgctcttggctcctgcgtcctccgccttcctggtggcggcggcggtggcggtggccgcagcccctctcccacatcggactcccactagtcgctgctgcgccgcag

SEQ ID NO: 440208 - DNA, 1775 bp, Homo Sapiens
  misc_feature (136)..(136): n is a, c, g, or t
tatacagatgttgatttactctttgggtaccctgtatttcccagtttttctataaatcacatccatttgcttctgtcataagaaaaaataatatctattatcatcctttattttgatcaaaacaaatcaatttttnaaaaaatcttaggtttttttaagaagcagaaataatttccaaattgcctccagagacaatgattttatcctctgcagaagctggtcagaaccttcttgatcacagccccagttagatacagggaagaatggcgcttcctacagcttcagcggcctcagctcagctctgtgccccaaggccaaaccagctcatctccagccccatccatcctattcttgctgagtcaccagtttcattcattttcaggagccatgtccccttggtcagaaggaaccatatgaccagctttcagaatccagtagaaagcaaggttcttgtaggacttgacaaaagcagatgtttccaaagatttagggtcactgtacagggccttccacttcagctgactgaatttaggcagttctggccacttcagtttccgcacccaggcctcctgacccatggtatctacgatgagatccagctgtccattatacaccgtcacgttgatccctgcctccagcaactcgtccacaatgctaatgactggcttcatgaagtcctcctccatgttcacaaagacgttggtagcctggcctccccaggattgatcctcaggaataattttgagcttctttctgatggggccattcatgagctggcttaaggcatctcgttgtaggtgtctcacgtggcgctgacaaagacaaactaggtggctctgtgtgaattctagactcgactccattgtagacgtgggagtgcttttagttaagatgttatagaagttcaccccatctgtgttctgttcaatgatcatttctgctttcccccacagctctgtggcctctctgtagagccccttatttacggcattcagtacttgctctgcaaccttagacacctctgccagacctttgtcttcgagaagagacatgctgtacaggtaaggtccccaggagagcaccgaatcaacaggggagatccaggaatcacccaaggcaacccccgcaaagttgcacttgatggtccctcgctgaatggccttataaagctctagaccaatgccagctgccatttttcctccataggactctgagaaaatgtagaatggaactgtctggaattctttgtggcaactgaagaaggtcttcaggagaaccatcatgtctgaagccaccatagccaggtccttggcataggcaccactaccattcacataactgaacccagtgcccacgggattatccacaaataggagactggcagcctggagccaggtggttttccgtggtttgagatcactgtcaaggggcccaatttcctcaaagtttccaaatccagtgctagaaccgcctggaccgccctgaagccacatgaccaggggcagttctgagaagttcttgcaggagttggtggcataatagagccaccagaacatgtaggcatccttgcggaccgtcacataatcccatacttccttgccctcctctgtgggccagtcaatgacagctcctgcgttcaggcccagcagcagcggcagcagcagcaaccaccgcgggacgggagagcgccgcagtgccagctccatgacaagtaccgcacggcagcatcagcaacccgctctcgacgaattcgagctcggccgatttggcctgat

SEQ ID NO: 440209 - DNA, 1499 bp, Homo Sapiens
  misc_feature (452)..(452): n is a, c, g, or t
  misc_feature (1170)..(1184): n is a, c, g, or t
  misc_feature (1201)..(1201): n is a, c, g, or t
  misc_feature (1205)..(1205): n is a, c, g, or t
  misc_feature (1207)..(1208): n is a, c, g, or t
  misc_feature (1214)..(1214): n is a, c, g, or t
  misc_feature (1220)..(1220): n is a, c, g, or t
  misc_feature (1224)..(1236): n is a, c, g, or t
  misc_feature (1296)..(1369): n is a, c, g, or t
  misc_feature (1376)..(1376): n is a, c, g, or t
  misc_feature (1427)..(1427): n is a, c, g, or t
  misc_feature (1441)..(1442): n is a, c, g, or t
  misc_feature (1454)..(1454): n is a, c, g, or t
  misc_feature (1456)..(1456): n is a, c, g, or t
  misc_feature (1461)..(1462): n is a, c, g, or t
  misc_feature (1466)..(1466): n is a, c, g, or t
ggctggtaccggtccggaattcccgggatgtccatccaaatgacgcagaactaccctcccgccatcaagtacccggaccacctgcacatctccacctcgccctgctgaggcccgcccctcggagctccccctgcctcctcctcctcctcgtcttagggggtctccctgcaatgcagcgcccccttccgtcctcgggactcctcgctcccacccggaggaggctgcgccagttttaggccccgccctcctcccaatggctccgcccacagactcccttatttcaatggccgcgccctcttttcccgacctctccttttcattggtccctctcactcccaaatgactcctccccttcgttggcccgcccctttcctctggtccctcctctccaagaaaattagctcctccctcgttctccacctgctctgagctgggagcagccagaggcgatngcaagcgcccagctccccagagctccccaacctcggacctcaccgcagggcgctgggctggagagcaggttcgggcagccgtcgggaataccgaccatcctcttctcccttctaacctgggcttcctttttccctgcctaatctcacctcctgacctgctgggtcctccggtgcagtgggagggccggcttgctccacccgcagccccggggtggcgtagggaagggggctggaagccacgggtacggttaacctggcccttccctccccatctcccctacttccctggaaggtcccattctttctcaccggctgggctcttttctgcttcctgaaggttacctgccttttagggggctcttgtctaaaggatcttcttgctttctcagctatccttggcttctttttcgtcttcctcctcctttaactctttttcttcctttcctcccttcaccctttcgtcccaagcccttgggtgcatcccgccctaggcgcacaccagacggccagaatggggaccctagggtggagggaattcccccacgccatctccgcacctgtgcccgcctctcccccctcgaggccccttcgagggagggaggggcagtagtcggggtccacaccccccccaaacctctaagtcttccattttctggctctcctcctcattgacgtccctcttcccccctcagaaccccaactctggcctctttcaagnnnnnnnnnnnnnnnttgcacaaattttggcnccanannagctcnccaccnactnnnnnnnnnnnnnttattagggaaagaggggcgaggtagcacagtgctgtacaccgaaccagaatggcccccnnnnnnnnnnnnnnnnnnnnnnnnnnnnnnnnnnnnnnnnnnnnnnnnnnnnnnnnnnnnnnnnnnnnnnnnnncccgccncagttaacctgactttacgcagcgatttttaacgaggctggggggaggggngcactggggtgggnncagggtgggccncngcgannggcnctgttatttaccgtgtatcatatgtaaatatcg

SEQ ID NO: 440210 - DNA, 406 bp, Homo Sapiens
  misc_feature (359)..(359): n is a, c, g, or t
agaagcccacaaaaatggaaacactttagaaggtttttgggggggttgttcgaccccccgcttactgccccctcccctccctcgacggggccctcgaggggggaagaggcgggcacaggtgcggagatggcgtgggggaattccctccaccctagggtccccattctggccgtctggtgctgccctagggcgggatgcacccaagggcttgggacgaacgggtgaagggaggaaaggagagaaagagttaaaggaggaggaagacgaaaaagaagccaaggatagctgagaaagcaagaagatcctttagacaagagccccctaaaaggcaggtaaccttcaggaagcagaaaagaggnggaggaggaggaggcaggcagggggagctccgagggtgcgcctcagc

SEQ ID NO: 440211 - DNA, 960 bp, Homo Sapiens
  misc_feature (668)..(668): n is a, c, g, or t
  misc_feature (820)..(820): n is a, c, g, or t
  misc_feature (871)..(871): n is a, c, g, or t
  misc_feature (876)..(876): n is a, c, g, or t
  misc_feature (899)..(899): n is a, c, g, or t
  misc_feature (901)..(901): n is a, c, g, or t
  misc_feature (905)..(905): n is a, c, g, or t
  misc_feature (913)..(913): n is a, c, g, or t
  misc_feature (918)..(918): n is a, c, g, or t
  misc_feature (930)..(930): n is a, c, g, or t
  misc_feature (935)..(935): n is a, c, g, or t
  misc_feature (946)..(946): n is a, c, g, or t
  misc_feature (952)..(952): n is a, c, g, or t
  misc_feature (955)..(956): n is a, c, g, or t
attgttcaagcagaaaacaagctgcttttattacagtatgatgtcatgactcatttgtaacagatccagcctcagggacagccctgtaaggcagcaagtggggctggctccaaatgggtatgagtctcagaatctttggtaaggcagaactgaactgggctgagaggtggtcttaaggcctgggcaggctctattctctctggactggctgcagcctgcagtctaggagaggcccagtacagcctggagctcctgagccttgtcaacaggcagtgagcccagagctgcttgaaagctgtcggtgtgctgtttggccaggaacgtcaggagcagcaacagtgcggccttggtgtctggtgggatcttgttgtcagccagaatgaggctgcagatacgcagaagctcgggagccacatctataacctggtcagggctgctctggtacaggaagctgaagaggcgcccaatggtgacccactcctccaagtcctccttcagtggcagggcatgcagtagggcagccagcacctggggctctggtttcctggtgggactggccatcaacaggcgggcaagtgccccacagatgttgtcacggacacgatcatgtcgctcccgcgccaggaggggaaaaggagccccagcagcttggggaagtgttcctgggnagggtggcccccatgctctgccagcacgcccatcccgaagatggcattgcttcgcacctcggggtctgcctcttgggcggtgctcaacagcacagggagcagccgagacacaaactgggctgaggcagcacccaggccctgaatagtctctnccaaggtccccactgcaaaggacttctctgccactgtgcagccctgttttntcttncacaccaataatggcaggaaacngnaaanaatggggnaaagngtctccccaccncggtnccagggcaggntggctntcnncgtg

SEQ ID NO: 440212 - DNA, 1526 bp, Homo Sapiens
  misc_feature (976)..(976): n is a, c, g, or t
gcctccctccaagatctttactcacgttgtcaccttagtgacggctccctccctaaccatcctatttaaaattgcagcccgttcaacacccattcctccttctccatccttgctctgcttcctccctttgacctgtcactctttaatccagtggcattctgattcaatggtgactgggagcaggacctaaggaggtgcgtcatctgtagagaatttgaaaataatcgtgaaataaactcaaagtgggtttgctctttatgagccccgcacaccagcaattctaaattctgttatcaatatactttcctgccagggtgggccgcccccaccgattctcctctatcttaatacactatgtgtttcccttgtttattttgcttattgttcatttccatgcactagaatataagctccgcgagggcagtatattttgtctgttttgttcaccactgtgtccctcgtgtctgccacatggtgtgtgctcagtaagctttagctgaatgaatgaagtggaggatgtcgacgttcccttagttgggggttatcaggagggcttcctggatgaattggtgtctatattgcctgtccttaaagaggaggaaggtgctctaggcagaaggaacagcaggtacaaaagcaacttgactgtcagggtcattagctaagagtaggagtcagagggatgagtgggtgtcgttcaccagaatttacccttcaaaatgtcagtgcttagtaaatgaatgtgttcctttattactagttgttggagggtccttgttgacatcttgcagaggtctggctgtcacttttaatcagaatggctattccccactcctgctgaagagctccaggcctggcgggggtgggctggcgggctgtggtggtggtaagggctgtcccccagcacactgttagaactttacttatcctcttgcttgaagtgtgggagctggagaccattcaggaagctgtggtnacagtcccagacagggtccctaaaagcaaggagccattcccaatgcttcctccttagggaagccttccctactttctcttccctcttctgggcagagtttgtaccttcctcctttttgctctctgtttatttctttaatttaacacttaacaacataataccatctttatttgttccatgtttgtatcttctactgaatgtggcttcaagaacagaaagcacagaacgtggcacgttggaggaaatcagtaagtgtttgctaaaggtccaacaatgaaacagaacagatatatccagtgctatgccgcgtcaaaagagtatgagaggtattgtggtgatgcttttgaatgctaatcagaataaggagggtgactagtccatagttatatagaatataggatatacagaatatacctttttctgtaacgggatgtgtcacttaactttgttccttaaagctccagaagcccaaggtcacccacaatgattcaagtattatcaatgttgagagcctgtaaaagcatcaagtatattatagtttccaaaaaat

SEQ ID NO: 440213 - DNA, 503 bp, Homo Sapiens
gcgaattctgattcacctatttggactttggaatgagttggacaggacatttacaaatgtgtcgtaattgagattgcctctggtttgctttgtctgggtcagacccaatcaacttgacagatgagtgataccactttgggaagccaagctgacaagagctctggaaatggagaagggcatcatttatgaacagtcattctcctcctgccaagcagggatgcactcgatcacttgtggtttatgttgttactcaaggaaacaaatgctaatcaactctccctctccagcaacttgcaccaggattattttctccatctctccactgggaagccaggtcatgctcaacatggagcatgttatctggggtctattttaaaaggcaaactgatctcctcatcctatcttgaaagaacaagagggtttttggaatcataaattttctttactatgactgtgacaatgtgggagccttacatgccttttgaatcctcaaggaaacttgc

SEQ ID NO: 440214 - DNA, 842 bp, Homo Sapiens
  misc_feature (99)..(164): n is a, c, g, or t
tcctctacactaaatacaaaaattaaccaggcatgtcggtgcatgcctgtagttcccaagttacctggggtctgaggtgggaggattgcttaaacctgnnnnnnnnnnnnnnnnnnnnnnnnnnnnnnnnnnnnnnnnnnnnnnnnnnnnnnnnnnnnnnnnnnatctgtctctatataataataagtaaataaataaaaatttaaaagtctggttttaagtactttcctagggatggaagaatgaaaaaaatgagcttttaaggtaaagccctaaacctatggaatatggtctttccctataaagggaggtcccaggtctgagggacctctctctcgctgaatcccagtcaccttcatcttcttacattccataaagcatctttcccctctcttgtccctgggtgctgaaggatgtcacacttggacctgtcacttaattaaaatgaaacacgagatattgactaaagttttttcccgtttctctgctccctcaaaatctaggggaaaaaaatctgaaaattatgcattcataggcgaagtatttggaaagcacctacccatccctcccctctcacactgctcatttacttatgatccatctcagactaaacatttttcttagtttaaatatcagtctcagatgcactctccttttggaggatatttcagagtcacagatctttacataaaggaagttctttaagtctacctcatgttcttctccctgcttttttggccaatttctagtcatctgaatctatcagagttgacctcagcccagtccgtgcttgtgaaagaagcattgccatagacaagttcaatgtcagtcttttcagaaac

SEQ ID NO: 440215 - DNA, 2080 bp, Homo Sapiens
  misc_feature (13)..(13): n is a, c, g, or t
  misc_feature (61)..(61): n is a, c, g, or t
  misc_feature (63)..(63): n is a, c, g, or t
  misc_feature (69)..(69): n is a, c, g, or t
  misc_feature (73)..(74): n is a, c, g, or t
  misc_feature (81)..(85): n is a, c, g, or t
  misc_feature (89)..(240): n is a, c, g, or t
  misc_feature (260)..(520): n is a, c, g, or t
  misc_feature (871)..(883): n is a, c, g, or t
  misc_feature (1645)..(1678): n is a, c, g, or t
  misc_feature (2000)..(2036): n is a, c, g, or t
tgagctagatatntatgacaagatagagagaaaattaaatggatattaataaatgaaagangnaatttnaaanngtatatnnnnnatgnnnnnnnnnnnnnnnnnnnnnnnnnnnnnnnnnnnnnnnnnnnnnnnnnnnnnnnnnnnnnnnnnnnnnnnnnnnnnnnnnnnnnnnnnnnnnnnnnnnnnnnnnnnnnnnnnnnnnnnnnnnnnnnnnnnnnnnnnnnnnnnnnnnnnnnngtataataatataaaggttnnnnnnnnnnnnnnnnnnnnnnnnnnnnnnnnnnnnnnnnnnnnnnnnnnnnnnnnnnnnnnnnnnnnnnnnnnnnnnnnnnnnnnnnnnnnnnnnnnnnnnnnnnnnnnnnnnnnnnnnnnnnnnnnnnnnnnnnnnnnnnnnnnnnnnnnnnnnnnnnnnnnnnnnnnnnnnnnnnnnnnnnnnnnnnnnnnnnnnnnnnnnnnnnnnnnnnnnnnnnnnnnnnnnnnnnnnnnnnnnnnnnnnnnnnnnnnnnnnnnnttttgtaaaagttttctaaggtcaacatagttaatactgaaaaacagcattttaaaaatcagttataaaataacttgtaagagttaaggacattcttcctaattgtccaataacgttgaaacacttcaaccatgaatatatttaaaataaaaatgataaatcgctttggcgacacccagtagaataagcttgactggctaaataaagtgaccatcttttcatcttcattttcaaatgcctctgcatcatgacattattggtagggattggagcaagaaagagagaaggaggaaaagaaactagtgtgataaaaaaagaaatgctacagaaatggggtttatagatgaaatnnnnnnnnnnnnnggtcatagggaagatgtgttaacgaaagagaaagagtgaattccaagaaagttggcactattaatgaacatgccgtcgacattttcccaattaataaatggttccactaacctcttctagtgaaagtatgtttctctaaaaaaataagagtcatgagaaaaaaataaactagtcatagtaactgagaaaatactatgcaatttttttgtatagaaatggtggtttaatgaacaatgttccaaaacacttttcaaaaattatatatataattagatgttctgtagttgtcaggcactgaggacaccttgtcctccaagtgcaattctaaaaagcgtagataagccacaggtgcaaatgcatcagctgaatgtatgactacttctgatgaatccacaattattttcttcttaaatagagggcaatccagagtgaaagtttcatactctccaccttctccacaaacatgtactccatacttcttagaaagctctatgagataaggctccatttgatccagggttttcccaagatgcttatcaggatctaaacccaaagctgctactttgatgatcattgcttgaatgttagatgatatcatctctctgagcaaatcttcctggtttctctgccaaagataagctaaaggctggagattaagccttttacacacattttccactcgaatacgctgatagtcagaaagtatagcacctactgatatcccctctacttcttctttttccttaacaagtttcaaaagcnnnnnnnnnnnnnnnnnnnnnnnnnnnnnnnnnntggtgtacacttgtcttgtatccaagctccttcctcttatggttcggcgatagaggggaagagccattgcttctgcatacaagtcaatggcatggtgccccactgtctgatacatgtagctatccagttcatcagaccccacttggttttcagctggtcttagatttgctaaagcaacgatctgatgcccagcagcaatgcactgcatcatattatagcagctgtccttcccaccactgatcagagccgcgaccctcatgctgggcgcagtgcgcgtacgtccgctctcgacgaattcgagctcggccgatttggcctgatnnnnnnnnnnnnnnnnnnnnnnnnnnnnnnnnnnnnncggccgccccgcgtagagctccggttcgccctatagtgattatt

SEQ ID NO: 440216 - DNA, 874 bp, Homo Sapiens
caggcgccgtggccggaggccgtaattttcgcacgcaagggtccagggccggggccacagcagggctgcgggggccacatgatggggtactgcaccgtggcatcctgcagccagcccgcgtgcaccagtccaggccctcctccccaggcccggaagagctgctcaaaggaggccaccaccgcagcctgctctgcacagacctgctggccctcgtggaagttgaactggtagcgcccgttgggggactggtaaggaaagaccacaccccgcagctccagctccaccagaccgctttcatcctccagcccgtcaatgacctcacagcggtaacgcccatagtcctccagccgcagatcctggatctccagcgagacgtcatgctctttgtcctgccgcaggtgcacgcggccttggtagtccccaaaggagcggtgcctcagcccgatggccaccagcacgtccttctctggggccccgttctccgacagcttccaccatttgacacgcacacgccgcggggagaccagggccggctcgtagcggtagcggcagggcaggatcacactggccccttggtaggtgaacagggtctcctcgggtgtctccaccaccagcttcactccattaaggaggtctttgccatgaccgttgcctaggttctggtcgttggcgctgttggagtagtagaagccgttgtagaagggcagtccgtaggagccgggcagcaggagcaacgggaccaggagcaacaggcccatctcctcatgccagggtgacccgggccaggctggggccccagggcaaacgtccccaggcagctcctcgacggctagagctctcgggggccgcgagctgtcccggtccaaggcagcag

SEQ ID NO: 440217 - DNA, 1805 bp, Homo Sapiens
  misc_feature (39)..(39): n is a, c, g, or t
  misc_feature (143)..(143): n is a, c, g, or t
  misc_feature (175)..(176): n is a, c, g, or t
  misc_feature (294)..(294): n is a, c, g, or t
  misc_feature (350)..(350): n is a, c, g, or t
  misc_feature (544)..(557): n is a, c, g, or t
  misc_feature (1136)..(1136): n is a, c, g, or t
  misc_feature (1139)..(1139): n is a, c, g, or t
  misc_feature (1354)..(1354): n is a, c, g, or t
  misc_feature (1495)..(1495): n is a, c, g, or t
  misc_feature (1567)..(1596): n is a, c, g, or t
ttctttttaaataggcaagagaatccagtagccattttnccattgaagtattatgggtggcaaataaaaacatgatttaaatatgctcaaaatcatgaagcttagagaaatgcaagttaaactacaaataagatactatactnccatccctagtagcattataaacattaaaacnncagatcatagcaatgttgggtgattatgtgacgaaactggaactcttgctcacaatcagggaggcaggggatgtaaaatggtataataactttagaacacaatttggcagtttcttanaatgtaaaatattcacctaccctgcaacaaaggcattgcacttttagataataacncaagagaagagaaagaatattcccacacaaagacctacacactaatgattacagtagctcaatttgtaacagacaaaaaccaacatgcagctaatagaagaaaaggtgggagttccagaggaaagagagaaacaaggaggaagagggactatttttaagaaatggccaaaactacccaaatttgatgaaagacnnnnnnnnnnnnnnaacacactatacagatgtaaaaagacataaatataaacacccaagaagctcagtgagctccaagaaggatgaattcaaagagactcacgctgaggcacattataatcaaactgtcaaaagacagagacataaagagaatactgaaagcagcaaaaaagaagtgactcattacattcaagggatactcactaagattatcagatttctcatcagaaaccttagagggcagaagacagaaggcagaaggcagtgggctgacatgttcaaagtgctaaaagaaaagaactgacaaccaagacccctaaatctggcaaaactatccaccaaaactgagggagaaatgaagacattcccaattgagggaatgcgttaccaagagaactgctgtgcaagaaatgctaaagggagtccttccagttgaaatgaaaggacactggacagtaactcagtgccatgagaagaaataaggatctctagtaaaggcaaatacctgggaaaattttaaagttcatattattgtaactttggtttgtactccacttgttgttttttatgtgatttaagagacgaatgtgttanaanattattaatctatgtttttggacacacaatgtataaagaggtaattttgtgacattactatctacaagtgttggggatggagttgtataagatcagagtttttctgtgttattaacggtaagctggtaaaagttcaaatcagagtattacaaatctaggatgtgaaatgtaatctccatggtaaccacaaagaaaatagttatggaatatacacnaaatgaaacaagaatgaaattaaaatgtctcacatttgaaaaatcaaacacacaaaaagagagtaatataggaaataagggacaaaaaagctaaaatcacatagaaaataaatagcagaatgacagaagtaagtccctccntatcagtaattactttaaatataactggattaaatcctcagagcaaaacacagaaactggcaaaatgagttnnnnnnnnnnnnnnnnnnnnnnnnnnnnnnccgataatccaactatatgctgtctacaaagtttcactttagatccaaagacagaaatagattgaaagtaaaagaatggaaaaagatattccatgcaaatagtaaccaaaagaaagcagggatggacatactggtatcaaacaaaatagaccttaaatcaaaatgtggttccatgagacaaagagagacgttacatattaagaaaagat

SEQ ID NO: 440218 - DNA, 729 bp, Homo Sapiens
cacaaataacctttatacaacctatttaaactattgtaacaacaacaacataacgtttttaaaaatttacctttttttaaccaataccaaataaattttaacatcaaccacattaaactaatatatcattttaatatttacaaattttttacgaaactttgaagggaagcaacacactgttctcacagggacagaggctgaaaagggcaccaagtttggttcagtattgctccataaatgaattaaaagagaatagagtgtagctgaaccttttgcctatgataaaagcaaaagcatggataaagtcagcaataatttacggatggtgtcagaagctctactttatgacactgtataatataaattcatttagaggtctctctctgcaaaatttctccctattctaagagcattttgagcacaatttgtttgttatgggagtgtgttacaaggaaccctgacaagaaggccctccagtaaagagtgaaatacagccaaaatccctaaggtccagtttcctgcatttcttccacagaaccagtcaggccaaacgtaattttaaagaacaataaaacaaaatctttctaaaatattgggaagggactataaattctgaggttctgtggaacaaaaaaggactgcattccttcaggtggatcttggttccaccggctacctaaactcagctgtgccttggatcttgtagaagccaggactatttctgaaaga

SEQ ID NO: 440219 - DNA, 1152 bp, Homo Sapiens
gcctagcctggggttctcagggaagagggaatgtaactgggagcaaagtaccccatactaattattttatcattttagtgtaaccagtgccttgtgcaagaaggagatggtagagttttcaagaatcagactaagtctgcccaagtttaaatcaggatatttgggggaaggattagggttggggtggctatgccatatgagctggtgcctttggaaggccaagaactgtgaaatgttaaaggggggatgggcacctgtgaaccgccaggagacaggaccatagaggaggctgaggctgaggctgaggctgagcctgatccgcactcctccccatagactcgccagcagccctgggcttgagtgcaggatgcagcactggaagtagagcagaagagctggcagactgaagacacatttctagtggggagagcagggatgggggttaggagcccagacccctccagccccaggagggcacccaatttgccaggcaattcacaaacggcggtgccagccgcccccaccagcagcgtcactggctgcatgggagccgcgagaggtagacattgagcagaagcgacactgagctgacacaggtgcctgctgtgtatacagacgtctgggccctggggcagcctggctgaaattgctgggaccggccttgatggcagcctatgggggctcagtggccacgtgggcagccccacacagcaggtgtgggcctgggccagggagtcggggttttccaggatgcaggaaagcagtgcccaggccaaggttcagcagcaggagggcctgagcaggctttaggggccccagaagggccaagtcctgccaacctcaggggactacccaggaggaggttatgggcacaaactgagcagcaggggaaagggaagagaatacaacagttggagccaaacttccaggaacccctagaaccctggaatctcagctctatgcctctgggagccaaaaaggataaaagggtcctggcagagctggggttatggggagcccaatcagtaaccttttggcaggagagggaggtgggttgtccctaggacacccagtttgagtgggttgtccctgggacacgcagtgcaaggcaaaccagctgcacatcccgggaattccggaccggtaccagcc

SEQ ID NO: 440220 - DNA, 1130 bp, Homo Sapiens
  misc_feature (955)..(995): n is a, c, g, or t
ttcaaaaaaaacagactttatttttaacataaaagttctattttcttgtgaggcagcaacaagtgttcaggtacagggaatacataagttcagcgtaacaataccgattaccattggaaatgctgttttttgagagaattgttagaataacaaaatgttttaaattgcattttaaaaagagttacacagcttccacagagacaaaaaatgaagagttaaaaaaattctattcttaaacaagactgtataaacaaaatgctgttcagggctgctctgctcatcttcaatttggtcagagtagaacttaaagtgcagagttaagcattcttagctttattttgcaaattcagcacttccactcatctggttttgagacatcaaaattccaaagactaaggaatgaatcttaagtttacaatagtaaagtaaatgcagtagtggcaaattttcttttattttccttcacaaaagaaaatctttataacccagtcctagtcttggacatagtgaaagctataaattctgactttttttacactttctttcagtgaaagccaaccactgaaagcaaagaaaaaggactttcatgtcgtcaaatattccacagttagcaagagcaccttctaaaagactgatttggactgtagtcataagtattaagtataagaaatataaaacaaattgaataatctagttgaaaaataatcttgacatccatgctcaccacatgtaaccaaagaggcaaaaccggtatttttaaaacacagttgcgtacaaaagccatgacaagtaatagactcagtcatgatcagaaacagtaaatttatattatttttatcatcacaaagaagaaattgtttaaagatttaaaaaaacctaagattgacaaagtgaataaccaaatagctcctttctctgaaagacacatgctacccatttcttttaatgcaatggnnnnnnnnnnnnnnnnnnnnnnnnnnnnnnnnnnnnnnnnnccattgaagctattctatttaccttctgtacagttttctacagaataacaataattatggagtgtaactttagaaaccaacattatgcattctattgagagtgtcacatttcactggaaagctggagacccattt

SEQ ID NO: 440221 - DNA, 1091 bp, Homo Sapiens
  misc_feature (179)..(179): n is a, c, g, or t
  misc_feature (397)..(397): n is a, c, g, or t
  misc_feature (705)..(714): n is a, c, g, or t
  misc_feature (852)..(890): n is a, c, g, or t
  misc_feature (1008)..(1008): n is a, c, g, or t
  misc_feature (1057)..(1057): n is a, c, g, or t
ctcagttatttggggtctacattttctcactgagagccttgatattttgccttctttgttatgcattataacttgactgtatcaccactgagtatctgctgtatcagaagttcagaagaaaaggtaaaactgaaatcagaatgggggtagaggaagttaaaaacaagttatttaaaaanaactcttggtttttggatgacttgaattctgttaaatctgtgttcttggccttgcacttccgttcctcttccatctctatccctgctagtcacaatggcattttagaactagaatgccactctgtagaggttttcccttttgctctgttgtgcctatttgtctaattcatatctttctgtggagtttcatatgtccttaatctaaagtaacttaaaantggaatggaagaacaagtttcagaattatttacagtcttatacatagaacttctagtgtaatgtttggttgtaaggagaatgtgaatttgcaggtaaatgaattgtatggcaaccagacagatccctggggtttgggagaaatagagcttgagatttgaaaaaaaggtacaaggtacaaaacaactctaactgccagtgccaaagggctaatttttaagcatgtaagctttaccacagtcttgaaaaaaatattaaccataggttcattcagctgttttatttaacccttagttccctggtggttgannnnnnnnnnaaatgggtctccagctttccagtgaaatgtgacactctcaatagaatgcataatgttggtttctaaagttacactccataattattgttattctgtagaaaactgtacagaaggtaaatagaatagcttcaatgggannnnnnnnnnnnnnnnnnnnnnnnnnnnnnnnnnnnnnnccattgcattaaaagaaatgggtagcatgtgtctttcagagaaaggagctatttggttattcactctgtcaatcttagggttttttaaatctttaaacaatttcttctttgtgatgantaaaataatataaatttactgtttctgataatgactgagtctattactngtcatggctcttgtacgcaactgtgttttaattt

SEQ ID NO: 440222 - DNA, 1150 bp, Homo Sapiens
  misc_feature (1114)..(1114): n is a, c, g, or t
  misc_feature (1133)..(1133): n is a, c, g, or t
aaaaaataataaatagcattgaagttctgtaatgtagtaaaacaaggcagtctacctagatgttacggtaaacctctgatctatgtatcaggagtgactcaatctggttaaaagttgcagaaaaatttagatggatttcggtatatggctagttttatacaaaggttaacacacaagccttgcagtgtaacagacccaggtttgaattctggcttcaccacttactaccttccaccagtggcctccatcaagttacttaacctacctgagacatggtattttcatttaaaaatgcttagcatgaaatgaaattagtattaaaataacagtaattactgttgttattattaaaaatgcatgcattctgccagccccaaggacagaaaggaatactttttcttctataaagttttacacattacaatattccctgtggatatgatgtgttctctaaagcagagagaaatcctttatcgggatttctaggagattatttttttccttcagttcactttatttatttatcccaggcatagtacttttcttaatcttttaatcacattttgatatacttttttggcttcctcttcagtccctattgaaacaagttttctcttcatgcaatcatgaataaacttactcatttctattcagtaatgtaagcattatcttttgtaacattaggataaattttagcatgcaaatgaactaaatagcaagggcaagagacaagataaggtgtctgttaataaataaatgacatgatgttaggtgaatggaaacagctgggagacctacttttaattttctcgttatctaaaaatcagaaaggccaaatgcatcaagtttactgataattcacttctgtttgctagccatgaatccatcatgtaaagagtggtattgatgacaagagcagtattgtcacctacaaaatgtacttggtactaatgtaatatatggtactgccaattctctcacagaaatttggccaaggaatgagaatgtagtaatttatgaattctaggacaattacataataatacaaacaatattctattactcatacttgttgtggggtatataaacaaaaattattttacctctaggaaanttatgtactgttgttcacntttatatgtgagggata

SEQ ID NO: 440223 - DNA, 1557 bp, Homo Sapiens
  misc_feature (1204)..(1204): n is a, c, g, or t
  misc_feature (1254)..(1254): n is a, c, g, or t
  misc_feature (1348)..(1348): n is a, c, g, or t
ttccttttcttttacaactgtttatttttgtgaaagcgagagctatgccatctaaaacaatgcaaaccatatatgaaagtccaaagaaggaagaggagagagtgcctcacattctgctctgtagaggagacagttgtgagcattgtggtgcctgtccttcacctttctccctgcccgcgtcacacacatgtgcacatgtacagctttacgtatgtcgactctgacagtgtggtgtgtgttgagctgtccctggtcagtatggacagacccacatagcttggagcatgtgttgaagagtgtaaatgtcagagccagcgtaccgggtttgagtccctgccttgccattgacaagcagggcatgacagacaagtgatgtctgtgtctgttgcttgtctgtaaagtgggacgccggccgtgctgccctgttgggctgctgtgagggtggagcaagttaacacatgcacagcctgtagaagggtggccgtctgccgttgtctctggtggctgtatgatgttccggagggaatgtcgttctaagcgatgccttgctgaacaccccctgcgctctccttgcaggtgtcgagtgatactcacttgatactctgagtgtggccaacatgcggggctcaggtggcttactgcttttccttccaaaggccgactgtggtgaccttgctgaagacagatcatccgtctcagggtctggagttggggtcccacactgcttgccgtgagaggtcagggggcggtgctggcctctgagcagccccgtggcactgagggctggcccaggtgctctcacagggcgacctcctgacgcccgtgctcaccgtggccctcgctcctaatcccaccctcaggttctgaggcaggaagcagttcccacacttggctactgggaaggaaggttgtgtgggggggcagaggcttcctgtgtgacctggagctgatctttcccgcccctgcaggtgcagcagtaccgcgtcgccatgactgccaaggactgctccatcatgattgcactgtctccctgtctgcaggatgccaggtgaggcccccactgcaaggcatgcagcctgggtctaacggggttttatggacagttggtgaattgttaataggatagttggtttccccatatttagagactccatggcggagtgacataacttccttggcctatgtgacatcatggggcttactnactctcgccctctagaagcttgtaattcagtcaaaagacagatttatggngaataacttaaaaggattgttagtacattgaaagttactgttttctaagaaaatactcccaagagctcagaaacaatgtggacagtgagctgcncattgcattccctcaaagaaagccagcccctgagatgtgtgggtacctgtggcccttgttcctcggtctcccacagtggcagcatggcgcacctgcctttttaccaccacagtcatttgaaagcctgtgaggcgcgcattcattctgcttcctcttctgaataaccagcctatgtgccgcccctctccctaatgtcactagttttatcc

SEQ ID NO: 440224 - DNA, 2046 bp, Homo Sapiens
  misc_feature (272)..(285): n is a, c, g, or t
  misc_feature (288)..(288): n is a, c, g, or t
  misc_feature (290)..(292): n is a, c, g, or t
  misc_feature (321)..(321): n is a, c, g, or t
  misc_feature (327)..(532): n is a, c, g, or t
  misc_feature (539)..(539): n is a, c, g, or t
  misc_feature (552)..(552): n is a, c, g, or t
  misc_feature (591)..(591): n is a, c, g, or t
  misc_feature (605)..(605): n is a, c, g, or t
  misc_feature (614)..(614): n is a, c, g, or t
  misc_feature (636)..(636): n is a, c, g, or t
  misc_feature (640)..(640): n is a, c, g, or t
  misc_feature (646)..(646): n is a, c, g, or t
  misc_feature (649)..(649): n is a, c, g, or t
  misc_feature (654)..(654): n is a, c, g, or t
  misc_feature (660)..(660): n is a, c, g, or t
  misc_feature (669)..(669): n is a, c, g, or t
  misc_feature (683)..(683): n is a, c, g, or t
atgagccactgtgcccagcctgagaattaccttataaatatcttgcacatgtgcctaaagacaaggatgctgtatatgcagttttgcttacaacagaaaaataaaagccattaagtgtccaccaatagggaactaataatggtctattaagacaatgacacactgggcaagggtgggggaaagatctttatttactgatacaagaacaatctgtgagatggtttagtctttaaaaaatggacaactgtgtatattatgctaccatttctttnnnnnnnnnnnnnnganannnaaagtaaagagaaggaatcaaggattganaaaatnnnnnnnnnnnnnnnnnnnnnnnnnnnnnnnnnnnnnnnnnnnnnnnnnnnnnnnnnnnnnnnnnnnnnnnnnnnnnnnnnnnnnnnnnnnnnnnnnnnnnnnnnnnnnnnnnnnnnnnnnnnnnnnnnnnnnnnnnnnnnnnnnnnnnnnnnnnnnnnnnnnnnnnnnnnnnnnnnnnnnnnnnnnnnnnnnnnnnnnnnnnnnnctgcagnttaaaacaattantaccactacatacctattagaatagttaaaatcagaccngatgtagtgactcncacctgtantcccagccctttggggggctgnggcnggcggntcncttgnggatcnggggttcgncacccacctggccncctgtgtctggttttcacagatttggcatctcacaccaacaggaaggttcaatggtgggaaattacctgtatgtgactttggtattatataaaccagaactgcaaatctataaagatatagatttgagattcaattctgacattacctgcttgactttgagcaagtcaaacatcttctctttttccttgactctaggatgtgaatagtaactcctacctttcttgcaagggtgcttttagcgttagaggtgcttgtttacattaaagagcttagcatagcctaaagctccatcaaaagtattctttgatttctttgctttttcatggcttttaatgagccattaggcactccaacccatcagcatccccaagacactgttctctccttcctctgacaagtggctagttgttagtcagtggcatcagttgctggaacctgggatcttaacatcttctaccctcatcttcccttaagagaccacatttggtgctgtgctcctagaactcaaaacaaatacagccacatcctcatctacatgcttatattctcctctatattccagtcctctctactgtcatatgccttctcctaatcacctgctgccaaccctaaacacacacagaagtcccacaacatgaggttttattcagttaatgtcctggaggctttccgtttaatggaaaagtgaaacttagagcttaaaatcaaattagatctagtaatagaaagtatcaaaatttaaatgaagatcttgagggtatccagaaatacaccccacaatgtccactcaaatcccaatcagtacatttttctctgattaaatctgaaatttctcaaggacaaaccagtcttagattgtattatcctatttaaaccaagacattatagtttaaatagacgtctgtagatcataaaatcatagcccaattacaaaatgttcttaagaaacaatacattatgagaaccaaacaacaatgctgatttacttgtcagattttgatattgtaaataaacttttagaacggctaattaattaatggcagttaactgtcacacagaactcattttattctcaggacaaccctaggaaatatccccatttttctattggggggaatggggaaactgaggctcagaagggataaggtacacccactgagcagcagataaggcatcaaactccagactaggacacattaggacacaacatttcttgttcaaaatacaaaatattcatactagctacagattgagtcttacattcctaggaatttaggagaaaaaaaaggtgcttccatacaaatcttcccatactcattatattccaaattttactctccagcatgaagcctctgatgtcga

SEQ ID NO: 440225 - DNA, 2351 bp, Homo Sapiens
  misc_feature (489)..(489): n is a, c, g, or t
  misc_feature (491)..(491): n is a, c, g, or t
  misc_feature (520)..(520): n is a, c, g, or t
  misc_feature (526)..(526): n is a, c, g, or t
  misc_feature (538)..(538): n is a, c, g, or t
  misc_feature (572)..(572): n is a, c, g, or t
  misc_feature (603)..(603): n is a, c, g, or t
  misc_feature (607)..(607): n is a, c, g, or t
  misc_feature (623)..(623): n is a, c, g, or t
ctgtggaatgtgttgagataatttaatactggcttggacacactggattccaggtgcaggaaccctggaaccccctggaatgtgctagagataagcataaggcatcctgtctgtgcccactccaccctggttgggagtcgcagaatgaggacctcctgacttgagacagattctttatccagagaatctgagattccaattcagatcctggagctgggcctgctactcacctccccagtaaatgtccaggcagcattggacagagaggctggccccgccctgacgggggctgaagaacaggcccccagcagccttgttgttgggctactgagcacttcagaggttgggaggacctggaacagtcgccccagatccatgtgccttctgtttggggtacacctgagtagcctctaacagccactgattggtaccaagagagaatccaaatgttggcatcacaaaccttaagtatggagcagggagcaagtncntgggggatgtttgccccatcttataaatnaatagntctcgtaatgtntctggatttttggagatgggaagaaatggccaantaacagcatcctcattcccaaatctactganaacnaactacggtggaaaanaaaatcaggggctgcatgggtgtgcgcctcagtttccctctactgcccccaaactggctactccaggagtttccccaaaagggagggggagatgaggagataggcatgcaaatgcccatttggagattttcagctactctggccattatcccatttcagagcacaccagacaggaagggcaaagaggtcccatcatgagtgccaaattgattggtactggctgcccagaacactgtgctgggaagaattctgacatcacccatgtgctgcacttgattggtgatgtctgccatggtcacagccattcaccatccctcatcttcaagctgggctgtcccctttccctgaaccagagacaattcaccagcctggactttggtaacagagagggaggccctggccacccaggtataaacaacccacaggactctttgccagattcttcaggaccttaggaaacacagattggcccgtcattccccaattttccaggaccatgcctgcttccttttctgaagatgttaatgttgcttgtattaggaaacactcatctaaaatagaaacacattacagggttaatttctcctctgtaagaatggctaaatgctttctttctcgctggggactcgagggacgatctggctgtcaccagaagtcaccttggagccatcaagaactctacccaataaagggaagacaggccttggcactgtgctctgggttaacgttcgcagaaacgtcctccactcctaaagcccaaacgacctctcgagtctgggtcacctcatttggacaccttggtctgcagggtgctgggcagatagaggtacctccagatggcatagtagtgggtaccagcaccaaatgctacaaagagatgccagatggcgtgggcaaaggggatcctcccgtcactcttgaagaagaccatgccccaggcagtagaagacccctccggtcaccagctcccagatgcccctcgttgttgggcatggagaggatgaccagggcggggaagaagcccattacgacgtagcagagaagcttcacaagcttgtaccgctcatggaagaagaagacatagatggtgcccacggaagccataatccagaccagccagcgcatgtgggaggcccaggggcccagctcccgaaggttcagccagggtgcgtaggaagccgctatgaagaaatagatgaccatccggtcgaacatgtgtagacagtgttccaccatcctgaggtggctcttcttccaggagatggtgtgaaacacagtggacaccacgaagaggccgcagaggccgaggccgtagatccaggcagagatggtctcccagtcatcgtccgacaggaagtagaggttggagctgcccaggatgctggggatgatccagaaagcatgggtggcacagttggccgcatgttcatactctgtgggctggtacctcttgtgggcagggactcggtggttcatgaacctcgcgtatttcgtcttctggaaatccagcagccggggggcgaacatcgcggcgcttccatgggaatctggccccgggctcagagcgcgggtagctggcagagcctggggggcgcggcggcggcagcagcaggttggagggcgcgcggcgggggccaaggggacctggtcggcgcccggagccggagccggagcccgagccggagctggaggcgcccggagccgccgacgccaaatcccgagcccgct

SEQ ID NO: 440226 - DNA, 453 bp, Homo Sapiens
gctgtgctagtagccagggtcggggtagtctccataattgatggggacacctctgatggcatgccaggggctgtgactcagttgtcatagaggaaggcacttcaccaaccagtctcacatttcccactatggcgatgttggcatcgttttcggctgcccatatcaagaactttcaagcccattgtagtacagcccagagagctggccctggaagggctggccctgctctttcccgccaattattatggttgcttggctattgaagattgtgagctgacgccctgcagggtagcgctcgatcactggccagctgtccacctgcaacgtggcattgccaccactcctcgtgaaacgaactacatggtatttcccatcattaatgattgcattggattcttcaatggcgatgtcatctgtcccaacattaaacttaactccaatttttccctggtg

SEQ ID NO: 440227 - DNA, 2105 bp, Homo Sapiens
tcggaccctcaagaatatcggggggggtaactccccgtgtgtaaggcccaaaaggcccaaaagagccgtgaatgtgttccgagtaatgggaattgcaaccatgttagaatttaaagataataccttggtctccctgaaaatctgtggcccaataaaccaaaggctgtggtataacactggtgcataatgaacaatgtatgttcctagggttaataaagaccagtttttcccagttttcaagagtgtttcaagaaagttctagacaaagcaagacgcccaaagaattgggattgagaagtccaggcactttgattgagaattaacgtatcttctcttcactgggcttagggaaatcctttagtgtgcctccagaataggttcatagagatctggaaatccagaataatgatacatcatacaggtgtatcaattctgttaattgtactaagaaggctgtacttgaaggcagaccatcattgtttgaaagaatgaaccaaattacccacatgaggaacaatcaaatggaacgcctctggagaatgctgaaagctaagcagcatgtgagaaagaactgcaagagcaccaggtctcacaagaggaaaccaaagtcgattaacaaccagttctattttcagcaaagtaacatctatcaaaatagtaacttctggacagctgccagtcctttcaggagtgcaattacccatgtatccacatgctgagccaatggccaggatagccagtcaatcattctgcaaagggcttgggtcatacttgcatcttttacatttggatccgtagtaaggctcctgatgagaactgtaatcatctgaagaggaatatgctgcacaaggcttgccaatgctacagaaggttccaatgatgcatctgtggaagagatgcttgcaatagcttcttgcagggaaggcagtagtgtggcaggctcggccttccagatgttctgcagcaagttactcacttttgtcacctgggagacatattcccgcagctctctttcctgggtggacacgcactggaaatggcctatcgttcgaaccagctgttgacagaacgtgatggacaatttccccttggggatgcattgcacaaagtcggtcagaaggtcgctcagtcgggcacagagctgcggctccggcctctcacacaccatccgtaacacctctacctgcaggaggctaaagagatccagcaccgacggacagctcataatcagcttcaggccgttgtgaatgtagtccaggatggctacatccttcctgtccagagagtggtagccctgatgaaggaggcccaacacgaaggtcttgttgaagaaggactcgaactctggccggtggtatcgtgcgtaggcctccagcaccctggtgcccccacctgccgctggaaagggtcctggccctccaggatgagccgggtcgtcaggtcaaacatggcctcgcactgcgcctcgtctagccagtgtccgccgattccaccactttccgcacaatcacccgcttgaggggcaggggatgcgaggaactcacaaggccctccaggatcttgtccattgtcgccacgctgcaaggccagggccaggggataaggagcgggtggcggcagccccgaggtggggcaggagagccccggggcggagatgaacttggagcgccgcagcagcagcgcgacgggccacggccaccgccgcctcagcagccacatttatggcgcagggagacccatccaagccggggcgggagctagcgagcctggagagcctaagaaccgacacctgcggctggcctaaggcgccagaggcccgtactccgccgccgccccgggccctcgatcccactcagcatcagcgccgaggggcctgtcgggccccccagcggcgtcggcgggagctcagggcccggggctgctagccggcgggtggaggaagcacgcctccgagttccgggtcaggtgtgggcgtccagtctccagcaggtcgtgagaagaagccggtcctgggctgagtcaggaggcgctgtcacggagagtgctgggatcagccggggagaagagaccgaagcgacatcgcaggaattccggaccggtccagc

SEQ ID NO: 440228 - DNA, 1634 bp, Homo Sapiens
  misc_feature (233)..(233): n is a, c, g, or t
agcctgggaaagctaagagcactttattttcatttttccatttatggaagtattttagtaaaggtcagaaaacaagctggcggcttagcaaatggcccattcccagtgctaaatatttaagggctcagaacctcttgattttaatagtctctatgcccgcacagacccctccctgctggagaaactgtcataattggccactaatcatctgtgtttaatgatactctactctncagagaggcctcaaaagaggtttctttcatggactatcacagatgggtcctgaaaaatcacttggtcaaggcctcaaattcccaaaagttactaaatttaaacttcgcctttattgccaaatcacaacattgaaataatatttctttttttctgaaagaatatttcatcatacaaattcaaacgtggagcctatgattggactacacgtacttctacagcacattatgacatttatatttatatataagaatatttttatcatcttgtaaatagaattctattatgtgtgcttgttaaaaaaatgttgttttgtttagtgtgaaaatttaaaatatgccacaattttgaagacactatttttgataattcatttaaaaaatattatgagaatctcaacaaaaagaagtaacacaaattcctttgaccactgtgaggtcttggcctcatgctgttaacctcttccctaaaccaaatggattttttaatctcacatctctactttctcaaggtgagagcctaatctaatcctcaaaaagccttttacagctatacaaatctgagtggatagtttctgagaaggagatttgcccctttgggacctagtgtaaaattaaaaagttgaatttttcattggtttttaaaccttccttactatttatgactagttactgtaaagcaagatagcaattgtatgtatcagtaaacatgtgttaggttaacttttatgttctaagtttgactatatcactagtacatgatgggttcctttgactgtcataatatattgctcagatggaatgatgatctgcttataataaaagagaggagttactggttttaagaggagactggtgatatgtttattgccagttttgtacacaggaaacagtcaatttatttaggagttcctatcacagaacatgttttgaaccagcgaaaggactgtttttatcataccccaagatatatctgttactgagcaggactgtgctctccatcactctaacccggacctcttggctcagctcccagaactctagcctaagtatattacctcactatctcctgcttgtagtaggggtgagtttacatactttatctgatatttcagacatttatagagttctaaaataatttaatcaaaaacatcaaagttcttttatccctgccccttggaacaggttatctttggatcctctttacacagatgcaggcacaggtacaggttttcctttctgctgttggtatgtaaaacaagtcaaatgattctgcctcacactagtgctactgatgcaatggctgctcagtagtcgcatctctgacctgactagtttctgagattctgcaaattccatccccagtagtgattccactctcacctggtctgcagcaagtgaccc

SEQ ID NO: 440229 - DNA, 1088 bp, Homo Sapiens
  misc_feature (43)..(43): n is a, c, g, or t
  misc_feature (55)..(55): n is a, c, g, or t
  misc_feature (58)..(58): n is a, c, g, or t
  misc_feature (62)..(62): n is a, c, g, or t
  misc_feature (68)..(68): n is a, c, g, or t
gggtgacaatttccaagtgggtgtgctcagtgtcagggatganacatgtgatagnagnaagnatgagnccttccccagcggtgaggggaacaacccctaaagcaggagtcgggaccctggtatcgtagtcctgggcaggccattcccctttgagcttcctttcctccatacagtgaaggggcttggcaagatcccttccagctctagcattctatgattggcatttccagttaggcacttcgataaaaacgatcatttattgggcaagtccctgtgtgaagcactttatttgtaatattccatctaatcctaattttaaatctgtaagataggattataattatccccattttctggatgaggaaactgaggcatagagaagataaggtcactgttcacatgggctgccataacaaaataccataaattgggtggcttaaacaacagacatttatttttcacagttttggaggttggaagtccaagatcaaggtgccagccaattgggttcccactgaagaccttctccccagcttgcagatggcctttctctcttcctcttcttatgaaaccactaataccatcatgagtgtctcaccctcatgacctaatctaaccctaattactttccaataggctagtgtccaaataccatcacagtgggggttaattcaacaatgaattttgtgaagatgcaatcattctgtctgtaactattgcatagctagcaagtgatagaaccaaaacttaactgtgatcagtagctggaattttgactctgaggcatcttgtatgatccctgtgttttggtatgggataccaatgaaggagattctgctgtgttggaaaagttctttgggaggcaaccggtgtttgctatgagtgccacctccatacagttgggcaccatggcagtactgcacaccactatatccctcggtgtagccttataccagaacgtgaaagatattcaatcagtgtctgttacataaatgaacagatggctctgttaaaagactaatgactatggttgggcacaaaaggctcaaaaaatggttttgtccaggtatcctgggaaatggggcccc

SEQ ID NO: 440230 - DNA, 1574 bp, Homo Sapiens
  misc_feature (243)..(359): n is a, c, g, or t
  misc_feature (983)..(1048): n is a, c, g, or t
  misc_feature (1053)..(1375): n is a, c, g, or t
tgctgtgtgagtctggactgtgtttctgtatctataaattgaggtttcagatatttattcagcaatattaataatctctgcctggattgcattccagagagagctttcctggccactcaaaacaagtcccctaactctctctcccctttccctgccttattttttccacaatacctgccaatatctgaaaacattgtctgtaggtgtacatgtgtgtgttgcatttattgcctgctagagcannnnnnnnnnnnnnnnnnnnnnnnnnnnnnnnnnnnnnnnnnnnnnnnnnnnnnnnnnnnnnnnnnnnnnnnnnnnnnnnnnnnnnnnnnnnnnnnnnnnnnnnnnnnnnnnnnnnnttgattgattgattctggggactcaacaatatgtagaaatgtgctttgcaaaccacaaagggcaaagcaaatgaaaggtgttcagctattattataaatctgctgcacactttagcatagttttaactcctcccacagcattttccaaggaaacgtcggtgaaatcttttttttctatttgggttttcttcaaaaagaagaattctgacaacctaatttaagagacttcctaggtgtggaactcagtgatggatcctcatctcttagcaacctcacataggagctgctcaccaggtaaatggggtgacaatttcaagtgggtgtgctcagtgtcagggatgagacatgtgataggaggaaggatgagcctttccccagccggtggaggggaacaaacctaaagcaggagtcgggacccctggtatcgtagtcctgggcaaggcattcccctttgagcttcctttcctccatacagtgaaggggcttggcaagatcccttccagctctagcattctatgattggcatttccagttaggcacttcgataaaaacgatcatttattgggcaagtccctgtgtgaagcactttatttgtaatattccatctaatcctaattttaaatnnnnnnnnnnnnnnnnnnnnnnnnnnnnnnnnnnnnnnnnnnnnnnnnnnnnnnnnnnnnnnnnnngtcannnnnnnnnnnnnnnnnnnnnnnnnnnnnnnnnnnnnnnnnnnnnnnnnnnnnnnnnnnnnnnnnnnnnnnnnnnnnnnnnnnnnnnnnnnnnnnnnnnnnnnnnnnnnnnnnnnnnnnnnnnnnnnnnnnnnnnnnnnnnnnnnnnnnnnnnnnnnnnnnnnnnnnnnnnnnnnnnnnnnnnnnnnnnnnnnnnnnnnnnnnnnnnnnnnnnnnnnnnnnnnnnnnnnnnnnnnnnnnnnnnnnnnnnnnnnnnnnnnnnnnnnnnnnnnnnnnnnnnnnnnnnnnnnnnnnnnnnnnnnnnnnnnnnnnnnnnnnnnnnnntattgcatagctagcaagtgatagaaccaaaacttaactgtgatcagtagctggaattttgactctgaggcatcttgtatgatccctgtgttttggtatgggataccaatgaaggagattctgctgtgtggaaaagttctttgggaggcaaccggtgtttgctatgagtgccacctccatacagttgggcaccatggca

SEQ ID NO: 440231 - DNA, 1761 bp, Homo Sapiens
  misc_feature (61)..(62): n is a, c, g, or t
  misc_feature (502)..(502): n is a, c, g, or t
  misc_feature (600)..(710): n is a, c, g, or t
  misc_feature (1216)..(1234): n is a, c, g, or t
  misc_feature (1257)..(1257): n is a, c, g, or t
  misc_feature (1267)..(1307): n is a, c, g, or t
  misc_feature (1310)..(1310): n is a, c, g, or t
  misc_feature (1410)..(1410): n is a, c, g, or t
  misc_feature (1432)..(1432): n is a, c, g, or t
  misc_feature (1454)..(1454): n is a, c, g, or t
  misc_feature (1521)..(1521): n is a, c, g, or t
  misc_feature (1590)..(1590): n is a, c, g, or t
  misc_feature (1594)..(1595): n is a, c, g, or t
  misc_feature (1645)..(1645): n is a, c, g, or t
  misc_feature (1730)..(1730): n is a, c, g, or t
  misc_feature (1734)..(1734): n is a, c, g, or t
  misc_feature (1736)..(1736): n is a, c, g, or t
gttctgttaacataaatcatttttcttcatccccaaaggcacgtatttgcagaatacctgnnaagtggtaggggctacagaaacaaaactacagacatcagtgtattttctgtactgtgcatacaagtgtagagggtcataaaatatcttttagaaaataggttagatatagacgctattcagcactagcgtaactatatagttgtcattttaattctatgttaatatgcccctgcaaataaaattccatttgcgctttatctaagttgggtgaaaaaaagttttatttcaaactacagcaataaatgtgcccttccttttcataactcttcttcagagtattccctgcccacaaacaagcatttttatagaaatctagtgacaggacaaaaaagtggtgtttctattctattagatttctgtgggaaccaagaaatagtacaaatattgatcatgtaagtagactattatatttattataatatagacattgattacttcntggagagtttttaccttgtaaaaactaggctacagtatcatattcccactgaagacagtatggattccatttatttccaaagcatgtcaagagatgcnnnnnnnnnnnnnnnnnnnnnnnnnnnnnnnnnnnnnnnnnnnnnnnnnnnnnnnnnnnnnnnnnnnnnnnnnnnnnnnnnnnnnnnnnnnnnnnnnnnnnnnnnnnnnnncttttaacttcttcactgtaaagcagtggtaattacagttttcattatatagaattattaaggggaactaaatgcactactatttctaaaggacttataacaagatcaagtatgccaaaagtgaaaaagaaagaacgtgaactttggtgccaggcagaagtagatttgggttatgaatctgtcatttaactagtggtgtgatcttgtgcaagttttttttaaaatgtgcaatctcagtttcctcatatgaaaatgaggactggtagacatcaaacctcactcatataatatacattcatcctcttctctttccgcatctccataaacagtttacaaacattactgcttatgccaacatcaaattatgccctccccaaattaataaaagtgaaatgttagatttgttttcatttacttaatttgaatttacttaatttcatttaatttgaacattgtatgctttcatgtctttctcttaggcaaaattttcttgctaatgaatactnnnnnnnnnnnnnnnnnnnctggcagatatatgtatttgcangatttgctcnnnnnnnnnnnnnnnnnnnnnnnnnnnnnnnnnnnnnnnnnagngaagttttaattcggaataaagcaagaggacataacaaaattccattttactgtaattgcgactatgtgatgttgcttttgaaataatttcttttggtgngaaggtaactgcaatttcttanccttgttttacataagcctctngctttttattgactgtgtgtggaatctatccacttctgtgtgaatagaatacacttgagcctccagntcttacgtgctgctaatctgacaagaaatatactcatcccaaaatgattaattaaacatctagagaaancctnncattccttctcaaccaaaactatgcttttccccatttcattgtagtcttnaagatgcatttttaaagggaaatttcctacaagtgaaggtctcacaggtccatatatggcagtgtggtgaaatgcaataagagtntcanantgatacattgagaactcagtatatg

SEQ ID NO: 440232 - DNA, 965 bp, Homo Sapiens
caaataaggagttatttggtgcacaaagactgggccatccccggcactaataggggcaaggcctctgggaatcccagtggaggggcccacagagggctatccatcccaggccccctgacttccagggccctcctagttctgcctcccctgaaggcttcactttcaaatgctttggatgttctgggtaagaagagtaagaactctttcttgcagtcagaagagaaggtgctggatgtggaaaaggatgggtgtgtggcttatgcatatggcttgaaaacagcagatgggaaaggtgaaaaaagagccagtgagctggccaaacaccctatggtcaacgacacgccatcctccccttccccagcggcccagatatccctgctgaccgatccggagcagcgctgcctgcattggtccctcctgtctgagaaaaacctggcgtgccctccagaccccagcaacgttcgctaccttgctgccttgcagcttctgcagaaacggggagtgcaaagctacaaatccaaattcaaagcccaggagccaagatctgctgtgatcccccgaaagcctgttctcccaaaggccaagcaggaaaacaggccccaaatgctggagacccaagtttttcccagaccctgtcttgccggtttctcacagtgagcagagttattattgctgtgttttcccacaggatccttttgaacggttcgcggtataaaccccttgggaataacacccgtttgagatgcaaccatccttctgcttgttctctgagaagtggcccgccccccccactttattttttgcttcctccggtaaggctggcttactcctgtttcccgccatattttttggatgccaccgaaaaaaaccgtacccacgggatgggtggtatattttttaaaaccgattctattttaccgggcgtatgctcttagccttcacaagccatttgttttagcgacccc

SEQ ID NO: 440233 - DNA, 1158 bp, Homo Sapiens
  misc_feature (659)..(659): n is a, c, g, or t
  misc_feature (665)..(666): n is a, c, g, or t
  misc_feature (671)..(671): n is a, c, g, or t
  misc_feature (857)..(858): n is a, c, g, or t
  misc_feature (864)..(867): n is a, c, g, or t
  misc_feature (1043)..(1043): n is a, c, g, or t
  misc_feature (1046)..(1046): n is a, c, g, or t
  misc_feature (1054)..(1054): n is a, c, g, or t
  misc_feature (1063)..(1064): n is a, c, g, or t
  misc_feature (1066)..(1066): n is a, c, g, or t
  misc_feature (1068)..(1068): n is a, c, g, or t
  misc_feature (1070)..(1070): n is a, c, g, or t
ctgccacatctcctggaaaacacatactaaccctccagcacccagccagaacacttctttaataaatgactggcatttatatcttgtctcaggctctgcttccaagagaagctgatcttagacctgatgcttctaattttttcatctccaaccagaacccagggaggtcagggtccggctcccccattctccctctccactctttcttgctcctctcctgcatccaaaaggcataaccaccttccaggctccccaaacaacagggagccatctaccggggtccggggcatgtaagaacatccatgaggtctctgaaggaagcagcaagcagcttgtttgccgtggccagcagcaaaagaagccccccaaccataccacgccggagggggatcataaggaggccaggtaggcaaagttaaggcagttgcatgtcagcagcacttcaggaggcaggtggggttggaggttgtctccgatcctgtgtctgcggtaggaggggctctgctggtagttccctctcctcccacaaggagcttctctccacccccatcagttctctgtctctgtaaatcctagaatccatcaccatggatcctccagcaggtcccacagccggctgctgctggagtcagataagtcagcggagaagatgctggggngtgggnnaccanaacccagaggaggaccccccctcagggcctccagccagtccagggagtccgtggggtccctgggagaaggggaggaggagttcgtgggagacgggagtgaagaggagaaaacagatgagaggccttcagagtccggggagggggacagcacgtcgaaggagccagggaagtccaggggaatagggnncagggnnnnatcaggctccacctgatcctccaggatgtcatcgatgccccggttaggaagcaactgcgccctccggatcgcttcctgcagctcctcctccagagtcagagccgctgagcccggccctgaggaaggggtcagggctggagctgcagcaggagccggagtgggagttggagccgganccntccccggngtatccgcnncncntngaagaggtggcctgtgagatctgcgctgggcttgacctggagcagccaagagggcgagcgcccataagccatgcccacagggcgcaac

SEQ ID NO: 440234 - DNA, 723 bp, Homo Sapiens
aagggaggcccacccattgggatttttatttttcattaagtaaaaaaagaagatccaagctatggaatccaaagagctttttccaggaacaaaacaaaaattggttgggccttgggcccagaggaggcctggaaccggcttactgtcaggtgccagtttcatccttggcactctgcctctcacacaagcatcgctccgggctcccagagcccacagtggcagccgctggaggctgtggcagcagctgctgccctgcccaaggagggatgtgggcttggctctgacagttcaagccagaaagagccttagaagtcattcaggacattcccattttacagatgatgaaataaggctcagagagagcaggggctttcaagaacaataaaggtggagactggaactcaggcctcctgtctgctgagggtgtctgcccatgctctctctcagagtttctgagtggtggtgtctggaggggctggacacgcaagggagctggcctcgtgtgtgtctgtctgtgccgggatgtatctgtggcttctgtctctgaacgtgccaggggttttgtgtcctgtgtgtgtctctctgtgggtgctcctgtgtgcaggaacttggggccatggccagagagggatgggcctattcctacaatcttgggaggcctccacaggctgagctggtgggagggtcctaagggagagtaagatgggactttctccacggaga

SEQ ID NO: 440235 - DNA, 2012 bp, Homo Sapiens
aaaaagaatgagttacatttaattgatatggtttgtcatatgctttataaatggtcaccctttgaaacatgtattattactatttgggggagagggggactgttcattttacaggggacaagcaagacaggctcaaggagggaaaggacaggctcaaagtcatcacagtgtggggctggaatgcagttgcccttccttctttctttttgcacatcttccgtctctagggtgaggaggggtgtaggcacaggcacccaagacagctgcggtccagccccggccccacctgtggtctcagtgacgccccagaggccccatcttccccacataatgaggctgctccatcctccttcaaagcccaggacctatttcataagccccaggaccccacctttcacccggggccccaagagaacagagctggagacacttctactcctagcactggatgccctctcccctcctgtgaagctgtaggtggggggtggaggacacccctttaaggcaggctcggggggctatgaactccaagactcctggaagccagtaagaagtgggaaggtaggcacaccatttgggatttttatttttcactgagctaagagaggagattccagctatggaatccagagagcgttctacaggaacagaacagaaattggctgggccctgggcccagaggaggcctggagccgcttactgttcagtgccagcttcatccttggcactctgcctctcacacagcatcgctccggctcccagagcccacagtggcagccgctggaggctgtggcagcagctgctgccctgcccaaggagggatgtgggcttggctctgacagttcaagccagaaagagccttagaagtcattcaggacattcccattttacagatgatgaaataaggctcagagagagcaggggctttcaagaacaataaaggtggagactggaactcaggcctcctgtctgctgagggtgtctgcccatgctctctctcagagtttctgaagtggtggtgtctggaggggctggacacgcaagggagctggcctcgtgtgtgtctgtctgtgccgggatgtatctgtggcttctgtctctgaacgtgccaggggttttgtgtcctgtgtgtgtctctctgtgggtgctcctgtgtgcaggaacttggggccatggccagagagggatgggcctattcctacaatcttgggaggcctccacaggctgagctggtggggagggtcctgaagggtagagtgaagatggggactttactcccagcggagaggaagaaaccagaagataggcttggggcatggatgggaaaggtcttggaactaggatggggcaagggaaacaaagccccaaatggagtatgggtccctggaagttgacacactcttagccctcatgggggcccagcccagtgggtaaccccggggaagtggtcacatgacgtgacacttctcagctgattgcttgagatcccccagtgtggcctgggccttgtccttgagtgagcccaggttcaagccaggaaggctggccagctgcccaaggactgaggccttctcctcctcctcctctgtgtcctcctcgatcatcttggccagctcccggggcagctccacgtctccacctgccatctggatctggctctcatctgtctcgttcttgggtagccggtatttgtctcggaagtggtccgcagtgtggcccgctctgccttcctctgtgtgaactgtgcatcccgctccatcttctcttccacgagttgcttctgatactcctcgtactcctcccggctcatgccctgagcttcggctgccgacttgtccccatctcccttatcctcgccgcctcccaggctcccagtgaggttcttcagctggccgcccaccatggtcttcaccatgaacgccatggtcttcgccggccggggcaccgggcgcctgctaccacgcgccaggcaccgggcacgtccgcgcctacttcagcactaggtttcgcgg

SEQ ID NO: 440236 - DNA, 1940 bp, Homo Sapiens
  misc_feature (1283)..(1283): n is a, c, g, or t
  misc_feature (1520)..(1520): n is a, c, g, or t
  misc_feature (1673)..(1673): n is a, c, g, or t
  misc_feature (1675)..(1675): n is a, c, g, or t
  misc_feature (1677)..(1677): n is a, c, g, or t
  misc_feature (1694)..(1694): n is a, c, g, or t
  misc_feature (1706)..(1706): n is a, c, g, or t
  misc_feature (1713)..(1713): n is a, c, g, or t
  misc_feature (1717)..(1717): n is a, c, g, or t
  misc_feature (1740)..(1740): n is a, c, g, or t
  misc_feature (1749)..(1749): n is a, c, g, or t
  misc_feature (1762)..(1785): n is a, c, g, or t
  misc_feature (1788)..(1788): n is a, c, g, or t
  misc_feature (1795)..(1795): n is a, c, g, or t
  misc_feature (1799)..(1799): n is a, c, g, or t
  misc_feature (1806)..(1806): n is a, c, g, or t
  misc_feature (1809)..(1809): n is a, c, g, or t
  misc_feature (1815)..(1816): n is a, c, g, or t
  misc_feature (1820)..(1820): n is a, c, g, or t
  misc_feature (1834)..(1834): n is a, c, g, or t
  misc_feature (1846)..(1846): n is a, c, g, or t
  misc_feature (1851)..(1853): n is a, c, g, or t
  misc_feature (1857)..(1858): n is a, c, g, or t
  misc_feature (1863)..(1863): n is a, c, g, or t
  misc_feature (1876)..(1877): n is a, c, g, or t
  misc_feature (1879)..(1879): n is a, c, g, or t
  misc_feature (1913)..(1913): n is a, c, g, or t
  misc_feature (1921)..(1922): n is a, c, g, or t
ggaagaaagtgaatgagcactcaagaaggacaaagaggagtagtcgggggtggggtggaggcagggcggggaagggagtgaccgcccctcctggctgcactcttgcctccggagccctctgatcctgtttgcagtgatgctccgagggcaggcacctgctgctctgtaatgattcagcccctttcagccgtcgtcgcgttaacacaacaggatgctgttgctattgtcactactgcctctcctgccgccgctgctgctgccgccgccgccaccgccgctggtcctccttctgcttttacttctcctgcatgacagttgttttcttcatctgagcagacaccagcttcagatgctcgaggtgagaaacatgcctttcagtttgggctactggtttacttaattaatcagccggcagctccgtcgatctattttcgtccctgtcctcttgacgagcccgggatggtttggagtagcatttaaaagaactagaaaagtggcccagaaacagcagcttaaagaattattacgatatactttgattttgtagttgctaggagcttttcttccccccttgcatctttctgaactcttcttgattttaataatggccttggacttggacgatttatcgatttccccctgtaagatgctgtatcatttggttgggggggcctctgcgtggtaatggaccgtgagagcggccaggccttcttctggaggtgagccgatggagatttattccccagacatgtctgaggtcgccgccgagaggtcctccagcccctccactcagctgagtgcagacccatctcttgatgggcttccggcagcagaagacatgccagagccccagactgaagatgggagaacccctggactcgtgggcctggccgtgccctgctgtgcgtgcctagaagctgagcgcctgagaggttgcctcaactcagagaaaatctgcattgtccccatcctggcttgcctggtcagcctctgcctctgcatcgccggcctcaagtgggtatttgtggacaagatctttgaatatgactctcctactcaccttgaccctggggggttaggccaggaccctattatttctctggacgcaactgctgcctcagctgtgtgggtgtcgtctgaggcatacacttcacctgtctctagggctcaatctgaaagtgaggttcaagttacagtgcaaggtgacaaggctgttgtctcctttgaaccatcagcggcaccgaccccgaagcaatcgtatttttgccttttctttcttgccncccaccgccccatccctcccctcacccacccggaaccctgaggtgagaacgcccaagtcagcaactcagccacaaacaacagaaactaatctccaaactgctcctaaactttgtgcccaaatgagtttactggtgatcgctgccaaaactacgtaatggccagcttctacagtacgtccactccctttctgtctctgcctgaataggagcatgctcagttggtgccgctttcttgtngctgcatcccccctcagattccacctagagctagatgtgtcttaccagatctaatattgactgcctctgcctgtcgcatgagaacattaacaaaagcaattgtattacttcctctgttcgcgactagttggctctgagatactaaaaggtgtncnangccccggatgtttctgnaatctgatactnaaccacncganacaaattgatagtcaatatcaancactcaaanaccaaaaacaaannnnnnnnnnnnnnnnnnnnnnnntantaaaacnaaanccattcnacnaatcannccantctcttatacaatnaccacatctctnaaaannntttnntaatntgtaaccgatatnnanttgaaatgatggtaagttaattttattgagaatntgtatttnnacaaataaaaataataaa

SEQ ID NO: 440237 - DNA, 422 bp, Homo Sapiens
ttttttttccttttattatgtttatttgtgacaaataacacattctgaatcaaaattaacttaccatcatttcaagtgcatatcggttacagcttagcaacacccttttcaggatgtggtcattgtataaagaagatggactgttcagtagaatgatttttattttatcaataaaagtgagactttgaaatgcctttattatcatatttcactgcttgatattgactatcaatttgtatcacatcattcaatatcaattccagaaacatccggagcctcacacacctattagtatctcagagccaactagtcgcgaacagagggaagtaatacaattggcttttgttaatgttctcatggcggacagggcagagggcagttcaattattaggatctgggtaaggacacattctaggcctcta

SEQ ID NO: 440238 - DNA, 1189 bp, Homo Sapiens
  misc_feature (3)..(5): n is a, c, g, or t
  misc_feature (8)..(9): n is a, c, g, or t
  misc_feature (11)..(11): n is a, c, g, or t
  misc_feature (13)..(13): n is a, c, g, or t
  misc_feature (970)..(970): n is a, c, g, or t
  misc_feature (1099)..(1099): n is a, c, g, or t
acnnnggnntnanctttattatgtagaactttaaatgtcagaaaaataaaactcttgatacaatttcaaatcttgtctcagcaaatataatattagtatttgaccatgaggttaaaggccctttatcataaaataaaatatactttgttttttaaactttgctcagtaaagtacatttaagctcaagtaacatcacctacatatacataaacaagtggtaaacaaatgtattaaaatagaaatactaaaactagagtggtgcaacagaatttttgtaacttgcactgaattctatttatacaaatgttagaaagcatcaacagttctttttgacatgtttatacatttccgtttttgtaataatatagaataaaatatgctttatatcactgaatagaaaatatgctgggtgaagcagatctagaagatttgtctgaacctataaaatctccatcccaacagaatactgttcaaaacattacacattttatggttgtaattccgtcacaattgtgtgattattaaaataatacagtgttctttgccataaggccatactaaaataaaaagatttaacccagctacaaaaaagttcactgaacttaaattaaaatacttgtaaacatctttgcaatatgaaatataatttttcaagtcaaaaaagaataaaatacttcaatctgtattaatgcaatttctctttaaaacttttaaacgtttttaatatataagagatatgttacagtttctttaactttaataaagctgcagtatcctggtttcacaggaactcctggcccttccacgaacattcaaaaaggatccactgtgttctataataagtatcataggaacccacccacaaaggggaacacactaaacagtccacacatcccatagcactactatcatcttcatcataattattactgttcattttttcctactttaagaaaatggaaaacttgtnggggttttcttcttttggaagcttcctattaagtacagtgtaaaaactatcattactagaaatgtcgccgttcctattatttatagagcatgcatttcaggtgttcaggtttcccaggctacagtactnttgatgcagatatcctggcaaattcctttacttaaaaattaaattttaaaaatgagcggatactacagctttccaagctcctctcggatc

SEQ ID NO: 440239 - DNA, 1699 bp, Homo Sapiens
  misc_feature (77)..(97): n is a, c, g, or t
  misc_feature (103)..(103): n is a, c, g, or t
  misc_feature (922)..(922): n is a, c, g, or t
ataacctgaagcggaacttcaataaccaaattcccccccttgttttcagcttgggcacaaaagcgagatccgtttcnnnnnnnnnnnnnnnnnnnnnccaaancaagtttctctttttgcacttaaatatcttatatttctagatttccaggtctatgtggaaatcatcacacttggggcaataaatgggttagttcagatgtgctaagaaagtaaatagtgtaccctaaatatcttgcatgtacatttatctatttctctgtttaatgccacttaatttgtaagaaatgagaaatgaaaccctatgtatcagtggaaaaatccttcttgcttcagatttcccaactttattctggaggagaaaaaaatctgtatttctcattaacagagatagaaaaaggtgatgtacttacgatggtcacattcatattgggcattggatctatttaagcctagaagtataacagataatcagttccttaagtgtaaatatgttcttaaatgtttggcctttttatctgttattcaaatgtattagtaattctcatattttgcaaacagatccttttgtgtatattataaaatatataccaaatctgtttttccttttgctgtggaagatgtctttatataatattgagacttcccttgcaaatgggagacgggactctggtcaggtatagtgtgtaggcctagccccatgtattaggaactcataaactcagaaatccaaggattaaacattttatgtctccttcatttatgcaagtcatgctttcattctacatgtagttaaaactacaagtatgagaaaaaatagaactttccattggaattttttccaatcaggtaatgttttagcaactttaaatcagcacttaatttgattgtattacctatcacagaaccaataaccctttcntttttctgcagtaaagaaaatgaaatatcctttattttccaaatgtatgaagcacaaatgcaatatagttatttaaaatataaaatactttaaaatgaatgtgaagaatgggaaaatatatttttgcatgaaaacagactacttacaaatgtgcttaatatctcaggaaaaaaagaatgaataaccgtatataaaattggtaaactataaattggctgtatttccttgccggttttaattttaaggaagcatttacatgaaaagaaaaaaggatcttagtagtctgaatttcctctcaagtatgctagaaaatactttctatgaatttacaattaactgcaataagaagtgggttagcattcaagtaaggtcaataccccaaatgagaaactcttcagttagaacacattagtggttgtaacacagaggcagtagataaatatttgaaatgtgagcatttctaaacttggtaccaaatggaaagggtttcatgaggtgacagtggcttttaaacattcatttgaccgattattctaattttccttgttaaatcattgcaacagttgcatgggggagaatggatattttttgaagaattgcttattccactttcaatttttaaaaatcgaggggattaaaatattactttttaaatatgcataaaagtatcttaactgtaattacattttcagttgctttgttatagtagcatgcatattaaatataaaatgcatttatgaaaatttttgtaaaaaataaaagatttttcatttctca

SEQ ID NO: 440240 - DNA, 1699 bp, Homo Sapiens
  misc_feature (632)..(632): n is a, c, g, or t
  misc_feature (968)..(1266): n is a, c, g, or t
cctctttttcaaacatcaatgagtattagcttagaataaagttcttattgctgttccttcagggaacagggaaactgctaacttgtcagttccaacaactgatgtaagatcatcttctgaccatagcgaacctgtaaggcttgctgttccctccagctgagtttcgcatagacttccttattactgagtaaaccttggtcagtttttaagtctgtggcataggtctgcaaagtcagtagaacactgttttgaagcagctgtctccacgatgctttgagcttgggaatatttgtgatcgtcaggctgccctcttcccttttatcatctccccctccatcctggtctttaagctctctgaactcctcagcaggcatgcacagtacctttagtgtggtggtcagctcctcttcagtcagcacctcctccctccctatcacaaaggctccctcttcccctaccatctccagtttgcataggaaatcccagcgctcgtacactaggtgcctttcagcttcagtttttgttccctgtaatgctgcctcacgaactgtcaccatctgaatgtcagctgtgtcatctgtgttgtcaggatatggttcaacaaaaccgtacatatgaatcagttgccagtnagccatttgcccataagtgttgaaaatctcatggcctttaggaatgggctgagtggctaccatccgaagacaattctgaggtgaaagggagaagctggggccatgcctttcacgggccagccccatgaagattatttccacttaagaagagccttcagcaggtgtagttcagccatgactgatgctgttaactaccaaagttctacctttagttcctgttagaccctaaactgtgaaacaaaaaagggttgggctaactttaaaaggccagcttcatgtttaactgggtggatttctgcacagtcctcttcagcacttaaaaagttgctagctttnnnnnnnnnnnnnnnnnnnnnnnnnnnnnnnnnnnnnnnnnnnnnnnnnnnnnnnnnnnnnnnnnnnnnnnnnnnnnnnnnnnnnnnnnnnnnnnnnnnnnnnnnnnnnnnnnnnnnnnnnnnnnnnnnnnnnnnnnnnnnnnnnnnnnnnnnnnnnnnnnnnnnnnnnnnnnnnnnnnnnnnnnnnnnnnnnnnnnnnnnnnnnnnnnnnnnnnnnnnnnnnnnnnnnnnnnnnnnnnnnnnnnnnnnnnnnnnnnnnnnnnnnnnnnnnnnnnnnnnnnnnnnnnnnnnnnnnnnnntgggggggaaaaaatggaacttttgtagatcaaagtgggaaaggaaaatggtggcaattgattaagaaataaccatactgactaatgtctgatcctataaatgtgccatgtttggaggctactgggcatgtagaatggagctgttgtgaacacagatttatattagttctaggatcgtttaacacctttgacctgtgaatgtactcatgcctgcaaaacacgagactattactgtatcagactgctttgcacagtgtcacacacagtgtgattcttactgttgtgacccctcggataggcatgagacatgtatttttcatcccacttagggtggccccctaaatcaatgttggctttatttccacctccatagggtttaaccccaattgtatttggcgggcctgttataatgttgttcgcttgtgaaatggtt

SEQ ID NO: 440241 - DNA, 1254 bp, Homo Sapiens
  misc_feature (4)..(4): n is a, c, g, or t
  misc_feature (9)..(9): n is a, c, g, or t
  misc_feature (50)..(131): n is a, c, g, or t
  misc_feature (177)..(286): n is a, c, g, or t
  misc_feature (356)..(356): n is a, c, g, or t
  misc_feature (371)..(371): n is a, c, g, or t
  misc_feature (1118)..(1118): n is a, c, g, or t
tatntaaanatcaagcaaaaggaaattaaaaaaaggaatatagcttggannnnnnnnnnnnnnnnnnnnnnnnnnnnnnnnnnnnnnnnnnnnnnnnnnnnnnnnnnnnnnnnnnnnnnnnnnnnnnnnnnacaacagagcttcaaaatatgtaaagcataaaccaaaataagtgannnnnnnnnnnnnnnnnnnnnnnnnnnnnnnnnnnnnnnnnnnnnnnnnnnnnnnnnnnnnnnnnnnnnnnnnnnnnnnnnnnnnnnnnnnnnnnnnnnnnnnnnnnnnnaatcaacgtgacctggtcggtacttattgaaacttcaccctggaagtgctcacagaatacacagcaaganagaccatatttggtnccataaaacaaatctccacaattttcaagtaaaagaaatcatatagaaatatgtgtctgctgatcacaacaacacttcctctaggaatcagtggaaaaaagatgtctgcaagaatttccaaatttttgggtattcaacacacttgtgagccctacaggtcaaagaaaaacatcacaaaggaaaattgaatatattttgaatggaactcattgcaaatgctaagtgatattctagaaattttttagcattgcttacctatcagatttcttcatggacagttagctaaagggctgattcattcagctgcaactgatggggaatggctgtgtgcttgctcttattatgttggttcagtcgtccgtcattccagtcctaactctatttttctttgtgccttaatttttccccccgggtctctcctattacttgctcaactaaattgtactaatatttatgggtcatctattaagcaagcataatgcttgggctaggtgtttatgaaattatgaagataagtaagacagagcttttgatattaaggagtttgtattgtaggcgttatgtgcctatatctgctgattaaatctgacttgcaattcatctttttctagagcttgtttaagacagtattttaccaggtaagttctccctttaattcaactagtagatctgttcattatgtctataaactttgaaggtcttgggtctatgccattcctaatttttaagactcactactgatcctgngattgtgccaatggaaactttaaattaatttttgagagaagtgttaaaaatatggccctttagcttggttcttgaattttttgccttcttgggaatatcctggcttcccttttttacccaacagattattttctgt

SEQ ID NO: 440242 - DNA, 1174 bp, Homo Sapiens
cgcggtagttgcctggtaaatggcaaagtctatttattatgttgttaaagacaactgaaacaaatggcatttaaaaactccagatgagatgataaggcaaagcaatgccagatgaattcatcaagataaaaagcagtatggcaatgtttttatcaaagtagaattcaagtcatgaagcattcaacaggaagattattttatattgataacaggtacaggctatgaggggaaagctttgcaaagcaacaacagcaaaacagaaagcaaaaactattagaaggaagattagctatggaagaaaaagaaggctgtagagaattttaacaattattatgtttcaatcaacaaagaacaaacaggataaatcttaaaaagtggtcttgttattgttacagaaagtgatcattctttacactacaagggaaaactcaaaatctacaaaagagaaatttcacagacaacaatctctactatatccatacgtggggaacagaacaaaaaaactaggtctagactagaagacagagagaaaccatgtcagaccagagcacattgatggctcacggtgagtgacccatggcctaaaggtgcctgtttagggcccaggagccactcacacaggcagagcagcttactccgtatgaaccaccaccagcacccctccctgcccggtgatgtcacccggtgggctgggctggaacaagtccagatgcctttgcctcaccttggaagggccacgaggagcttcctcctctatccccaagttctccacttacacacagcacctgacacgaaggttggcaagtttcccccgggccatgactgcacaatggctacccccagcctctgtggcctccgagagagggctcctagacagattccagccctatagggggagggaagcaacactgcagttgaccttgaagagatcactgtagggggctatagaagggattgtgacatttattgttctgaaaatgccatcaaagacagttgtaaagtctagtctcatacacacttggcaagacatagccaaaagaggtaaatttgaaattagaaaaaatatcagcagttattacccagagcttgaaattctgacctgttacacagtaggatattcaacctccatttcagcgtatttaggtacttattaggtagattgcaaaattactag

SEQ ID NO: 440243 - DNA, 933 bp, Homo Sapiens
cctagtagaacaatttattaattaatatgcaataaaatatctccccaaaatctttccagaaatgacaaggcaggaaagtgaatacttttatgcttctctggaaatttttaatgtaaacatgaaatatttgaagaaccgattaaaaagtctcaagtgaatctgtaaatacatttttaagtctgacttcaaatcggtacatgaggcttagacatacacatcattggacaagtgacttaaatatctaattacaaatcaaatagcattttcctaacttcaactataaaaacacaaatttcagtaggtactgcaaatctaagaagaataacttgaaaaataccataataagtgttgtaaaaggggaggactcatatgacagaccttgaaggaaaggtgggacatcacgggaggcaggtccccctgtggacatgattccacagaggcatggagtccttttgccaccagcatgatcctgaaatattgaaaaccctcaagacaagtgataccttcaacatagccacaaatcagtgagcacatcccacgacagggtgtttaaagaccaaaagaaaaagaacagtcagaggcagaattcccctagtaactgccacacagtgaccaccagcgagtgatccaatggacgcatcatggatgagggagattcggatttgtgttaagtaagggacgcgggttctgagccgttcaatattctccacacctgttttggatcaggcatctctacattagtttcaaaacaaaatggtggttaaaagtaacatgccttacactactacttccagggagttaccaagagttccacgactttttggggcatccttggatgcccttcttttaaacatttctgacttgtggactttttcttaaaagaaggtcccggtcaaccagttttatatctttttaacaagtgtttaaaaaaag

SEQ ID NO: 440244 - DNA, 1006 bp, Homo Sapiens
  misc_feature (836)..(836): n is a, c, g, or t
  misc_feature (966)..(966): n is a, c, g, or t
caggctggtacggtccggaattcccgggatcttttagatctcaggtctaaggcttcctttccctccctctcccagctagtttgtgctaattaagagaccttttatactgttttattgcctgtttgaagaaataatttttatcacgtttttgtaagatatctataattttaaatgtttataaattgtttaatttattagcatcttaatgtaccccatttttatatactgaatgtggccttttgagtgaaataggaagcttcatggtgttggagccacctttgtacagttgtttaaagtttcccattgtcacggaaaacattggttgcaaagcccctcaaagccctcaagtgccttctgtgagtttaaatgtgctggtgccctccagaaaagcctcggcctcagctccgtttccgcctgttccctcccccaggataatgaatggttactgcactgtaaagaccgtggtctcttttcactaaataggagattcgagtttcccagtttacatgaatgaagtctgaatttaagacggtgatgaaactgaggttcagtactctcgggactcgaggaaattattcctgagacatgggagtaattcttacaaatttaaactattgtacagatccacatacatgttgttaagtacctaatgttttgctgaacttttaaaagttaatttccaaaatgtataggggattctgataattaaacctttttattgctcatttttttagtagaaggatatcacttatttttaggcttgtaaaatgtatgaactggtgagcggacatctgttaagagagtcactagtcagaatgttaaaggagtgcatgcangatgccccaaatgtcgtgaactcttgttactcctgtatgtagtagtgtaagcatgtgacttttaacaccatttggtttgaaactaatgtagagatgcctgatttcaaacaggtgtggagaatattgaacngctcagaagccgcgtcccttacttaacacaattccgaatc

SEQ ID NO: 440245 - DNA, 902 bp, Homo Sapiens
ttttttttgacggagcaaacgcggctcagtttattagaatatgcaaaagagaggactttcctccacaaatacagattgctgcttctcagtttctatcaagagcaagacaacagttgaaaactgtattcctgagaagaagcaaaaaagttatcagtttacaaacaaggataacaggtgatttcaacaaaagataaaaaacttttttttccaaaaatcaaaatttcaagtattattccagatgacatggcaaagctagcacaggcggaagccaaggtgcccctcaggctctgtagggtcttggaggaagggcccgggcagcatgagggagcggcgcgtcctgggacctgcctccagccctgggcttggggccgtggtcactcacacaagggagcagcacgtcctgggacctgcgtccagccccaggctcggggccgtggtcactcacacaagggagcagcatgtcctgggacctgcgtccagccccaggctcggggccgcggtcactcaccggttagcaaggagcgactaacttggcggccacgtcgagggttagcagttttggacattggaaggtttctttttttaataaacagaagcatatgcttattctttcaaataccatactatacccaattttagtcaatttgtaaattataaattatattatttgggctacagtttggcgacatttaaatcttattagaagataagcaccaaccctattaaaataaaaaatagataacatgcctgtgggttttcccagcagcaggattttgggtacgtcctgtaggcctgtaaacttatgctcccttctcctgaaccaagtttttgaaaaaactggccctttttccttggaacttttcctgaaaacagatttccgttttaaatggattttcgggaaa

SEQ ID NO: 440246 - DNA, 420 bp, Homo Sapiens
  misc_feature (207)..(207): n is a, c, g, or t
gcggaggagcaaacgcggctcatttattagaatatgcaaaagagaggactttcctccacaaatacagattgctgcttctcagtttctatcaagagcaagacaacagttgaaaactgtattcctgagaagaagcaaaaaagttatcagtttacaaacaaggataacaggtgatttcaacaaaagataaaaaacttttttttccaaaantcaaaatttcaagtattattccagatgacatgggcaaagctaggcacagggcgggaaccaagggttgcccccttcagggcttctgtaggggtcttgggagggagggggcccggggcaggcttgaggggagcgggcgcttcctgggggaccttgcctccagccctggggtttggggggccgtgggttcacttcacacaaggggaggcagcacgt

SEQ ID NO: 440247 - DNA, 903 bp, Homo Sapiens
  misc_feature (124)..(133): n is a, c, g, or t
  misc_feature (305)..(313): n is a, c, g, or t
  misc_feature (843)..(843): n is a, c, g, or t
aatgtcgcatatataaattttattgcatttgacatcatacaaaaatttgaacttaaggaagaaaatgaaaatgtgcaccttttacaagtcaaagaaaagcaaaagttttagcatttggtctgcnnnnnnnnnntacgttagaggtacaaaactgtactacagcaggtctaaaaaatgttggacatagttcttttgaaaaagttaaaactgttttcaaggttactttttatatttaaatttacaggcactgaccaatttacaaatatttacataaatcaaaaagacccttaataaacactgtagcnnnnnnnnnagcagccaccacttctttcatgtgaaaaaagaaatactaaaaaagagattttttacaaacattaagcttttatttataataattttattgtgtcttatctaaaacattttgtggtgacttactgcctaaaaattccagtttagattacaatcctataattgtacacagaaaaatatctgatactacaaacaggatataatcttaactttgatctcagtttctgttgcttcatgtcacagagaaaacagagcaggaaaatggcaagtaaaacagaagtgcacattgcactaagctatcgtaaagcacaggaaacaatcttttcaaaatgtgtacactgagactgattctttaaaacgattcactagactgttgtaagagttagtgctcccattactacagtgcaaaatgtattgtttgtttcaataccaaaatttaaagcaatcttcacgagtcccattaaaagcttgtgaaagtacttatggaaatgctaataccggacccaccccaaagaccttaggtctattctcagntgggtccaagcaaagaacttaaaggccaatggtttaagtatttttttgccttgcagtcgt

SEQ ID NO: 440248 - DNA, 1414 bp, Homo Sapiens
  misc_feature (932)..(975): n is a, c, g, or t
  misc_feature (1124)..(1134): n is a, c, g, or t
aattaagaaactaatgaatcatcacaggaatgtgttgctcctcaccctaaattaagagaatgtcccagtagattagacttcaacctttgagtccaatttggattttattatcgttgtctatgcacttcttatattggttatcttcttgtaaatcttctgtcttttgtaaggggaaaggatttaacatttagaataaaccccaccatttatgtaatggaaatagtttaaaaattgctaactgccatgtggattgcaaattaaatggaaacttatttagataacgtaaggctcaatatctgcgttgaccacctagatattacaggttttaatatttaaaactatttttgaattatccacaacctgtatagtgatagccatatatttaataatggaatggtggttaacagtctatttactgcacaattaattgttcactaatcaaatagaatgtggtaatttttcagactttatgatctgtttccaaaattggcacaaagtgctagggtttatatacacttatcgtaactgtatttttgtgccttggttttatcatgtcaatgcactgtactctgtaaaagttttgcagacaaaatagaaagtatgataatccgtcagaagtatgatgtaaaactggaatcctctgtattttttaaatgttctaaaaattttatcgctgttaaggtattaatcattcagtattactaatggaatagaaattcatacttttgtatggacaacaattcaaattgatattgcatttatagcactgtaagaaactttcatcttgagcaactttgtagatgatgggtgttttattttcaatcgccatatttgatcagtcattgaaaattggccccagtgctgtttgttcatctctgtatgtaaaaactgacagtgagacacaacgttctgaactgtgagggtgtcccagnnnnnnnnnnnnnnnnnnnnnnnnnnnnnnnnnnnnnnnnnnnntgttttttgtttgccaaggactcaggaaaataaaaagcattttctatttttaggacaaatcacaaatgaagtgtctaactggctattactgtttacccatataaaatatgctgctaaagtacatattttgctgtcaatggcttgacaannnnnnnnnnncaaatttgggacttgagaggttatatagggcactatattatccaacccatattttccttattttgccaccaaattcccctttaacaattaaaaaagggcgaaatgcctgtttggcaatccaaaagtggaattttcttttggggggaagccgaacccccggggtttatgggggtgtctcccccggtttaggcgcacaacccccctgcccacgggaaggccacaccccccctctcaacattattctggtgtgtggggggggactctgtcgcgggaaaaggaa

SEQ ID NO: 440249 - DNA, 964 bp, Homo Sapiens
  misc_feature (244)..(244): n is a, c, g, or t
  misc_feature (342)..(342): n is a, c, g, or t
  misc_feature (498)..(498): n is a, c, g, or t
  misc_feature (791)..(791): n is a, c, g, or t
  misc_feature (838)..(838): n is a, c, g, or t
  misc_feature (859)..(859): n is a, c, g, or t
  misc_feature (862)..(862): n is a, c, g, or t
  misc_feature (871)..(871): n is a, c, g, or t
  misc_feature (882)..(882): n is a, c, g, or t
  misc_feature (886)..(886): n is a, c, g, or t
  misc_feature (906)..(906): n is a, c, g, or t
  misc_feature (911)..(911): n is a, c, g, or t
  misc_feature (914)..(914): n is a, c, g, or t
  misc_feature (922)..(922): n is a, c, g, or t
  misc_feature (924)..(925): n is a, c, g, or t
  misc_feature (930)..(930): n is a, c, g, or t
  misc_feature (944)..(944): n is a, c, g, or t
  misc_feature (947)..(947): n is a, c, g, or t
  misc_feature (949)..(949): n is a, c, g, or t
  misc_feature (951)..(951): n is a, c, g, or t
  misc_feature (953)..(953): n is a, c, g, or t
cgatttccaaaggttccggtgaggcgtcgctgggggcggggcggggctcgcagcctccgcctgtttccgagccgtagaaccaaatgaaaaataaaaaggcggaatattgtttttttaaattttggaccgcagtgtccacaggggagcaggcctggattatctttaatggcactggtcagtcacggggcggccattacaggtagaggcctgaggcgagggacactgcggcccctctggctccgtntccccggcccgactattcccgccgagacccggccccacgcgcccctcccggcccggagcagctgcgggacttgcctccgcccccccgcgcgctacatntcgcgacggagacaggcgctctcccgtattctggcgccgctgactcccagggctgggctatcctctgagttgggtggcggttagttggggccagggaagcgtggagtgtgggttccaatcgagttaagaaaagcctggggtgtactgaactctgcntgcttccccagccctgccagtttccagagaaggcgcttgaaaaggagaaacgaatcgctgctgctcttctaaaagccggttccctctctggtgtctgtggaccctgcttctgaagtacatgaaccttgaggaaaattgaccagttctagcagttctaaaatcatggctcgtgatttggtgatgttcagagatgtggctgtagacttttctcaggaagaatgggaatgcctgaactcatatcagaggaatttgtacagagatgtgatattagagaactatagcaacttggtgtnactgggtaagcctagcatatctgtgtcagataatttagacattcacnaggactgaatttctgggctgnctntgttttttncaaagacgagntcgnctgagtcaccaggctgaagngcagnggngaatcttngnntactnagcctctacctccnggntnancnattctactgcc

SEQ ID NO: 440250 - DNA, 740 bp, Homo Sapiens
  misc_feature (460)..(460): n is a, c, g, or t
acaagagtaagcattatttcttgaactatgcactatacatgtgaatctgaatttgatttcaaattatttcatattgacatattttgctcatttctgatgcaaatttaatatcaagatactactatcattctgttctttattttccctggctttcagtccctctgtaaaatagttaatgatctggaactactttctcaaccattttcagatgttttctttgagagaaatcctgcagtgacttaaaaaaattaaatcattatctcagtttccttctttgcctgactttgggtttctgaatttcggacatctggataataagcaactcttttgaggctgtgggtctcttgagggaattaatagaacaattcaatcctaacattagcacagctacaggctgagagtgtagaccttgctccattcgatgttcaattctgtgctgacagaaagggttgattttatnctcacagtctaaaatcatcctaaaagcaggaaagagtgaggaacttaattgtttcaactgctaacatgggcccaaaataatgattagaaaatttaaatccattcattcttctgacaactggaatgtggagttcagactagggaagcaggcatggaagataacttaaaaaaaacttactagttaaacagaattgttagagggaatatttctactacaaatgtatttttcctctccccttcaaatattaatatttacaagatgttaaaatcttaaggtagga

SEQ ID NO: 440251 - DNA, 1170 bp, Homo Sapiens
  misc_feature (297)..(297): n is a, c, g, or t
  misc_feature (303)..(303): n is a, c, g, or t
  misc_feature (321)..(322): n is a, c, g, or t
  misc_feature (339)..(341): n is a, c, g, or t
  misc_feature (383)..(383): n is a, c, g, or t
  misc_feature (406)..(406): n is a, c, g, or t
  misc_feature (431)..(432): n is a, c, g, or t
  misc_feature (490)..(490): n is a, c, g, or t
  misc_feature (501)..(502): n is a, c, g, or t
  misc_feature (518)..(518): n is a, c, g, or t
  misc_feature (555)..(555): n is a, c, g, or t
  misc_feature (562)..(572): n is a, c, g, or t
  misc_feature (612)..(612): n is a, c, g, or t
  misc_feature (990)..(999): n is a, c, g, or t
gattacccacacaaagtgcaacaagaatcattgtccatatagactctcctagattggctttgctagaacatttcacaaggccatttcagtcaaagtcctgagaaagtaaccggtttcaattgtgccctattacaaaagaaaacgtggttattaactttatacagacaaatgccatgaattaagaatattcataaatagtttacaaattctggagaaattagaatactcaatacacttaaagtgtatttcaaggctataaatagctcaaaataaaaagattattcagactctgaaaanacaaanagaagtagcaatatttcnnacaacaaaagccatacnnnttatttcagtcttccattagttcatttcagtccatgtaatcnactcctgctctacttcatattcntctttatgaacacatcagcctttcnnttagtgccttggaagttttctgtctaatccaatggcacactctccaaagttaccaganacctgcattcnngagttcttttcatganctccaaagaagtaagccttggactgtagctgattatnagtcacnnnnnnnnnnngagaaggatcaaagcaaaacatcaattatggatgacaaangtcttaagacagccataaagccacagttgacaaatgtggctatttctgtggcttaccacaatttaacataatccttaccacatatattcagacatatcagaattttagaactctcatacaatcctggaacacatattaacaacaaatctctatcagtataacccaaaggaagctaaacaccacctcacacttgacaatgtttcctgtataattcacacattacaaataagcctaatataagcctaatatgtcactcttgaacttcaggaagcctattatccaaaaagttagtttaaggtcaaaagtttttgaattaactttttccattagtatggtcatatctttcttactaatttgtaagttatgtaatttattaannnnnnnnnngtggtctggttcccaacctctatgtcagataaagaatcaccccagcccagacgccatggctcatgccttgtaatccccacactttgggaaagccaagtgggaaaaatggtttaagcccagaatttgaacccaagccttgggcggaaaaaccattacccctatcttctaccc

SEQ ID NO: 440252 - DNA, 1221 bp, Homo Sapiens
  misc_feature (119)..(127): n is a, c, g, or t
  misc_feature (746)..(1039): n is a, c, g, or t
  misc_feature (1084)..(1092): n is a, c, g, or t
tgcggggctctgtgtgctcaggtggagtgacataagcgccggggattacatgggttgtgcgccagtctgatcggcgcggagtgggtgagagtaagaaggtggagggggagtatacagtnnnnnnnnncgagtaggggagctatattaaatgcgggcggtgttcacaacgacatcgggcacgtggcgttacgcgggagggggaaatgtgtgggggtgacgcagcgcgcgatggtgtctcgtggggtggctaatcgaggagacgtggtgtgtgggaaagggagacaacgcgggagacggtgaaagaggcataggggcaaacgggaagggggtacaatggggggggacaaggcgcagggtgaaaaagggatatgaatgtggcagggggaggaggaaacgggtgtggggggttcggggccaatgcccgccaaacgggggcgctgcggtatacggggagcggggaaaggtgctacaagggtaaggcgaggttggtggcggaatggcgttagaaaggggtcaaagtgggaagggatattgcccctgccggtcccttgcccggcccattgggggaatcgttggcagaggagggcctttgagggtaagggaggagccccatggttctaggaccgggggggtatttgagaaaagagttgtactccagataagttccagatagaataaagggttaatgtgaataagcaaaatcaaaggagaatatgggtaattgtttgtttaaaatttagttctannnnnnnnnnnnnnnnnnnnnnnnnnnnnnnnnnnnnnnnnnnnnnnnnnnnnnnnnnnnnnnnnnnnnnnnnnnnnnnnnnnnnnnnnnnnnnnnnnnnnnnnnnnnnnnnnnnnnnnnnnnnnnnnnnnnnnnnnnnnnnnnnnnnnnnnnnnnnnnnnnnnnnnnnnnnnnnnnnnnnnnnnnnnnnnnnnnnnnnnnnnnnnnnnnnnnnnnnnnnnnnnnnnnnnnnnnnnnnnnnnnnnnnnnnnnnnnnnnnnnnnnnnnnnnnnnnnnnnnnnnnnnnnnnnnnnntgggtgattctttatctgacatagaggttgggaaacagaacaacnnnnnnnnnttgataaattacataacttacaaattagtaagaaagatatgaccatactaatggaaaaaagttaattcaaaaacttttgaccttaaactgactttttggatattaggcttcctgaagttccggacgcgt

SEQ ID NO: 440253 - DNA, 700 bp, Homo Sapiens
  misc_feature (404)..(422): n is a, c, g, or t
  misc_feature (544)..(599): n is a, c, g, or t
cattaaaacatgctcatgggaaaatttatttttcaattttaaaatagtacatttaacctgattagttacattccaggtacaacgatgagcactgttacgccatcatattgcaacatcctgacttcatccatatgggttgtctttaaatagtgcaaaatactttatccaggaatgtgttcggaagggtcttgcaaccaaaataaggaaaagaagtatcttacaaattactatgaacatatattcaagtgacggggtgaagggaaatttttaaaacgttacaatctgtacagaggaattgccacagacaaccaaaaagttccctccctcctgggaaaagcatcgggcctctgaccttcacaggtctggcatttgtgccaaggtaattttttggtgtcaatcaaacnnnnnnnnnnnnnnnnnnnccagttacttaatacattataaatagaagtccattccagtgattcctgtggtgggtcaaatgtggcaacagaaggcacaccttttttcacctagggtttcagtagggttcttaatgaatgtnnnnnnnnnnnnnnnnnnnnnnnnnnnnnnnnnnnnnnnnnnnnnnnnnnnnnnnncatcgccaccaccaactaaaaaactggatcactccagcccggatgccccatgttgcatatggtgtcagcactcaaacacggttctgggtactttagaataa

SEQ ID NO: 440254 - DNA, 1081 bp, Homo Sapiens
  misc_feature (18)..(18): n is a, c, g, or t
  misc_feature (21)..(21): n is a, c, g, or t
  misc_feature (24)..(25): n is a, c, g, or t
  misc_feature (27)..(27): n is a, c, g, or t
  misc_feature (32)..(32): n is a, c, g, or t
  misc_feature (40)..(40): n is a, c, g, or t
  misc_feature (42)..(43): n is a, c, g, or t
  misc_feature (45)..(45): n is a, c, g, or t
  misc_feature (62)..(62): n is a, c, g, or t
  misc_feature (65)..(65): n is a, c, g, or t
aaaaagaatttctccacnggngtnntntttancaaaatcncnncnccattttctccacatcnttntgcaaagagagaacccccactgcagagccagcaccccaccccgattacaccaccctgcctccaccccctttgcccaaggaaggaggagaaacggcccactcacagccctgctcagctgctaggctggggtccccaagaggccagatagcgagtttgagaagccggcaccctccagcatgagtggtgtaggctgagagaatgcccgggccccatagggaaggtcccaggaagtctgagatcaggactagatggggaagaaaccctgaggggctcagctcagacagaacgtttagcgtggagaacaggggacggatgtgagaagaaccccgaaccctctggggcagcccctacttagagccagctccaacccgggctcccaggcccaaggcaccctgaacatggcccgcatgccttggggcctgcccctgggttgggatggtctccagagtgcagggaacaggcttctgggtattggagccatgaagaccccacagagtcctagcttcaccccatcccagagttggactgtgagcacacagggacgggggtgagcatggggtgagatggctggggagcccagtgcaccctcaccttctccaggagtggcttgacgcagtgcagcgtgtcctggatatactgattcagctccgggtggcaggacatctggaccggcacgttgtacttcttgcgtttctggaagatgcccacggggtagacctcgcgcacgtagaggatgagatgcacagccacctccaggaactcgcagagcacatcggccaccacttggccaaagttgaggtcttgtcgtgtgagcgtggtcatccttcccgctaccgggaggagtgggcctgcctcgcccggtgcccgcacggcttgactgtgcgcccgcctttgtctgcctcctttgtcttgcccgcgccctctgcggcggcggcgcctaggcctctggggagctggcccagaactcatgagcgcagctggcgagggcgcgctggccgggtgcgcgccgatcccgg

SEQ ID NO: 440255 - DNA, 1076 bp, Homo Sapiens
aaggagggctcagctcagcccagcccttggggcccctttattgaaacaactcacagcacagtatttgagacagacagtgttggccggcggaaccccaggaggctgagaagtcgaggttgcggcatccctcactgccctcctgggggaggcatcctccaagcagacctgagcggccccgggctggggcgggcgatccacacacagaggcgataagagcacttggaatcagggcagccatgcagcactgccctaggcggggatcccccaaagtctgacagtttgggcatcagtggggtggcaggtgccccctcagctgcctttatgagcgcgctcttccacgtaaagctgcatctttaaaatgtccgacgtcatggtttttagtggtatcagccgggggtcatgcatgtggacatcctgctcatccgccaggatccaggggaaatccttgatgacctggatcttctccatgttgcgagtggcggcttctctcgtgtgcaccaggactgtgaaggtacagcctggggggttgtggtccaggacggcatcgcacacgctgatcttcaggatgaaggcccggagcagctgctccacatgagacaacagcgagtctgagctgatggacagcagtggaggctgggtgatctcaaagacgaatttctccactgggcggtgctctttatccaaaatcaccaccaccactttctccacatcattcttctccaggagtggcttgacgcagtgcagcgtgtcctggatatactgattcagctccgggtggcaggacatctggaccggcacgttgtacttcttgcgtttctggaagatgcccacggggtagacctcgcgcacgtagaggatgagatgcacagccacctccaggaactcgcagagcacatcggccaccacttggccaaagttgaggtcttgtcgtgtgagcgtggtcatccttcccgctaccggctctgcgctcggttcccgcccgagatcgggcccggccccgccgcggggagccaccgaccggaccgatcgcgcctcccgctcaacccggggcctcggcgccgctcggtgacgttccc

SEQ ID NO: 440256 - DNA, 1096 bp, Homo Sapiens
  misc_feature (135)..(143): n is a, c, g, or t
  misc_feature (324)..(324): n is a, c, g, or t
aaataaaatccaattcttttttctgaaactttgtccctggaattatttgggataaaggggccaggaaaaaagattccggccccaccgtaagccccattgggtggtagtttccgttcccagcccattgatgagttnnnnnnnnntggagaaaaatttaggtttttctttggagaaaagtagatgaagggttcattttttcccttgatccctttttccttttaaaataagcatcaccaaaatgctgaggtagctgaggcctttctgttgactgaagcttttttcaatgagtctggagagaaaatcatagactacagctgcatttcntaaacagctgttgatgttttccaaaaggcaggatgccaatccatggaaaggcattatacaagaagactgaggcactggcagctagttccacattttcactaaataactcaatcatgtgctgaaaatcggtgtcttcataagtgaatcgttctccaaaaatgatcagattggttatgtttgaaacagcattcgttattaactgtttaaagtcaaaaggtctacctttgtatgtttcaatagcatcattgaaaaatttggtttcttccaagattttagattcaaaagacttttggccatatccaaaatatcgaaaactgtttacagctaatcgtctgtgatcaacccatcctcggccatatctggaattgagtaagcctcccatttttgtcatcttcatgaataaaggaaggcatggtctgtctgcaaaaatttcgctttgatgaacaaggcattcctttactacatcatagccatttagaaccacagttgatatgcctccaagatctaaactgaagatctttattatctcgtccagcttccctttaacaacgtaaaacacaagcggtggtcgccttttccgctgccagtcacagggcatttccgtgctgctttcccctccgcagaatgaggaggagcgaagtaccgacctcaccggctggttatgagttttaaatgagtcaccaagttggcagtgacagtggcacacagaaggcgccttttaagttctgctaaggtccgttcccagccagtcagatcccgggaattccggacc

SEQ ID NO: 440257 - DNA, 1453 bp, Homo Sapiens
ccttggaaagttttccaatagccatccttggaaaaaattttggtttctttccaagaattttaggattcaaaagaatttttggcccatattcaaaaataatcgaaaactggtttacagcaaatggtcggggatcaaacccatcctcggccatatctgaaattgagtaagcctcccattttggtcatcttcatgaataaaggaaggcatggtctgtctgcaaaaatttcgctttgatgaacaagccattcctttactacatcatagccatttagaaccacagttgatatgcctccaagatctaaactgaagatacacaagcggtggtcgccttttccgctgccagtcacagggcatttccgtgctgctttcccctccgcagaatgaggaggagcgaagtaccgacctcaccggctggttatgagttttaaatgagtcaccaagttggcagtgacagtggcacacagaaggcgccttttaagtatctgctaaggtgccgttcccagccagtcagaacggcattaccatctgcgctgtaggacccccgcagcggattttagtcatcaattcattcacgcgttcacaatcgtttcccagggcccgcttctcagtcaggggcgttcccctgcattctccattctcacagcaaacgcctacaccagtcgttcgtcgactgcagacaccgaagaacctgctattaaccatctagaactcagaacgccttgattttccgacaagccgcgtgcagcttccacagagctgcgaggccgactcgcaagacgcccgcacctgagggcatgcgtccaccctggacctgaagtggcggcgcggctggcgagccaaacggcgcaggcgcaggagcaagagctcgagcggtagcgggaaaatcaggactggatcgcctcggagcctcggcccggagtgggtcaccggcaggggcggggctccccctgcaagggggcacggcgtcgaggacttctcccctttccagaccccgggaagcgggttgtccctcaaaggggcagccgggcacacggagaggtcccgactagtcggcccaggggcggccataagtccaaccaggaaggccctggccagcccgggccagcctggcggccctccctgcccggggcccgtcggggctgtacctctccgtacacctggctctgctttctcatgtagacatggggaagctcggatgaggctgccagggaatagatgttgccgataaatggcagccccggcggccccggggggaagcccatcggccacctctgcttcagcagctggcggacccctagcgcgaagagcagcaggaagagcgcgccgccgagcgccgccgcgccctcttcagctctccaaagcttccacatcggcccgagctggaggtgcgaactccacagcagccctgagacccaggcactccctccagccctgccatactcccattggcccc

SEQ ID NO: 440258 - DNA, 974 bp, Homo Sapiens
  misc_feature (881)..(881): n is a, c, g, or t
  misc_feature (970)..(970): n is a, c, g, or t
cgggctggtaccggtccggaagttccgggatatcgtcgaccacgcgtccgctgaaggaggagtttcagcggatgcaggctcagctcctggaactccggacaaacaactaccagctttcagatgaactacgcaagaatggtgttgaactcaccagtcttcgacagaaggtcgcctacttggataaggagttcagcaaagctcagaaggcactgagcaagagcaagaaagctcaggaagtcgaggtattgctgagtgaaaatgagatgctgcaggcaaagctgcacagccaggaggaggacttccgtttgcagaacagcacactaatggccgagttcagcaagctctgcagccagatggaacagctggagcaagagaaccagcaactgaaggagggggctgcaggagcaggggttgcccaagctgggcccctcgtggatggggagctgctgaggctacaggctgaaaacacagccttgcagaagaacgtggcagccctgcaggaacgctatgggaaagaggccgggaagttctcagctgtcagtgagggccagggggatcccccagggggcccgtgccccaccgtcctggcccccatgccgttggcagaggtggagctgaaatgggaaatggagaaagaggagaagagattgctctgggaacagctgcaaggcttagagagctcaaagcaggccgaaacatccaggctgcaggaggaacttgctaagctctccgagaaactgaaaaagaaaccaagaaagtttttggcgtctgcagacagaacaggagactctgtttaatgacagcaggaacaagattgaggaattacaacaacggaaggaagctgatcacaaagcccagttggctcgaaccagaagctgcanaggaacttgaggctgccaatcagagcttggcagagctgagagatcagcggcagggggagcgcctggaacatgcagcagctttgcgggcnctac

SEQ ID NO: 440259 - DNA, 1455 bp, Homo Sapiens
  misc_feature (22)..(22): n is a, c, g, or t
  misc_feature (53)..(53): n is a, c, g, or t
  misc_feature (335)..(335): n is a, c, g, or t
  misc_feature (428)..(428): n is a, c, g, or t
  misc_feature (514)..(514): n is a, c, g, or t
  misc_feature (1344)..(1344): n is a, c, g, or t
  misc_feature (1361)..(1361): n is a, c, g, or t
  misc_feature (1419)..(1419): n is a, c, g, or t
  misc_feature (1433)..(1433): n is a, c, g, or t
  misc_feature (1442)..(1442): n is a, c, g, or t
atataaggcacgcctcgaaatnagagcacatagacgatagtgtgaaagtgtancgccgccgcacactcggcagctatgtaatcttcgatgcgcacgtacacatcgactcaggagtcacagctcacgataacccagaggaccaagaacaactaactaatcacatacatacacacctcgtgccactggcatcgcatacaggtgacatcgacaagctccagagactatacacgtatcatccattacacaagacagcgcgcggacgaccagaatacgcagtcacgctgcgcaaagcatgtgaggaagtaattgtaacttaatatacatagccaaaatanaggagcgcactcagagaaacgtcggataatattacgagggatgaatccagatatataatccattatagtatccaatggtaacttctaatgctncacaaagtcgtaacgacgaagaatattgagtaccaaagttccacatagatagatgcaatattaagtgcaaggatcttacgcaatantacatacatctcactattgagatctgtcgcctatccactttcgtgggtgtggaatctgatactccgagaatgtgtggggagtaggaataatagtcagtgttgtcactttagacgaacccctccacttcaattggatcggtattttgtcttctaacggttatgtggaatcatgatctaaattgaaagatcgagactaacattgtatgcacgtgaatcgagggggaccggggttaccggtacatgaagtgtcgagcaattaaacggcgcgaaagtgatgcaagcgaaggagaaaagatatatccgcgatttaagaacatcaagttatacctggacgcgcatcagaccctaagctcgccgtgggaacgagggaacgccaaccgtcagagcaatctgaatctccaacctaaacggggcactcatcccacttgacctccatggactgcagcttcttgagctgactgttgacagtggccaggtctcctccagggtccacgtcttgctagctggctctccatgtgaaggagtttcttgtccagctcagcaaagctctgcaccagttggtctgctttgctggcctcaaagagctgccgtgccttggcctgggtggtgctctccagctccgcccagcactggcggatctcgcccagcttcttccgcacggaggccgccagttcgggcttctcctgccatcagttgctggccctcccgctcgatcttctccagccactccttattctgagccagctcggccatgaatgcctggtgccggagccatctcttatgcagcttgtggttgtcctcccgccgtgccatcccgcgccatcagcatnttctcatggatccagcnatccagctgaagcggcagtggcgttggcggggcgtccctgcagcggcgcggcgcgggngctcgcccctcaantgcgacggnagcggcagcggcg

SEQ ID NO: 440260 - DNA, 1684 bp, Homo Sapiens
  misc_feature (1050)..(1050): n is a, c, g, or t
  misc_feature (1103)..(1103): n is a, c, g, or t
ttaacacttcaaatcagctttattatgggtgacagatttagggttcttaaatagcgatagcagtggctagaagaagcgctcatccccacagtggagttctttgttgtgaggggagggaatgcaaggagtcatcagcgggggtggcccttggccactttttcagcacctacacagtgcctgggcacatagtaggtgccccaataaatatttgtcagccatttgtgggcagtggggacaatggatcataggggcaccctttggaaaccatatataggaaagaacatcttacatcccatatgcctgcaattcttggttccaacttaggggtatttccactccactctgccctcctgtggcctgtcttattttctggaggaggactgggcctgcctcatcctagcatcttaaaccctctttccagagctgcagcttctccacgtggaagatgtctgctctggtgggcatacattcattttaggagagaaactaaactcacaacccttcattttgggggatccatcttaaaaccaggaaggccttccagcctgccttttaatgggtaatcatttttggaattcctccctaccatgtattcttctattttttaccctctcctccttggtttatgggcatttcttggagggctgggggaccacagtcaagttgaggtgatccccgctccggggacggagtaaggccaggaggcgggatcggaatgttggaggcagaaccgcaagctcccagggccacccaatcacagggccagtcatccgttgagaccctgcctccgcgcccggcagccactccgtatcttcctcgcattatcgcagggttgggccgaggcccgcgcatgcctgcagaaaacctacggccgcgaggggtcgggcctcctcctgctcctactcccgagaggctccggcaatgagaataggccccgcccccccgcgcaagccaagtctacggaccaagtccgagcctgcagacaagctccgccccccacgagggcctgctccgggctgacagcgtccggcagcgcggcagagccccgcnccccatgcgggggcaacgcttactgacaccgtccgtgcgcgcgggaagggccncagcctcgcggcccggcgtggctttgtgacgggcctctggtggcccagccccttccagcagcgtcagcagatcccagtggttacgttggtgagcgacgtccgccggcgctagcccagcctggtcccgcagctctcgggctgcccccagccccagcagtagctgggctacttccaccgctccttcccgcgccgccaggaatagcggcgtctgctcctgtacagaagagccagggccgatatcagggaaggccacgcccacaggactgggcctttctgccttcacttgcgcgaccactggcccctatcccttcaggctttgcgggttaccgcactttccatctctcgtgcgcctgactgttttgtgggaagccctctgtcccatctaaccctgttgtcctgggcatctttatcggctccggcctggagaagcgagcgggcggctcgggcgttgttcacggcagcagcccagtgcagcgcagttttccctaggggacgacgtgggaggttgttaccccagttgggggccagacgcctgggttccggtttcccacgggttctggccttgggggaagggctattcg

SEQ ID NO: 440261 - DNA, 1845 bp, Homo Sapiens
ggtgggggagtcgcccagcgccttgggcaatggacccgggattttccgtacggagatcagggttgggcccatggttcaccttccctagcggggtcccggggggccaaagggaaatggttttgaaagcttttttgaagggggcgaaggcggccgacaagggtttacgggtggtgtgagtcggggaaagggggggtaaaaatatcttcaataataagacatcctatttttggggggttagggatagagataaatatgaaaacttttttttgataaaacacctagtaaggacatgtttccaggtttaaagttcatgaacatataaaacagaaattgggtcctgccaccttgagtgcaggattctgaggtcctaaatctggttctgaggttctgtgtttgattctggggtacagacagctcaagtaggaggtctccttatgtcacaaaactacacgatgcggaggttctgttccccaccaaaggcttgtctggggcccattggctgcctggggaggaggccccagcgaggctcatgggtccagcatggctcctggggggacccctactctcaccacgcaagagcccccagccaggagcactgggccagccagctgcgggccgatgagggggcttctggcccgccctgcacctggaggcccgccctgcacctggagttcctgcttggccacgggtgggcagacccaggagacacagcactccccactgggtctaggaccgtctccgcgggtggggaccccagccggccaggcatgtgccctgacagccctgccgacaacaacacctgaagggaacccagagtcggccgtaggaggcggcggggtctgtgctgctgggggcggcctaggctctcggaggaggactgtgatggcccctgcagcagcagggcacggtaggtgggagagctgaggaagcgggggtaggagtcccggtgcatgagcgtgtagatctgcagctgcgcgtcgtcgaacgtgtgtgcggacggctcctgcatcttcttgttgatgccctcccgcacacgggagtccaggctcacctccttggggggacaggatggatacgtagtcctcgtagatgagcctcgccttctcgtctaccacatgctggttggcctcggccttcagctcctcgcaggccaaccagaagagcatgttctcctcgctgtactctgtccgcaggaacgcccggaacacgctgcgtcccgctgggctgtgcatcagcttgtcaaaagactgcgcccagctctgcacctcctcaggacttggcgtggcacatacttcacagctggggaggggctgcagcttgcttctcccgggaggcctgccacgcgcgccgccgctcttggttccaggagcagctacagcagcagcaccagcacaggcagcaggggttgcggctgggggccgctggagaggctgtatcatgactggacattgaagggggccggtccgcctcctctggccctgtgatctgcttctcagcctcatgcggggtgggcatgggtgggcggaggaggttgcccaggctccgtggtaccagctctcagaccctcaccacagcgtgggggtcagcgacccaaaggcggggtgggggcaggaggggccaggttgggtctgggccccaccctggctgccgaaggggcgtgcactgcagcagcagggactcaagtcagacggcaggagggactcctgcggcgctctggagggaggctagcgccaggagcccccgatcggctggggccgggggcgcagcgcctcccctacagctcgaagggctgagtggctgccagatccagcggggtggatcccgggaattccggaccggtccagc

SEQ ID NO: 440262 - DNA, 1200 bp, Homo Sapiens
  misc_feature (571)..(571): n is a, c, g, or t
agcgggagggcgcgggccggcggcggcgcgatgtggctcgggagcgcggctgacccccaggctgtggtgagggtctgagagctggtaccacggagcctgggcaacctcctccggccacccatgcccaccaccgacatgaggctgagaagcagatcacagggcccagaggaggcggaccgagccccacttcaatgtccagtcatgatacagcctcttcagcgggccccaagcggaaacccttgttgccttgttgctgggttgcttgttgcttgttagttgttcctgtggaaccaaaagccggcggcgggccgttggcaggcctccggggaaaagcaggttgaagccccttcccccaggcttgatgaggtatttgtgcccaacggccaaaggtcctggaagggaggttccagaagccttgggcgcgcagtccttttttggacgcaggctgtgttgtccacagggcccagcggggaccggccagcgggtggtgtcccgggcggggttcccttgcggggacccgagggttcccacggccggagagggaggaaccatttcgtcgtcttctggggtntggggcgccttgcgggaaaggaaggcgtttagaaggcgccgagagggccaaaaaccaggcgcatttggttgggtatgacacgacagaaaaggcgcaagggcgtccaatctatacggaagaggagcgttaccggtaatttcccatctccgttggtccccgccaaagtggacaggtttaagcccccttgggagcctccccccggttgggtgcccggcgcaaggggggcatttccaaccgacggaaagcaattgcgagggagagcgccgggttcccggcaccaaccaaccgcgttttccggagaggaaaccgcccgcacagcgtttggcgccggagttcttaaccgacccgcgctcccatttgcgcccgcggggggagccttccctcttaacgcacccgggcgttacgcttccaaggggttctttacaccgagcgcataaacctcgttggcccgccttgggctttgtggtttgcgaaggggggccccatttcagcagagcggctcccgtgccccttcccgcggagggggccttatagcgccgcgccccccccgaggcgaagagcacgcgaggagagcccccgggccggcgccttccctcaacggcggccgagactttctcggcggttccccg

SEQ ID NO: 440263 - DNA, 1297 bp, Homo Sapiens
  misc_feature (436)..(460): n is a, c, g, or t
ttttgtatcaaaactaggcacatgcctttatttatggtagacagaagttaacagagttgagcagttttgccttgggtcctgtttcttggcatcctacatcagacaaacacatctctcaaaatatctccgcccataactccagggatctagtctcagggtcatctgtaggtaacggaaggtgaaatcacacttggatctatagtggtgagtaactaaaaggacaacctctcattcatattgctttaaaacatgtacagcatatatgtttcaaaaaaggaagaaaagaatatattgatctctttgtggtactgaaccaacaatatggtatgatgcaaggctttaacaaatgataatcatagatacaaatttttctgtagagtatgttttagacaaatgtgtctttttaatatgtaaatcctacactgtaggttgttcnnnnnnnnnnnnnnnnnnnnnnnnngcagtggtagaaaatgctgaataattgtccgtgagtgtgagccaaatattcaggttcattactgagatccccagaacgccaatatttgcaacgcaaacacttagtatcccactgtgtgaagggctctgacacatgcctgcctgcctgcctttcgatggagagtctccattggaagtcctcctgcttccatagaccctgcttttgatacaggggcagctgcacatggctgcctcttaatctagtaatttactgtgccatactgtcttactgattacccacattgacaaagagacagtaatgtgaggggtgggccttcaaatcattttcatgttgaacctcctggggtccagctacctccccttccacaacagcaccattgttttttctggggcacatatttcaaggtcaatgctgtttttgtgcttgccctttccctcggctccacacaaaaagggagaaggaaaacaaattaaaaccactccccaggaatgtgaagcagccccatagctgtagacaccagtattgttttaaggtcccagggaaaaagtattggcattggtgccattggaaatggtgtcattggagtcggtcatgtacataggggtcctgttcgcataaagaaaacgatctgaagcgaatcctttcacagttaaggaggctgtgaaggtatcattcccagcagcattgctagcgatgcaaacatacatcccgctgtcttgatcctgggcaaagcggatttccaaggtgccatcacccaacacggtggctcttccattggacttggtggtgatgaaacgccttcggggtgtcacccaggaaatcacaggaagcgggtcc

SEQ ID NO: 440264 - DNA, 1324 bp, Homo Sapiens
  misc_feature (1278)..(1278): n is a, c, g, or t
  misc_feature (1280)..(1280): n is a, c, g, or t
  misc_feature (1282)..(1282): n is a, c, g, or t
cttccagcgtgtgcttaaatattttcttcagggtgttgtaaactgttggtccattttcagaatcaaaattaaccttagtgaatgccttaatggcatgggcaaggaaagcttcctccacatccacgggaattgtctgcaggttcactatgcagtgcaacacgcagagaatagtctggtgctgtcccttctctaataaaaaagtgcttctgcggcatctgctcgcctgtcaaccaacatgtccacatcctctttggtgattacaggctccttcagttgctccacccaagaccacatcaagctgcataggatgaaagggtccctctcgccacatattctttcccaagctccatctcgggaattaagctctttctgccacatttttaccttcctttttaggtcctccttttctacagattcatttaaatttgctagggctttggccgccagtattcttcttgcctcagcactcaattcagactgtaatgcagagtgtgaagctgcttcagacagatctttactgtcctgggtttcatgttcaaccaagaactgtgctttgggactggagccacagtccagagggcttcggggtgtcctggtgttctgcctgacagagccagggctcccaacaccatgagttttacactgacagtgagacacttgctggtgagcagggtttggatccttatggacatttgcaaagctgggtgaaactggctccccagggctgtgtgagcctgaaacatctgcagagaaagctccactctgctgtgcttcctttggaatgatccttccatggaaaattggtgacccattatctttgagtccttccaggcctccaaactttgactgactccagaaagaaagtgtgctgcgaaccaaggcttccttgtgtaagtctggttctggagactgtgggatgtaacaatggcttatgagcttctgctgcctgggcttgtggccaaccaagatctgggcaggcactgtctgtggagtctccccttgctccaggaggttctcggccctctttaaatctgagtcactgtagctgagccgccttttcagatgagtcaggggttgaaggcactcaacattccgccttttccaaagagggtcaaactgttgctcattggagaaaatcatgcctcgattgtcaaaatctgctgccactgcagtggggttaggcgggttggacacatcactgtcatgcctcagtaactctttatccagctgcatggtgaccatctcagacattgtcttttctatttcagcagagagacncnangtcttcggacacatccttcatcatcactggcctgttctccgc

SEQ ID NO: 440265 - DNA, 1427 bp, Homo Sapiens
  misc_feature (460)..(460): n is a, c, g, or t
gcttctacatccagtttatacacagctctatacaatatacagaaacctttatatacagatatatttatagaataagctatattaatttgtctctcctttttacagcaatattagtttggatctttcatacattaagtacaaaaaaagtctggggagaatggcacgtaagagagtgcatgagggtctgtggggcccggctgctcgctactgattgcatatggagtcgcccaggcccctgggaggacaggcccgcgcacttgtgctgcaggtctggggatggagtgggggtcggtctgagccgaacggggctgaggggggtggctcagaccccccagtgtggtatggggtggaggagggagacgtgcagcaggcccatccttcaagggcaaggtgggtaggagccaggttaggggtgggctgcccctgggtgcccaggattgagcccaagcctgccccagcnccaagcctgaaacatggtgtggctgcagccttgggggtggggggtctgtccctgatggctcgtcctggggtggacgacatgcccacattagaggtcccaggacccaccctggcagaggaggaattaaaaggccagacatcaagtctctccctgtgactggccacggtgcttgtcagatctttcatctgagagtctgtcttgttttcttaaactctaagagccactgattttgtcttgcttctgtgctgggctgaagctctgtatgcctcagcagggccagggtgtccttgagtctggtgaaggcgggagttacagaggatgaggggaggcccagctccgtcagggtgggcaggggctcccaggacagccatccaggccagtcccagctgtgtggggagccgggggccagaattcaggcccccaggtaccagtgatcatgagagggaggtcttttggtcgggggagcctaggccacccagggaggctgcaggtggagccagaatgggagggaccatgccgctgcagaatgaaggcacgagcaggcggtcagccgtgcagtcagcgcctcggtacacaccagttttccaaaacgggtcacagcagcaggcgtgatgggaacagatggtgcctaaagctgagcttgtccctgcgaccctgcctcaaaggccccatcatgctcccctaccgttttcttggcaggctgggaggggcagcaggcaggcagggcaggtagggtgggcagccccagaggccccttctttaggaacggtgcacactcatgcacatgcatacgcgccaacactagcatgcacaccctcccaccccgcttctggggaaactccgggtcgctatctccctaactgcttcccaaacccagcaggggaggaagccctatggggacctcaggctaaaccgggactgctcccagccccaggcccctccatgggcagtggacagaggtctccag

SEQ ID NO: 440266 - DNA, 1490 bp, Homo Sapiens
ggtccggaatttttcaatggggagatgcggaggtagacttgccagcagcaggcctggaggccggggtgggtgccgtgggctcccacaggccctgcgggctcccccggcctcaaatccaggccctgcgctttgggccagccctttggctaagagggtgtgggctggatcatcgccagggtcttaagagccccccagcgtccacgcggagcatgaacattgaggatggcgcgtgcccgcggctccccgtgccccccgctgccgcccggtaggatgtcctggccccacggggcattgctcttcctctggctcttctccccacccctgggggccggtggaggtggagtggccgtgacgtctgccgccggagggggctccccgccggccacctcctgccccgtggcctgctcctgcagcaaccaggccagccgggtgatctgcacacggagagacctggccgaggtcccagccagcatcccggtcaacacgcggtacctgaacctgcaagagaacggcatccaggtgatccggacggacacgttcaagcacctgcggcacctggagattctgcagctgagcaagaacctggtgcgcaagatcgaggtgggcgccttcaacgggctgcccagcctcaacacgctggagctttttgacaaccggctgaccacggtgcccacgcaggccttcgagtacctgtccaagctgcgggagctctggctgcggaacaaccccatcgagagcatcccctcctacgccttcaaccgcgtgccctcgctgcggcgcctggacctgggcgagctcaagcggctggaatacatctcggaggcggccttcgaggggctggtcaacctgcgctacctcaacctgggcatgtgcaacctcaaggacatccccaacctgacggccctggtgcgcctggaggagctggagctgtcgggcaaccggctggacctgatccgcccgggctccttccagggtctcaccagcctgcgcaagctgtggctcatgcacgcccaggtagccaccatcgagcgcaacgccttcgacgacctcaagtcgctggaggagctcaacctgtcccacaacaacctgatgtcgctgccccacgacctcttcacgcccctgcaccgcctcgagcgcgtgcacctcaaccacaacccctggcattgcaactgcgacgtgctctggctgagctggtggctcaaggagacggtgcccagcaacacgacgtgctgcgcccgctgtcatgcgcccgccggcctcaaggggcgctacattggggagctggaccagtcgcatttcacctgctatgcgcccgtcatcgtggagccgcccacggacctcaacgtcaccgagggcatggctgccgagctcaaatgccgcacgggcacctccatgacctccgtcaactggctgacgcccaacggcaccctcatgacccacggctcctaccgcgtgcgcatctccgtcctgcatgacggcacgcttaactt

SEQ ID NO: 440267 - DNA, 1536 bp, Homo Sapiens
aaagtaattacagagcaggtagtcgttgacgcaaacctcccttcagtatcaaaagtgtctgtggggcaggtggggctggggcgggtggaggctcccccccgcgccgacgacagggaccgccggccgggagcagagccgggcgctgggacgggagctctggcgacgtgtccatctcttcagttttgagggcggaggagtgggagggagggacgggcgtcaaactgcaaaaactgaaccgtaaaaggaaggtgtttggggccgaggggaaaggacacccctggagaaagctcctctctcccctggaaggcggcgggcccggaacgcttggtgggagagcgaggaggaaacgcggagaactcaggccacttctcctgggtcccacgtcccctcccgtcaccggggattggcgggggtgaggcgaggatcccagagactccgctcctggagccccaccctgtccttactgggggtccgagccccagatggggctggaagccacctctccccaattccctgcgtggtcccagaaggtgggctgggctgtgggagggaggggtcccggtcaggctgcgcccgggctgggacctgggtggggggctccacgcccctcgcccgcccggccccgccgccttcagatctgcgtctcttgcacgttctccttggagccgctcttgaagagcagaggttcgtggatggagttgaggccaggcgggcctttgcccccgcagcccccgccgctggggttgctgctgtagtgcgccttgaaggcggcagccacgtagtggtggtggttgaggtggtctcgctccagggcgggcagggccaggtggctgtccccgcccacaccacccccactggccgcggtggccgcggcggccacggacacggccgaggcggcgggcagctcgtcctccacgttgatgatctccacggtgcgcgtgggcccgtggtgcttgtggagctggtgctgcttgcgcagcttgtagaaggccacgagcatcaccgcggccatgaacgtgatggccacgaagcagccgatgatgattttggtggtcttcatgacgtcgtccaggtccttgagggcgttctccgtcacatccgtgatgggcaccgtgaacgccttctccgtgggccgcgaggagcgcggggcgggtgccgtggtagaagacgaggcagggccggccgcgtccccaggccggcccccaccccagacaccgtctgtcgtgggccctggcggttccttctccgtcccccgcggctgcagggcctcctctccgggctgcgtctccagggtctccacggtcaccgtggtgaagtaggtgtagccgccactgccccctccaacaccaccactgcccccagggccgcccccgccgctgccggtgccccggcgcctcggggtccacggcgagacgttgacgcgtggccgaggccggtggtgttgcccggctgccttcgtcccactgcctgtgttctggccgtgtctctgccggttgacgttggtggacgttaacgtgccgtctgccggacgcgccc

SEQ ID NO: 440268 - DNA, 614 bp, Homo Sapiens
aaattcagctcgtttccgagcacagtctgcgggtgagcaagaacgtgtggcactggatgtaggtggacactttcaacgctgtgaccagcctgaacacgctggagctttttgacaaccggctgaccacggtgcccacgcaggccttcgagtacctgtccaagctgcgggagctctggctgcggaacaaccccatcgagagcatcccctcctacgccttcaaccgcgtgccctcgctgcggcgcctggacctgggcgagctcaagcggctggaatacatctcggaggcggccttcgaggggctggtcaacctgcgctacctcaacctgggcatgtgcaacctcaaggacatccccaacctgacggccctggtgcgcctggaggagctggagctgtcgggcaaccggctggacctgatccgcccgggctccttccagggtctcaccagcctgcgcaagctgtggctcatgcacgcccaggtagccaccatcgagcgcaacgccttcgacgacctcaagtcgctggaggagctcaacctgtcccacctgccccacagacacttttgatactgaagggaggtttgcgtcaacgactacctgctctgtaattactttaaa

SEQ ID NO: 440269 - DNA, 1827 bp, Homo Sapiens
ggtgagtctcattccttgaggagggtttgattaggaaaacagccagtattcccagccaactgaatccaactgtggaaaacaccggggtcaaacatgagatgccctataacacaaagaccattttttgtacagctcgtaatttagagtttagaaaatgcctgagcaatgcagtcctgatgatgtacagattcttctagagtgatgactcagggggctacgctcatttgaacggtgtatctaggtgttttgcagctttagaaaccggtccttttgttgcctctcacatggactttagtattcctcttcagcttcagtcccttttgctttcttatggattgcccgattaaagctgtggcaggcaggaacccagtgattgtcatgaagccccagcttacagccagggaatcctttctgagaccggtggcagcacatccaataccctggcccatagggcaatgcctggcaatagggcttggggtgccatcggcacagggacacatcccctttcacatactttttcttgcactgtttgcaaggatcctctctatagcgtggatctcgaacccagcgagaatctgctggcctgatattgtagtactcaatgataaacttgaaatagcagcaggtacatttaagggccactaaactcttggtgggaagtaacctgaagatttttaccataatgtggtggggcagaaaagccatgtactgctgaggctccaaaagctgctggattttaaacctggtctccaggaagtcatgcgacacctgcttcttccaactggatgcctcaagcactggtaatgtactttccacagaagaggctggcagtacaaatggctcagcagacccacttttttcctcagatgcactgtcacccccagcagcatcttcaagctggctggcctctgaagactcttttgttgtgctttcattcaactgggaaatagtctgacaagtgctgaccaggtggcaaaaaaaacaacatccctggaactgggtcttcacaggagtttaaaatggaaggctggtctttgtctaccttggacacagtgatactaatgcacaaagattcttttctttgatcaggatttcggctagtaagggacacaagctctctgctcatacaatcaacagcatctgtgggcaattcagaggcttgggaataggtatgagaggaaaaaggtaacccaacgagttcatctgtcatttccacatcatatctgttgctgtttttcacggcagtttgcgaacccggctctaactctgcactgtctatgtggaaactcactccctgctggcaatggggggcagtcctgagaagcaccgtcccaggcctggtcctccttaggagaacaacgatcagctcttgaagggccacaatccacagatacagaccccacaggattcacctgagtgtcaggtgcctccaagacgcctttctttgttttgccttcatcagcctgagtgctatttgcaagcaatactctgcccacatttcgacggaagctgttattccttgagaggctcccaggctcacgctggccctgccgcttcaggcactcagtctccaacttggctaccatgtcaaggacacggactggttcgctctgtggttcaccaacctcaagatttcccctttctgtgggttcttcacaagctcctggggcagaataggactcagacactgcaggcacacctctggattggccagaaaaccttcacaatttgcaggtgagttttgtgccgtttttctgaacaggctaagctaagcagagcagtggctctttgctccaagaagggccaccatctgtttaactggacaga

SEQ ID NO: 440270 - DNA, 378 bp, Homo Sapiens
  misc_feature (361)..(361): n is a, c, g, or t
cgcattcttttaggactaccttgatttattccgtccctgggctggtggggccgaggagtgtcggaggagagccagtgctttgcgtggtcctctgaattctgccaggtagccctgctccggcgtccgtgaaggggccaggacagtgtccgccaggaggggctgtgctcccagacaggaagcaggagaggttgcagccctgttctgaccctgccattccgccctctcctcacccctgccccacagggactgcatcgccctctgcttcctcaacagcggcaccagctttgtggccggctttgccttcttctccatcctggggcttcatgttttcaggagcagggggtgcccattttttgaggtnggccgagtcagggcgga

SEQ ID NO: 440271 - DNA, 1598 bp, Homo Sapiens
ggacctctggcagcagcttcactaaggtgggatggatagcagggtctcaggcacaaccagtaatggagagacaaaaccagtgtatccagtcatggaaaagaaggaggaagatggcaccctggagcgggggcactggaacaacaagatggagtttgtgctgtcagtggctggggagatcattggcttaggcaacgtctggaggtttccctatctctgctacaaaaatgggggaggtgccttcttcatcccctacctcgtcttcctctttacctgtggcattcctgtcttccttctggagacagcactaggccagtacactagccagggaggcgtcacagcctggaggaagatctgccccatctttgagggcattggctatgcctcccagatgatcgtcatcctcctcaacgtctactacatcattgtgttggcctgggccctgttctacctcttcagcagcttcaccatcgacctgccctggggcggctgctaccatgagtggaacacagaacactgtatggagttccagaagaccaacggctccctgaatggtacctctgagaatgccacctctcctgtcatcgagttctgggagcggcgggtcttgaagatctctgatgggatccagcacctgggggccctgcgctgggagctggctctgtgcctcctgctggcctgggtcatctgctacttctgcatctggaagggggtgaagtccacaggcaaggtggtgtacttcacggccacatttccttacctcatgctggtggtcctgttaattcgaggggtgacgttgcctggggcagcccaaggaattcagttttacctgtacccaaacctcacgcgtctgtgggatccccaggtgtggatggatgcaggcacccagatattcttctccttcgccatctgtcttgggtgcctgacagccctgggcagctacaacaagtaccacaacaactgctacagggactgcatcgccctctgcttcctcaacagcggcaccagctttgtggccggctttgccatcttctccatcctgggctttatgtctcaggatcagggggtgcccatttctgaggtggccgattcaggccctgttctggctttcatcgcttacccgcgggctgtggtgatgctgcccttctctcctctctgggcctgctgtttcttcttcatggtcgttctcctgggactggatagccagtttgtgtgtgtagaaagcctggtgacagcgctggtggacatgtaccctcacgtgttccgcaagaagaaccggagggaagtcctcatccttggagtatctgtcgtctccttccttgtggggctgatcatgctcacagaggaacgacaaagtaggcaggtccctcctctggcctttgggcatggaccacccacctccagggatgggtgaggagccatttggctccacagtaagtgaagagggcggaatgtacgtgttccagctctttgactactatgcggccagtggcatgtgcctcctgttcgtggccatcttcaagtccctctgtgtggcttgggtttacggaaccaaacgcttctacgacaacatcgaagacatgattgggtacaggccatgg

SEQ ID NO: 440272 - DNA, 847 bp, Homo Sapiens
ggaaatgtacatcccgccctcggtgaccaggaaagccctatcaggtagcacatgacggcgatggtgaggaatgaggagctcgcgccgcccgctcttccggagctgcctggggaacatgtctatggaggctgtcaccaggcactccacacagacaactgggctgtccagccctaggaatatgagcatgataaagaacaggcaggaccacagctgggataagggcatcatagtcacagcccttggggaaggctactgaaggccagacccaggacctgatctcggccacttctagaaattgggcaccccttgcttcttgggacatgaagcctcaggattggagatagacaacaaacccagccacaaagctggtggcactgttcaggaagcggagggcgatgcagtcctttgtagcagttgttgtgatacttgttgtagctgcccagggctgtcaggcacccctggcagatggcaaaggagaagaagatctgggtgcccgcatccatccacacctgagggtccttgaggcggaacaaatctggcttcaagtagtagatgatgccctggtaggctccgggaagggtgacacctctgatcagcaaaatgacaagcatcaggtacggaaacgtggctgtgaaataaaccaccttgcctgtggacttgacccccttccagatgcagaaatagcagatgacccaggcgagcaggaggcacagggccagctcccagcgcagggagcccaggtcatggatgcccgaggtgatgcccagaactcgtctctcccagaattccatgacaggtgaggtaaaattctcaaatggggtcactgtgccggctcctgagtggttca

SEQ ID NO: 440273 - DNA, 1131 bp, Homo Sapiens
  misc_feature (919)..(919): n is a, c, g, or t
  misc_feature (944)..(944): n is a, c, g, or t
  misc_feature (1040)..(1040): n is a, c, g, or t
  misc_feature (1045)..(1045): n is a, c, g, or t
  misc_feature (1047)..(1047): n is a, c, g, or t
  misc_feature (1055)..(1055): n is a, c, g, or t
  misc_feature (1072)..(1073): n is a, c, g, or t
  misc_feature (1077)..(1077): n is a, c, g, or t
  misc_feature (1083)..(1084): n is a, c, g, or t
  misc_feature (1104)..(1104): n is a, c, g, or t
  misc_feature (1106)..(1106): n is a, c, g, or t
  misc_feature (1110)..(1111): n is a, c, g, or t
gttaatatttattttctaaaaatattaaggctctcagttgtttcattaattctaaagggttaaaaagggctgaaatttgtttatagcactaaatgtttttaataggaaatttactcacataaaaaatttaagcagaagtagtagaatacagattatcataaaacatattttctatgaaaggcatttcttcctcatcttcaataaatatgaagaagttagaggagaggaaaagcaatcactctaagacaacttttcgtctttgagggacattatgataagcctgaaattaatacgcacaggctattgcatttttctgtgagaaatgtgcccctttgctgtgagattctaaaatgtgttcagatttagtttttattcaaatgatcaagataacgcattagttagataactgctatttcagatagtgaggttagctgagaaaaggaagcatggtagaagaaatgcaaataacaattcttggaatgccaactcctgaggcttagtttaaccaagctaatttgttggcccagggatggccatcatatgagtttccatcaatacctgacttccatcaacaactgaatccatgttctggagtattacagagactgttactatgacctcaaagactgtggctacgaatctgaagttaacaagacatacatcttctcttactaacttaagccatatctgtcaactctatgtttgatttttctgaccctggtgcttttacttctgtttctgccaaacttcagcctactctatggggaaggtgagtaaaactagtagttagaacaaatatgaagactgaaaaaaactaaacatactcttcataatgagatcctgttcagagaacagtagtgatcaaagtgcaaactgttggaacaatacggatatatgtacatctgtacatgtatatagngtataatatgtatgtatatgttatngctcatatgcagaaatctatccatttgcagacagcccaggtgggtcaatgtttctaatggaaaccatttagggcattcaaaacattagggctaatngtggngngaattctnttcatctggattaattnntgtntttgannacaaaaagccaactaaaaantntganntaaaggggcctcatttgttt

SEQ ID NO: 440274 - DNA, 1918 bp, Homo Sapiens
  misc_feature (1743)..(1743): n is a, c, g, or t
gggggcagacatgactttattggaggaagtcagtggggcgggggcagggccctcatctgctcccccgaggagacccgggcaagctccctggaacttcaacgggccaggcaaagcagggagggctaaggggtgcaggagactggagaggggtctggggaaggggctggggcaggaacagagggccaggtgaagggagtagggcggctcacacatggtgcccctccagcaggggcaggtggcccagtgccgagtggcagacagtcccgtaggcttgggagtagcctccaagcaaagccctggcacccccctgggcaccctgcaaggcagaggtgctgaacatcctccggccgggccgggcctccggaggaagccggggagggacctgttgtacgctggccaccctcaccccaccgccccggttccagtcaccccggatcagggcctggttggccacctgagccgcagcctgggaggtcagggagggcgcagctcccctcccgcttggtttcaccagcgagagtgtcaaggggggcgcttctttcgccccagggggcttttccccattccctaggagatcattttggagtaggggagcggagttctgtcctgggaacgttcttggctgcacggggggactcgtgctcggcagggtcatggcctgggctgctctggggcctgggtctgggaccctgcacaggtgtcctagaaggcagctgagggtcggctctgggtttgtgcaggtgtgcctggcttgggggagacaccctccgggcccttctctctcgaggtgccgctgctgcctccacactccaggatcatctgatagacgcggctgcggtactcaggcacagagagctggaccccttcgtgtgcccggggccgcacatctgcctctcgtgcccactcgtcgctggggcagtggaacctctgcacgtaggggtgctgcagtgcctgggtcgcgcttaaccgcttgtccggggcgaacaccaggagtcgcctaaggaggtccaaggcctttggggaggtgtctggcggtaggagggcatccagcgtctgtcgtggcctgtgggctgccgtgtgtcgtcttcagggcccgacccaagggcccctcctcagatccatgttcgtggctgggggctcagcttccaaactggggtccaccctgctgtcctgtctaggtagatgcccctgtgcctgacgggcaggcagtctgggcccctgcagggtggagagacccctgcggccccctggtgccctcctctccacgccctggcacagctcctctgggccaccctctaggagcaccagaggggctcctgctttcagtgtggccaacagttgttgggtttgggactgccatcttgaaaacaggcagaatctgaactggtacaaactggccccagtaaacttgcaggaaggtggccctgctcccttgagataggccaccctgtcaccctcaccgaagtgcccccactcaccgggaccccagctggtgcagcacagaggcacggcagcctgagccgagagccaggaggtctggggcagcagaaggtggtgtgacccaggcaggcctggtcggctggggcggctcagggcatctggggccagtcatctcttccagccccagggagcacagcctctctacagggtttctgctgtctggcggggctcaaacaccccatcaccagggcgtgccacccagcctgtgcacgggagcacccgcacatgacccctgctccacantcgggcacctggccctggggtgtgctcacagaagtggatgctggcgcccacctccacggcccaggaggctccacccagacaagcagctatgcctggcggtgcagctccctcttgcccccaccctcaagagtgacccccatggcccctctaccactgccttcctccacctcttccc

SEQ ID NO: 440275 - DNA, 1752 bp, Homo Sapiens
  misc_feature (782)..(782): n is a, c, g, or t
ggttaattaaaaaatgttttatttatacaaatggacaatcagaggccagtcccccgtccttgccttccggctccagtgtggtgtaccaggtggccactgcctgctgtcccggcaagcacgtcctcacgctcagctctggcccgcctcgtcgtcactgtcctcaatcagacagtcccggatctcctgcaagccccaggccctctgtgtgcggagttgggcctcagccaggatgtacggcggcagggggtccagtgagggcaagtccttcatgttcacgcggcaagctgtagcacagctgctcctcaatgcaggcttgggggtcctccctcctgcaggccccctggccgcagcgctgggcccagcccacccctggagaacagcagggccccgggggtgtccgggtctcagtcagggggatgggtgactgcattcgggagagacgcgaggaggtttgagccccaatagccgtggcactgttagcggcgtttgacgttcagggtacacatgcagaggaggcatcggtggccggattcgccagcagcagggccatcccgggggcccttcaccagcttctcacttgtcctgtacacagtgctgacagtggaggggaactgggtctgcagcctgagggatgaagggcctccatcagcccggtggatgctggccttttcagggggccttggtgtcgacggctggtgtgaagacagaaggaacggagaacaggcggttgtagaaagcgacctccttcagggtgtggtcccgcatgggccgcaccaccaccnacgtccccgtgccgctcatccgagaagcccgtatcccaggccaggaaggcccctcgacccagcgccaggttggtcatgagcttgatagccaagcgtgtgcagctgtccccagtcatgaccttggagtagccgtgggctcgggccacgtggaggatcaggtgggtccgcagggtctgcagaagctcctccttggcagtcagtgtcctcactgagcagaacagttgggaaagagcctcagtctgggcaggggcaggcggtcttgccaggttctgggggtccagcgggggctggggtggctgttcctccccttgagtcgggccaggaccacccccggcccccagcacatgctgctgctggaggaagctgtccacggccgccttgtaggccccctcggatcccaccagctcctgggcagagcaccaaagcaccgacggtggcaggctgaacacctcctctaaggccaccacatgccatgggaacccagttgcttgcagaatgggcttcacttcggccagggtctttgatctctcctctaggctctggccacaggctgctccctcgtcaacaaagatgactcctgccacaaagcgcagtcttttggcagaatcttggctcaggccctcaagaacctgccagaccatggagctggacgaaggccccccagaccacgccaagagcaccttctcgcctggaaagatgagccggttcttgcccagcatggctctgaacttgtggacgtagaaggccttgaaacagtccctgcagaaggcatctccggctcgtatcaccacaacgggctgcgcttccttgcacttcacacacttctgctcacggctgggccgcggcgccgggggcggctcctcaggcgccggctccccgtagtcctcgcccacctgacacatgggcacgccgggtcccgtcgcagactgtggcggcgacagcgcgagggcgcgccccgatgacgtcggag

SEQ ID NO: 440276 - DNA, 861 bp, Homo Sapiens
cgatttcatttttcaccgccacttcactggctcttccatagggtcccatcccctgtcgacttgagggcatttaactcttcttttgtcatcttggtaggaccttggtatcccaacattattgagggtgtcggaagtctctccattggtagctatttctgaatttaggattattccatgtttctcgagcatttcctctctttgcttcagggcctccttgacttcagcaaactgaaattgcagtatactgtgggcgtgtttttccctttcaaattctttgtttttctcttcgtactgccgcctagattcagccagctgttcttcaagctccagcaacatatcttttagggtatcaacctggtacatgaagtttgtcttttcattgtctagctgagcattggaaaccatagccttcttatatttctcttcaacttctgctagagagtccttgatttccctgatggatgcctcggtgtcgatggagatggaggtgtctccgctgcctctccgagaggaagtcccacccagagaggccagcgtggctgcagacaggcccggcatgttacgagaccccttctcagtaaaatctttttctggtctctcttctacctccttctgctgccgctccagctccttcatgcggatctcgcgagcctccgcgcgggccgcccgttttgcagcgagccgggcttccgcctcccgcgcgatctggttgagcgcgtcgtcctccgccgtgagccgctcccggttggggagccgcttgcgccccgatccctgggtgcccatgtccatcgaccgcgtcgcccgcagctgccgcggggccccttgctccagccgctcgcgccgccccggcccggccccccc

SEQ ID NO: 440277 - DNA, 1387 bp, Homo Sapiens
  misc_feature (11)..(11): n is a, c, g, or t
gggcttggccncaccgaccccaaagcttgttcagggttgggtcccgaaaaagggaagagggaaacagggaagtgctgggaccatggacccaagctttggggtaatcttatgggtgataacaccatcgattttttggtttcccttttgaaaaataaccagaaaattatgtgggtgaaaagtcctcttaaggagtcacaagggactgctcgtatttaccagggccctctaaatggggctggtgaaaacaagatgttttgacgggggatccagaatttcgcccttgactctcggcaggtatgaccctgggtgcctgtgagctaggagaggaaattctgtatgcagggcaaacatgttcaaggggaggagatggcactgcacttcaggtctccaaatgcagtgtgctaggaatggcctcgctgacagttggaatcacggatacattaattacagcgaaggcaaaagtaagctacagtgacagggagctgggggcggagggagaaggcactttgccatgggagcacatctgttttataataagcaggtctataattctcttgtgaaagatcatgttctgctatcttctctgaggctggaaaatataaatactgtattttaccaagaggaggaggaaaggagatgatcaaatttgtttgcctgttgccaagtgtttgagattttccaccctttttcttttgtgtgcaacattctctttaactagagtgggggaaaagtcaacctgcttttctaagggtaaaaggcaccgtcaggcgtctcatgaatagggccctggccttttaacaagttttcaagccttggttgcggctactgtatagtcagaaaataaatgcatgtatggtgttgagctattaaggtgaaatgtgtggcctggggccaaaggaactggtgtgggttgagaggttaaaatgcttacatctaactgcacaaaagtcagtctgaaatgtcacatctctagatggatggaagtatcatgagttggggtcttggggaagcggcgtgtgggggaaaggagcaatggggttgaatgtaccaagtatgttgtgagccactgatcctaatagcagcaaaactactaaaccatgaagacatagaaggcatctgctcagcgcgaaagctacagaatcttctcataaagtctactgagaactgttccattataaacatatttttcttgctctagggagagttaaggggaaggaatgggagctgtcagggtcccagggctgtcctacctgccgttttggtcacagtgaatgccacgtgctcttccaagggcactgcagctggagaacactacctgccaaatagcaaagcagatctctttcttactcctattatttattttagcactctttgttttacttcaagg

SEQ ID NO: 440278 - DNA, 1890 bp, Homo Sapiens
  misc_feature (1804)..(1804): n is a, c, g, or t
  misc_feature (1813)..(1813): n is a, c, g, or t
  misc_feature (1831)..(1831): n is a, c, g, or t
  misc_feature (1854)..(1854): n is a, c, g, or t
ggaattttcgggatgcaagaggaagatggccgtgccctgtttttcggtgtaaggcagcgacggcggctgcgacggcgagactgagatcctggtgtcgtgggcacctgagttctagcttcccccagcgagcgcgcgtcccttcgtgcctaggcgagagccggctcttccccgggagatgcgtttgtcccaggctcgggggctcagtgggagttcatgctgcgctggaggctcttggccaccgctctaatcgccttgtgccgccgcagcgccagctccgtcgccagcggtgagcctcccgattcccccccttgcccctggcggcggcgatgaccggggagaagatccgctcactgcggagggaccacaagcccagcaaagaagaaggggacctgctggagcccggggatgaggaagcggcggctgccctcggcggtacctttaccagaagcaggattggcaagggcggcaaagcttgtcataagatcttcagtaaccatcaccaccggctacagctgaaggcagctccggcctcctccaatccccccggcgccccggctctgccgctgcacaattcctccgtgactgccaactcccagtccccggcccttctggccggcaccaaccccgttgctgtcgtcgcggatggaggcagttgccccgcacactacccggtgcacgagtgcgtcttcaagggggatgtgaggagactctcctctctcatccgcacgcacaatatcgggcagaaagataatcacggaaatactcctttacaccttgctgtgatgttaggaaataaagaatgtgcccatttacttttggctcacaatgctccagtcaaggtgaaaaatgctcagggatggagccctctggcggaagccatcagctatggagataggcagatgattacagctcttttgaggaagcttaagcagcaatccagggaaagtgttgaagaaaaacgacctcgattattaaaagccctgaaagagctaggtgacttttatctagaacttcactgggattttcaaagctgggtgcctttactttcccgaattctgccttccgatgcatgtaaaatatacaaacaaggtatcaatatcaggcttgacacaactctcatagactttgctgacatgaagtgccaacgaggggatctaagcttcattttcaatggggatgcggcgccctctgaatcttttgtagtattagacaatgaacaaaaagtttatcagcgaatacatcatgaggaatcagagatggaaacagaagaagaggtggatattttaatgagcagtgatatttactctgcaactttatcaacaaaatcaatttctttcacgcgtgcccagacaggatggctttttcgggaagataaaacagaaagagtaggaaactttttggcagacttttacctggtgaatggacttgttttagaatcaaggaaaaggaagagaacatctcagtgaagaggatattcttcgaaataaggccatcatggagagtttgagtaaaggtggaaacataatggaacagaattttgagccgattcgaagacagtctcttacacctcctcctcagaacactattacatgggaagaatatatatctgctgaaaatggaaaagctcctcatctgggtagagaattggtgtgcaaagagagtcagaaaaacgtttaaagctacgatagccatgagccaggaatttcccttagggatagagttattattgaatgttttagaagtagtagctcccttcaagcactttaacaagcttagagatttgttccagatgaagcttcctccngggtttccngttaaattaggtataccngtgttttcccacattcacagccnctgttgacttttcaggggttttcgatacggtgaatt

SEQ ID NO: 440279 - DNA, 582 bp, Homo Sapiens
  misc_feature (58)..(58): n is a, c, g, or t
  misc_feature (474)..(474): n is a, c, g, or t
atgtgtaattcccttttcttcactgaaagcatttgtcccttctatttggatccacttntaaggtctctgtattttctttccttggttagacggcatccttttccacgtcagttaaagatcaggaaaacggcttgggtcttccttgtagtcatcaggtatagtaaagatggagccatcaaattcatcgtatcgaaactccctgaaaagtcacagtggctgtgattgtgggaaacacaggtatatctaattttacaggaaagcctggaggaagcttcatctgaacaaattctctaagcttgttaaagtgcttgaagggagctactacttctaaaacattcaataataactctatccctaagggaaattcctggctcatggctatcgtagctttaaacgttttcttactctctttgcacaccaattctctacccagatgaggagcttttccattttcagcagatatatattcttccncatgtaatagtgttctgaggaggaggtgtaagagactgtcttcgaatcggtcatctgcctatctccatagctgatggcttccgccagagggctccatccctgagcatt

SEQ ID NO: 440280 - DNA, 999 bp, Homo Sapiens
  misc_feature (441)..(441): n is a, c, g, or t
  misc_feature (662)..(662): n is a, c, g, or t
  misc_feature (899)..(899): n is a, c, g, or t
  misc_feature (913)..(913): n is a, c, g, or t
  misc_feature (929)..(929): n is a, c, g, or t
  misc_feature (942)..(942): n is a, c, g, or t
  misc_feature (969)..(969): n is a, c, g, or t
  misc_feature (975)..(975): n is a, c, g, or t
  misc_feature (987)..(987): n is a, c, g, or t
  misc_feature (991)..(991): n is a, c, g, or t
gcctctggttttccgactgcttatccgacgctcctccctctgtctctgtagctggagaaggtagtttccaggaaagttttccggtttgcaggccgcgcacatcgggcaggggccatcctcggtccccttgctcgttgctcgcagccccgttcggctacaagtgagtttcagggcgtcatggccaggggccaccgcggccagccgggtgtgaggctgcctttcgctgcccgcgcgctccagtggtctctgggtccgccggcgtccgtttcggcctgaacgcagcccctccgcggcgacgagcagtctcgcgccggagctcatggcctcggaggcgccgtccccgccgcggtcgccgccgccgcccacctcccccgagcctgagctggcccagctaaggcggaaggtggagaagttggaacgtgaactgcggactgcaagcgncaggtgcgggagatcgagaagctgctgcatcacacagaacggctgtaccagaacgcagaaagcaacaaccaggagctccgcacgcaggtggaagaactcagtaaaatactccaacgtgggagaaatgaagataataaaaagtctgatgtagaagtacaaacagagaaccatgctccttggtcaatctcagattatttttatcaggccgtactacaatgacngttaatcttccaaaataaaagtgactgaactgtcagatcaacaagatcaagctatcgaaacttctattttgaattctaaagaccatttacaagtagaaaatgatgcttaccctggtaccgatagaacagaaaatgttaaatatagacaagtggaccattttgcctcaaattcacaggagccagcatctgcattagcacagaaagatacctccttagaaggctcatcattagctgaantttgagagctgcanagaagcggctgtatcnagactggattagntatgatgaaatactggactgtattttnacacancactggttctantatnatttgaaa

SEQ ID NO: 440281 - DNA, 549 bp, Homo Sapiens
  misc_feature (529)..(529): n is a, c, g, or t
ctgactcaagtccagcattttaataaactgaaatgtgatctacagtaaatgcgcctactgccaatgggatgttaggtcaagtgagaatgaagacaatgtagccacagtacttaagttcaattcacgccagccgcgagacattgatttaaatcaagtaacctgaactcaggtttgctcctaaggtacttggaattgtaactgcgctgagcttctacttatttactttaagtactctacagtagttctgagcccctgccagggaccccttccgaggctatcacgggcttcgaaggcctcgcctgggctggatggggcgcggggctgaggaggaccgcgcacctgcgtgcggagctcctggttgttgctttctgcgttctggtacagccgttctgtgtgatgcagcagcttctcgatctcccgcacctgccgcttgcagctccgcagttcacgttccaacttctccaccttccgccttagctgggccagctcaggctcgggggaggtgggcggcggcggcgaccgcggcggngacggcgcctccgaggccat

SEQ ID NO: 440282 - DNA, 1615 bp, Homo Sapiens
  misc_feature (13)..(13): n is a, c, g, or t
  misc_feature (56)..(56): n is a, c, g, or t
  misc_feature (132)..(132): n is a, c, g, or t
catgatggcaggnaagtagggcagcagcgagacctgggcagccgtagcatggctcncagggcgctcacagcagctccttggccgggggactgctggggttcctcagaagctgcagcatgcattcctaagctncggaaggtagggctgcaccttgggccctaggttctccacaaaattctccagggcatagcaggccttggctaggtggtgtgtgtgtccaagaggcaccgacttcaagtaggcgaggagcagtggcattacctcccttgaatagctgctgatatggggctgtaggttttctgagaactggcccagggcaaacagcgcagcattgcgtacaacttgcgaggggtcctccaggcccttgcacacaatctgcagcagtgggggcagcagtctctgcctgatgtggtcgccagctccgtcagacagcacggccagcaccaggagtccagctttgcgctggtatgggctctcgctccgcaaagcctcttccaacatgggcatcagctggggacagagcttctcggggggcaggtgtagtgccagcatgtccacaacttgtacagcgaaatgcttgggagtctcccccatcagctcaatctccaactcttcctcttctgaatcctggtcctcgggatccaactggcctggtgggggctcagcagccacaatggggaaaagggtgtgcagcaagggtggcaggagacgattcttcagtaaggccttgctcttgactttgaccaagaaagtgaggcagcagagaatacgtatgcgtatcgcattgcccagggccacatttctagctacctccaggcagaatgtgaggacttcagagaggtagggggtgatgaccggcacctctgactccaacagttcatccaaagcctcaagggcctcacaggcctttgcctcatctatggggatcagagtctgcatggccatgatcagcttgggcaccaacatccgagcgagaggcacatcttcagtgctgaggtagggagccatggtggtcagagtgcgcagggagtagaagagcagcccaggagagcccacctcaccaagagtctcattcagaagccgaagaagctcccggtggtggggttggaaggcctcgggccgggaggtcaccaccacacttagcagcaaaagccccatctctctctctgggctgtgggggctgtgggtactgtgctgaagcagctgcaaaagctgtggccaggcctccaagccttcctttcgaaaaatggtggctgagagctgggccaggctgaggctcacacagtgctctgtttctctctgcagggccgtcaggatcagggacttgaggctctcccgttgctccgccgccagccgtcgccagcgggtgttcagtcgtctgcgggtcagcacggccgcaaactggcggatctgggggtcggccgccgaggctagcaggtcgcagagagccggcaaagcggcgggggcccgaagaacgatctggagctgttccgtggcccgacggatgcgctcggtgtccggtagcagcagctcccgtaggagctgctctagcccggctgactccatggcagcaactgacctcgtgccgaattcgccacccaggcctcgcttccta

SEQ ID NO: 440283 - DNA, 985 bp, Homo Sapiens
  misc_feature (449)..(449): n is a, c, g, or t
  misc_feature (895)..(895): n is a, c, g, or t
  misc_feature (925)..(925): n is a, c, g, or t
  misc_feature (949)..(949): n is a, c, g, or t
  misc_feature (961)..(961): n is a, c, g, or t
  misc_feature (970)..(970): n is a, c, g, or t
  misc_feature (979)..(979): n is a, c, g, or t
ggggaacatagatggctggagacagaatctagagccttcaaataatgtggagatgtttccaccttcaggccatcaagatgtctcagagaggcggctagacacccagagacctcaagtgaccatgtgggaacgggatgtttccagtgacaggcaggagccagggcggagaggcaggtcctgggggctggaggggtcacaggccctgagccagcaggctgaggtgatcgttcggcagctgcaagagctgcggcggctggaggaggaggtccggctcctgcgggagacctcgctgcagcagaagatgaggctagaggcccaggccatggagctagaggctctggcacgggcggagaaggccggccgagctgaggctgagggcctgcgtgctgctttggctggggctgaggttgtccggaagaacttggaagaggggagccagcgggagctgnaagaggttcagaggctgcaccaagagcagctgtcctctttgacacaggctcacgaggaggctctttccagtttgaccagcaaggctgagggcttggagaagtctctgagtagtctggaaaccagaagagcaggggaagccaaggagctggccgaggctcagagggaggccgagctgcttcggaagcagctgagcaagacccaggaagacttggaggctcaggtgaccctggttgagaatctaagaaaatatgttggggaacaagtgccttctgaggtccacagccagacatgggaactggagcgacagaagcttctggaaaccatgcagcacttgcaggaggaccgggacagcctgcatgccaccgcggagttgctgcaggtgcgggtgcagagcctcacacacatcctcgccctgcaggaggaggagctgaccaggaaggttcancttcagattcctggagctgagtttacaagnagtgcagtcctgctgaacgctggnggagaagggttncctcatggngagtaaagncaggag

SEQ ID NO: 440284 - DNA, 814 bp, Homo Sapiens
caggtcacctgacctccagtcttcctggtctgctcagctgcttccgaagcagctcgccttccctctgagcctcggccaagctccttggcttccccctgctcttctggtttccagactactcagagactttctccgagccctcagccttgctggtccaactggaaagagcctcctcgtgagcctgtgtcaaagaggacagctgctcttggtgcagcctctgaacctcttccagctcccgctgcctcccctcttccaagttcttccggactacctcagccccagccaaagcagcacgcaggccctcagcctcagctcggccggccttctccgcccgtgccagagcctctagctccatggcctgggcctctagcctcatcttctgctgcagcgaggtctcccgcaggagccagacctcctcctccagccaccgcagctcttgcagctgccgaacgatcacctcagcctgctggctcagggcctgtgacccctccagcccccaggacctgcctctccgccctggctcctgcctgtcactggaaacatcccgttcccacatggtcacttgaggtctctgggtgtctagccgcctctctgagacatcttgatggcctgggggttggaccaggggaatgtctgagagccaggtgggagccattcttggcagagttgaaaggggccgagcttgaaagtgggaggggggaatcagcccagtggaacctgaaggtggaaacatctccacattatttgaaggctctagattctgtcttcagccatctatgttccccaaccgcgagagccccctactgcgctttgg

SEQ ID NO: 440285 - DNA, 2147 bp, Homo Sapiens
  misc_feature (164)..(172): n is a, c, g, or t
  misc_feature (1520)..(1520): n is a, c, g, or t
  misc_feature (1559)..(1559): n is a, c, g, or t
  misc_feature (1705)..(1705): n is a, c, g, or t
  misc_feature (1827)..(1827): n is a, c, g, or t
  misc_feature (1964)..(1964): n is a, c, g, or t
  misc_feature (1981)..(1981): n is a, c, g, or t
  misc_feature (1989)..(1989): n is a, c, g, or t
  misc_feature (1995)..(1995): n is a, c, g, or t
cgagggaggaggtgtgagaacacgaagtgtggcgacggtggttggatttccctcttttcctatcgccgagtccgcggggaaggggccccttttcgtggtgtgtttagtacccaccatatgaaatagtggggagggggtgggtagaggtgttgggtgtcatttcnnnnnnnnnccccctgggaggtagttcggaagcgtgcgcccgcctgaattattatatgatgcgtctggggggcgttacccgcagggcggttttttaattttgtcgcggaaaaatggagggctcccatgtaaggggcggggagaggattctgcattttcctgttcgcccgccgaaaacaaaatccggggaggtattatatatgggtggcgcggcgggggaaaactgtgggtgaggcggaagccaaaaggggaggggggtgtgagatttacgttatgtcggcgcggtaggggttttacaccaacctagaggttccggtgggttggtggtagggacaaaatgtgtgggttttggcgggccattattggccgcgccgcattcccggtgtgttcccttgaaggggatttttaccatgtcttggttcccaagaaaggggttaaacgcggggggacaaggttggtaagggggccttccttctttcctgggatgcagcaaggaattttccaaagggataagtggtctccatttgacgcttttggcgaacatttttttatgttgtgtgccaccgagggcatggtcaagcgagcttcagctttgcgttcagtgttggggccctgggagctctttcgaggcagaagtagattttgccttgcacagctgtggcgtttctccaggtgtgcagctgcagccacctccttgatctctttcacagtttcatgcaggcagtcctccgccatgtttttttgggaggagctgtccttgagcacttcatagggcccttccatccccagcccctggtccccgtccacacttctcgccgtgagcatggtatccactgcgctctcgggagggattgtgggcagctcccgactctgatgacattttggtttccctgtgctgtcctgggaatccagcagatccgaggccgatgtctggacttcctcgtaatgctgcatgcaggtcagagtactgtcctctgaaagaatgtcccccattggtgagtgccccattctgctcactgctggcaggagcatctgttgccaggctagtaactgaacggctgaacatctccttgtctgaaggcacgttcatcaggttctcatgtcccccactatgtgtcgcggcttcttttccctgtcacaactagagcacaggaagatgaggaaggtgatgacgaagaaaatggcgacagcggccagacttccccacagggtgatctgcatctgtccgctgcccagcaggctccccgcgggccccatggcaggagcaggcactggcaccagccgagggaatcagtcagtccttcaaaggtggtgacatggaggcagaaagctgtgtccttggaggaaatgtttgtccnagtagagtattccaagttctggcaatgtattccctttgnaaatgttgtggtgagagttctctcttctttcttggccttttcccagcaatgaagttgtggccaactgctgaaagtaggagaaaaatctcgtgtttttgggactcaggaggcagggagtcttcctggcggacggcgctcggaggcangcctctgcaaacctgcgcggggcagcgccgccgccccggcacagcccggcagcagcggcaattgcaggaccaggcgccgccgctctgcaccagtcgcctttggctcagctgtgccgggcgcngggcattcgccagggcacacgacttcagcgaggcggcggctgggactgaggctactgcacccggccgcgcggacccgagcgctgcagctgcctccagccccggagcgcggcgctccgagcccttggtggtgtgtctnctggctccaagggaatncacggctncaattnagggtacctgtctcaggagaaaatatccgatgcgtgccgcaggcagagccgccagcccgcccccagtcggctggttcacatcgcgggcgcgcagacggacaagcgagcgggagggtaccgcagccagcattcgccgccgcgatcccgggaat

SEQ ID NO: 440286 - DNA, 1494 bp, Homo Sapiens
  misc_feature (187)..(195): n is a, c, g, or t
  misc_feature (497)..(514): n is a, c, g, or t
aacggcttttatttaaattttattttaacttagtgcataaacattacagccagtttaacttgtccgtggaaaggcagtagaattttaccccgggaccgtcttgcatactgctttttttgagttttaacatccgcaaaatcttggcatattaatttagttgggttgtagaattctgagtttaggaacnnnnnnnnnttaggtggggatggttgacctatgctccctactctgtagcttttgtttttttaaaaactaagttttaaatcccgttttctgtcctgtcttctttaaaagcaaaacaaaacattttaagtttcttaactttttcctggggcaggggacggtgcaaactcaaagctacagtattcttggaaagaagaggcaaccccctcccttggctcctttaggggctggtggcgtcatttattattgggactggaatggtgtaaacaattctctctctttttttcccttgttaacagcaactttcattgttnnnnnnnnnnnnnnnnnngaggccttgttggttgacgtcacttggttcatgaggccttcgcctagaggtgaggctgctgggccgaccttgaggggagtcctctcctgcttcaatctgctgctggataggaactaatcagagagagagaagcggaagacggagaaggagggagtcgaaggctttcccgatcacaaatctcacctccactacaactctctttatacttttcttgcagaaataataatagaaataaggaggtggtggggtttccaaaaatcttaaccttcaaccatctggggaaaaggcaaaaatcccatctaccgcaactctcagttcgagagtaaaggtgagtttaaaatcctcgggcgtgaggggtgcgggtgaggatgtaaattcccagtgttacaaagccggtggaaacagcagcggagaaactgcgctcgggcaatcgggggactccggagttgctgcgtggaggcgctcgccccgccgccctctcgccctccgccgctgtttatcctcgccggtcggtgcggctctttgttgtggtggccggaaggttggggtggttctcggggtcccgagtggagtttgggggaggaggacacggagatgtgccgtcctgggtgggagttggggggtgcggcctcaggagaacgtaaactttattcctagaagccggtgcgggacttcgctggagtagggccgtgggttgtgctcccggccgggcaggcgctgccgccgcgagtccgccgcttttgtgccggccgccctggttcgcgtctccttcctcttccccttcggcttccagcgctcaggtcgccgccaacagttttgcttctgggaaggtctatgtcagcacgcagaaggtttgaggagcattgcttctcatacagtaaggtctgtgccttggtctcatgttttagcagttcttccccgggaacgaccgccagctcccaactcctctgcttcccttttttaatcttcttttcgatccc

SEQ ID NO: 440287 - DNA, 1757 bp, Homo Sapiens
  misc_feature (723)..(723): n is a, c, g, or t
  misc_feature (1607)..(1607): n is a, c, g, or t
tcccgggatgcgagagtttgttcacgtgcgttcccagtgggtgtgttgctgtctaggggcactcgcgtggcaagacgcccgtggctggcttccagcgcccaagattcaaggaagggaaggagccctagcgtttcatccggaccagacccagccctcggagtctattttttgcctccagttaccggatttattgaagttgccagcgaagttggttttattcctttacttctctgctctccgcccccgtccacatcccccaaccctgtattatttcctgtcctagctgcgctttaaagattcggaacttttcactcgttctagctacagattttaactgtgttccgtgtgcgagacgaattgtggagggcacccacccacccatgccaagtgtaaatgaaaccgcaagaaaagctgcctcccactcacccatccagtgtccgagtaagcctaatgacacacattcacataactaagaagacacgggaagataggggtgcggaggacggagtttgatgtgtgaatgggaaatggagagaggggacagcgcgcgcgagagaaacagcgcgagcctgagccttagaatggaataaacgggaaacacacacaagaatgacgatgcaaaaaatgtatctaagtcccaacattgacagcagagggtcagctttaagcgcctacattttgatccgcgaaatttcccagcttttttggaggcggttacatagnagaacacaggagcctctgccttggccgcccagatgctttgcattttgtaaacagctttgactaagtgctctggacttccaagaagttaactggagtggaaggcgagtcatattgtggatgcggaatggaagcttagacaagaaaaaactgtcagcagagcgcctctgctctcaccgtcacacccaaatgagccaggacgtcgctcagagcgcaaactgagatccacacagggacatcttcaaccgaatctttcttctgtctccattccggactaaggaaagaaagaaagaaatacggagcctttatagagtattcagaggctacacacatggatcttgctgaaacggagttatttaaaaacagagaaagtgtgttttcccatgagatagatgttatagtttctctctgaaacatacccaagtctatgggtgtcaataatagccatttcaaatgcctctctgagccttgccagccccagaagaggctgtgggaatgctgcttccagcttcccctgtgcagaactccgttgtaaatccttctgagtttccaaggtggcagcagagcatagggatagctcctcaagctccagcatcaacaaggaagatcacattttaggacaaatactcatctacctgcatttaaacatccattttcgtatgttacaagatgattatgcgtgaacaaaaacagaaggtacatactggcaggaaacaaaagcacgttaaaccatgggagatttcctcttacataaacctgccatttgttaagcagttgctgtctgttccacagggaagctggcaaaaacttgatacaaacattctccaactgcactgggaggaataagtgaagggtacacctttttaaggagggcatacaaagagatnaaagatctacctagggacttactcaaacctagatgctaccattgtacaaaatgttccccagtctacctatatctaactatagttctgataaggagggaggtgatgttttatttttggaaaacacacttatccaacatggtaatgagattt

SEQ ID NO: 440288 - DNA, 1454 bp, Homo Sapiens
tttttgacattacagcacacttcctaaatcatctgagatcctgaggcactgcttcagactggtgtttcttgtagcttcctgtctgcttaggcaacataacagaagtaccatcttcccttaattcctaataaatattagatttttttgtactaagattcaacagcagaatcctaattaatctctaacacaacaagctatgaattatagaatactatatcttcctactgctctccctgatcttattccagccacagaattctaattgaatgtgaaacggctacttatcccagtccttggccatctggccatgtttatctttcttctcacctgctcatcaaaatatcttcatcagatactacgatttctgacctttatctcccataggagctagtcccctaaaactgcttattctttcagtggcagtcagctgtttccttatcaatagttatagcgtagtacctgatttactatagatgatggttctaccacctcatggtctgctcctaacacccatgtttcagctaaggtgattctctctgcctgctgcacagcccatatcatactattcctcaagttctcatgctactccaagctttatctggccttccttacagtctatcctttgccctttgttccatctacacaaaacaccttgctccccctttttcccattcctcaacccacccagcactcaattttgcaactagttatggaaagttcttcctatcataatttaaccagtaaccttccctcctttgaccacttcctgcttcatgaagccttcctgaataaagagaaaaaatacctcccagatttttgttaaagcaaactaatgcattggaccacaacatttatgcatagtgttgctacctagctttctagatttctctaaaactgccgcaactatgcatgtgcacttgtttgtccatgtcagtgtcatctgctttagattgtaaggacaaggagaggacctgttgaccttgtgctatacagggctcatccatactatgagccatatgggccagttaatactattgtattataaagatgaagtaattatatttgcatttaaagaactgcttttaattgtattcagttgaatgtgtatgtctagattggcagctccactggccaaagataatccatcttccctgccattagggtaaagggcctgttcgcacacagtagtccattttcccaatacacgggaatgtggcagtggcttctgcttattgcaggtaagtgcccatggagggcataacactataccaggtgtgtggaatatggacgagttcctattggcagctttaactgctctacctgtcaccacatgcagctgcgttgctctgtggaacttctggaccacaagagacagacgaaattcagatgagactggacagaaagaaaaccaacctaaatcctgtaaatgtattattctattccaacccttcatc

SEQ ID NO: 440289 - DNA, 1011 bp, Homo Sapiens
  misc_feature (401)..(402): n is a, c, g, or t
  misc_feature (404)..(404): n is a, c, g, or t
  misc_feature (642)..(661): n is a, c, g, or t
gatttgcactcttaggggtttgttagcccttttgtactactttctttttaaattgagaacatggttctttacatataaatctgcttcaaccttaggatgttttcagaccagaggcaacttattcatgaatttttatgaaaactatctactaggacagataagctgaacagtgatgatctgtagacatttatggactgaatgtaatggttgatatatgtacattctgatatttttaaatctttaactttttaaagttaaaaacctacagctgcttaggtccagcttcttaactctttttgagacacttcctgtcctatctccactgtgcctgcctaaatttgttctcaccaagcactgcctgtgcatgcagagaaaatctgtgcatcctcttttatattttnnanatactgtttaacatttgtgagaattttatgaaaatgcttttgtatgagctgtggctttttcccattgtgaagcattgaatatcacattttggaacatgttatagggtgagtccctggatctttgctcaccagatccaagcactgcttctcggtgtcattgcagtgtgctgcttgtcacccagaatactactatcatgtgaattctttttgtcgtcagtgtcttttccttagtcttttnnnnnnnnnnnnnnnnnnnnttttaatcattccttttttaagaagaagtaattttccatttatgaagcagtatgaattagatgtattttcaaaacaggtccctaagacaatttttcagatcatttttaaaatgactaagtcattttagtatgtcaagcaagataaaaattacatcataccgtctattttgcccatagtgccatttagagatgaaaaccagctttaactttgcaaagtgaacatgtacatggtctgctctcatttattcattcttctctcaaaagtcaaatgaatgcagagtgagcttggtcaaactgcttttgtttcaactgcaggcaggggagcaaaaggtcgccatgtgagcattagg

SEQ ID NO: 440290 - DNA, 1627 bp, Homo Sapiens
  misc_feature (155)..(156): n is a, c, g, or t
  misc_feature (182)..(182): n is a, c, g, or t
  misc_feature (197)..(197): n is a, c, g, or t
  misc_feature (209)..(209): n is a, c, g, or t
  misc_feature (277)..(277): n is a, c, g, or t
ggacttgcagcctaaactatggaagatgtagctttcctgtatgcagggctgtcccattatctaaaccctctatgctgctattaagctgcttatatccttttagtccagaaagctttcagcaacccaggaataaaaaatttctcctttaggaaagnnctagaaacacattcccagataatgtncacataagcctgaanagcccaagtagnaagttttcctttctcaatgtctgctaacttacgatttttgtaacctcaccggtaattctacttctctntccatcattcaaatgacagtcaatcttgctccctatgttccttcatttgtcttcaggaataatgccgccattcactaatcacaggcattatctgaaataaagaggcaagacaactaaaagtacacatactaaatgtctaaatgtctcccaagtttcttgaagatggatgtaaaaatactgcctgcaataaatgatatcaaaaggaacttacaaaacagtatgtaaagggacaaaagggagagatgaaaaaggacttgacaggagcaggttgatgtttggagaaacaagttctgatggttttaaattttgttgcctgagacttagcttcctacaggttgtcttttaaaatctaaactttcaggtagaattcaatcagaaatcctgggggattgcctattcaggtcaaataactgaaaaggttgaaaaaatgaggtcagcaataaccttgattcggtcctccactggcaacattttaggaagtacgtgattttttggagtcatgagacatttttcagaaattggagtcttggaaaacttgaaattatctgtcatactatcatttactctgttttgtcagtggagacctggccaattcagtttttgctttcagtgactgaggctttgctttaacctggtgactcccaaaaatatcttcgatgtgtttgatgatttttatttggcttagaagcacagcagatgagccaagtatgtcaggctagatgctctgaggaaaggctgcacatggacctacccagagtaaggaaggagtaaggaagtctaattcaattttgcacgagatgagattctgttgcacactggcaacacttccctgtgtatttcagcctttcacatttagtattcttccttcacctctgcctttcatttttccactctatgatcaggccggttctcagccagacatgccccctacttcttccctacctgcaaagattcacccatctttcacatacagcctgtgtttccataaagctttccttcatcattcctggcaaaagggagcttttccctctttccattcctagggcttatcatctgcctaaatgcagcataggttatatatgtacaggttgtatctataaggttggcttttctctccaactacaaagctcactcctggaggatagcattggatttaattcatctttgactcctccatggcatataatagtttctcagtgaaagttcacagggaaaattgttcctggagggggctgctcctgggaagcttcaaaattagaaaatcacttccttacaatgtgattagaatgtaggcctaatatcccctaaactatgttgtttagtttctgggagaaacattagctattgact

SEQ ID NO: 440291 - DNA, 1964 bp, Homo Sapiens
  misc_feature (1283)..(1293): n is a, c, g, or t
ttcccccctcgccccgtcccccttgccactgaccgcggggcgcgacgccacgaaggaggcctgggaccggctccggaattcccgggatgtctggaaaggtaggagtcaccaattctcttcaagccatctcccatccccacgccccgtcactcgggctaccaacaccaggatctaccacccaggaaggaggggcttagcttcggccgccattctgaggcagccacctccacccccacccccaccgcaacagccagccaaggcgctaggagtctccagctgccggcctcagctggtgcactagtaccgcagtcccagcaccttgcccggaatcccgtcaccccgcaggatggggcagggacaggtcatcttcaagccaagggaagagcaggttcactgccacccgcgatccccttttcttcctggatcttacagccaggctagggggcgtcgaacccaatggggccttagatcattccttgtccggaacagaatctctgcggaaccgccagacagacacacagctgctgctgcggatactggcttcttggggccaagacctcaacatgcaggacctcacatttccagcgatgcacacgttttttgagaacatcccgacctttcctcctccccaggaagatgctgcagacgtgcccgccatcccaggtctcgaagagctcttaaggcaaacctccggcacccgggccacacccaccggccggcccactctcctcgcgcatcccccaacctgccggcctaaggggaatggttcccttccctggccacatggtagacccttctcccatccagccctttctcccacaccatcccgaaagaactattcatccatccttccagaacagtaccccggcaaacggcatctctcacctgggtatcgaacccgttttccaccgagccgctcttccgcagcgggagcccctcccccgctggctcctgcagcccctgcagcacctgcgatttcagggggatctggctaggataggtggtcttgctcacctccaccttgcttcccaacttcaggtagcagggctgggggcccgccccgggccgggggcacgtgcaggatgggcgcggcgctgtgcacgggtttgggccagtcccgacttccattttggaggcgaccaggatggccggcatcttctcccggggcttgggctttcccagcacgtccctggcagcggcggcgggggcgaccgctaaaggcagcgcgggtagcagagcaggcgccgggccttagcccacgaggcgcccaccaccagcggctnnnnnnnnnnntccccaggtcggtgaactcgaagcaatcgggcgagcgcgcctttggggtgccgggatggtaatgggggactggccacggcgctcagcgggtcccacctggacggatgctgccgccgggtctcacacctctcctgggtggcctttcaagagctctgggcgctcaggggctgccgcctcttgcaaagtttcctcctgggaaacagaggcttggacgcccatattaacttgtcactgcatctccgaagtgaggaggcccctttggaagagacagaggcggcggcgacccacgagtcccgttccggaggctacgggtctgagccggcgagagaaagagcgagcagccaaggaaggaaaggagacagcagcgaaggaaggagagaagaagggcgcaagggtcccaagacgtctccaccgagaggcagctgccaccctgctcgcgagcaccgcagtgtcacccgcgacgcagcagaggtgcggcaagagcccccgaaaggtctctcttggggtgacagtcaccgctgcccagaaggcccccggactgagagcaccttagcgcctgcgggtctgcacatgctccgtgagctagatagaggcaaggctgtggccgtggggcgcgggcgccgggacgcgcggctggcgggccgggcagggctgcgctcgggagcggccgc

SEQ ID NO: 440292 - DNA, 2125 bp, Homo Sapiens
  misc_feature (54)..(54): n is a, c, g, or t
  misc_feature (95)..(95): n is a, c, g, or t
  misc_feature (130)..(130): n is a, c, g, or t
  misc_feature (164)..(165): n is a, c, g, or t
  misc_feature (224)..(225): n is a, c, g, or t
  misc_feature (251)..(251): n is a, c, g, or t
  misc_feature (272)..(272): n is a, c, g, or t
  misc_feature (274)..(274): n is a, c, g, or t
  misc_feature (338)..(338): n is a, c, g, or t
  misc_feature (363)..(363): n is a, c, g, or t
  misc_feature (391)..(392): n is a, c, g, or t
  misc_feature (395)..(395): n is a, c, g, or t
  misc_feature (397)..(397): n is a, c, g, or t
  misc_feature (433)..(433): n is a, c, g, or t
  misc_feature (445)..(445): n is a, c, g, or t
  misc_feature (450)..(450): n is a, c, g, or t
  misc_feature (489)..(489): n is a, c, g, or t
  misc_feature (529)..(529): n is a, c, g, or t
  misc_feature (548)..(548): n is a, c, g, or t
  misc_feature (572)..(573): n is a, c, g, or t
  misc_feature (634)..(634): n is a, c, g, or t
  misc_feature (640)..(640): n is a, c, g, or t
  misc_feature (690)..(690): n is a, c, g, or t
  misc_feature (732)..(732): n is a, c, g, or t
  misc_feature (734)..(734): n is a, c, g, or t
  misc_feature (879)..(879): n is a, c, g, or t
  misc_feature (959)..(959): n is a, c, g, or t
catagtcgcgatctcactggcgtgtgtccgtgtagtcgtcaaatactatgttantctccccgaatactatttggaatggtaatggtaacccactngcgttcttcctcgatccatttttcgtcatctgctncggttggagggtgtaggtggtgcggtttattgcnnggtttgtggttgtgttagtccttcaagggtgagggtgaggttcgggtgggtggtcgtgnnggatgtttacggtacaagtaattacnaatcatagggttgataggcgntncgctgccaatcatgctctcattgaggagggtaaaatgcgcggtaattagtgtgggggcaaaagncgtagttggtgggggtcgccgtggntggtcttgattgttgtatttaccaatannccncnaagtcggtctcagatttgtctttctgtacgcctatngatttctgtggnaagcncggcgcgggtgtcgcggggggtggaggttaggtggaaanggattgtaaacagcaatatgggtgccatggcccgcttggngggggaggcatccgggtancccgtaaattcgtgtacgggaatnnatgaattcttgttgcaagccgtcaattacgagaggctggcggcggtggtcttggtaggatnataagncggagctgatgcgctgatgtggagaaggctgtatgttaactcattcattntcggtgtttatcttacacgagcggcgtgttggttttatgggngngtatgcagtgaggcgtgttgaagtggcaccctcatccttataactacgtcccaccgatcttgttcgttttagagtcgtccgggacaggtcgggtgcgggcgggttctcccgtatgggcacttgggcggtgctggtggtgtgttcnttggtcgtttgtctagagagatggagtggtggccatgtgttctttggttatctgacggttgtgttatattcggtacgttnttgtcgatttgttgggcgcgtgctggcaattggtatattttcatggggggtgttcgaattgatcggccgaacaagtggtgctttgttgttgcccctatttgactcgaggctatggtaataacatggagggccccgtcgtgcctggccttttataatttggtctcctctattaggggctccccctttttccaagaaaaagtggggggccgcttaaaacttgtgcccctctgggggatacttttgagccgccccccctcattagtgtagatgattttgtttcacaaatcagaaaagtcctcgtcttgttgttggagcatttcaaaatgcatcttgtttatttggcttttgaaactgttataacacaacttataacattggaaatacattattttattaatacaaagtagttttcatagtaaaataccaaattaattaaaaggcagaatgaaacgtaccatatacatgtagacgacaaatgaaaactgtcaaagtatccttctctctaaaaagccacaaattacgttctttgaagtaagtattgggttttatttcctaaactatacacatcaatatcacctcctgaagctttttacccagtttcacggttggtatttcggacatgcaatgttccatgctgtcaaacttggaatgcctcgtttggatacagggagacaaagacttggagacccagaagcctgaaagtggttcttgaccgactttgtccactcaaattaaggcatcatgcagctggtcatcacttacattgctggttgcacgcaggcacacacacaccagtgctcacagccagcacttgttaagaatggttgagctggaccaaatggtatacgtgtctttcatcaatataaacatggactgcattcatctggacacgggcctttcccgcctaccgagcctgcccaccacccgaagtttaagctcatcttggaggacctgacactcaggaagccgtctcccgttgttccaccggctttgtggccccaatgtctgtataagctgctgatttgccttgggaaaacaaaccagcatcgatttcagagaaattactggataatttgcgctgtgaggcgcctagatcgcaaggcgcacttcgcaaatgacagccgttcccgtgcacttgtccagtcatttcggttggcaattccggg

SEQ ID NO: 440293 - DNA, 963 bp, Homo Sapiens
  misc_feature (411)..(411): n is a, c, g, or t
ttttaatatagaaggagactctttttccctacatatgcaagttcccattaaatattaggggaactctttataaaaaaagcttagaagaattttgggcttttggttataaacccaatataggttttcaaaatttgctaatataaggggttcaaagaaaaggcttaaaaatacttttggactcctttcttaagccttttgtaaattccctttttaagggcatgaaggtccaacaattggtctatcttgtaattttaaaagtatcgatataataataaaataagctttattgcgccccatttcttgaaataattggggttttagtgtaattttattttaaaataagataataaattatgttctcctgtataaagaaggatctcccatcactatggttagcatcaattaaaaaanattagaataagaatatatagctaaattgtcacatttattttataacatatataaatcttttataactatatcagaatgtacggctggagttgcctgctcatgatcttaataaaagaatgggatctgagaattatattttacttttgactattattgattttaattcatttaggctataaaacaaagatcctaccaatttaaaatttggtctgttatttagattttaattacagcttcccacattgtttatattcttaatgcttaaataaacatatatcagtatgtgtgatttttttataagtaaggtatactaaatttgtagatatgcatatattactgttcacttttaatcattttgaatctatcaagaaagcatagactaaaagtacttaattttatttgtgtttgagtaaaatggaatgaagcaaagacggacttacagtcatatctttagtataatctctgatgcagtaaggtaacacatctttagatggaataaaaaataaaacaaattattcatgtaagcttaaaaataagttgtattatgactgc

SEQ ID NO: 440294 - DNA, 833 bp, Homo Sapiens
aaagagttcagaatgtttatccaaaagatccccactgggtgctttcgaaatgactaactgaaaccggtgggaatttgggaatgtgcttctgggccttctgccatacagggctccagagctcagtttccggggcccggaggctgcataatccacactggacggggaggaactggagttcttctcaggaccatttgtgatgactttactggatttatgtagacttaggtgtagtctctctgaagagggtactagtgaccttgcaaaggatgaaaatccattcatttcttcttttaacatgtcatcctcaatttgcggttcgcctgagggcttttgtaaggtattaaaaagtgacttggaattatttttataattggctcgcattgcagttttagttaatttgaactctttttcacattgtgctaattcctttttgagtttctctcttcgttgttggtctgcatactttatgctggtactcacgcttactggaaccgagcagtctactgcagctttggctgaaaggattttattatagtgaacagccatgtgattcttgaccagctggagagtgcttagtctgagagaagaggagtcagtgcaaaaagcattacttttggtgctcaagtgtcctttaaataggcacggtggaccatatctgggaaggacagaggttgctctgactctccggctgccattcatgcttagtcctcttgcagccgccgcagggacacgctgtattcccttcggtccttcccgcggccgggcccagccccggcagtggaggactggaaaagaggagccgacgggggctgcagcagcagggaaaccgtcgc

SEQ ID NO: 440295 - DNA, 1916 bp, Homo Sapiens
ttttgagttactggccatttgaggtatttattaatgaagattaaacatccaaagggcagtcctcaatgctcatttccatgattttaagagttgataactccatgtcatgattattgtcgcctttgacactggagaactgaacagattgggagggtgatgtgttaagaccacataatccatttgaaatctcaaccttttcagggtcactatcaccttcaatgacattcacagaagtttcccgatctgttaaactgtctgaaatacttggatgattttcatccaaagttgaagtttcaagatttgtttcatcattcacctgttgaattataaccccttctgaatgctttgatttataaataggcatgaaaaattcagttggtgaagggaatatctcgttctcatcctttggtgccgacaataacatatccaaagccttttggtattgttgacgttcctgctgaattgttacttcactttcattttttaattcatttggttctgaattcccagccttttcaaaatcaaatacattcaacatatcaacatcattttgctttaccgagttttcctccgatgtgcagcctaagtctactttcaggacatgcagcaggtggcgcattttttcctcctccaaatgtttattttgttttatatgtcgctcgaacagtcgttctaaaaacctgtttgaaaataaaccaagtttcaaaatttcatctgttacatcttcaatgaaactcagatacaacagttcttcttcatcagagtagattttacgagttgaagggggcttcagggaatactgacacattgcccttggtgaggaatgctgaagagcatcatccttaatctcatcccatgttgagtcatgcccttctaaaggtaaaggagctattttttctttggcatcatatgtcacacaattagatgctacctgctttatgttcatttctgaatctgtcatgtttttagtctcagctgtccccaactcagatttaaagcttaattcagtctgggtttcagcttctatccgttgatctgtaaaatccttttttcttttggcaggtgtataatagcgatactgtgacaggaaagattttgcttctgtttttaaagtgcgaggagtgaatggcaattgtttgttagaaaagagttcagaatgtttatccaaaagatccccactgggtgctttcgaaatgactaactgaaaccggtgggaatttgggaatgtgcttctgggccttctgccatacagggctccagagctcagtttccggggcccggaggctgcataatccacactggacggggaggaactggagttcttctcaggaccatttgtgatgactttactggatttatgtagacttaggtgtagtctctctgaagagggtactagtgaccttgcaaaggatgaaaatccattcatttcttcttttaacatgtcatcctcaatttgcggttcgcctgagggcttttgtaaggtattaaaaagtgacttggaattatttttataattggctcgcattgcagttttagttaatttgaactctttttcacattgtgctaattcctttttgagtttctctcttcgttgttggtctgcatctatcctaggtatatttgctcccaacactggagcacccagattcatacactttatgctggtactcacgcttactggaaccgagcagtctactgcagcattacttttggtgctcaagtgtcctttaaataggcacggtggaccatatctgggaaggacagaggttgctctgactctccggctgccatccatgcttagtcctcttgcagccgccgcagggacacgctgtatccccttcggtccttcccgcggccgggcccagccccggcagtggaggactggaaaagaggagccgacgggggctgcagcagca

SEQ ID NO: 440296 - DNA, 1440 bp, Homo Sapiens
  misc_feature (201)..(201): n is a, c, g, or t
  misc_feature (270)..(270): n is a, c, g, or t
  misc_feature (275)..(276): n is a, c, g, or t
  misc_feature (787)..(810): n is a, c, g, or t
gaaggcccaacaaaaagaatttattggtgtctgataacagagaaatgaatcaaacaattgcatattcttttggggaggtttgtcaataacacgttaaaaggagaaaggtacaaaaatatttacaatatgactacaactcttacaacaacaaaaaatcctatacggaggggagaagtgacaaaatactccacggaggggagnaagtgacaaaatactccagtgtgaaggaacttggtttaggatgataggaaagtgattccttctttaaanaaaanngatttctatattcttttttatttattgagcaaggattttgcattacaatcgggaacaaaaacaggcctttttgagaagagaaggggcctcttgcagtagcctaggaaaatcacatttagaatccactcccgggatgtcattctaggctctgctgactacaacagcctgagtgaggaggaaagaggcagcagcagacagcggatgtggagcaagtaccctctggatgtgcagaaggagttcggctatgacagcccccacgacctggattcagactgatggtcttgtgatgtccatgaggttctgccacatgcccttgagggctctgagtccagagttaactgccctgctgacatcctgttaggtttcctagcttaacatgtggaaggaaaagcatatcaagcatatcgggcggcaccatcccaccacagtgaaaacttatgttaggggagtgagtcttttccacttacagtaggacccctttgcctcaatcaaaagtgaccctacagtttgnnnnnnnnnnnnnnnnnnnnnnnnggaaggtttctttagctttagcttcttggcccaggaatttttcctggcattcaggttctgtgctgaaaccacaagggagggggaggttcccatttcattagcagtaagcttctgctgtgccataccaccaggctgcctgcctctaggaaaaccctgttccttttgatagaatctaaaaggggtaccagtgggtcccttgtagcaatacagactggatagtaatggccattagggcagaaagtagtctgagcagtgggaggttttagttaacagctatttctgcttccaaactctgataacggttgtgaaattactgactgacttcctttggcagtggggccaagaaacaatatatatgaatgtgatacatgtgtttagtaaaatctagctttgaacatggaagaaagtaattctttgaaaaccttttaaatctgaatatctaaaacagggagcggtagtgaaatagaaggttcagcattgattataaataccaaggacttaaggcaagggaggaaaaacaaagtaccttctgaacttagctttccactgagtaatgtttactcttcacagcacccaccacaaaaacaaactactatcaacaggatcaattttattaacaactgttatctc

SEQ ID NO: 440297 - DNA, 1746 bp, Homo Sapiens
  misc_feature (731)..(790): n is a, c, g, or t
  misc_feature (1631)..(1654): n is a, c, g, or t
ggctcctttcatttttggatggtgacagcatttttcccctctgtgctggatacagacttctcccaggatcctctctttgggagcgaagccagaggatccctacagcactcaagcttcatggtggaattaatttctgccagctctttgttgtctgtctccttaaatccttttcctggtgtgcttattatcccttttgcagtgagtacagtttattaagttgtcagccctttaatattggggaaacttaatgagtataaatagcagggagcacattgtaacagcacagtgttttgtttttttcacccggttgctgtatgagaatggctttcaatcctttgtttctatgcctacagacagaaagcaagatgtctaatattagacatacaagttgctgcctgttataacggtgaattatacctttgtgcatgcctaggatgtttgttgttttaattagctgcaatatatacggcctgtgtacacagaatttaatcacttcggcaggttgaacaactccatgtagataagagcaagtgtaggcaaaggtttagaaaatggacataaagtcaaagaatgatggcaggtaggatgaaggagagatacttaggaaatcctaaaagaggcggcaagaaggtacctccctgtgtaactcaccttcccccatgacagtgagtaagagacactcacaggctatgagggtacacccctagctgaatgttctgtgttgtttcctnnnnnnnnnnnnnnnnnnnnnnnnnnnnnnnnnnnnnnnnnnnnnnnnnnnnnnnnnnnnaaataaaattaaaagctcagtttctcagttgcgctaatcacatttcaagtgctcagcagccacccgtgtctactactacacagtgcagacacagaacatatcatcactgcagatagttctactggacaatgttacgctagaataaacaccaaggcagtcagttaaggcagctatggtttggaaaggcatacggacagagtctgcttagaagagatacaagttgttaataaaattgatcctgttgatagtagtttgtttttgtggtgggtgctgtgaagagtaaacattactcagtggaaagctaagttcagaaggtactttgtttttcctcccttgccttaagtccttggtatttataatcaatgctgaaccttctatttcactaccgctccctgttttagatattcagatttaaaaggttttcaaagaattactttcttccatgttcaaagctagattttactaaacacatgtatcacattcatatatattgtttcttggccccactgccaaaggaagtcagtcagtaatttcacaaccgttatcagagtttggaagcagaaatagctgttaactaaaatctcccactgctcagactactttctgccctaatggccattactatccagtctgtattgctacaagggacccactggtaccccttttagattctatcaaaaggaacagggttttcctagaggcaggcagcctggtggtatggcacagcagaagcttactgctaatgaaatgggaacctccccctcccttgtggtttcagcacagaacctgaatgccaggaaaaattcctgggccaagaagctaaagctaaagaaaccttccnnnnnnnnnnnnnnnnnnnnnnnncaaactgtagggtcacttttgattgaggcaaaggggtcctactgtaagtggaaaagactcactcccctaacataagttttcactgtggtgcc

SEQ ID NO: 440298 - DNA, 1090 bp, Homo Sapiens
  misc_feature (204)..(205): n is a, c, g, or t
  misc_feature (211)..(213): n is a, c, g, or t
  misc_feature (217)..(217): n is a, c, g, or t
ccccaggttaggttagggaaccctaacccggagtccgcagggccagtaaactggggactaggagcctttaaagggcatggggcagaacttcatggacatcccaaggcccatcagtctgaatccagttcgtgggggctgtcatagccgaactccttctgcccatccagagggtacttgctcccaatccgctgtttggtgctgctnnttctcnnntcanttcaggctgttgtagtcagcagagcctctggaatcctcatctccatcactgctctcctcctctgggtactcattgcgccagttattctcactgttctcgtcatcttcatcgtcgtaaatgtcctctggttcttgatcatcattcaccagctcccattcttggctgtagggctgcacggagaggatgttctcaatccagcctggagtggccgtctccaagtagtaaatgtcatacacatagtcatcgtgtttttgttcttcctggcgcctgactcctggtccatcctcagacacagtcaatcgctcacggatcaactctacagaattgcagaggatcacatctgggtcagatgttttgcaggagcctgcagaggcggcttcaggttctccctcctcgtggacaaggtctaacaactgaaagcccgagttcccggcggcttctgggttccccggcgtgtactcggactcctggccgctcgaggtggtccccaaggatcggcggctggaaagcacccggtagcggccctcctgccggacctcccgagccgaggcgcggagattacggcggacacgctgctggctgtcccgtgacgggcgcagaacttcccgcaggagaggctggactggttcctcctgggagcacacagtggccaccaagtggaagacattattctccgccgctctctccaaatcctccgacgtcttctgtgccgctgactcgaccgcgtcgctccggaggcgtttacaagcgagcacaagagcctccgccggctccgcactgcgcttccgcttcacccggagtacagcggtcctggcggcctccatagtggctgccgccctcgtgccgaattcgccacccaggcctcgcttcctt

SEQ ID NO: 440299 - DNA, 2119 bp, Homo Sapiens
  misc_feature (1)..(2): n is a, c, g, or t
  misc_feature (53)..(53): n is a, c, g, or t
  misc_feature (119)..(119): n is a, c, g, or t
  misc_feature (149)..(149): n is a, c, g, or t
  misc_feature (156)..(156): n is a, c, g, or t
  misc_feature (166)..(166): n is a, c, g, or t
  misc_feature (185)..(185): n is a, c, g, or t
  misc_feature (189)..(189): n is a, c, g, or t
  misc_feature (191)..(191): n is a, c, g, or t
  misc_feature (196)..(196): n is a, c, g, or t
  misc_feature (210)..(210): n is a, c, g, or t
  misc_feature (212)..(212): n is a, c, g, or t
  misc_feature (220)..(220): n is a, c, g, or t
  misc_feature (243)..(244): n is a, c, g, or t
  misc_feature (247)..(247): n is a, c, g, or t
  misc_feature (251)..(252): n is a, c, g, or t
  misc_feature (263)..(264): n is a, c, g, or t
  misc_feature (266)..(267): n is a, c, g, or t
  misc_feature (273)..(273): n is a, c, g, or t
  misc_feature (284)..(284): n is a, c, g, or t
  misc_feature (287)..(289): n is a, c, g, or t
  misc_feature (296)..(298): n is a, c, g, or t
  misc_feature (306)..(306): n is a, c, g, or t
  misc_feature (309)..(309): n is a, c, g, or t
  misc_feature (315)..(315): n is a, c, g, or t
  misc_feature (318)..(318): n is a, c, g, or t
  misc_feature (323)..(323): n is a, c, g, or t
  misc_feature (333)..(333): n is a, c, g, or t
  misc_feature (349)..(349): n is a, c, g, or t
  misc_feature (355)..(355): n is a, c, g, or t
  misc_feature (371)..(371): n is a, c, g, or t
  misc_feature (376)..(376): n is a, c, g, or t
  misc_feature (408)..(421): n is a, c, g, or t
  misc_feature (424)..(425): n is a, c, g, or t
  misc_feature (435)..(435): n is a, c, g, or t
  misc_feature (497)..(497): n is a, c, g, or t
  misc_feature (515)..(515): n is a, c, g, or t
  misc_feature (2018)..(2018): n is a, c, g, or t
nngcagtagacacaaagggagagcaatcacagatcagtggttttgtgtttgtnttgttgtgtgtgtgtcattgttatttaactcctgtaccagaccattttactgattatttcaaagangtaaatattatcaatacattttacagagcngtctgancttttatgcngaaacaagaccgggatggnaaangngaaantccatttataaatntngggcattngcctaatccaagagtatattaannggnaggnnatactactagnntnngggcgnggggggcgggnggnnngggggcnnnccacacangcnctaccnggnttcgnattgggggcnccaaggcctatgtggncaaggngtcggtgacttaggcnactcngcgggggggagacatattccctaggcttcacnnnnnnnnnnnnnnaanncatgatagtngcctcagatttggctctggcctcctcatcttccacagcctccctatattgttctggccagtnctgtggtcgctttctgtngagcctggccatgtactccaagactttcattttgatggtttcatggtgggctcgagggccccatagaagctcatattcaactggattagagtaggacagtggcctgcattccagatagcgctgtctcataagcttacgggtgatggaatgctttctccctacatccacactaaatcttcgaagcaagttccagacattggcctctttgacacggttgcccatcaggaagatcaaacctaggattggcattacatattcttgagtgggtctccccaggctctctagcatcacttgctcttcctctgattctggttgctggacaaggaggtagatgtgctcactggtatcaacctcaatcagagacaacccatagaacatatcaagaattagagtagctctattgaggatatttgggaacacatcctcaaattctttgccagtgtgagccaatagctcatcctgatgtataggcagcatctcctcagtgacactaatagccaactggaccaaatcatttgccttatcattcatagtgtcctccgaccagaactctaagccagcagtcaggcttctttctttggttttgtcaccttccagggccttattatattcttctggccagctccagggttcttcagtcatgggcatctgacacaaacttcagggcttccatctttgtgatttccctgtgggctctagagccccacaagaactcaaactcaaggggattagtgccatacaccggccagtactccaagaatcgcatgcacacaaagtcagtagtgaggaggttccttgtgttcccaaagaggttgttgatcctctgaggcttatcccacatatcaacttttagcagcaagtcccaaatggaggcctctcttgctcggttcccattcaagaggatgtggcctaggactagggccaggagacttgcttttggcatgtccagggactccgctatcctatcggtgatctggaaaccccgtttgctgactaaattgtaggtgtcagcctgaggatcaataactctcaggttcaacccaaagaacctggtccaggtgagctgaggctcgtctggaggatcttagggaactgatctgagtactatctgagaaactccagcatctcggactgctggatagacccctccgtctggcttttcattctcatgaaattcaccaaagcaatcgacctgtcttctagagggtcatggaccctgagcgcccccaaacgtctggactgctcgtcgatcaggacctccaggtcattcgggtcctgaacggcctgggaagtgttgacacactgagagttgattggcgcctgagggcactggggggcatcaacgactagcatggaggtgggggacccggaggcgttagtagcttgtatttcacctctgccgtcgccgtaatctgcagtgatctctgcgctacagtggcgtgcattctggcttaccagagacatggttccaggagacaggagcgggaacggtgagatcagcgntcagtcggagagaggaccgcagcagtgttggtgcctcggcacaaagctgaagcccgagaccctggagctggaaggatcaaaagtgaaatctggtgtgaaga

SEQ ID NO: 440300 - DNA, 669 bp, Homo Sapiens
gttaatattaatttatataaaaagggcaatctcattttgtgttctttatttcaaatttcttgctcgtgcctttctcattataatctataagaatcaacaagaactgaaaataatttcaggacaagagaatgtacactgaaaaatcctggctatctatgagaaatgagtgaagataaataattgcagctgttctctttttctttcacttaaggtagaaacagtgtgttcacagaattcagttaattattacaatacacatcttgattaccataccaaaactctccaaattcttcctataagaggtacaatgtttctttataatggtgccaaactggtaccaatggtaggcaacaactgctgcactggaaggaagtagttcataactaaaagctaatatacagtgtcagagaaaagtggtgctacatcagttgcactccatcaataaaaaaactaggtctgttcaagctttatgctgccacagtgccgtgaacttcaagagcattatccagtggctatagtcttagtgttcctttttccaactaagcaaatgccaagaggagtgccttcccacaaacaaatgtgtaggtgacagtaaatgcaataataagactaattaatccactgggtgcttcaaaagtggaatgagtcagcccgacagaaaccatataa

SEQ ID NO: 440301 - DNA, 735 bp, Homo Sapiens
tttttttcaagaacaagaaataacacaggccttttatttgctccagaacttggctactgtgtggtctgagggtgccatgctttcccaaagcccccgagggacactccacccagggggtgccagatctctgtgtgtagccagactgcagtgtccccccaggctgccttagtccagaaggccagctgcctgccaccggtgcccgggacgagcatatcccctgaagctggagaatggtgtccacctttgcatggcagcttctcccaaggcattggctaaaatattgcacttgtaaatcaggaaaactgatgaggcaagggtttcctattacaggacgacgtgccaagcatccaactactatttaaataaataaaactcaaagtgggggtctgagctgcaagctccaatggccctctaggagggcccgagagcccaggcctggacctcctgccctatcagccagttctttaaggaacttggtcaacgcgaagcctccgcggtctccgcagcagggagcagcagctccagatctggcttggccagggcccctgacctgccagggttccgggccccctcgtaccggtgcagtggggaccccatggcgcccatccttctactccttcagccgcctgtgcctttcttgtgccatgcccttgtttccgcatgcccatcccgttggtcagagacacggtcccccggggcttgctttgtcctcttcgtacacttgtcaccgaagca

SEQ ID NO: 440302 - DNA, 671 bp, Homo Sapiens
  misc_feature (526)..(586): n is a, c, g, or t
tttttaatttgccagatattcttttaatgagaattataaaagaccaaaaacattttttgcaaactgcctttttaaacaaatgatttgcttttaattacaaatactgtgcatgacgatgccttcttctgcaaaaccaataaatacaagaacaaattttaaaatatgtgatttgtccaagatatctgaaaaaggaaacaaaagcctgatttgcagtatttataaaaatcaatttattctctaacctttcaaagattaagctcaaaggtgtgactcatctgtagaagacagaaagagagcaccttatagatgctttaaatagcttttgattatttttccgatgtcacctttactttctggaactcatggcttcacaaaatagctgattttaaaatatttctaatgaactgattaatgggggaaaagaaaatattgaacacgttataaattttttaccataaacaaatatgcatatcaaaagatactaactttaaaatggtacaaaaaaaggaaaaacctgaattacagnnnnnnnnnnnnnnnnnnnnnnnnnnnnnnnnnnnnnnnnnnnnnnnnnnnnnnnnnnnnnaaagcacacagcagcactatgtattgactcacaaagggaaaagcagtggcccatgaccactcatgatggctttgtcagttaaagg

SEQ ID NO: 440303 - DNA, 1016 bp, Homo Sapiens
  misc_feature (4)..(5): n is a, c, g, or t
  misc_feature (12)..(12): n is a, c, g, or t
  misc_feature (18)..(18): n is a, c, g, or t
  misc_feature (21)..(21): n is a, c, g, or t
  misc_feature (26)..(26): n is a, c, g, or t
  misc_feature (28)..(28): n is a, c, g, or t
  misc_feature (31)..(31): n is a, c, g, or t
  misc_feature (41)..(41): n is a, c, g, or t
  misc_feature (43)..(44): n is a, c, g, or t
  misc_feature (56)..(56): n is a, c, g, or t
  misc_feature (62)..(63): n is a, c, g, or t
  misc_feature (71)..(72): n is a, c, g, or t
  misc_feature (75)..(75): n is a, c, g, or t
  misc_feature (79)..(80): n is a, c, g, or t
  misc_feature (83)..(83): n is a, c, g, or t
  misc_feature (87)..(87): n is a, c, g, or t
  misc_feature (103)..(103): n is a, c, g, or t
  misc_feature (115)..(115): n is a, c, g, or t
  misc_feature (117)..(117): n is a, c, g, or t
  misc_feature (120)..(120): n is a, c, g, or t
  misc_feature (133)..(134): n is a, c, g, or t
  misc_feature (138)..(138): n is a, c, g, or t
  misc_feature (141)..(142): n is a, c, g, or t
  misc_feature (148)..(148): n is a, c, g, or t
  misc_feature (152)..(152): n is a, c, g, or t
  misc_feature (164)..(164): n is a, c, g, or t
  misc_feature (168)..(168): n is a, c, g, or t
  misc_feature (172)..(172): n is a, c, g, or t
  misc_feature (175)..(175): n is a, c, g, or t
  misc_feature (185)..(185): n is a, c, g, or t
  misc_feature (214)..(214): n is a, c, g, or t
  misc_feature (514)..(514): n is a, c, g, or t
aaanngcaattnggcacnatnaaacntnccntttttgaatngnnaacaaacttttnggcccnntttaaaannttntttnnacnaaantaggcacccttttttngccaactaaaantnttncggggggggaagnnaaanaanngaagtnaaanaaaaagaaaggntgtnaaanacnggaaacagtngcatgtagtaacactaatatatttaaaantaagtcaacagtaaaccactgaaaaaatatatgtatatacacccaagatgggcatcttttgtattaagaaaggaagcattgtaaaataattctgagttttgtgtttgttgtagattgattgtattgttgaaaaagtttgtttttgcgtgggagtgtgtgcctgcgtgggtgtgtgcgtgtttgggtttttttcctttaactgacaagccatcttgagtggtcatgggccactgcttttccctttgtgagtcaatacatagtgctgctgtgtgctttttttgtgtgtatttgctaattttnattaattttagtttttcattaaataaatttgacttttctgtccttcaggtttttcctttttttgtaccattttaaagttagtatcttttgatatgcatatttgtttatggtaaaaaatttataacgtgttcaatattttcttttcccccattaatcagtctcattagaaatattttaaaatcagctattttgtgaagccatgagttccagaaagtaaaggtgacatcggaaaaataatcaaaagctatttaaagcatctataaggggctctctctctgtcttctacagatgagtcacacctttgagcttaatctttgaaaggttagagaataaattgatttttataaatactgcaaatcaggcttttgtttcctttttcagatatcttggacaaatcacatattttaaaatttgttcttgtatttattggttttgcagaagaaggcatcgtcatgcacagtatttgtaattaaaagcaaatcatttgtttaaaaaggccgtt

SEQ ID NO: 440304 - DNA, 903 bp, Homo Sapiens
cacaatgtcagatcatttatttcagcgcagttacacccagcagaggggcacaggcttaaacgccggcatattagttttcccgcacgcgagccctgcatggcggtgggctggggagccggggcggtgcgattctgccacacgccacgctctactaggcccccttactcctaattaattgcctgctcaccagactgtgagaatattattgccactatattttttccctcctctgcataaaatattcgggggaaccagcacttaaaaaacagacttcatgaaagaagggcagcaaggcgtggatgctgcgccccccacaacccccactgcagaggacacagagaggccaggagccccttcctggttccccctggttccaaatgagacagaaaggctcaaagagctcccaggaatggtcacagctgaaaaaaagtcgagtgagtggctacatgcggcagccgcttgtgttcacctgccggtccacccaggacagtccccggcagcagcttgtgttcacctggccctccacccaggacagtccccgggctggctccaggctgcagggggtcagcagagggagccttctgccccatatccttggcaaactcacttctccttttgggaccacacaagagacatgggaggaatgttccttattaggcaagggcacagaacccctaatcccagtctttgtttggcatgagttcccaggcaggcaaggaagatggagtcaggtgggatttcagcctccggaaagagcccccgcctcagagtggttggtggattacccagccttggccttcctttgaccgtggtaaccggttgtggcctggccttcgcccctggagggcccttctttcctcactggcagggcgaaaatgatgttggattcccaccccttatgtg

SEQ ID NO: 440305 - DNA, 898 bp, Homo Sapiens
ttgatgatctgacttgctttaatctgcacactgcgggggtgggggtgggcatgctcctcagcagtgcattctgggacacgggcgggcgggggctggcacgggaggacgagagcacctgcagggcagcgcctggcgggcgggcgggcgggcgggcgatgtgtcagctgcagttcttgggcaggcggtagacgccggccgagtagacgagctgctggtcccgcaccttcttctgcaggtagccctgcagctcctgcaggtcaatctcggccagtgcaggcccagtcaccacaaacatgcggagcatgttgtagatacgatccagtgagaggctctccaggttggtcagcatggcctggatgtacgtccagaagaggcagcagcttctcctccttctggtcggcctgggaggccatgccggagtcgctctcgtcgtcactgtcaatgagcaccatgttgtcccggtcctgaggccgctcctcctcaatgacagagaaggtgccggggggctcctcacgcagcacaccctgctgcagccacacggacatccgccgccgcagcagcgccacgggcatcttaaccggcttgctcagttcctccagggtccagctggcttggtcctgaaaatacagcatgatcaccgtctgtactggggtgaccgccacagacagggtgcggtcggccaggtccacgttcatggtcaccaggcccagggggggcgtttcaattgaggtgtcccatgccccttgaggctgttcatacttttttgcagaaaggccttcaggggctggccttaatattccttggggcccctccagctttctcgtaccttggaggggcgggtcaggaacttcattggccacggtaggccaggggttagacccctgaaccggtgggcctg

SEQ ID NO: 440306 - DNA, 1588 bp, Homo Sapiens
  misc_feature (1005)..(1005): n is a, c, g, or t
  misc_feature (1098)..(1098): n is a, c, g, or t
  misc_feature (1233)..(1253): n is a, c, g, or t
  misc_feature (1535)..(1535): n is a, c, g, or t
  misc_feature (1549)..(1549): n is a, c, g, or t
  misc_feature (1568)..(1569): n is a, c, g, or t
  misc_feature (1580)..(1581): n is a, c, g, or t
gaggcctgggtggcgatttcggcacgaggtcaagtactgcctggagaggacggaccagaggcagcagctgctcgtgtccctcaaggctgccctggagactcggctcctgcatccaggcgtcaacacgtgtgacatcatcaccctctatatctctgccatcaaggcgctgcgcgtgctggacccttccatggtcatcctggaggtggcctgtgagcctatccgccgctacctgaggacgcgggaggacacagtgcggcagattgtggctgggctgacgggggactcggacgggacaggggacctggctgttgagctgtccaagaccgacccggcgagcctggagacaggccaggacagtgaggatgactcaggcgagccagaggactgggtcccggaccctgtggatgccgatccagggaagtcgagctccaagcggcgttcatcggacatcatcagcctgctggtcagcatctacggcagcaaggacctcttcatcaatgagtaccgctcgctgctggccgaccgcctgctgcaccagttcagcttcagccccgagcgggagatccgcaacgtggagctgctgaagctgcgctttggcgaggccccaatgcacttctgtgaagtcatgctgaaggacatggcggactcccgccgcatcaatgccaacatccgggaggaggatgagaagcggccagcagaggagcagccaccgttcggggtctacgctgtcatcctgtccagtgagttctggccgcccttcaaggacgagaagctggaggtccccgaggatatcagggcagccctgggaggcttactgcaagaagtatgagcagctcaaggccatgcggaccctcagttggaagcacaccctgggcctgggtgaccatggacgtggagctggccgaccgcacgctgtctgtggcggtcaccccagttacaggcggtgaatcttgctgtattttcaggaccaagccagctggaccctggaggaactgagcaaggcgntgaagatgcccgctggcgctgtctgcggcgcgcggatgtccgtgtggctgcagcagggtgtgctgcgtgaggagccccccggcaccttctctntcattgaggaggagcggcctcaggaccgggacaacatggtgctcattgacagtgacgacgagagcgactccggcatggcctcccaggccgaccagaaggaggtaggagctgctggtgcgcgtgctaggtcccacnnnnnnnnnnnnnnnnnnnnngaggcctgcaggtgcctgacgggggctggcctgtgtccgcagctcttctggacgtacatccaggccatgctgaccaacctggagagcctctcactggatcgtatctacaaatctcctgcatgtttgtggtgactgggcctgcactggccgagattgacctgcaggagctgcagggctacctgcagaagaaggtgcgggaccagcagctcgtctactcggccggcgtctaccgcctgctccaagaactgcagctgacacatcgcccgcccgcccgcccgcccnccaggcgctgcccngcaggagctctctccctcnnttccacccccnncccgccc

SEQ ID NO: 440307 - DNA, 936 bp, Homo Sapiens
gcttttaggaatgaccaagattttggagagccgagaatgaagctaagtatatttctttttaagtcaaacttcataggaaatttggagttggaaaccatttaaaaggaactcttttttgttttcttttcctttctagtgtgtgatttgaatgtaaatgtctcagctgctttctgccatttgttgttattgatcatctctacaaagtgatatggaaccccaagctcagtagggaggcagaagaccaaggctcttatattttctgcttttaggtcaacctgtgtacttgaacaattaactaaatattacctgcctctataacatgggcatgctggtttatttctcacatgccagtttttatgcaatcatccatgttagcataaaggcaaaactagtaaccatgtttaagttgttccaataaaatgcttaacacatgggcttaaaaccagtcacgtctgggtgcttttccctacacagttaaccttgagacccaggataatttatttcacctccctgagcaatagtttcacctatctgtaaagaaggaacggtgtatttcccttgcaaacttgtggtagtgattaaactagcccactagagatcccgagtcaatgggagatgtgataattgctaatatttttgtggccttaaatatgtttctcaacaagaccaaaaccctagcaacccaggtcctacctaaaaaaatggcatgagagctaactactaaaataaactttaaaacatttaaggaatggaattggttggttcaataacccctccattttcaaatattttgaaaggttggaaaaacctctggttttccaggttaaagaatttcttcaccttccccaagctcttccaaagaataaaaatgagattttaaaaattacccggatctttttattaaaccaagccctataaagctgtaaaacctgcttt

SEQ ID NO: 440308 - DNA, 999 bp, Homo Sapiens
  misc_feature (3)..(3): n is a, c, g, or t
  misc_feature (7)..(7): n is a, c, g, or t
  misc_feature (9)..(9): n is a, c, g, or t
  misc_feature (13)..(13): n is a, c, g, or t
  misc_feature (30)..(30): n is a, c, g, or t
  misc_feature (32)..(33): n is a, c, g, or t
  misc_feature (38)..(38): n is a, c, g, or t
  misc_feature (43)..(43): n is a, c, g, or t
  misc_feature (48)..(48): n is a, c, g, or t
  misc_feature (50)..(50): n is a, c, g, or t
  misc_feature (55)..(55): n is a, c, g, or t
  misc_feature (59)..(59): n is a, c, g, or t
  misc_feature (64)..(64): n is a, c, g, or t
  misc_feature (66)..(66): n is a, c, g, or t
  misc_feature (72)..(73): n is a, c, g, or t
  misc_feature (78)..(78): n is a, c, g, or t
  misc_feature (85)..(85): n is a, c, g, or t
  misc_feature (88)..(88): n is a, c, g, or t
  misc_feature (91)..(91): n is a, c, g, or t
  misc_feature (96)..(96): n is a, c, g, or t
  misc_feature (98)..(98): n is a, c, g, or t
  misc_feature (110)..(110): n is a, c, g, or t
  misc_feature (120)..(120): n is a, c, g, or t
  misc_feature (123)..(124): n is a, c, g, or t
  misc_feature (138)..(139): n is a, c, g, or t
  misc_feature (142)..(142): n is a, c, g, or t
  misc_feature (146)..(146): n is a, c, g, or t
  misc_feature (149)..(149): n is a, c, g, or t
  misc_feature (151)..(151): n is a, c, g, or t
  misc_feature (153)..(153): n is a, c, g, or t
  misc_feature (166)..(166): n is a, c, g, or t
  misc_feature (169)..(169): n is a, c, g, or t
  misc_feature (175)..(175): n is a, c, g, or t
  misc_feature (177)..(177): n is a, c, g, or t
  misc_feature (183)..(183): n is a, c, g, or t
  misc_feature (190)..(190): n is a, c, g, or t
  misc_feature (196)..(199): n is a, c, g, or t
  misc_feature (206)..(206): n is a, c, g, or t
  misc_feature (208)..(208): n is a, c, g, or t
  misc_feature (212)..(212): n is a, c, g, or t
  misc_feature (215)..(215): n is a, c, g, or t
  misc_feature (217)..(217): n is a, c, g, or t
  misc_feature (242)..(242): n is a, c, g, or t
  misc_feature (247)..(247): n is a, c, g, or t
  misc_feature (258)..(261): n is a, c, g, or t
  misc_feature (264)..(270): n is a, c, g, or t
  misc_feature (272)..(272): n is a, c, g, or t
  misc_feature (281)..(283): n is a, c, g, or t
  misc_feature (285)..(285): n is a, c, g, or t
  misc_feature (287)..(287): n is a, c, g, or t
  misc_feature (289)..(289): n is a, c, g, or t
  misc_feature (300)..(306): n is a, c, g, or t
  misc_feature (312)..(314): n is a, c, g, or t
  misc_feature (316)..(317): n is a, c, g, or t
  misc_feature (320)..(323): n is a, c, g, or t
  misc_feature (331)..(331): n is a, c, g, or t
  misc_feature (333)..(337): n is a, c, g, or t
  misc_feature (341)..(344): n is a, c, g, or t
  misc_feature (346)..(346): n is a, c, g, or t
  misc_feature (352)..(352): n is a, c, g, or t
  misc_feature (356)..(357): n is a, c, g, or t
  misc_feature (360)..(366): n is a, c, g, or t
  misc_feature (379)..(379): n is a, c, g, or t
  misc_feature (381)..(381): n is a, c, g, or t
  misc_feature (385)..(385): n is a, c, g, or t
  misc_feature (391)..(392): n is a, c, g, or t
  misc_feature (410)..(410): n is a, c, g, or t
  misc_feature (418)..(418): n is a, c, g, or t
  misc_feature (434)..(434): n is a, c, g, or t
  misc_feature (436)..(436): n is a, c, g, or t
  misc_feature (441)..(443): n is a, c, g, or t
  misc_feature (446)..(447): n is a, c, g, or t
  misc_feature (454)..(454): n is a, c, g, or t
  misc_feature (456)..(456): n is a, c, g, or t
  misc_feature (462)..(463): n is a, c, g, or t
  misc_feature (471)..(471): n is a, c, g, or t
  misc_feature (473)..(473): n is a, c, g, or t
  misc_feature (477)..(477): n is a, c, g, or t
  misc_feature (481)..(481): n is a, c, g, or t
  misc_feature (488)..(488): n is a, c, g, or t
  misc_feature (495)..(496): n is a, c, g, or t
  misc_feature (557)..(557): n is a, c, g, or t
  misc_feature (612)..(612): n is a, c, g, or t
  misc_feature (646)..(646): n is a, c, g, or t
  misc_feature (684)..(684): n is a, c, g, or t
cantcancnaggncgcccccccatattgcngnnctgcntcggnccctngntgccnttgntgccnanactgcnnttacnctgatgnaantgncttgnantttgtagacgcnattttgccangtnnttttttatattttnncantgtngcnantntttgcccaaaatnatngcaagngnactggngcatccngctgcnnnnaagtgcngngtcnaangnaagaaaatcgatgatttttttaaanccatnctttctgcctnnnnagnnnnnnncntgagtgccnnnanantntgggcagaaannnnnnnttggcnnncnngcnnnntaaagccntnnnnngggnnnntntgaacncccnngcnnnnnnnttgccgccgcaanangtantaaatnnttttaaaggggatggagntggtcccngtgtgctaacccccantntgagnnnaanntgggctnanaggacnnatagggangntgcntgcnagtaganggggccnntcgaagtactcaagtacttggctcgcaacagcactattcccataaagcctggcctgccccnttggtgccctccttcccttacgcctctagactctactaggtgatcagaaatcccntgcaagctagttggggagggaagagtgaaagtgnataaatggagaggaaagagtgctacccgccgaatgccntgaagcccaaatgcaagcctgggccaggcttgggggaggaatcaagaggaagcttaaacttaaaatgaaatcgaaagtttagactcctacatgggattggacattttaaatgctgaacagagcctatttttatagctagaagttacaggacaaatttttggttaactgagaatgatccaaaaatcatgtgaattttgtgatccagaaagtcacagaacatgccctagattttttcccaggggcagggaggagtgacctgcagagcaagtttgaattggtaaatagaaaacaagaataaaatagtttgctgtttac

SEQ ID NO: 440309 - DNA, 770 bp, Homo Sapiens
gcatgtttgaaaccttttattaaacaggcaatgcattgtgcagtggttaaagacacagatgcctagtggaaaagtttaaaaattatttttggaaacagtctatgaattgatgaaccctgccgtgttccttcatctccttctcagagtggctgtctttaggaaaacagattgttttatagctgctcttggaaacggcatccctgttttgccatgaatgtcatgcctcgtagtaaacatgaaagaagacaggatccacaggcaagagagcgaccagagacatgggctgatctcagctggaagcacagatgtcccttctcctagaagggcttctcttctggcctttgctgggtgtcctatttatgtgtccaatttcatttctattttcttccttgtctgaggcttctttatcaagggaattcgaaaagacacattcgtacctttgggcacaggaactggttcctggactttttcaatgttgttcttgtttctgggccctctggcccaggagtatggctgtgtgtttatcctctttgttttgcctggttccttcctcttccccaagttcgtcataacttgatgataaaatcaatctttaagtttcacagtttgtttgccacaatacactggcagtttttaactaagtggcttgtcagggctagtggacatgctttatcagcacactgcccacctattttataatctggggcatgtcactccaagcttgagatttctttctggcaagttccatccaggatggctgatctgtactg

SEQ ID NO: 440310 - DNA, 950 bp, Homo Sapiens
  misc_feature (913)..(913): n is a, c, g, or t
cttgcttccaatgatttttattgggaattaaacaatacatggtcataaaaggtacaaagttgaaaattaccatacaaatatgaagattaaaaacacacaaaaaagtaaatgatcaaggagaacctacatgaaaagagactccccagtaaaatacagttgaaaacaagagaaaattctgacctataaaatattgaatataatacagacgtatcataaaaacaatcctttaaataactagttttcaactgtgacttatgaagagctggcattttgaatctttgacatgccatgcgccgcaataaaagcaaatgcatttcaataattaataaaatgctctaatgagaatgaagcattgcaatacatttacttattacacaatgtgtaaatctgagtactttatttcagaaattctgaatctgtaatcagataaatttgacatagaacatatcggaacatatggcatagcaagatggcagaataggaggttctctacccacactttctacagttatgaaaatgcagcagttatgccctgacaaaagaacctttatggcaactttggaatccatgtgtaagattgtgaatcgaagactgaggagggctgtattgagagggtgtgcccttgcttgagtggcatgcttgcccatcatagtcccagctaccgaatgaaatgtgattaattctcattgtaaacatagctatagatcatttggttttgtttctgccactatcaccatctgccaagacacttaggaggattcataatgtcctgtgtctcaggtgaaaggcctttagatgttggctcctgcctgtgatctgtaaattagcccaaacccacccctttccctgatcagtcatagtgtggaagaaatcctgcacacacagagacccacagaaacatccattctgtgcncctggatgtaggcctgccaatatttattcaatggtgg

SEQ ID NO: 440311 - DNA, 1615 bp, Homo Sapiens
  misc_feature (33)..(33): n is a, c, g, or t
  misc_feature (49)..(57): n is a, c, g, or t
  misc_feature (74)..(118): n is a, c, g, or t
  misc_feature (148)..(200): n is a, c, g, or t
  misc_feature (221)..(221): n is a, c, g, or t
  misc_feature (307)..(307): n is a, c, g, or t
  misc_feature (325)..(376): n is a, c, g, or t
  misc_feature (382)..(382): n is a, c, g, or t
  misc_feature (409)..(409): n is a, c, g, or t
  misc_feature (419)..(419): n is a, c, g, or t
  misc_feature (484)..(484): n is a, c, g, or t
  misc_feature (488)..(488): n is a, c, g, or t
  misc_feature (542)..(542): n is a, c, g, or t
  misc_feature (830)..(839): n is a, c, g, or t
  misc_feature (1419)..(1419): n is a, c, g, or t
  misc_feature (1507)..(1507): n is a, c, g, or t
cccaactctccttcttttttataactcattttnttcatgcattgttgcnnnnnnnnnttagtaatctgtgtacnnnnnnnnnnnnnnnnnnnnnnnnnnnnnnnnnnnnnnnnnnnnnaagatggagtcttattctgtttccaaacannnnnnnnnnnnnnnnnnnnnnnnnnnnnnnnnnnnnnnnnnnnnnnnnnnnnaagcaattctcctagtctcancctcccaagtagctaagatatacaggaatgtgccaccacacctggctaatttttgtatttttagtagagacggtttcaccatgttngccaggatggtcacgatnnnnnnnnnnnnnnnnnnnnnnnnnnnnnnnnnnnnnnnnnnnnnnnnnnnnagtgtnagcctcctcgcctggactcttattganattttttaanataattactttgaattctctgttagacatatttctagatctgtgttttattattaattgttcctngagnatttttagtttctttttgtgctgttaggtttgcctgatcctatcataatctgtnaagccttgttttgatgttcttgcatctgaaggagataaatacttctttcaatcattacagactagtttagggaggtaaatatcttctattggttttctgggctgatgagattttcactaggatcacagtcaactgcattggatcctggtcacataactactactgggtctacagtgaagttaatgcttggcagacctgttatttaagcatcagacagttgaggattccatttttctgaggagactgaactttctttaagatcttgatcaaataagactggtgctgagnnnnnnnnnncccagttaatatctgcaaatggagatgctgatacaataaatatgagtaggtgtggctcctgctgtttggctcttgcgagatgtttggaaatgctctaacctagtcattggacaggtttctagatgaccgttactgagcgttgatcacagctgagagggtgtgaaactaattcatagggctgcttcaggatacacagctgagaccaaagtcttcaggtttgttctgggttcatgacatttctccctccagatttctaggtgggcaggacttctccctgcctctagctgccagggactggagcttggttataggactgcttcacaattcacggtgggaataaagtcagccagcatgcctacagggacacatgtagctgtgcttttgggcaggtcacaggtcaggaaaaactcctcctggattttggttgcatggacttggagccaagttgtagtgccacgtcaagatccaccatcaaataaatattggcaagcctacatccaggggcagagatggatatttctgtctgtgggtccctgtgtgagtaggatttcttccacatcatgactgacatgtgcaaggngtgcagtttggggtaattcagagatcacagacagaagcaacatctaaaagccttttcacctcgagacacaggacattatgaaatcctncctaagtgtcttggccagatggtgcttagtggccataaacacaaaccaaatgtatagcttttggttacaatggagaaattaaatacattttcattcctgtattgtggg

SEQ ID NO: 440312 - DNA, 692 bp, Homo Sapiens
  misc_feature (70)..(70): n is a, c, g, or t
  misc_feature (184)..(185): n is a, c, g, or t
tggaactgattcatagggctgcttcaggatacacagctgagaccaaaagtcttcaggtttgtttctggcnttcatggcatttctccctccagattcctgggtgggcaggactgctcccagactttagttgacagggactggaggtaggttttgggactggagctgggttttaggactgcttccnnaagattcacagtgggaataaagtcagccagcatgcctacaggggcacatatagtgtgttttttggcaggtcccaggttaggaaaaactgcttctggacttcagtttcatggactgggagccagattatagtgccacgtcaagatccaccattaaataaatattggcaagcctacatccaggggcacagatggacgtttctgtctgtgggttcctgcatgtgcaggatttattccacatcatgatagatgtgtgcaaggggctaattcggagatcactgagaggagcaacatctaaagtcctttcacctgagacacaggacattatgaatcctccttggtgtcttggcagatggtgctagtggcataaacaaaaccaaatggcctacagctatacttacaatgagaattaatcatattttattttgtagctgggactatgatgggcaagcatgccactcaagcaagctcatgccttctcaatacagccctcatcagtcttaggtttac

SEQ ID NO: 440313 - DNA, 1037 bp, Homo Sapiens
  misc_feature (18)..(18): n is a, c, g, or t
  misc_feature (40)..(40): n is a, c, g, or t
  misc_feature (43)..(44): n is a, c, g, or t
  misc_feature (48)..(48): n is a, c, g, or t
  misc_feature (68)..(69): n is a, c, g, or t
  misc_feature (72)..(73): n is a, c, g, or t
  misc_feature (87)..(87): n is a, c, g, or t
  misc_feature (94)..(94): n is a, c, g, or t
tggtgggaagcacggagntgatgttacctttgccagggtnganncttnctgaccgcgcgctgtggtgnngcnntgacccaggagggngccccanacaacccctagccaggctgttgtgtctgctctggttgaaacagaccccctggaacacacaataggtcattctgggtaacacaggctcaagaggtgcaggtgcccgtgctacctgccccaaggcagccctcactaccctgtgcccaggctgctgggaggtgacaggacagccggctgggtccttggcatctgactcaccgctggccgcactctgggcctgaccgccgcgctcctccttgaggtccctgctggggcctatgggtgtgctgcgtcctgcctgctccagcctgctcagcgtgctggtggccaccttctcctctttggctctcttgtcccctccttctgtggccaaggcctccgcatttcccccagggctggtagccggctcagcaagtgacttgagggcatggcaggccgtgatgatgtcctgcatttggaggaaagtggccacggccagcacatcatccacgttctcagggctcaggctcagcttggccgtgtacataaactccagcacctgccccaggcctgccgcgttactgatgtccaggtgcaccacgtccttctggtccacgaagagcatcttgaagtactcgctgcaggccgccagcactgctttatgagccttaaagtgaacaccgtccaccacaaaggtgcagtcacagagaagccccagctgccgctgctggttcagctgttccaagacatgctggctgtgctggggaaagtccatggctcagatttccagacagcccaggctactcttttctgacagtttgcctgtgtaaactccagcttggctcccctcgtccggctcattacctgccatgtcccggaccccaccgcagagggaggtgcatcacggccgcgagaaggccggggacggcactccagagcagacaaagggcgccgccatgttagagtcgggcggaaccgacctcgca

SEQ ID NO: 440314 - DNA, 2720 bp, Homo Sapiens
tttttttagaaaataatccaatttattctctctagggaacaggccacccttcccggttccagggtgccatccatccttaaataaacagtcagaagggccgccagctcactcggcaggcgggggacattcaggagctgtaggggaggtctctgccagtgcgggctggccctcagccccgtcgcgagggcggaagaccagctccccagcctgcagcacctgcccggcaggccacgtgccacctggcccatactgctgatagaagtccgcgtctgtctggaacatgaccagtgcctgggctgtgtggattcgcacatgctgagccaggctgttggcatccagaaacttgtccccacaggagtcacaggcgtagaggatgtgagtgttggggtcttcttcctgcacttgcttcacagctttgctgatctcggccttcaggactttccgtctcatcggctgtcactgcagctcccaccggcaccactgtgagctgagtgacggctgtcgctgccagtgcctcggtagccagcgtgaccatgtcatccacagtgaccacgctgacctcactgccctcctcgggctccaggatcttgatgcctgccttgccctggtgcacggtcttcacgtgggagcgcaggttgtctacccggttgaagccacgcccacacttatcacacaggtaaggcttctctccagtgtgaatgatgatgtgcttggacaggtcccccacgttcacgaaggccttgctgcacacgctgcacttgtgtgggcggatgttgtcgtggtggcgaatatgattggccaactggctggactggacgaatctcttgccgcagcgctcgcagacgtagggcttctccccggtgtgctggcgcacgtgggcgatgagggagctggccctgggtgaaggccttaccgcacatcacacactggcatggcttctcacctgtgtgaatgcggacgtgccgctgcagagcgccggggtctgcaaactgtcgctggcagtggatgcacacgtagggcttctccccgctgtggatccgaaggtgccgcttcaggttccctgaggtggtgaactgcttcccacactctcggcacttgaggggcccgtcagcgatgtggatcttcaggtgggccttcaggttccctacctggttgaacttcttgtcgcagtgtgggcacttgtgctccttgtccgtgtcgtgggtctccaggtggcgcatcttggaagtggggtcggagaaggagcggccgcagtagtcgcactggtagtgcttctcgccgctgtgcaccagctggtggcgcttgaggttgcccgaggtggtgaagagcttgccgcagtcctcgcagcggtagcgcgcctcgcccgagtgccgcttcttgtgcaggttcagcaggctgatgaggcggtagctcttcccgcactcctcgcagccgtagggcttcagagggctgtgcgtcttctcatgggccttgcacgcggccgggtcggaaaaggccttgctgcactcccggcacgagaagggcttctcccccgtgtggatgcggatgtgccgcttgaagttccccgtgtgcgtgaactccttcccacagtcctcgcacttgtggatgacggagccgtaggccttggactccgtgcggtcgccgtaggtgcctgagcgcaggccccgggcctcggagccgagctcctgccccgagtctgtgcccgctgactcctcattctcgttctcctcgggggcctctccgttctccagctgggaaccctcctccttgacctcagctggccctgcgccctcctcctcttgctcctcttgctccttttgctcctcttcccctttccgggcgggctccaccgtccatttcttgctccgagctctcggacaaagcggcctcagcttctgcagcagccatgccactcgtggggtctggcttgagctccacaggcggcggctcccggggcgcatcggctttctctgtctgctctgcaccgctggccgcactctgggcctgaccgccgcgctcctccttgaggtccctgctggggcctatgggtgtgctgcgtcctgcctgctccagcctgctcagcgtgctggtggccaccttctcctctttggctctcttgtcccctccttctgtggccaaggcctccgcatttcccccagggctggtagccggctcagcaagtgacttgagggcatggcaggccgtgatgatgtcctgcatttggaggaaagtggccacggccagcacatcatccacgttctcagggctcaggctcagcttggccgtgtacataaactccagcacctgccccaggcctgccgcgttactgatgtccaggtgcaccacgtccttctggtccacgaagagcatcttgaagtactcgctgcaggccgccagcactgctttatgagccttaaagtgaacaccgtccaccacaaaggtgcagtcacagagaagccccagctgccgctgctggttcagctgttccaagacatgctggctgtgctggggaaagtccatggctcagatttccagacagcccaggctactcttttctgacagtttgcctgtgtaaactccagcttggctcccctcgtccggctcattacctgccatgtcccggaccccaccgcagagggaggtgcatcacggccgcgagaaggccggggacggcaactccagagcagacaaaggcgccgccatgttagagtcgggcggaa

SEQ ID NO: 440315 - DNA, 1074 bp, Homo Sapiens
  misc_feature (262)..(262): n is a, c, g, or t
aaaatttcaaaatttcaaaccatttcccagggggaaaccaagtggccctttttccatggctaaatatgggaagggaaaaaaaagctttccaaattaaggttggttaacttcttttaatccaaccaaaccttttagggaaatgttgtgggacccctgttttaggtggctgggggatttggaataaaggccccaatcattagcctgtagacacttagccctaacggaggctggatccccccctgggcaaccttaaagttacctncccttggtccttaagatgaaacgcaacttcaaagtctgccatgcttagcatcttgtggcaaaacaaataatggtctacctagtttgctactggtagcactgtggctctattaatattaaccgtctattgatgaagttaactttcataaaggattctatgaaagttcagaggcataaagtatttaaggacaaacaagtactggtccgcaacaaaaatagcatcggtattctgctttcacaaaaaccaagaaaaccaagaaaaatttcattctgagtatatacagaactgctggacagaggtcatcctatatgtgtggtacatgtacaaaatatgacataagaagtatgaattattgcagtcattattaaacaacgaagtatgccaaatcagtcatcaggtttcaaagaatcatagccttctttcaagaggtcccgccacgttttaaggaaacgtgcattttctgtacatttgaaggcaagttcttccacttgagctgatactgcagatgtggcttcaagaagtttggttaatgaaaaggctgcgtctccgatctgcagctccacttcctccagctggtccaccgttgggccgctgctcctgctcggaactggccagcccaaactcactgggctgcccgggtaagatgctgcagaggcgtctgaagaggagggagaagagggaggcggcgggggcggcgaagaaacctgcaacttctcagggtcggccatggggaagggttgggaccgcggaatccgacccgagcagccgaacggacaccaactgtccctcgtgccgaattcgccacccaggcc

SEQ ID NO: 440316 - DNA, 685 bp, Homo Sapiens
tttttttaaaattgcaaataagaagtttaatttcagaaactgagttcaccatttataaatacactaaaacatagtcaatgcaaatttagattaagcgtacgtacagtatttcaacaaaacaacttttctaaaaggtcgtaggcaaatgagtgattagtctcactcagaatatttaattggcttaaaatgagaaaatgaatctttttttctctgaagacataacttttaaaatcatctgacaactgacacttcactctgatgtccttgggatttgaaaatatcccagtgatggccgcatcttccctatcataaaaaaatctaaacactaaggctattcttacaactggaatataacaagcttcttccctgttaataagccatctcttctaaaaaaattttacacaaatttgatcaaacaagggggtcagtgcacacattttgaaagacagcttcagagcgtggagatgctgaagcggaggcgtgggggtttcagcagggaccacctgccatcagcgtgtcattgaacgcactggcgaagtgatgagcacagttacaaagggatcacatttcagaggagctgatgataaacagctggggtatctctgagttaactgaccatgtaaagcctgaatgcagaaacctgaaatgggaaagttctcaaaataagctccatgaaacatctaag

SEQ ID NO: 440317 - DNA, 904 bp, Homo Sapiens
agcgggtccattgaaccgcactggggaaagggatgaggcccagttaccaaggggatccacatttcaggaggaagctgatgataaaccagctgggggtatctctgagttaactggcccatgtaaaggcctgaatgcagaaacctgaaaatgggaaagttctcaaaataagctccatgaaacatctaagtttggtttccaaatgccacgtctctgtcgtagtaaacagttaccttccagaatattatctgtactccgcgggacactttagaacctgcggttaaaaactgctcagtcaggatggcttgccctccacctcctatttacagatttcatttgatagccacaaaagctattctgttgcaattaaagcaatgcttcactaaaatacagtacctgatttgtggtttgtacataattgagtaaaaagcctacagaataaaatggtttacatcttctttgtcattctagtaaaacaaattactaacccaaaactttaaaaaactttacggttatgaattaaaatctagtcaccatatttcatagttgacaggacaagctatttctagtggacgtcttaataaaacaccccgcgaaacttggcctgaaggagaaggggtaaggcacgtggagacactgtggtgagctggagagcggccctgagagtgcctggtctgatgtcgtacacagccgtgggcagagcgggtcatagacctggtacaggctgctaacgctggggcagccacgcctctggcctagtggtgccgtcgtgagtttcaatactgaaagtatattaagggaagattcactttcaaaaagataagtttttcaaaatgttccatcatgagcctggattggccaaggctaccgttctcagtgggtgtcctcgtccgaatcgccacccagg

SEQ ID NO: 440318 - DNA, 575 bp, Homo Sapiens
  misc_feature (41)..(41): n is a, c, g, or t
  misc_feature (67)..(67): n is a, c, g, or t
  misc_feature (85)..(85): n is a, c, g, or t
  misc_feature (97)..(97): n is a, c, g, or t
  misc_feature (105)..(105): n is a, c, g, or t
  misc_feature (126)..(126): n is a, c, g, or t
  misc_feature (160)..(160): n is a, c, g, or t
aacagaaaaacctaattccaatgaacgtccttaaataaaanaccccccaaaacttgccctaaagaanaagggtaaagccacttgnaaaacactgtgntaaactgnaaaacggccctgaaaatgccnggtctgaatgtcgtaacacaaccgtgggcaaaancgggtcaataagacctggtaacaggcctctaaacgctggggcaagcccaaccctctggcctaagtggtgccgtcgtgagtttcaatactgaaagtatattaagggaagattcactttcaaaaagataagtttttcaaaatgttccatcatgagcctggattggccaaggctaccgttctcagtgggtgtgttgaacagcttttctgaagggacgatgcttggggggcagcccaaaaatctgacggccagcgcggacagccccggccaggacgccttcttcaggttccagtaggtgagcgggtcacagctgtgttcaagcacctcctcctccagatacgcaagcaccatggcttcaggcagcttttctcttgggtctttcttcttcaccttggccacaagtgaccacaggttctcc

SEQ ID NO: 440319 - DNA, 1244 bp, Homo Sapiens
  misc_feature (1187)..(1187): n is a, c, g, or t
  misc_feature (1191)..(1191): n is a, c, g, or t
  misc_feature (1240)..(1240): n is a, c, g, or t
cttttcctttgcgcggaataaaaataagagctgaccacttccataaacctagaacaattaccggggtgggccaaagagatctcttctggtcaaagataaccacacccgattttccctacaagaagggcagcacccctcttttgcggaatcaaagaaaatattagggctgaaatataaggccagctttttattcaagaaaccaaagcaaggaagggtgaggttcaggctttaactcaaggtagctgtctgagaacccatgagactgacctggggatgtgtcctggtcctgaactccctggcaaagcatgatgctaggggggccaggaggacaggcaccaggtttggagactgaattggagcagacaagggtatgatttgtgcattttggaagggaaccagaaaaaaggccagagtagagccagaatattcagcattcaaattttaattttctttcgattctggccttgggaagacttgagagcctgtggggtcagggttcccttaattgtccttgtttggataaatgaaaactggttttaagaggtagggtctccctttaatctaactaaggctctctaagcccctgttggtccctgaagagagaccttgtaaaataaggaaactaaggggtggacttaaaacaagttttcatttgggaacaatttctggattagcaaagcttaatttaattttttaataggataatgaattttattttttaagttctaaaaacattaggaggggaaaggacccatttcttacctttcccaaacctgccatagacacaataaaactctctttaagactctttaccttgaaaaggaaccagctataaaactgtcttatacaggaaaatgtcttaaatggaaaatggtccatcagagacaaaggtaggaacccgagaaatgtctatacattcagaaaaactttaaaagctccttaataagacgggggtgtacttctaggggatggaggagaggcaagagcaaacaccaatgaccaattcacatcaatggaaagaacacagagagaaagcccccaaccccaaacaggttacgggattgtcccatcccgttatgtttcatatgatggagagatttcaaaggctaggttctctggcccagacagaacaaagtttgtaatggaaacagagacccctggtggctactgtgtgaactgccacaatnactnacaaagagactggtctatgaccaggagaggctacacatgccagagactngaaa

SEQ ID NO: 440320 - DNA, 2069 bp, Homo Sapiens
  misc_feature (94)..(95): n is a, c, g, or t
  misc_feature (117)..(117): n is a, c, g, or t
  misc_feature (119)..(119): n is a, c, g, or t
  misc_feature (148)..(148): n is a, c, g, or t
  misc_feature (346)..(346): n is a, c, g, or t
tgggaaaaaagaccctgtgccgggggttttctgggctgaggaaccttggagtaccttccaccatttttctttcacttagaaagccactgtttannctggaagagaaagtcccaaaantnggattgaaatgtgcttagaaaaatccacntgggagactctggacacacccacctgaaagtgactcgggggcctttttgcccctttctgagggggtttgttgtaccatctatcttttttgatgtctggaatggtaattcttgctgatggattctcaactaagattttatgcagcagagctagaggagcagaatcgatttttttccaagggttgaggtatgtttttttntctttccagtcagaatactcctgacgggtgtcactgggttggtcccatggcaattctccagcgagcattgcagtaagtactattccacaggaccaaacatcaactggttctgcatgaaattctcttctcttcagaagttctggagcaacatatggtaaagtaccacacatcttgttcaacaaacgctcacgattattataccgaaatactgttgccaagccaaagtctgagattttgaggttatccctttcatccaacagaagattttctggtttaatatccctgtgagttattccaataccatgcagataaaccacccctgccatgagttgatggaagaatctctgagcatctggttcaggcatgcctatgtctggctctattctgtcaaaaagctctcctccactacagtactccagaaataaatattggatattgccttctctcctgtgaccatagaattttactacattttcatgatttagcattttattgatacagatctctttcttaatattttctggacagtctacggcacgcttcatatctacaatcttcactgcgactgcttcttcagttactctattcacagcaagttgaacttctccataggcaccttctcccagggtttgcaccaagtcccagtcttccacaaagggcactgccatgactccaccgagcacctcggcggactgtcctttgcccaccactgcaggaatccaaatgcagcgcttttcccgccaaacttgagggcgtcacgctgccgcaaactcgcgcacccgcgccgtaaagcaagacagcgcgcgttcccgtgtcctgcccctctgaatgtcggcggctccaaaagggtgacgtggagatgttgccgctcccgcccagggctgctttgcagtcggggagagatcctggctgaagagatttaaggacggcggaccgcatcggcgcgaattgagctctgggcccaaatatgaagtggcatccggtgtgaggctcgactggggcggtgctcgagcgctgctgggggaagcccaggcctccaagcctcaggggcgcgcgaccgaccgcgctgcgcttccaggcggggctgcgggcttcgctcctggccgctctgggcctgaaaggctgcaccgccacctgcgtgaggccaccggacaggactgtgaggatcacagtcggtgaagcagagtgctttgtaaacctcagagtgcggtactcgtggtgcttggagccgagaaaccagcagcagctgctgagagccgactgtgaagaaatgggaggaactccgtgttgggagcgagaggcttcgaaagaactggccacgcagtcaagtgtgtgtggcggggcaagtttcccggagaaagcgagcagtttatgttggagcttgagggtcaggataaccagttttgccttttttctgtgaaccaggtccaaaacaagtgctttacttcagcccggtctttttgcaggaagaccatctgcttagcttagttctacaaactttttcatttttaatgtgcaaagaacaggcggggagagccaaaataaatcttacaacgcaaatttaaaagctgcgtacgtcatttaagtggaaaagtaaattctgaggaaagagactcaagaacaaaataggaaaaatggaaataagtattctctgacagtaaactagactggaactcagggataggcaggatcatctccattacattctcagcactggccgggc

SEQ ID NO: 440321 - DNA, 1071 bp, Homo Sapiens
  misc_feature (557)..(565): n is a, c, g, or t
ccagccccttggaaataaggtttggttgtggcattccccatttgggttaaaggaattgcgggccctttctttttggccccagccctcttgcccgggggttttcggggagggattccggggggtcgccagtaaacggggctttttcaaaaagccaatttgatccgggaaccaggtggggtgggggaaaaagccgattcccttgtcccccatttatccaatgtatgaggggggtggtatccccataagggaaaggacctttccgggggttctggctgagaaattggagttccttcacatcttttttcactagaaggcactgtttactggagagaagtccaaattggattgaatgtgcttagaaaatccactgggagactctgacacaccacctgaagtgactcggggcctttttggcccctttcttgagggggtttgttgtaccatctatcttttttgatgtctggaatggtaattcttgctgatggattctcaactaagattttatgcagcagagctagaggagcagaatcgatttttttccaagggttgaggtatgnnnnnnnnnctttccagtcagaatactcctgacagctgtcactgggttggtcccatggcaattctccagcgagcattgcagtaagtactattccacaggaccaaacatcaactggttctgcatgaaattctcttctcttcagaagttctggagcaacatatggtaaagtaccacacatcttgttcaacaaacgctcacgattattataccgaaatactgttgccaagccaaagtctgagattttgaggttatccctttcatccaacagaagattttctggtttaatatccctgtgagttattccaataccatgcagataaaccacccctgccatgagttgatggaagaatctctgagcatctggttcaggcatgcctatgtctggcttctccataggcaccttctccccgggtttgcaccaagtcccagtcttccacaaagggcactgccatgactccaccgagcacctcggcggactgtcctttgcccctcgtgccgaattcgccacccaggcc

SEQ ID NO: 440322 - DNA, 2240 bp, Homo Sapiens
  misc_feature (1351)..(1351): n is a, c, g, or t
  misc_feature (1388)..(1388): n is a, c, g, or t
  misc_feature (1413)..(1413): n is a, c, g, or t
  misc_feature (1846)..(1846): n is a, c, g, or t
  misc_feature (1849)..(1849): n is a, c, g, or t
  misc_feature (1968)..(1968): n is a, c, g, or t
catcctctcgcatgaggatcacagcctgaccattggccatctccacctgtcatctgggtccccaagcgtttgccttcaggcccatgcatgccccttgggagtatcactcccagatgtcggtcgagggcatcaccagccactgcgataggatacgccagcacccgggtttgacagtggcttctcaccttggcacaagttaggcagcaccacacgactcttaatagccatgacttgcttcagaccatccaagtcaaactctgacacctcctcgtcatccagctgctttagtaaaaatgggagaatgtcctccagagcctggtggccgatggtggaatgcagctgctcgaaagtcttggctgccgcctctctgacctcctccagtgggtcacacgaagccttccttgccgtgggcacgagggattcagagaaatacagcacggcatcccggctggtggacttcatgatctcacttaggccaatgcacacaccctgcctctcatcgctcttctgagacctcaggccttcctcaaggatggggatgatctccggggaggattttctcccctaacttccgcacaagatctcccaatgttctcgctgcaatcgttctcttatctgcacacgtgctggccaggaaacccagcaggagcccaaagagagtgggtaggatctcacgcaaggtgcggggggtattggagacaacaatcttccagacatgcagggacgcctgccgcaccaccagctgggtgtctgagcggcccatgtacagccctgccaacacccggttccgccgctctacccccagggcagtgatgatcgccttgttggactgggcagttccaaagttatcatcctcagaggcagtttctgtggtcatcttcccagtgactcctgagatgtgaaacaggagatccccaaggagctgaacagagctgaacctgattctccaaaggtcatcaaagaggccttgctctagctggggcagcagcagggcgatggctgtctcagcgtacatggagataacccgctggcccgcgcgcagggcggtgtcacgcacaaactcattctcatcagcaagagcctgggcacacagagggtgggtcagccagagctgccacccccaggccccagcccaaaaaacatggggctcactgaaggctgagggctctgccaaccaaccccagccagcagggatctctagctctccaggtgagcacttgcctcctgccctcctcaaggactctacccttgccaaggtcatggtacctactttgaggatacaggggatgatgggccccacataaggagtaaacttgtctccaaaggtgatgggcaggtagttaaacatcantaatgtagccatctcggacatggggtgcaatgtccanctttgctggctgtagccacgatttnctggcatcaacttctccaacttctccacccccaaaccggccatgacctcagccaacccctgtgcagcgcctgagcgatccacagagctctgctcataggtcagtgtctccatcagccacggcagcaagtcctcaaagcacgactccccccatgcccttcaccaatggccccaagggcctttgcagatacggtccgcacctcaggcacagggtccaaaagcgatgctttcaggccaggcgtcacgctgggcaggtacggagccaagtccttctggtctgtcagggagtacatgttgccaataatctgggctgccatcttccgcgtgtccgtggaacggtcctggaaggctctctggacaatgggcatgatgagggccagggatggggcatcaatgaagtggacaaacttggtgtccagcagggtctgcaagcanttntgggtcttcctggagggatccgtcagggcatccaggaggactggagcaatggccaggatctccgggttcctgataacggagccgatctgcctgagcgcctgctgtccagccttctggantttgacatgggagtcggtcagcacctccgtaagcttgggcacaatgttgggtagacaggatgacagctgcttaggagcacagtacgccattgccccaagaagctccactgacccagctttggtccgccacgattcctcctccagggcagccagtaaggaggggagcaccagcttcaccccgtgagcactcaagttgctcatcacagccttggcacagtcatctgcagcctcacgcacatactggtttccatccccaaagcacaggagcagat

SEQ ID NO: 440323 - DNA, 1570 bp, Homo Sapiens
ttttttcacaggaataaaaacaggaagtttaatgtaatacaaattgcgtattcaaccaaaaggggtattttattgttgttagttattcaacatcttgccctgagaggacagggccattagcatgtgaattatttgatccgttctcctcttccaaagctataatatctggaatttcatcagtctcagatgtcaagtctatggtggtgaaatcaaacaccagccagttgaggggcgtgttgttaacaagataatccatcacgtcatctaaagattccttcattttctgcagctgccccttgctagaagtgaggaggctgtcagacacttctttaaaggaggcagcattgcggaacactgagtagatgtcgcctgccatcaccctcatgtgcttggcttgatcttggatgttctgtggtacaccttggatgttggacaggagggtgtggcacgtggtctggagctgctgagtcaggttgcgggcaattgcaagagtacgtgactcaatgtgctcagcacagtgggactcatcagtatcatcatatccaatggtccttttccactctacccatgagaggtagagcttatcctgagcatcctgaattttctgattggcactatacacattcttcctggcaaattcaatcaggtgaacagtagaatggagctgagaaatggtctgttggcttttttgcttagcttctttaaccctgctgagagcctgctggtaggcacgggagtgaagcttggtagacagggatcccagtctaacataataacttggcttctgaaccagatcaaatccttcaactttttttgcttctttttctagttcttcctcagtgagagggaggtactgttctaccaacagctctgatttggtgagtgcattttctacgccactgctcacgagctgcatcatccgactccccaagactgtgttaatgctgccactgaccacagacttggtcttctccacactgccagtcactgcccctttggtcttgtccatcacccctgtgatcgtgctggccacagaatccttggccccagtcacagtagtcgtcacagcatcttttgccccagtcacagcgcctttggcattggcaacaatctgagttgatggctgattcagaataggcagtctctcctcaatcctgtctagccccttacaggcataggtattggcaactgcaatttgcggctctagcttctggatgatgggcagagcactggtcatggccacggaggtgatggtcttcacaccgttctctgccatctcacacacagacttcaggtagggatactggtcctttgtactgagataggctgaggacatgaggtcatacgtggagctcaccaagggcaggttgaccacccgagtcaccacactcggttgtggatcaactgcaacggatgccatttttcttcctggagaaagaaatcgacggactgcagcgaaaggcgaagagcaggcgcgtcccgaagacgactccggctgccacgacccggtcaaagcgtggggcccgcgggcgcccgggctataaaccccgcctcgccgcccctccccaag

SEQ ID NO: 440324 - DNA, 1420 bp, Homo Sapiens
  misc_feature (68)..(68): n is a, c, g, or t
  misc_feature (148)..(148): n is a, c, g, or t
  misc_feature (217)..(217): n is a, c, g, or t
  misc_feature (234)..(234): n is a, c, g, or t
  misc_feature (272)..(272): n is a, c, g, or t
  misc_feature (319)..(361): n is a, c, g, or t
  misc_feature (432)..(432): n is a, c, g, or t
  misc_feature (538)..(538): n is a, c, g, or t
  misc_feature (680)..(798): n is a, c, g, or t
  misc_feature (813)..(897): n is a, c, g, or t
  misc_feature (974)..(982): n is a, c, g, or t
gtggaggcgcgattattaagtattttgtattgttgagtgttggggggcggccgtgacgtacctcgcgnccggtgtatgttgtttaggggtgggtgctttttagcaagtctatgagcaacaattggagtgtgagggggttgcggcacgnagtattggcgtgtggatttaatggggggggattaccgtcattactattgccgcgcgggagtgcggtggnaaataaacatcccggtnacgggtcgctggtgggtttgcgcgtgttgttattcgcngtattagcgataacgctcgcggggtattggggctaagacgcgcgacnnnnnnnnnnnnnnnnnnnnnnnnnnnnnnnnnnnnnnnnnnntaatggtgggtgtaggaggcgcgggtcgctaaaaacgcgccgcgactccgtcgcggcctctcgagatcagntatcggcggcggaattatcgggcggtgtattagtggcggcgcagtccggtggtacgggcggggttaataagatagtggggatggccgattctcggtgggcgagtcnaatgtggggcaaatctcagccggggagataatgagatagacatatgggggggagagggcgtgtgttataaattagcggggataaggagataatatgataagggcgggcggaggtgcggcgggataagggaaatatgaggttnnnnnnnnnnnnnnnnnnnnnnnnnnnnnnnnnnnnnnnnnnnnnnnnnnnnnnnnnnnnnnnnnnnnnnnnnnnnnnnnnnnnnnnnnnnnnnnnnnnnnnnnnnnnnnnnnnnnnnnaaggtcggagcggannnnnnnnnnnnnnnnnnnnnnnnnnnnnnnnnnnnnnnnnnnnnnnnnnnnnnnnnnnnnnnnnnnnnnnnnnnnnnnnnnnnnatttaataggtcggcgtggggggagttgcggtttggatggtgcggggtgaagaggctgaccatgggttccatgaaannnnnnnnntctctcagttacgctgtgggcggcggggccggcatcggggtcagcgtcagggcgtgttgggccaggctcgggcatggctgtgcctgtagccagcactgcagctggtgggagatccaggccgccagggaggggccctctccccgctggccccggcagctctccagcatgtccagaagcccggccagggggtcgtccaaggcagcaaacccccgccaggcttcctcccggagctgcttccgctcccgcgtggaccacagggtctgcagggcctgcaggagcaggagggggtcctggcccatgcggtggcgctcgccagcggcagggtcaccagcgggatctcctgggtccatcctcagggccgggccgaggacgctggcaggcagctaggaacgaggatctgcggggccgggaccgccccatcccgggaattccggaccc

SEQ ID NO: 440325 - DNA, 1106 bp, Homo Sapiens
  misc_feature (827)..(827): n is a, c, g, or t
  misc_feature (847)..(847): n is a, c, g, or t
  misc_feature (1065)..(1065): n is a, c, g, or t
ttttttttgtctttcatagagtttatttgaaaagatgctgaatttattcccaagtataattttaaaaagctgtttaggacccaaacatatttaaacatctcttacacatacagaatttcagtttacaaatattccagaaggcattttcttaagcagtgaaccatgcagaatactgttgctaaacatcgtttctgccttcctcgtgttctcttggtagtttttactgtttggcttgatcctgctgaggaatgtgcttaccactggaagccagatgcagattcggcaagtgtttcttgcctcttacaaggcaccgcgtgtaacgtcctgaccagctgttggtcatttgtggcagaggggtgtggctgcttttcgcctgcatctcgcgtgctttaggcagatcagtctggagtgcaggggaggatgaagacaggtggacttgggctcatctttcatcagttaagtagccaattatctaacttgtatttctggaaactgaaaaggaaagtttctagaaaccgtaagaacaatttaagttgggatttagaatagctgacacatttttagatgggactgaaatgagtaagaaaggttctccaagatgtatgattttaagtccttactccataaatcttcattaaacacatctcagttttggcctgactcactggggtgtcaagcagctactcaccctgcctcaactacgtaagctgcaccttggcaggaaaagggctcacaggttacagatagagcttgatgagctcatcgctgactgctgagggtgtcagcacgcccaggtctgttaacagcagagtgattaaggaaggggnaatgtagtcgacccacgganaaaaaaatttgaggtcttgtccagtctgcgcgaccttgagagtgtctgccttatacttaaacttatctgggacgtcttgctggtttagtggaaagagccggacaaacttgaaactttctgcaaccacatagaaaggtttgttctgtgctttggcacacacagccatctggttggttccaatcttgttaataattcctccgttttcaacaactaccttnagcaccaactatgacaagatatgctttctccatgatgtagc

SEQ ID NO: 440326 - DNA, 1206 bp, Homo Sapiens
  misc_feature (45)..(81): n is a, c, g, or t
  misc_feature (1141)..(1149): n is a, c, g, or t
ggaatgtagatctatagggcgaatggagcttacgcggggcggcgnnnnnnnnnnnnnnnnnnnnnnnnnnnnnnnnnnnnnatcaggccaaatcggccgagctcgaattcgtcgagagcggaagtgcgccggaagtggggtgcggaggtgtgcagcgcgctgtcagactggctcgcaggcggcgcggccggcggacccgttcgagacagcgcgggcggctcgggtcccctggggctccgcagcaggaggacgccatggacgacaaggagttaattgaatactttaagtctcagatgaaagaagatcctgacatggcctcagcagtggctgccatccggacgttgctggagttcttgaagagagataaaggggagacaatccagggtctgagggcgaatctcaccagtgccatagaaaccctgtgtggtgtggactcctctgtggcagtgtcctctggcggggagctcttcctccgcttcatcagtcttgcctccctggaatactccgattactccaaatgtaaaaagatcatgattgagcggggagaactttttctcaggagaatatcactgtcaagaaacaaaattgcagatctgtgccatactttcatcaaagatggagcgacaatattgactcacgcctactccagagtggtcctgagagtcctggaagcagccgtggcggccaagaagcgatttagtgtatacgtcacagagtcacagcctgatttgtcaggtaagaaaatggccaaagccctctgccacctcaacgtccctgtcactgtggtgctagatgctgctgtcggctacatcatggagaaagcagatcttgtcatagttggtgctgaaggagttgttgaaaacggaggaattattaacaagattggaaccaaccagatggctgtgtgtgccaaagcacagaacaaacctttctatgtggttgcagaaagtttcaagtttgtccgggctctttccactaaacccagcaagacgtccccagaataagttttaagtataaaggcagacactcttcaaggtcgcgccaaactgggacaagacctcaaagaaggagccttcccgtggggtcggactacacctggcccctttcctaaaaccacctccgctgggttaaacgaaccctnnnnnnnnnctggaaacccctccggcaagtcaacggatgaaacttcattcaagcttcttatcttgg

SEQ ID NO: 440327 - DNA, 1515 bp, Homo Sapiens
  misc_feature (172)..(180): n is a, c, g, or t
  misc_feature (428)..(428): n is a, c, g, or t
  misc_feature (438)..(438): n is a, c, g, or t
  misc_feature (858)..(858): n is a, c, g, or t
  misc_feature (866)..(866): n is a, c, g, or t
  misc_feature (873)..(873): n is a, c, g, or t
  misc_feature (913)..(913): n is a, c, g, or t
  misc_feature (920)..(920): n is a, c, g, or t
  misc_feature (930)..(930): n is a, c, g, or t
  misc_feature (958)..(958): n is a, c, g, or t
  misc_feature (973)..(973): n is a, c, g, or t
  misc_feature (976)..(976): n is a, c, g, or t
  misc_feature (1005)..(1005): n is a, c, g, or t
  misc_feature (1013)..(1013): n is a, c, g, or t
  misc_feature (1023)..(1023): n is a, c, g, or t
  misc_feature (1026)..(1026): n is a, c, g, or t
  misc_feature (1039)..(1039): n is a, c, g, or t
  misc_feature (1046)..(1047): n is a, c, g, or t
  misc_feature (1057)..(1057): n is a, c, g, or t
  misc_feature (1064)..(1064): n is a, c, g, or t
  misc_feature (1070)..(1070): n is a, c, g, or t
  misc_feature (1081)..(1081): n is a, c, g, or t
  misc_feature (1100)..(1101): n is a, c, g, or t
  misc_feature (1103)..(1108): n is a, c, g, or t
  misc_feature (1119)..(1120): n is a, c, g, or t
  misc_feature (1122)..(1122): n is a, c, g, or t
  misc_feature (1125)..(1126): n is a, c, g, or t
  misc_feature (1128)..(1128): n is a, c, g, or t
  misc_feature (1141)..(1142): n is a, c, g, or t
  misc_feature (1152)..(1152): n is a, c, g, or t
  misc_feature (1168)..(1168): n is a, c, g, or t
  misc_feature (1172)..(1172): n is a, c, g, or t
  misc_feature (1205)..(1205): n is a, c, g, or t
  misc_feature (1208)..(1208): n is a, c, g, or t
  misc_feature (1215)..(1215): n is a, c, g, or t
  misc_feature (1226)..(1226): n is a, c, g, or t
  misc_feature (1232)..(1232): n is a, c, g, or t
  misc_feature (1235)..(1236): n is a, c, g, or t
  misc_feature (1238)..(1238): n is a, c, g, or t
  misc_feature (1240)..(1240): n is a, c, g, or t
  misc_feature (1242)..(1242): n is a, c, g, or t
  misc_feature (1251)..(1252): n is a, c, g, or t
  misc_feature (1266)..(1266): n is a, c, g, or t
  misc_feature (1295)..(1295): n is a, c, g, or t
  misc_feature (1309)..(1309): n is a, c, g, or t
  misc_feature (1326)..(1326): n is a, c, g, or t
  misc_feature (1329)..(1329): n is a, c, g, or t
  misc_feature (1376)..(1376): n is a, c, g, or t
  misc_feature (1390)..(1390): n is a, c, g, or t
  misc_feature (1409)..(1409): n is a, c, g, or t
  misc_feature (1420)..(1420): n is a, c, g, or t
  misc_feature (1423)..(1423): n is a, c, g, or t
  misc_feature (1433)..(1433): n is a, c, g, or t
  misc_feature (1454)..(1454): n is a, c, g, or t
  misc_feature (1462)..(1462): n is a, c, g, or t
  misc_feature (1465)..(1465): n is a, c, g, or t
aaaaataaaaaggcccctgccccctcttttgtttgggggccacccaaacccggggggccccttaaaaggattttgttttttggaaaaacacccccaagccaggttttggggaagggttttctccaatgcccaccttccttggtgggccccaccaacccccctttggtgcccnnnnnnnnnggggccgaagcctccccccagggggcaggttaaaaaaagggcccaaaccccccattccttttttaaaaaaaaccaattcccaacacgggttttcgcggaacaataatagggttaaacccagtttgggcctacgaattcaatggtccggctagacctaggggacccttaatgcccctccacccgcgcttcgtgtgctgtattaaggggtgttctgtgccagctctgtgcttggtcagcgtttcgggagnacattgcggnaactggcgcgcactatactcctgcgtggaacatgcacctgggagagaagcagccgaccagctctcctggagctgttccccaaaggcagtgtggctggtgggggcacctcaggcaggtcggcagcaccccagttctgagctgctctcgctggctgtctggtggcagtgaagggcacacctctctgggctcaggcaactcacccctggaatggaggccctgcttcctgggggccacatgcggtctgaggccagggctctgcaccaacatgccgctcccagaagcatgcgggacaagcctagagtggcctgctggttccatgtacaacagaaggtgtacctgcttctgtagtttctgtccttgaaatcaaggtcctcaagctcaagtcagcctctgccactgtcaccaggactgccatgggcntcttggtnccccctntttttggttctcttttgagtcggttccttggtgtgcattntcccccntgtgaacccnccaggtggcattatggtcggttttgcangtgtgctgcatgtcnccngctcgactgcgaaagcccagggcctcgcntgctcccntcccctgggntcngatgctccccccnggctttnnccctcgcccngggatgngttctnacaggcactcnacatgcgtgtttttccttnncnnnnnncgtgccgtggnncntgnngntttttcctagganngcctcccctnttctttcccgcccccnctcngccacactgtgtctttcacacgctccaatgacngcnttttgtntttgtttcctnctcccnggnngncngnatgtctctnncatgtggctgtggnggccttgccctgggcctgcttggcgcctngtgtgggggccttntttcccgcccccctccngcngccccggaggcggtgcagaggagtggcttgcttctgggtccttctcngcacttatgccccngaggatgaagtcccagcgnggtccctgggnccnagcgcttccnggcttcctgctcgtgccggcngcgtgttnggnggtacagggggcgcccctgccttcccgggcctgcccttgcgctcccgggc

SEQ ID NO: 440328 - DNA, 1239 bp, Homo Sapiens
  misc_feature (138)..(138): n is a, c, g, or t
  misc_feature (151)..(151): n is a, c, g, or t
  misc_feature (605)..(647): n is a, c, g, or t
  misc_feature (996)..(1046): n is a, c, g, or t
  misc_feature (1080)..(1112): n is a, c, g, or t
ttggaaacagttttaagtggcttttaagtatctgcatagaggcaatcctaaggtttgctttaagtctcttaaatctaacatttttaaaagcatttcttccctgtattttcatatacaagttggttttaattttgtttnggtggtgttattntttttaaatgactttttagtttagaaagttctgatgagcaaataaatacatctatctacatgttggaagtccatctgccagcacacctgcttaaagtgaaatgaaagcacataaccaggctctgaatgggttatattttatcatggtgctcccagaatcctttgacctcactctgctttctagtctgcttgtgacactggacagtcctttcttacagagctattatatgttctaggctacgaagggttaaataatcccaaaaatgaggtatgtcatacccacacgtctttatctctaggaagctgtgatgtatgtgaaacagcactgttattcttaacactagtgtgttaaaataaggattagtacagtacgtcttcattactttttaattcaggggcaccctgagtgaaaacaaatacaaaaaaaatccctaactctgagctctatctctgannnnnnnnnnnnnnnnnnnnnnnnnnnnnnnnnnnnnnnnnnngttttgctacattctcctcagtggcaaaaagtttcactctacctctgacagcatgtatattgcaccagtagctaacaaaaactggtctagtcaaaccaaatgggcacaaaagaaccaggataccaaaagttaagctcatacagctgcaaaccatatcacttcttggtaacaatgcagacctcataaacctaaagaagagaaagaaaagaaaacttttgttactttccttttttgcttgtcacttatatacaggctatgtgagaatataatttgtaggtataacacattaagaaaaagttatcttcattggatagaattgaatggtggtcgctgataggaatagggcgtnnnnnnnnnnnnnnnnnnnnnnnnnnnnnnnnnnnnnnnnnnnnnnnnnnngtcatgagactgtgtgtgacagggccacctgtcnnnnnnnnnnnnnnnnnnnnnnnnnnnnnnnnnatgtgtaggtgcatgtcttggggatttaaaaatttcaaggctggtttacttatgcaaagcatgcctacgtctggaatacttagggaaagaaagcgactccatgttgtccgaattcctcaagggacag

SEQ ID NO: 440329 - DNA, 3064 bp, Homo Sapiens
  misc_feature (25)..(25): n is a, c, g, or t
  misc_feature (107)..(107): n is a, c, g, or t
  misc_feature (665)..(665): n is a, c, g, or t
  misc_feature (1110)..(1119): n is a, c, g, or t
  misc_feature (1151)..(1269): n is a, c, g, or t
aaatgaaaataggtttaccaaaaantgtccctcactggggaggggaggagggggcagccctcgcccccgggcccccagggtggggctgagaggaaaacctcccggcnccctccctgcttcctgggagagggggatgccccgtggcttggggcctccctccagtcttccagggcagggccctcacctgggcagggggatcagcatgcgggggaagggggtgggtagagggaggggccggtgtcactggaggtcccggtcctccaggtagcggtactcaaaggtgaagccttccttcttccgctggccccacttctcgtagtcaaagtagatgtaggtgccctggccgggggagaaggcggtcagtgagtggacgaggaggtggtctgggatctgggccggaccaacagacaaaggggacaattcttagggctgtggatgtgtcaggcaccgggccagctgccctgcacgcacacactctcatccatcctcacaaggttcttcttgggtaggaaatgttatcatgccacttcagcgaggaggaaacggagggggccgcagaggttccaccgaagccagctgccagaacggggccccagccccaggtgtgagtgcacagccttcgtttcctcgagggctgtggcttttgagcacctctcacgtgagtncaggatgcacagcctagcatttaatcttcacaaagacctcgaggcagtgggtactgtcacccttgttctagagaatggaacagtctcagagtctaaatccaagcactctgcagggacattttattggtgacggaagtggtgtgggaatttctgaatgactggatgccctgaaatgtactaacttggaggatggttttgggccaaaccaggaaaggacaggaagtctgtggttaacatctgaggacacaatgggagaggacctaggttctaaatgaatgtcttaagtgcttcaaagatggcaacctgggagaaccaggagaggggactgagttctttgaggacaaggaccttgtactacttcatccccatgaaggggctcggcatcagggaagtatttggtggaaaaaaacatcactgtagaacacaccaactgaaagtaatttgnnnnnnnnnntccatgacactgactatgtagcagtcaccatnnnnnnnnnnnnnnnnnnnnnnnnnnnnnnnnnnnnnnnnnnnnnnnnnnnnnnnnnnnnnnnnnnnnnnnnnnnnnnnnnnnnnnnnnnnnnnnnnnnnnnnnnnnnnnnnnnnnnnngagtcgcccagctggactgggctgaaacccaggtaggttggttccagagtgtttgcaagcagcaggaatttcccagtattagaacttgagaagcccattcaaaaaaaatagtttcggcactgagcccctgccctgctgagtgctgggacctggaggtgaagtgggggccatcaaggtccctcggcagcagagcccacagcctggtgcagggacacatactgggaaaatcccacaccccaagcgagtgtgcccagcactgcaaaggggaggcactgggctgggtggctccaggaaggtttctttgaggaagggacatttgggctgagacctacaggaggcctaggagctggccaagtggaggatgagagggcggtgttccaggctgagcagacagccagagggaggagtacttggtcaggctgagggactgcgccagctgaaaggtggaggcaagggagcagaggccagcaggggctgcctggagcctggggactctaccccaaccctagcagcgggaagagagggggcggggccctcacctgctcaaactcgtcagtgatggtcttgggctcctcgtgcctctggaaccacatcatgtacttggtgtggaatcgccatgactgcttctttagggccttggctgccagatactgtgccttagtgccctccagatagtagaagatgaagaagagtgtctcggtcgacaggcgctggtagaattccacagtgtccgagtgtgggggtggcatctggtggtggtaggggggcgtcggacaggggttccgggggaggtactgccgaatacgctcagagtcagaggggtgaggcatgtggtgccaggcggcctcttccatggcctgctgatagagctgctccttggtgaggggcacagggcccagtggacagacacccagcgacagcggtatgttcccctctgacagctgcaggggcggctgggctgaggcccgaaggtgctgatgtactgctcaggatgatgtctcggtcggtcaggtgcagcgttggcacagggtcctcaatgccagagctgatggctgcccgttccgccatggacttcaaggagctcagaggctcaggggccttgatttctggggcggtgctgaactgtggaggcccattgagcagggcaccggctgccttggcatcactgaagctgggcgttggggagctgggaggattcacaggcagtggcaccaggaggctgggtccccctgagttgttccctgagcctggggccacgcccccagccccccgttggggctgccgcactgggttccttcgaggtgctgggaggtgggttgtgggggccggaaggggggcccaaggcctggctgctggcattgttgcccccactgctgctcaaagccacctctgccgggctgtctgccacaactgagctgtaactggtggcgccattctgcttgccagcccctccaccggcactgctgttactactgctgctgctccctccacctccgctgccgccgcctccgcctccgctaggctggacgctggggggccggggctgggtcgtgctgggcccactgggagctggtggggccacagcctgggcatagggagcaggggtgcccgagttgtggctgggagctggactggccttggggcccagggcacttgggggtgctgcgggggcggggaccccattgttgccaggagtggtgctcaaggcagaggcagcaggcggggggccggaggggtaggtgggcggcacagctggggactgagggtgctggttgctgtggacaggcttggagcc

SEQ ID NO: 440330 - DNA, 512 bp, Homo Sapiens
  misc_feature (229)..(276): n is a, c, g, or t
gccagccgtcatataaaactatttattcataaatattttccaaaatgaaaataggtttaccaaaaaatgtccctcactggggaggggaggagggggcagccctcgcccccgggcccccagggtggggctgagaggaaaacctcccggccccctccctgcttcctgggagagggggatgccccgtggcttggggcctccctccagtcttccagggcagggccctcacctnnnnnnnnnnnnnnnnnnnnnnnnnnnnnnnnnnnnnnnnnnnnnnnnccggtgtcactggaggtcccggtcctccaggtagcggtactcaaaggtgaagccttccttcttccgctggccccacttctcgtagtcaaagtagatgtaggtgccctgctcaaactcgtcagtgatggtcttgggctcctcgtgcctctggaaccacatcatgtacttggtgtggaatcgccatgactgcttctttagggccttggctgccagatactgtgccttagtgccctcca

SEQ ID NO: 440331 - DNA, 226 bp, Homo Sapiens
gaatgggcttctcaagttctaatactgggaaattcctgctgcttgcaaacactctggaaccaacctacctgggtttcagcccagtgcagctgggcgactctaggcaagtcactcgaacctctgtgtctcaattaacttatctgtaaaaatggggggaagaccacctacctaatgcagttgttatgaagattaaatgagttaataacatgtaagtacttaatggtgg

SEQ ID NO: 440332 - DNA, 492 bp, Homo Sapiens
  misc_feature (276)..(276): n is a, c, g, or t
ttttttcatatttaactatttattcataaatattttccaaaatgaaaataggtttaccaaaaaatgtccctcactggggaggggaggagggggcagccctcgcccccgggcccccagggtggggctgagaggaaaacctcccggccccctccctgcttcctgggagagggggatgccccgtggcttggggcctccctccagtcttccagggcagggccctcacctgggcagggggatcagcatgcgggggaagggggtgggtagagggaggggccnttttccctggaggtcccggtcctccaggttgcggtcctcaaaggtgaagcctttcttcttccgctggccccacttttcgtactcaaagtagatgtaggtgccctgctcaaactcgtgagtgatggttttgcgctcctcgtgcctctggaaccacatcatgtacttggtgtggaatcgccatgactgcctctttaggtccgcggctgccagagactg

SEQ ID NO: 440333 - DNA, 317 bp, Homo Sapiens
  misc_feature (262)..(262): n is a, c, g, or t
  misc_feature (278)..(278): n is a, c, g, or t
  misc_feature (303)..(303): n is a, c, g, or t
ttttttcaaattactttcagttggtgtgttctacagtgatgtttttttccaccaaatacttccctgatgccgagccccttcatggggatgaagtagtacaaggtccttgtcctcagagaactcagtcccctctcctgggttctcccagggttgccatctttggaagcacttaaggacattcatttaggaacctagggtcctcttccccatttgtgttccttcagatgtttaaccacaggacttcctgtcctttccggggttnggcccaaaaccatccnccaagttagtacatttcaggggatncagtcatttcagga

SEQ ID NO: 440334 - DNA, 1675 bp, Homo Sapiens
catttgttcaaaagctacctcaaaagtcctcctaccaaacatgatttggcaatctttttgcatgattagtatgatggcagtaggagctttgtttaataagcaaacatgatgaaaattccagaaggtgctatgcaaaagttcagaaggaagatttttttcttgagaccctctgccacttgttacttcttctgatgcctttcctgctttcttgaacaaggcttaagacagtttctctgttccatttctgaccactatgtggcaccagaacttttaagtaggaaatagaaaaaaaatctgcttaactagtgatttgctgtgaatctttaatcaatgcctcttaaaaataattcatttatggccgggcgcagtggctcatgcttgtaatcccagcactttgggaggtctgtgctatggggaaaagcaggttaaaaaacatgcagatcactcttgcccactactgtggtcccctggttggctatagatttagcagcttttctttgtgccacagcagcctccagcagcatcagggacacatctggacttcatactgtcagactcttctgcaagcttaaatggatctgtgattatatcctttaactccaaagcagaacagcctccagatgttggcaacttctctccaattggtctgatcagaaaatcttgagcaaatcttgaattcttcaagatagctgctgtttcttcatccacttcaacaatttcaccttccttaaatgtaaaattggcatcaaacattagttctttttcatgtcctgtaattcctccattgtaaataacttggcatctcttggttggtcctgtcttagagtgtttgaagaggcgaaatgttgcagaaacaaaacgacagtcaccgataactctttccagttccttgttttgaattgtaatgagattggcagtgaccaaacgtggagggcagaacccaattttttgagcaaggacagcaagttccttccagtataaagcaccacccagacactcaccccataaaactttgtgtgtcctgatttcttctggcagttcaaggctcgtatagacgtcactgaaatatacttccccaccatgcttcagcacccgatatgcctcctgaagcacttgttgtttatcaggcacaaggttaataacacagtttgatacaacaatatcatggctctcattcttgattccagcctctcccaacttctcaatgtagccatgaataaaagtcacattagatgcctggaagccatatttttccatgtgatagtcaagatacttttcagccacttccacctggcctttggtcatgtctattccagtcacgtgtcctttttcaccaaccagctggctaagtacatagcaatctctgccacttccactacccagatccaaaatccagcagttttctagatgctcagggatcaccagaccacagccataatatcttagggctacttcttcgtgtacattttgcaaggcttcccggatgtgcttggggaccggcctggctgtggtgacacagccgttggtctggaggtctgccgatctcttcagcacctgcccgtagtaggtctgcacgtccttctgtatctcagcgtcacgaagtgcagccatgtctcctcggcctgcgactcagggcgcgcactcactgtctcctcggcctgcgactcagggcgcg

SEQ ID NO: 440335 - DNA, 1660 bp, Homo Sapiens
  misc_feature (21)..(21): n is a, c, g, or t
  misc_feature (32)..(32): n is a, c, g, or t
  misc_feature (69)..(69): n is a, c, g, or t
  misc_feature (90)..(90): n is a, c, g, or t
  misc_feature (174)..(174): n is a, c, g, or t
  misc_feature (179)..(180): n is a, c, g, or t
  misc_feature (206)..(206): n is a, c, g, or t
ctcataaaggtacaagtcctnctattttagcnaacgtcgctataaagagtgtcatttgagcttgcgtgnagtgaacatccttttcctggnaatagtgatgtgctgcccacctccgcatgagggggtcttcagaaagcggctgcatgtcatcagcctcccctgtttgctgccagncggcnncgagagcttggtctggatcagggctntgcaatgctggagacagaagctgctgacagtgaggagtccttcaggctctttgaggtcacaatcttccatgatgtggccctggcctccagaaaggttcttctgcgcagcatctattccgagaacaagaaagaagttctcctggcaacgggactcgctccagaggcgctgagaagtagacgtggtgtgtatgctctgaagggctctccagagttttctggattcgttacacaatttatgtacacgttcaacgccaggtttttcttcactgcttatttctaggaaatggtctatggtggaaacgtcttcagctgcctgctggactgttatttcttgaaaagcacactttaaaatgttctcatagctgagaatgggctcagaaggtgggacggcagaagttcctgtcacccaaggtccaccctggcatggttggtgagaactgcactcttttggggcagaagtggttctcggtggctggggttctgtgggtccctcgaggagttcaagggactgtgagaattgtccagacttggctgaagattcccgaaagccttcaaactccccccaagtgctgctgtgttccccagggtcaggacatcgggcagtgcaggtggaaccgccctcacggggcatggagatgctggctttcccatcggacaggagaaggtcggggcaggtccgtctccattccaaactgtcatcactcagcctctcaggtgccactcggagggaagcgctggctgcttcctcctggaggtcactcaaaggctctcccacccagctcccgccggccttgcatcttggagcccccaggccagcagagggcccgatgggcagctgctcaggagacatgcacgccggggtgctggccgcccaggactgcccaaccttcccctgccctggagagggccaggggacgctgcaggagtgccccgggctgcccagtggctgacggtggaaagtgcccacgtgctgctgtggaactgacacaaaccacaggaatggcccggtcgcccgggagtcctggcttcctcccacgcaggcgggcgcggagtccgacacagaggcgcgtaccagacccacggcaggtgtgagaggggcggcccaaggtggggctcctgctctggagagagccgcgagggggccttgggaggcccacgctggccagaggagcgagagccgggcgcccgcgggagtcccaagtgggaaggagtgggtgcggcgccccggggcctcccgagagtccctctcgcacgcggcccgcagagcagccctggaacgcctgggcctggacagggcccgaggtggccggctaagcgcctggcccacggctcccgagagtccccgcacccaccttggtcgccgcctcggcggggccgcgcgggaccagggcgagagaaacctgcaaccagccgttccctcctgcactgcgccgccccggtgcctggcaacggcg

SEQ ID NO: 440336 - DNA, 1469 bp, Homo Sapiens
  misc_feature (292)..(292): n is a, c, g, or t
  misc_feature (376)..(376): n is a, c, g, or t
atccaggtggttttatttagtaaaattttacaaaagtcagggctgacttcttggctctgccttcgaagagcacagttttccttagcagataactgggggaagccacgggcccaccagaggctctcgcaggccagtggtgcgacctcctgtccacaaccgtgagggacaaaggcctgtccttgaggctgctgggcaggggcccaggcagtaagtgagggcacctgcgaggctctgaggacacagcacatctgtacaccctcatggtgccctgaccacacagcagccagggcangagtgtgacagacagagggtttctgagcggtctcaacaagctgtctctctggtgacgtttcagtgccttcccctttttcctctngaattcatggatttggccataagttgctccccctggactaagcagcccagaagccatgcccagggtccatccctgggcaaccccccaccaggtgccagcagcattcacatggggcagggggcccatgagtgccacctggaccccgacagcctgtcatggcatccagaaacctctgtctcacccttggctctgccaaggacacatcctccatctcctggtcagacccgagacaagcccagaacacaggacaggtcctgttggagagatcccaggaatgggcctggggtctggaaaacagctccacagacagctctggtttccacatcaacccagccaggaagaaaatgaaaaattcctcataaaggtacaaagtcctcctgattttagcaaacgtcgctattaaagagtgtcaatttgagcttgcgtggagtgaacatccttttccttggaatagtgatgtgctggccacctccgcatgagggggtcttcaggaagcggctgcatgtcatcagcctcccctgtttgctgccaggcggccccgagagcttggtctggatcagggctttgcaatgctggagacagaagctgctgacagtgaggagtccttcaggctctttgaggtcacaatcttccatgatgtggccctggcctccagaaaggttcttctgcgcagcatctattccgagaacaagaaagaagttctcctggcaacgggactcgctccagaggcgctgagaagtagacgtggtgtgtatgctctgaagggctctccagagttttctggattcgttactcgagcttctcaaccactgcggcctaatccactcgagcgctgtctgtctttcaatgctcagttgaaagtgtgtcccaccatttatgtacacgttcaacgccaggtttttcttcactgcttatttctaggaaatggtctatggtggaaacgtcttcagctgcctgctggactgttatttcttgaaaagcacactttaaaatgttctcatagctgagaatgggctcagaaggtgcggacgcgtggcgacgcgtggcgacgcgtggtcgacgatatcccggaacttccgggccggtacagcct

SEQ ID NO: 440337 - DNA, 492 bp, Homo Sapiens
  misc_feature (105)..(107): n is a, c, g, or t
  misc_feature (467)..(467): n is a, c, g, or t
aactcctcgagggacccacagaaccccagccaccgagaaccacttctgccccaaaagagtgcagttctcaccaaccatgccagggtggaccattgggtgacaaannnagcttctgccgtcccaccttctgagcccattctcagctatgagaacattttaaagtgtgcttttcaagaaataacagtccagcaggcagctgaagacgtttccaccatagaccatttcctagaaataagcagtgaagaaaaacctgggcgttgaacgtgtacataaattgtgtaacgaatccagaaaactctggagagcccttcagagcatacacaccacgtcttactttttcagcgcctctgggagcgagtcccgtttgccaggggggaactttctttctttgtttcttcgggaattaggattgcttggcggaggaaggaaccttttcttgggagggccgggggccacattcatggggnggtttgttgaccttcaaagggcctt

SEQ ID NO: 440338 - DNA, 2546 bp, Homo Sapiens
ttttttaaaaagtatttattgcaaagaatgctggacacagtgttgcatgtggctgagattcaataccatccattctggggaactcgggaaaatatctgcaacatgggcacgccagccagcatggccgaaatgtggcagccaatcagctacacctcagcccatgcggagaccatgccagggcagaggccggggggttgcccccactcatgccctgatccctggatgtccctctaccctgtccccagtcctcgtaatgcatccagtccagcaactcctaactcccctctgtacacagagagaaaaggcctcggtggtctcacctcagatgacatccagaggtacatgcactgttgctgaccaagggaacccactatggctaacaaatgagtgtgtccaggtgacaaaagtcaccaaaactccaaaatacacagaagcaaaggctgcagtcctaatgtcccaaaggcatggtccttgggctctgggtctaaagggcttggggctctgacagatgagtctggaaggatcttgccccagctccgccttggacatctcttagcagagcagttcacaaggctgagagacccccggtcagggtcagggacgctaacttctctcagggacaggtggcatctgcaggctgcaaagccctgggaggctggaaagatgtgctaccctccaggcacaggccaggaaaggctccggacacaaaggacttgggatccaggggcctggcttccccagagtccacctgtggacagcagggcacccgattacaagtccagacactttctgacccagccccacaacttgccagccagtctgtttgccagctgtaaacagactgcccaggctgtctctctgggaccaaaagaactcaggggcatgacagacactggacttcacaaggccattttcacccagactcacgtgcacatgaatggaaggctgtgctgcggccgggaaaatcctcccttgcccagggactgcctatgggttctgccttctcccttcctcagacccacaggcagaagtcaacaaacaccagagaagttttacaggaccatacaagtgtttctgaattatttatggcaaatgcatgtttctgccaccagtgtacattcctgtgtggacacgggcagcaacaggggagaggccgcctccccattggctgccagtgtccacagccagggaaggggagagggggcggcagcctctccctcgagcacttcggtgtgtgcaccaggaaggtaacttcctgccctgtcttgaagtggtttcactgtgagagcaggcctgaaggggcacccctggccaccagctcccctaagcatacctaagtagccgggtacatgcacaactggggaggggcgaccacaactgcccccctgccctcacgtttctgtgcatcccaatgtgctgaagcaagcgcattgctgttcatgaatgccccacaactaagggtgacatggatacaacggcctggccagtggctgcccaggaagcatctgctgtggttggggctctagttcctggtgggtaaggatgggaagggctctccctctcaccagaggcagcagaagctcagggccccatgaagacctggcctctggctcaggaagtggccacagagaggatggtagaggccctgtggagagtcaccaggtccatgctgggcagctgggccacagtaggaacatcacagcaagcactttcctttcacattgtagggtttcacacttcacaaagccaactgagctggcgagagtgaacacctaagagctgcgccggaagaaactggggctgggcaacctccgcgcagcccatgcagatgcagtctggtcaagtgactcttagcagcaggtcaggagccacgcacaaccttgtcgccgactgtcaacaaagagccaggtgggctggggtgggggctctgggttccgccagccatgtgtggcttcaagaatatccctgcatggcatggtgactatcacacacactggagggcctggaatgaccccctctgcagagagcagtgcctgcctagtggtcacagtggatgaacatggtcactggtgagcaggcaccgtgacaagggcttcctctggaggtcttgagatgtccacgttctgaggcctgtcccggtgcgtgttcacagcagccacgttcaggaatatggactccactttacaaccatatgccacaggagtcagcttcaggactgtgtgcagcggacacttgaggtagggcagctgttctgctgccttgtcgaggaagtaggccagcaggcagcgcatcacagcctggtggcagatgaccagcacattctcttgcctctccagctccatgatgacaggctccagtctctggaccaggtcctcgtaggactcccctttagggtaccggtaccggtacttgtcctggtcccgcagggcgaactccagtggataattatcctgaatttcctcgtaggtcatttcctcacagacgcccgcatcgatctcgttgaggaccttccactgttccctcgtgccgaattcgccacccaggcc

SEQ ID NO: 440339 - DNA, 1176 bp, Homo Sapiens
  misc_feature (973)..(973): n is a, c, g, or t
  misc_feature (1013)..(1013): n is a, c, g, or t
  misc_feature (1032)..(1032): n is a, c, g, or t
  misc_feature (1036)..(1036): n is a, c, g, or t
  misc_feature (1058)..(1058): n is a, c, g, or t
  misc_feature (1060)..(1060): n is a, c, g, or t
  misc_feature (1071)..(1073): n is a, c, g, or t
  misc_feature (1075)..(1075): n is a, c, g, or t
  misc_feature (1081)..(1081): n is a, c, g, or t
  misc_feature (1093)..(1093): n is a, c, g, or t
  misc_feature (1098)..(1098): n is a, c, g, or t
  misc_feature (1121)..(1121): n is a, c, g, or t
  misc_feature (1124)..(1124): n is a, c, g, or t
  misc_feature (1140)..(1140): n is a, c, g, or t
  misc_feature (1148)..(1149): n is a, c, g, or t
  misc_feature (1151)..(1151): n is a, c, g, or t
  misc_feature (1157)..(1158): n is a, c, g, or t
  misc_feature (1168)..(1168): n is a, c, g, or t
tagttcaaagtaaaagttttatttgaaaaatgtaacagtcattttatttcagcagtttaaaaattgtcctttttcttaaagaggaagaaggcattttcacacaaggctggccagatgggaagaatcttcagcttcagcttcagcttggcctcattcatttgaaaataaaatgtttacatgaggccgcgcctgtgtccagctgaaagtgggtccttcagagcgtgtgggggattctctgccggcttgatgggctagctcctctaagccggctgctggagacatcaccggctgagggactcctgcaaacgttcatacatgatttgatccttttttgatatagatgatcttactttcttgaaagcttcttcaaaatgcttatgactaaccttgagttcacctttttcatttccactcttctgtcttgccatttcctgtctcagggcacagatagaagcttctcgtaccaaagcagagagatctgcgcccgtatagcaatcacagcgaaggtcaccagcaattgcttccaaatttacatctgcatccagtggtggtttggtaccattttttgtgatagtttttaagatggcaaggcgatctgcagggggcggtaaacccacaaacagtgttttgtccaggcggcccgggcgcaggattgcagggtcaattatatctggcctgttagtggctgccataataaaaacctgctggcgtgcttccagaccatccatctctgtaagtagctgattcaccactcggacacttgcccctgtctctcggtctgatcttcgaggacataaagcatccacttcatcaaagaatatcacacagggtgctgagttcttggctcgttgaaaaacttgtcgcacagcacgttcactctcaccaacatacatgtttagtaattcggggcccttgacagatataaaatttagtccggactcatttgcaacagccttcgccagcagagtcttcncacagccaggaggaccagcaaggaggacccagctggagtnaccatccaagagctttgantggnctggggtgcgtactggtgccancntggcatgtggnnncnctctantttttccagggnccatntttgccctgtcatatagggaagnganaagcctccctttggcngaggtggnngnggaaannaaaaagaaanatcattca

SEQ ID NO: 440340 - DNA, 1035 bp, Homo Sapiens
  misc_feature (12)..(13): n is a, c, g, or t
  misc_feature (16)..(16): n is a, c, g, or t
  misc_feature (19)..(19): n is a, c, g, or t
  misc_feature (23)..(23): n is a, c, g, or t
  misc_feature (25)..(25): n is a, c, g, or t
  misc_feature (29)..(29): n is a, c, g, or t
  misc_feature (40)..(40): n is a, c, g, or t
  misc_feature (51)..(51): n is a, c, g, or t
  misc_feature (64)..(64): n is a, c, g, or t
  misc_feature (79)..(79): n is a, c, g, or t
  misc_feature (122)..(122): n is a, c, g, or t
  misc_feature (595)..(643): n is a, c, g, or t
ttaaaatggggnnaanaantgancnttanaggcagttatncaactgaatcnttttgagtttttntaatgacaattaganacatccacccaaacatctatggtccaaaaactcttctcccccnaacagctttacctccaaaaggcaacaaatattaaaagtaacaaaaatactagaatactctttgataatacagaccttttattaataattcaattggccagagagacaaatgagtagaaaacatcatgtctaaagggaagacatacgacccacctattttatatatggcaaatcaaagagctgggaagaattactacttagaaataactacacatacatgatctgttatatgcatccccctgtaagaggagattctctaggttgaaaaaataattttctggtctcaatttgcccatttgagctcaacatttccccgctctagctcgtgggcagaccaggccagcaggaaacaagatttgagttgaaaatcctcttttatctgccacctccaacccctaagcccttgctcttctgtaaggtaacaaattcttaaaacgtcagtccaaaattacagacatgcattttttggccacnnnnnnnnnnnnnnnnnnnnnnnnnnnnnnnnnnnnnnnnnnnnnnnnnactaatttattactcgcagaagaagtcaatatccgtggtgggaacttccttggtagcttcctggtacacacgctgttccttgaccaagttcctggggaaataacccacgactcccatctcgtcctggccatcaccataaacctaagtgcccagaagaatagcaatcgggaaaaagctgatgctgagtgtcttctgagaaactcgcaggcatcctctttgctggtggtgagaatcatagctgccaatacctccctttcactccggggtccagggggcgctttagggttgcagatgaggacagaaaatcatccctgcttcatccctccccagggaccgcccctgtatattttaactgaagaacgctgattctttcgaattaattagggtgcaaa

SEQ ID NO: 440341 - DNA, 899 bp, Homo Sapiens
  misc_feature (643)..(652): n is a, c, g, or t
ggcaataaaaagaggattttcagctcaaataatgttttcctgctggcttggtctgcccacgagctagagcggggaaattgttgagctcaaatgggcaaattgagtccagaaatttattttttcagccctagagaatctcctcttacagggggatgcatataacagatcatgtatgtgtagttatttctaagtagtaattcttcccagctctttgatttgccatatataaaataggtgggtcgtatgtcttccctttagacatgatgttttctactcatttgtctctctggccaattgaattattaataaaaggtctgtattatcaaagagtattctagtatttttgttacttttaatatttgttgccttttggaggtaaagctgttgggggaagaagagtttttggacccatagatgtttggatgatgtctctaatttgtcatttagaaaaatctcaaaaatgatttcagttgaataacttgccttctaaatgatcaatttacttctcccccaattttaaagaagtatgtgtatatttaataggggaaggtagtttatggaaatatttttaatggaatagttttcccttaatatgtatccttgctggatattattcaagctgcaagtcatcaaaagacccagnnnnnnnnnngtctgtaggttattttctctacttctatttcaactttgaatttcctcttcctgtgcaaattcctctagtcaagtgtgatatatcaagaaatctgaggaggatgcaggttttgtggtcctgatgggcccacaagtttttctatatttaactggaaatatgctttgattttgtgttattaatataattcttttgatgtagtcatgagtttttctttgtttgcatataattaaaatgccgctacttaatg

SEQ ID NO: 440342 - DNA, 1209 bp, Homo Sapiens
  misc_feature (59)..(59): n is a, c, g, or t
  misc_feature (642)..(642): n is a, c, g, or t
  misc_feature (697)..(748): n is a, c, g, or t
  misc_feature (1068)..(1068): n is a, c, g, or t
  misc_feature (1182)..(1182): n is a, c, g, or t
gcccaagcactacccctggaaatccaactgaaggttagctcctcacttttggaaatccnactcccaaaattgtaacccaattcccaacatagtaaactgttaaaagaaatgcccacttccatccttaaagccttaaaattcatttattgtagtgagcaagtttgtaatgaataccagcaggtggtgctcaagccacagttgtctaagacactgggtttcacaggaagttaatctcaatctcagtatatgcaagtaaactgactcattcctgcttccagtgggaacaatttttcagttaaatcttgcttccttgcatgtcaagaattctctactggtaaatcttacaggtgtcaactttcattatcagggcatctattggccatctattaaaggccttacctgttttttctgtcatccagcaaatcttagactatttacttgtgtaaacattagatagcaaagaaactaaggacaaaaatctctagttcaatttagacttgatacctcagagcactggctgatgggaaggcattttatctaattcagactcagatgagggaaaacgataacacttcattacagacttgtctatggccatttcaagtacctttgaatcttgagcaatacatcattgtccatgtncactttaagaggccttatctcttgggctgctttaactcctgcttagcatgtcctnnnnnnnnnnnnnnnnnnnnnnnnnnnnnnnnnnnnnnnnnnnnnnnnnnnnggaagatcggcgaaaagcatttttcaaatgcacaaatgcttaaagattcaggagtaagtgggctattacacctgttaagcctattaccatgtagtttcattcctagtgaccaagtagacaaactgctaattatcaaagcataaaaggtattagactctgcaggagaaaagcaatgtagattagtctaattttatagctacttcaaattgccatctttttctattagaaccttgttcctattctgaatagcactcaatagaacttgtgaaaccatcaaactggcataaagcttactccactgacttcaaaatggacccttnccactcatagggtggtaccctagccactacacttatttcttatgtcatggcaaatagtcaactttcactgccctgtcattttaacccacgtttcaacatgcacatcccagtaantttggaaacattttgtttccaaagatt

SEQ ID NO: 440343 - DNA, 1271 bp, Homo Sapiens
  misc_feature (791)..(791): n is a, c, g, or t
  misc_feature (855)..(855): n is a, c, g, or t
ttttggcttggtgccaaatggaactggcattgttttttaattcagcctgcctggtatttctatcatagctttgctagttgatcagtttcctctcactatggcctcttattcattccttcatttggcaaatatttgttgaatacctacttatgtcaggcactgttaaagcagtggatgtagtggtaaataaaatagaaatggtttagtctatttctttgagccttcctcagagaaaatgtcacttctttgtcaatgtctttacagcctttatcctgagaccaggagagaaaaattacctaaatatccagtctagtttaaagcttaaactgatccagtaattcagacagtcccttggggtagtgtcataaatgatggccataggtgtctcctggtctcaggggcaaggtccctcatccactttagtgctgcttgttctgctgtcatttagggctgaaatatgtggctgtaggctgcttgctcagaacccagtagcactctggctacctgggcctccccctgacttctggttgcacccccctgagcctctggtgtgtctgccatccagttcatcctcttataatctctcagtatctgtgccttatgggaactatgggggctcaggaaacctgaacctcagacacttctctaccagacctgctacaacgctgagtcactgtttctgtgcaccatgttgtggtggaggctgcctgagagttgatcttctctagactcccaaacatgaagaaggagtgggcacttggcctttgattttatcctcacttatttaacanacttgatttttctccaggctgaggaaatcagtgttgctttgctgcacttccatctcgcatagtncctggaagtctgggagggcctttttcctacattatatccttctcttgccatagacctggcatggcagttatagttggatggaatatctcctctacactcccttttgtatgggcatgttggttgatatagaaaagggagaaaaagtattttggaaaagtctttaagatgacttttcgcttataaactactgttttcctgcatgtcatagattatatttttctctgcttgttcaatctcccttccttttccgtgtgatatgcaacacctcctatgagaggagtacacatccttgccccattgatgttaggcttaaatgtgtgactttctttggccagtgacgtgtgaacagatatgatatagaccacatctgggcagaagttttgaaagtcagcacagggccgggcgcggtggctcat

SEQ ID NO: 440344 - DNA, 1185 bp, Homo Sapiens
taaacttaaataaattgttacaaaatagactttagaaaataagttacaaattgtagcaaaaggctcccttccacaggcaactttcccaccggtggggctctgcatccgcctctccctggtgttgcaatctggctgctgagggtggcgctgagaagagcacggtgatgaggctgggggaaggaggtccttcaaggacagggacgcgaggaacaccccaccccctccttgggaaagaagccagatctgggtcctcttcacaaggggagaggagaagatatggggatgcccgaactactcctgagaaaatgtggagatcaagcccctccctgcacgcgctccctcccccagattctgatctttggagacttgaagttcagagggagaagctgaggtctgcaggccactggggtgaaggatccaggagtggggtcgtgggggtgggtggagggggcaatggcaagtcccctctgcccgtcactggtgccactggggctcctggggggagagagagaggaggtcaccaactgaggggcagaccccgcacagcgtgtaccccctcccagccctgcaggccattcccctgcccctggccccggaggcccagatgagaacagggattctaggcctcctaattattttcccagccctggcaaactggctcctccctcatatcccttgaggtcatgagaaatcttctatccttaaagccattccttcagctttcaggtgactcccacctgccctctgctctgacaaggcctgtcaagggcccaccatctcagggccacccaccctcggtggccactagatggaatgggtccgcctctactaggggaggtggagaggccagcccaggtcctgctgagggaaccggccgccccactccctggcagccgcggcttccagcagtgctgggtggaggcgattccccacggagatgccctctgatcagggatgtgacacgggctaatgactgttgttgctgcagctgggcctggacttcaaggaaacaattatctgtgactcagtcctccagttaaaggtgtgcagagggtggcagggtgcgcaggtagaaagggtggtttggttggatcctaaaaaggccgttggcagcagagggaaaaggggctgaataaaggttagagaagagatgggagcaacactgacagggaaggaccagaggtc

SEQ ID NO: 440345 - DNA, 1764 bp, Homo Sapiens
  misc_feature (511)..(552): n is a, c, g, or t
  misc_feature (576)..(782): n is a, c, g, or t
  misc_feature (797)..(797): n is a, c, g, or t
  misc_feature (1558)..(1603): n is a, c, g, or t
cgggaagccagagacctgcaggggcctcggcccctcacatcgtgtatgtctctccttgatttgtgttgtgtccagtttggttttgtctttttttatttggcaagtggaggaggcttttatgtgacttttatgttgtggttggtgtcttaactctcctgggaaaaggaggctggcacacactgggatgccgcagcctggccggctgtggggtggtttgggaggatccatgtcggctctgcctgcagtgaccagtgctctgtggggcagaggagctgaccagggagggaggtacccatgagcagagggtagtgggagagtgtaaaggagggtttggtcctgtctgcttcctcaccttgagagtaaagtgctgccctctgcccccaacacacacacatatcaattcctggattccttagtcctgctggccttgggctggagcctaggaaagtggcccccaaatccttagtgagctaaagctgggtctgaaatttggtcagtggggaggggtagnnnnnnnnnnnnnnnnnnnnnnnnnnnnnnnnnnnnnnnnnngagatggagtctcactcttgtcannnnnnnnnnnnnnnnnnnnnnnnnnnnnnnnnnnnnnnnnnnnnnnnnnnnnnnnnnnnnnnnnnnnnnnnnnnnnnnnnnnnnnnnnnnnnnnnnnnnnnnnnnnnnnnnnnnnnnnnnnnnnnnnnnnnnnnnnnnnnnnnnnnnnnnnnnnnnnnnnnnnnnnnnnnnnnnnnnnnnnnnnnnnnnnnnnnnnnnnnnnnnnnaacctcccaaagtgntgacattacaggcgtgagcacccacacccagctcagggaggcgtagttttctttaattttaaatttaaacccaagtttattggcagactcccttttgacctccctttgcctccccatctggtgctttcttgcatctacaccccagggccctgtggtggggctgcagggggaagctgtgcacctgagatgaggctggaacgggaattggcctctctgctcccttcttcagtaagcaaggagccccgcccctcaggcccagcctctggcaagaggtggtggaatccttgtgccgggtagtagaggaggataagggcaaaaccaggcccaggccagtgcctggcttggtctggatgggacactgtcagagtttggccacagcctgtcctttacttcatccacacctatgaagctattccctaaataaggcatttcccaagttagtcgctacctaatcagccttgagaagaatcctttcctcttctttgatagtgggtcgggggattcttcaggaatggtttggagctgggagtgggtagggggattttaaatgttccatatgggagccccaaaggaactggatgggctgcagtgaggtgggggcgggtgggcagggaatgggagaggggaagtcttggcagggaaatcccttttggccacacagtttacaaacccagtatcatgtctgtctgtgtgtctctcaaggtgagagtctgatttttataccaaagaggaaatgattttttttcatattttgtttgtcnnnnnnnnnnnnnnnnnnnnnnnnnnnnnnnnnnnnnnnnnnnnnnttttggttctctctcgttttttagggagggaagaaagtaccaagttgcattgagctgtaattaaggaacattataatttatgacacatttctatacttgcaaaaattatatcattttatggatataagagaaacaatgcctttttataaaatttcgatttc

SEQ ID NO: 440346 - DNA, 817 bp, Homo Sapiens
  misc_feature (137)..(242): n is a, c, g, or t
  misc_feature (328)..(379): n is a, c, g, or t
  misc_feature (399)..(401): n is a, c, g, or t
gtgtatttgtcactattcatctaactgcatacacattatctgtgcacttactgtatataaattatacctcaataaaaagtttatttacttctttatattaaatgtctattaataagctgggcgcagtggctcacacnnnnnnnnnnnnnnnnnnnnnnnnnnnnnnnnnnnnnnnnnnnnnnnnnnnnnnnnnnnnnnnnnnnnnnnnnnnnnnnnnnnnnnnnnnnnnnnnnnnnnnnnnnttttaaaaattagcccgggcgtggtggcgcacgtccgtaatcccagctactcaggtggctgagacatgacaacctctagaaccctnnnnnnnnnnnnnnnnnnnnnnnnnnnnnnnnnnnnnnnnnnnnnnnnnnnntgaaaaagtgagactctgtnnnaaaaataaataaataaatattaataaagcaaacggactacagttggtgggaaagggcttaaatcaccccagagtactcaagaagtgctcctattcatgagaagcacagatagaaaaactaaatttcctcctaaaacatacaactatgtgtctagtgttatgatttcatcttaaatgataaaatatcattcaattaattccccttaaaaactcaaacattcattctccatttcctaattgaaagaactaaatgttgataaaggcctatgttttaaatggctatttattttcactccaaaggcacatctactgttcctactattattgctacagatattccaaaaagtgactaggtggaaagaagggattaaaaaataccaccacaggaaaaaaatatttaacttatgacctaaataa

SEQ ID NO: 440347 - DNA, 1623 bp, Homo Sapiens
  misc_feature (19)..(19): n is a, c, g, or t
  misc_feature (126)..(126): n is a, c, g, or t
  misc_feature (197)..(197): n is a, c, g, or t
gctttccccacattccctnacatacatggggtttttcacccagtatgaattcttgaagttaacctcagctggtgaggcaacaactgtaacacttttccaccctcccggcattcatagcgtctttcnaccagtatggattatctgattaaaggctcaggctgtgtgtcataacgaaaaaagcattcccacatccctancatttatggggtttctcacccgtatggatttttttatttcgaaaaaggtttgagggacgggttaaaggccttccccacacgccttcctttcatagtatgtctcatcaagtatggatcctctgatgttagattaagctgtgcagtggatggaaaggctttcccacactcccctacacttatagggtttctcaccaaagatgcatcctctgatgctgactaatttgtgagctggaacgaaaggctttctcacattccttacatttatgaggtttctctccagtattaatgctctgaggttgagtaattccagaatcatgattaaaggcacatttgttattttcactatgttttttgctttcatgaagcgtctgatgcttaatcaagtctgatccactattaaagattttcctacattctccacattcaggttctttttccttattatgaattatttcatgttgaataggacatgactggtacctaaaagcattcttacatttcctgcattcacaggatttctctccagtatgaagccactgatattctctatgggctgtgcactgcatggaagtaaatggtattacagctggtctgaaatgtccctcctgatgaccctgttgtctctccacctggcatctgatttctctgataactctggccttctcctgttgtggtgatctaatttcataaatgttttcctttggagataaattcttggtttctcttccaaactcccaatctggacaccattcttttgtctccttcctcttaaccatccagggctctttcttctgctccaataaggagatcacatttggcttagtatcagaaagccctccgccatcacttcagacgcacagcagttctctcctcttctgggttatgcacagccacacagaatcccgtgcagacaggactcccaccacagccccgcaggcacagcgggcacagatcgccaagcacctgtcgctgggcccacaatccaggtccggggagaactgcccggacttttagtccagacaagaggacgcagggccgcgataccctagacctcctaacattcccagaccgctccagcgccagcctcacaccacacccactccctgcctgcgcgcggcccgacactgccctctgccgagctgggggccagtggccctgacactcttctcccatcccgactgcaccgccccgacactctcttccttccccatcgcacagccctgacctcccttagcggtgaagcgtgggcatgcagcccgcacatctccgagagccacctgtcttttaaactccagacgaccccagctcctcgccgggacgcctcaccgcccccttcggcgtcctagcactcaggtctgaacgagtccatcccaacccagcgagctccgcagcccgggacgttccagccctttgctttccacacgct

SEQ ID NO: 440348 - DNA, 2062 bp, Homo Sapiens
tgggtgttttattatttatttacttgacaggtaacatcgatttggtcctacaagacaccatgctataggcttagctacttgctgttgcacaagagaactttcctgaactctcaggaagcccttgcatggcctatcgaggacagctcagtcactgaagggaaaaattccataccaaagaagagagaaaaattccataccaaagaacagacttcccccagggaacctccgtcctacagcccttcagggccatcacactcacacacatcagccatcatcaaaatagtggccatgctgggaagaacaggagtcctgaactagaaggtggtcttcaaaccatggcgtaccgatttatgtatattacagatagataaattaagaggtctacatgaataaaaaatctctcaaaggggaacgaattccattctgtcatgccaggtgtttgtcagaaccttgaaaacgaaggtggttttcagtggagcttgtattaaaaatagaaggtatttatacacaggccctgctcctctcatggccatgaaatcctctggtgttgtcaggacccctgggcaacctcagcacccctacgggtagcccatctgcagtctgcatcttccgggagagcaggggactcgtaccggggcttttctcctgggtccccatctcggcttggcgacgcctccggacccaggggctgccagagggagtgacgctgctgtcagaggaataatccatacacttgcggaagatctcagggctggtgctgcagttcagtctaccttcctccgccagtggggactttctggaaacgcctttgcgttgggccaaggggctgctccaaggacttgtgcacggggaggcatttggactcagaaagagattctggtggccagacgggctgagcttgttggtggccgcgtgccgtcggcccgccataggggatgtggggttgctctcggggtcagaggagctgttggcagaagactcatcacccatgtactgaagctcctcgactctcttgttcagggacttgttcaggtggatgctcgcagtgggctcctcgtcatgatttttgtctttggcaggtttctttttgggtggcttcataccaatcaggacagctttcatgttctctttgccctgagattctgtgatcatgaactcatgggctttgatggctgcttccacctcctcgaactccacgatggcgcactcctgggtccccacttggctgtagcggctgctgatcctccggatgtcagggggcagctctctcccaggtttgaggatccgcactgatgagatgactccaaaagtcccaaaaagcttgagcaggtgttccatcaccttctcttgcacccttccattcttctggggggtggccagagcccacagcttaggagacaagtagagatcatagaccaggagcatcttgctggggaggttctcgttggggaacagtgggacgggggtggtcctcctcaccttccggtggtcctcattcaactcaaggaccactgaatacttcaaagcatgtgctgtggttctccagtcccgtgtaagatgtttcacctttttgaaggatgtgagtagcttaacgctcacatatcccagcttgttcctcctcacgtgttttagcaaaaaggcgtccttctccaggttttcatcagaaaagtagaattcgatctgatccaccagtttcttgatcaactcctcatccgggggcttccactcctgctccaggtcctcacgctcgttctcacctccacttgcagtggtgccactgtgcccgcggctcggctcctcctcgctcgcgctgccccagccggggctgaggtaccgggccgggtccccggcgccccgagtctccgccccctcctcctcgtcctccaactcgtccacgtcctcggcctcctggatggcgacgcggatctgcaccgccgtcttgggcccgggccgagcctccccgccggactgggccatggctcgcgggactgcggcgccgccggggtcctcacgccgcaaggcccagccagccggtcggcagcgactgcgacgagggggcggg

SEQ ID NO: 440349 - DNA, 1489 bp, Homo Sapiens
  misc_feature (463)..(477): n is a, c, g, or t
aggtacttcaaaaaatgtttattgaatgaataaaccaatatacagaaatgtcacgtagagtgacggctccttttttctagcataatgtaaaactgaagaattttaaaatggttaacagttagttattaggtaacataaatcaactatattctatagagaataggatattcttaggatccctgtgaaaagattagcaagtgctgatctgcgtgtggtaggattacaggtgattttgttttacttttatgtgcacgaaggcattgcctaaatttttagaaagaacatgggttgtttttattataatataaacaagagtatgaatcctcaaaaaatgaagtatctccttaacatgcttcatagttttacaaggaaacagaatacacaggacacgttgctgctgtttttgtggcctctgctctcttctgcattccttgcttctctgtttctctcctctccccccgcnnnnnnnnnnnnnnnccaaaacgtcaccggtggcagccttggcctgaacttggtgagatgtggttcgcatttgcacaaaggtggaatgcttcctattggatatttcaagtatttaggcatcggtgtccttattaccacatctctgctaatctggactcctgtccatcattgaccagctcctcctcatggtcaatgtgtcccaaagtcgtggtggcaagaatgctggagaggatttctagggaagcagtttatcctccatgctgtccatggactgggtgggccactctgaccattaagtttttccaagaggtgaaatggttcagtggcccaggcttgggagacccagttgggttcagatcctggtcctcccctcgccagctgcatggcctcaatcaagtcacttagttttgacagctcagttccctcgtccactggatcccagtcatgctgtaaacagggcttgctttggagtctgtcagacctggcttagacccaggctctgaccaaatgggtgagttatgcagctacttggtggcatctaataccctatcgcaaaggactgccgtgaacaggaaggaggtgtcaaatttggcagtgcctgatgaggtgaggccaggacccaggaacttctattccctcccatgctcaggaacagtaagtgttcttctatctgcagaggtagatgcttagcacatcgtgggtacttcactcatgattgctaaatttgaatttgtgataagtcatttcaaaagtcagatctaggaccaaaaatacaatatctgtcaacatgaactgtagatcatggttttcctccagcccaggaatctcctttcagtaaacgcttcttctccaaatgtcttcattccctttctggcttgctggttctgtcggctgagacaaagcagtcccattcgcagcgggaggccaaatcaaaatgaaattttatttagtctgcactgtccccagattgggtttcagaatgactgctttaggagatagcatggatgtggctgatgcatgctttgca

SEQ ID NO: 440350 - DNA, 1638 bp, Homo Sapiens
  misc_feature (256)..(256): n is a, c, g, or t
tttttgggagaattcggcgcctgttcccggggggaaaaaacccccggcctttgggcttaaacttggggggcttcaccctgtgccggccttccggtgaaacttgtcatcggggctcatcaataaaaagtcagcttaagcgtggttattctaaaaaaactgttttacttttttctgcaaaaaattttgatttttctgcagggcactgtctgaatttagctactgatttcccaacttcaagagctccacagggtcccantcatggttccagcaagaagctatgtatgatgtcagcatcagccccaagctggtagactgatgtttcaatctggtatttcaattttatgaagtaaagcctcaattcgatcatcttcaaatcctttctcaactacttcatcaatcgttctgtctatgaggcttctgacggtctcaatgtctttctccacaatcccttggaggccgacactaaagtaggcctccctcgtgtagccattatatccaacatcaggagaaaagtctgtgccaaggccagattcaatcaaggctttgtaaaagggagaattgggcccagaagtcaagagtgaagacagaagacttaatgtgaaggcttcaaatgtgtcggtgatgtccggtaagaggaagctaacgctgatggttgtttgtttagagggatctgtagcaaatgaatccgggccacatgttatctggaattccctaggcttgtcccagggtgtctgagctggcaccacggtgcttggttcaattttctggaatttgctcagtgcttcctcgtgaatttgtttcagatgctgttctaatggaaaattaccgtacgtgaagaacctagcattgcttgggtgatagtgagtggcatgaaactgcttaagctgctcccatgtaagctccgggatgcacagtgggtcacccccggagaccactgagtacgtgtggtcaggaagaagtctgttctgaaggtgctgggagaatatcctctcattgtctgtaaacgctcccttcatctcattaaagacgactcctttaaagaccaagggcgtctgggggtcgctcggattctcatgttccagccgccatccttcctgccagaaatccagctcgcgtaaacatgggaaaaaggtggcatccaaatacaccgagaggagattctgaaagtccttgggattttgtgtggaaaatggatacagagtataatcactagctgtgaaggcgttcatgaacgtggagagggaccggttcaacattttgaagaaagggtctctgcacggatatttctgagacccacaaaggacggtatgctcaagaatgtgaggaacaccagtactgtccatgggagtggtacggaactgcacgctgaacagattattcgtgtcttctctggccaggtgtaaatacctggctcctgtgtcatcatgggtgagcttcactgcagtcaggaacagctcgggaacagatgtcacctggtttacggtgaatccatggatcttgtctcctagtttatactgcagagccctctcacaagcccggttactgttccatcgccacgctctgtggtgtgcatgtccgccgctcagccgcctcagcacacacaggccctgccgcccgccgcagcgccacattgcgcat

SEQ ID NO: 440351 - DNA, 1269 bp, Homo Sapiens
  misc_feature (608)..(608): n is a, c, g, or t
  misc_feature (618)..(618): n is a, c, g, or t
  misc_feature (634)..(634): n is a, c, g, or t
  misc_feature (771)..(771): n is a, c, g, or t
  misc_feature (840)..(840): n is a, c, g, or t
  misc_feature (1211)..(1211): n is a, c, g, or t
atgagccaccacagccagctggcccccccttttaaccatttcccttccactcaaagaacttcctttagtatttcctttaagtagacctactagtgatgaatttgtttagttttcacttgataattttcccagtttgctctatttctgagagatttaattttgctaggtagaggattttggactgacagttaccatgggcttcactcctcagggtctgagattgtctttctagctgaggggtgtaagagttaaagataacaaaaactttaccttcactgaggctgccatcccttacgccacccccattagagggaggggagggctgctagttctttgctgacacttggatggagatggccaagagtctaaaggcttttctgtagcctccccacccctaccccactcccatcttctggccagaggaagtgaatttttctggagcttttttggtgtgttcctattcaaagctctgcagcttagactgatctggagcctgttggtatatacaaaatataaattaaaaccccaggaaatgtactgctcagtctcccctctatttctggctttcgtgtaagtcctcttattcttatccacttttcagagccctngcagagaccntcaaacctgccgtatnttatgcagagtttttagctgtagtcagggagctgtagcgtggagtgtgattatctcatccggctagctgttaaggtgatttaatattccacatatgaagcaataaaacactatataaaataaaggagcaccagcatnttaaacggtggcataataatgtatattttctcactgatgctgaaacgaaacatataactataagcagtnttatccaaaggtatgctgttgctaaatgctgtggatttttcctgactatattaaaaggaaaaaataatttatagtaatgcatgtgattatatctaaaaggcaaatctaaatttgtttaaaacaatatacaactatctttatttagtattaagaactcacccacaaatatttggttttttgtctaacaaatcctttacacaaaacttgttttaatgcatacacttttgctatctgcctccgaggcaccccactaccagaactgaagctcttgaaaagtaagagaatggaccttaattgcctgcccttattcacccactaaggaaatcccaaatcatatttaggaagttgaatttgaaatcaaagttagcttnccaaaattttctgtgtcttagacttacattttgcttttcattttatatatacacctga

SEQ ID NO: 440352 - DNA, 949 bp, Homo Sapiens
  misc_feature (67)..(113): n is a, c, g, or t
  misc_feature (126)..(417): n is a, c, g, or t
caagaaaactgttttcttccctatttaaagaaaataatgcctctttcaaatagtcagaaaaaatggnnnnnnnnnnnnnnnnnnnnnnnnnnnnnnnnnnnnnnnnnnnnnnnttacttccttacnnnnnnnnnnnnnnnnnnnnnnnnnnnnnnnnnnnnnnnnnnnnnnnnnnnnnnnnnnnnnnnnnnnnnnnnnnnnnnnnnnnnnnnnnnnnnnnnnnnnnnnnnnnnnnnnnnnnnnnnnnnnnnnnnnnnnnnnnnnnnnnnnnnnnnnnnnnnnnnnnnnnnnnnnnnnnnnnnnnnnnnnnnnnnnnnnnnnnnnnnnnnnnnnnnnnnnnnnnnnnnnnnnnnnnnnnnnnnnnnnnnnnnnnnnnnnnnnnnnnnnnnnnnnnnnnnnnnnnnnnnnnnnnnnnnnctaaaagccatgtattaccctgttcaaggtactagagtacctgtttacattcctctataatatggcaaacattactaattttgggcacacactcttcctttgtcttattgaattcaagtaccttttcgtcaggtttgacttccaggttctctaaatgtgctttctggaggctgaagcaatcatattgctggagatatttctttacctttttgataactggtctaagaaacaaagattttacattttatcaggataattatctgtggttcctgttgcttgtttttattaggtttttgattacttgacaaaacagcgcttaaaagggttaagggtttttaaaaaaattcatgtaactgtctgtatttcattttgaagtattttgattatcatcctggttaaataaatgactattaattcacagtgacatttgatgctgttttgataaagtgtttttaaccttttgatattttggcaagctttcccgggatcacatcctaaattgtttttcttttttatcttaattaaccttgat

SEQ ID NO: 440353 - DNA, 911 bp, Homo Sapiens
cctccccaaattccccaaggggtcaggtggtgtgcggcttaagacaaacaattaaaccagctctaaacaagtagatatgtctcacatctcccccattgccaacacagaatattagttcctccccaacacacttttggttcaactaacaacaggctctttgtcaagacttggctaaccagtcacctggtagctctgatatcctagcatttctagggtcattctccttaataggcttgtatgttaataacatatatttttacaacagcttgtttggcagattagagaataagataaaagttccacaaccttagcataccctgttcctgggtctccaatctctctcattgtttacttctgttcactcagtgacaacagaaacaagaatcaggtagtggcaatgcaatagaattattagtatattatgaacattataacattttgaacactataatgcattatatattatgaacttttatgaactttatacatgagtaatagcttcctaaagtttataaaacattgtttaggttacataaagattaccaagtaagactcaaaattgcaaatataaacaaaagaaaaatccaactgaaaataacactaagtatttttgagtttctagaatgtccattttggtatttggttacattatcatatttactagtcactatcagcacaattaggttaataaagaagtgggtcattatattcaaagagtgctcaggaagttatgtgttcaaagttctctcataaataccatcgtctgcctgatactgctcttgtctaatagagggttgacattaccaaaggaaaaggtgtctggactccaaggaactcagttggttctgtttggccttaagtttggttcagtgataggctgtcttctaacccctatactcctcttctctcct

SEQ ID NO: 440354 - DNA, 1195 bp, Homo Sapiens
  misc_feature (144)..(144): n is a, c, g, or t
  misc_feature (148)..(148): n is a, c, g, or t
  misc_feature (399)..(400): n is a, c, g, or t
  misc_feature (404)..(405): n is a, c, g, or t
  misc_feature (407)..(407): n is a, c, g, or t
  misc_feature (409)..(409): n is a, c, g, or t
  misc_feature (416)..(416): n is a, c, g, or t
  misc_feature (446)..(446): n is a, c, g, or t
  misc_feature (454)..(454): n is a, c, g, or t
  misc_feature (508)..(508): n is a, c, g, or t
  misc_feature (1040)..(1074): n is a, c, g, or t
  misc_feature (1099)..(1099): n is a, c, g, or t
  misc_feature (1102)..(1102): n is a, c, g, or t
  misc_feature (1104)..(1104): n is a, c, g, or t
  misc_feature (1106)..(1107): n is a, c, g, or t
  misc_feature (1109)..(1110): n is a, c, g, or t
  misc_feature (1113)..(1113): n is a, c, g, or t
  misc_feature (1117)..(1117): n is a, c, g, or t
  misc_feature (1120)..(1120): n is a, c, g, or t
  misc_feature (1122)..(1123): n is a, c, g, or t
  misc_feature (1136)..(1136): n is a, c, g, or t
  misc_feature (1145)..(1145): n is a, c, g, or t
cttgtccaagatcatttattgttattattatttttctctcttaattggattcagcttttctggctcctcacacacatcctctctggtgggggattcaggtttgtgcaaagcacaaaggagcttgtacccacctgggcccccggncagncagcacggccggctttgatcggagcccctcttccctgtccgggctcgcctgccccagtccctgcttctgacccctgagtccggcctcccgagcctctgcctgcaccctgagcatccccagggacggctgggagggccaggtcttccgtgatgcagaagtgcctgagatggttcatgaaatgccctcattgttccccttctgctaaggccccgcgacggcctccctcctgctgtcctacacagggcccttgnngggnnananaccaaanagcctcaaggaaaaattcagcagctgagcngtgcgtgnggcctgggctcaagcccggagtctccttggcccgtccaggccgtcactgaccanacgctaggctgacgacacggtccgaccctttggactaacactgtggatgctgcctggcctgctggtttccagatcccaaagccccttccttccccttctccatctcgctcaccctcggggcctggctccctcatatacaataagctgcttctcacttctcaccctgaagccaacagctacgacagcaggggtgacagggcgctccagggtggcagacaggcttgtgttgcatataaaaacaaggtgatgctctaaatatctaagaatattggtcccccaaagtgactcttgctgcctcccccttcctcaccgtcccgccgacaccttgccccaggcccttggcaaggccaggtcccttggagactatcgttgccagtttgggattctagacaaaaattctatcactttgtttttgctagaaatcaccaatacaatccttagttcagcaaatacagttttctgtatagtttataaacatgaaaagacgtacagttaggtaacggagtgggagggggactgtgcatttgtgtgnnnnnnnnnnnnnnnnnnnnnnnnnnnnnnnnnnngagagtgtgaatatttataagtggncgnantnngnnttnaaantgnannttttgtgagaacnttattgagnggagtgaagatttagattagagagagtgagggtatatactttggagttgg

SEQ ID NO: 440355 - DNA, 555 bp, Homo Sapiens
  misc_feature (361)..(361): n is a, c, g, or t
  misc_feature (435)..(435): n is a, c, g, or t
  misc_feature (449)..(449): n is a, c, g, or t
  misc_feature (454)..(454): n is a, c, g, or t
  misc_feature (482)..(482): n is a, c, g, or t
  misc_feature (506)..(506): n is a, c, g, or t
  misc_feature (515)..(515): n is a, c, g, or t
  misc_feature (521)..(521): n is a, c, g, or t
cttgtccaagatcatttattgttattattatttttctctcttaattggattcagcgtttctggctcctcacacacatcctctctggtgggggattcaggtttgtgcaaagcaaaagggagcttgtacccacctgggcccccggcagtcagcacggccggctttgatcggagcccctcttccctgtccgggctcgcctgccccagtccctgcttctgacccctgagtccggcctcccgagcctctgcctgcaccctgagcatccccagggacggctgggagggccaggtcttccgtgatgcagaagtgcctgagatggttcatgaaatgccctcattgttccccttctgctaaggcccccgnacgttttccctcctgttgttccttacacaggggcccttgttgggttcaaaacaccaaacagcttcaaggaaaanttcagcagttgagncttgngggaggtttgggttcaagccggagtttntttggcccttcagggcttattgancaaacttangttgangaaaggttcgaacttttggattaaaattttggat

SEQ ID NO: 440356 - DNA, 2946 bp, Homo Sapiens
  misc_feature (46)..(46): n is a, c, g, or t
  misc_feature (121)..(129): n is a, c, g, or t
  misc_feature (1051)..(1061): n is a, c, g, or t
tttttattgtcacatttaactgctttgtcagatatacattgtatgntttcagtatggcatcaaaataaaaatattttcgtgaatgtcaaaatctgaacagaggagacggtaatggcacttnnnnnnnnntaaattcacactggcgctgaagctgcgtagtaggtagctgataacaactgggacacatttgcagataaagtgtctgcggcgttttaaatcaaatggcagtggtgtaaggccaacataaccaggagagttgttaaaagacagacccccatagagtggcgatccaaagaacggcagttctagcatttcattttccgtctatatgatactgtctaatttagtattggaactggagctcagtgagtaaatgtgtatcctataaactgaaactactttttcagaacccagattttaagccttcaacaacttccttattcttacagattttaactagttcaaagggaaggcagttaaactccaagtattaacctcatggctgtccttgtcataaatggtgggtcttgctgtttccaaaccagaagctcaacatgctcctgaatgtcttagtggtttcagacgttgtgggcaaaactagaaaacaagtagtcattaaataaaaatataagtgcatcccaagagagtctctacacatactgcaattattccccaaatggcaacttaaaataaaataagtatggttattcagcttgaaaatgaatctttattcaccaagattcccaaacagtttattattaaatgtctttcctccacagataaaactaacactaggatttgtcagaagatctaaatgagttatatctcctctgtatgaactcagctaaacctaccgtgtctggaatctgttcattataaaactcactccttctgttctccactgctgtgtgtcctccaagattccagaacagagaccataaatgtgccagtgcacacagtagtcactgtaatccatcaaagaaaaaataattaatttattttatgacgtatttatttggatgattacttactggtaattagtatctctacnnnnnnnnnnnaaaggcaaccattttaagtgataatacatatcaagctagtagaaaaaagttggaagccctctcttttatctcacaaagtcatgcagacaagagaaggtatatctgatttgttctaatcaggcttcttggaattatcaaaatttcttttctggcaaagatgaatttggctcatcatagaaagaagttctttgaaggctgctgctaaacttgtttccctttgaaaaagtaaatttcaaggcatgatagtgcaagaggtaagtttttgatttatagaacatttatagactaattgtgcttagtctctaatttccaatttattttaaagaacagaaactacgctgataagtttcactttgcctaaatttaccagtatatccatgaatcgcaccagaattaggacaatttgattatcttaatgattctgtcatgaaacttgcacactgtatccaaaggtaaagagcagcggatggaggctcccacaagttctgtgcacaaggactctcttctcgggagtaaaggtatctgagaaagcagttctccccccagattaagttctcaaaaaccctctcagtaagcaatgaagaaaaacagtgctaggtggagagtttcttttgtttagttaaatctgggaggtctgagtgttcctggggtcctcgtcgggatgtgccatgggtcgagaatcctttgaatgtgagtattcactattagaaggctctgtagggtcaatcaaattttcataatcactgtcgtctgaatcctcaccactgtctccagctgctctttggggaggaggaaggtcagccccacttccaggatacttcagtccggcactggtggaagcataattggaagagcccacagcttgaggtcgaggcataaagacactcctttccatgcgagagtggctcaaagtactttcttgattgtttgggtgaaaatcagagtaagggggaggaggatccgaggcctctgcatctccaagtgtacttctgccttcagctgcaaacccagaggacggcatccgaggactgaacgctgggtccaagctttcagacggcatctgtctgcttaacactgcctgctgcaatcttctttcttgttccttttcatttttcctctgagtgatttgtcttcttaatttgttcacttctgcctgacaagattcaacaactcgctcactcttttcaacatctgcacacactgcctgaactttctcctgaagtgcattataaacctgataaatcgccctgatgtctttcatcactccatccttgtcaaaaaagtcagtaccatgttctttaatcactttggcataactctgagaagtatttggcactgaagacactttgtactcttgctggctagtatttcctagattgggaatagcgagtgatatcctctgattataccttctatttggtctgaagagcacatattctaaagcgtgagtggaattgttggcagtggagatgaagctgaagagaagaaagacgaggtcgggcacgccgaggatgcgggtgagctgcttgtgaagaacctgctctctgtaggacatctgctgctgcgtattgcgccggaatctgtaccacccaatgactttctttctccgatctttaagaatcctgtccaaactctcctcattcactttgcttgcgtagtcataaaaactaaaaagttttgaacaaggctgatggttatggatttcaattacttgcagaaattctgtgttgctgatttgtgagtcactgatgctaaacgtttcctcttgtcttacctctcccagtaaaaatccttcgtggtccgcgttgctgttggcgctgtggaaacacacagcactgaaggtgtagcccgaaatggacgccgccatgatggaatctccatgccc

SEQ ID NO: 440357 - DNA, 140 bp, Homo Sapiens
ttttttcatgattaaataagttttttattgtcacatttaactgctttgtcagatatacattgtagatttcagtatggcatcaaaataaaaatattttcctgaatgtcaaaatctgaacagaggagacggtaatggcactt

SEQ ID NO: 440358 - DNA, 850 bp, Homo Sapiens
ggcataaaaaggcaaacatgtgctttagtgtctgacaagaagttttgtcctcccaaggcatatggcatcaaggctgggcctaacccagtctcatgaccttgtgaatccagtccacaaacacagagacacgcgtgaagacagctggccagcgggaccttgcgcatactcggttggggattataattccttccaggacccagcagttgtgggtaaagcaggcaagtgggcccccgtagtcaccctcacaggcccccacaggggccaacagtccctcagtgcacatctcactctcccgcacacgtcctcggtgcttgatgttacactcctggttggagatgacattcagcaaggccacatttaggactgtgtcattacccgtacctttggtctcaccccagcctgcaatctcacacttggtccctggaggcaccacataccattcagggggcaggcagatcagggccacacgctggttcagggtcacagatctctccagcttgagcaggacaagctgggagcctgagggcccacacaccatcttggctactgggacccgctgtaggcttggctctccatgctgtgggttctggaacagggtgcccaaccatacctcatagcccgtgagaggcatatggcaggaggagaagcactgccgggcagtcagtatccactgctcctttactagagaccccccgcagaaagtgctggccctgccgattccgcaagctgactgtccagggtgagttgcccggatggcccccaaccccgcgcagctttgaaccgccgctgattccacccggtccccccctcttgccacactttcttaaactggaacttggcttgggggggt

SEQ ID NO: 440359 - DNA, 484 bp, Homo Sapiens
aaaataagacatatttattaagctaaagaacaaattttatttttcattttccccaaacactaaaatagcacatggcatagtaattcagcacacagcataaactgatatatgcaatcgataatcccgaaaatgtttaagtttcactttgggagtctttaaaaacttatgtccttaaatgacctttattaaagttatcaacagacgacaacaggagtcaccttgaaaaattttagggtacaggatactgcaattcttagaatctggggaaactttttatgtggggaaataactcgatttgcttctctgtaactgagctacttttttctcgagctcatttttgtttaagggtaacactgctagggggttcctgaggtttgaggaggggatccttcttaaaggggaaaccttaaatattgccaacttttcaccccagggggccctctggtcctaaattgccatttccagtggggaagggaaagggggg

SEQ ID NO: 440360 - DNA, 765 bp, Homo Sapiens
aaaataagacatatttattaagctaaagaacaaattttatttttcattttccccaaacactaaaatagcacatggcatagtaattcagcacacagcataaactgatatatgcaatcgataatcccgtaaatgtttaagtttcactttgggagtctttaaaaacttatgtccttaaatgacctttattaaagttatcaacagacgacaacaggagtcaccttgaaaaattttagggtacaggatactgcaattctttatatgtcttttaaagcacaatttaacacatgccaaaaaagttccttccgcatcaactggctttgaatttaaactcaatttactttaagtctgccaggtcgtacaaaactacagcaggaacctaagggcctgacacggtttggttccagacttaatgcgaaagaaatcattctaagacaactcttaaaattaatctattggtattgttctgcttgtaccttaactatggccataatgtatttgcctaattcaaaaggttgcagagccagtaaccccagtgttatctgcagactatctgaggtgcttttaagcattttcttgaattctattgtttgctttgaaaacatgggctttaaacgatcaaggaaaatgcgttttgtctcctcactcaggagcacttcgggatacatgtgcagcgttgcagacaggatggagtgcaggcaagcgggttccaactcagagcccagacccttgggaaaagcacttggtgggtcatccttttaacttccc

SEQ ID NO: 440361 - DNA, 892 bp, Homo Sapiens
  misc_feature (775)..(775): n is a, c, g, or t
gcattaagtctggatgcaaactgtgcagcccttaggttcctgctgtagttttgtacgacctggcagacttaaagtaaattgagtttaaattcaaagccagttgatgcggaaggaacttttttggcatgtgttaaattgtgctttaaaagacatataaagaattgggaaacatttcaggagacgatcatagcctgtataaataccagattagaacatacggatttaccatgaagttctgtcttcaacatccattctaaagggctactgtcccaaatcctgtgtgtccttttgacttgtctgatcacccaatggaagtggatacttgtaaagtctacaccactgtacttggcgttaaatcttgctgaattcgtggtaagctgttaccatgtctacattttgtagaatgattttggtctgcagcaaaattcgatttcacttctcatacccctttccttccacttgaaatgcaatttagacagaggccctgtggtgaaagttgcaatattaagtttacctttagaagatcccttctcaaactcagaaccctagcagtgttaccttaaacaaaaatgagctcgagaaaaaagtagctcagttacagagaagcaaatcgagttatttcccacataaaaagtttcccagattctaagaattgcagtatcctgtaccctaaaatttttcaaggtgactcctgttgtcgtctgttgataactttaataaaggtcattttaggacataagtttttaaagactcccaaagtgaaacttaaacattnttcgggattatcgattgcatatatcagtttatgctgtgtgctgaattactatgccatgtgctattttagtgtttggggaaaaagtgaaaaaataaaatttgttctttagctcaaaaa

SEQ ID NO: 440362 - DNA, 628 bp, Homo Sapiens
cctttaatttcttcacgttttaatttcttctgttgcacactgtttatcttaacaccacaccctccgcccgacaaaaaaactttttgcaatgatttccagttagcattggtccatgcctatcaacggaaaattgtgcagtctctgggataaacagctcgactttgtcaagggaaccgtgtatttttactagaagtcagattcacgtccggcctccaggccagaatgcaggaaatgccagacactggcgtctcaaaagcagctttcaaagttatccactcacacagccggcctctaagcaaatactcttgagagcacttgttgttttctccaaatatccaaacagaatataaactcaaagctgtttcagtacagttggttaaaaccacgcatttatagtagtgatcagcattatatattgttttaaggagcataaatccatagtttataaggattgatatggttgtgaaggaaaatgtatatagttcagcctgagatgtcagtgttaacctataaaaggcccagcacattaagtgttctttctaatcttcatgtttactctgacaatacttatctccattttacagatgataaaactaaacatttgctctatattaaatcctgttgctcc

SEQ ID NO: 440363 - DNA, 929 bp, Homo Sapiens
tgcctccaaagtgctgggatacaggtgtgagccaccaacgctggcctaccctggtcattttttatggtcttttttccttgcttgtgttttcagttcttgctttaccttaaactcttcaaatgttattttatgttttatgtttggtaatgtcagtatctgaagtccctgaggaacagtgctgctatttgttggttctattgacttatttctggtggcgtaattccttatatgttttgtaattttgaatggtatgcttatatttgattgaccttaatcatcaggaatattgggaggcttaggttgtgtcttctgtgttctctggcaggtcttctctcttctcctcaatagaacggtgtttgcttttgccaagttctatagggcacaacaatccaggactactttgagttttctttggcttatggtttcctagacttgcaggtagggtaaattcaaacctcgaacctgcatgagggtaagactgtccatataaattctcaaaagagggagactttacctctacctgaagctgaagttgaaacagacaaattattgctgctgcttctgccattgggcaggtatttttcttagcccatcctttcactaaaagtgtaaccaccaatcctagtgatccagcttcatctcagttccaactccttatcttgagcagatccaagactttatctcctctgcctcatacagccaattaaaacaatttctaggtttccagtattttcattagacttatcacatagctactgcttactagtatgatggggttttaggtaagtagacccaatgttgtccatagattggaaagaaatatatccatacaatgcaatgttctatagttactaaaaatattttacatggatatctaataatgaaaattttgcatagagtggccaaactgtcatatttttgtttcaatt

SEQ ID NO: 440364 - DNA, 1541 bp, Homo Sapiens
  misc_feature (198)..(238): n is a, c, g, or t
  misc_feature (1029)..(1261): n is a, c, g, or t
tcaaaacatgctttatttctcttacagttctgaggtcccaaagcctgaaactgacgggtcagcagggtggttccctctactgtctgtgagggagaatcggccaggcctctctcctggcccctggtggtttgctggcaatctttggcattccttggtttgcagacacttcatccccatctctgcctccatctcaatgannnnnnnnnnnnnnnnnnnnnnnnnnnnnnnnnnnnnnnnnataaagacatcattgggtttagggcccatcctaaatacaggatgatttcatctccaggtgttttaattacatttgcaaagaccctttttccaaataaggtcgcattcacaggttctagaagttaggacttggacctatctttttgggggccaccattcaacccactacctccaggaaagacctgtaggagagcaagagacgggtggaggattgcctctcccattgctgagctttcttaacaagagaacggtttttatgtcagcctgaagtagtgatctacatgagcaaagacatgggtctggaaagaggaaaagaatatttgagacaaggtgtcatactttactagaagtgaggaaacccggagtaaatggtgtgagataaatcagcctgcacacttcctaagtgtcagcactgttctcggagctgggacagtagctgtaaaccaaacaaaaactcctgccctcacgcagcttacattctgatcaggagagacaggaaacaatataagaggaaaaggtcaaaatattagaggcagaatctaggagaaaagtatccaaggcagagagaataaccagggcaaatgccctgagtgggaaactgtgcttgccatgctgggccaggagtgaggctactgggtgtgaagtcagaaaccaagaaggcgcagagactggaccctcctcgcatgctgacaaggtggcctgcacagctccacatcacatgcacatgtgtataaaacaccagaccaaggccgggagcagtgactcacgccagtaatcccagacttcgtgagnnnnnnnnnnnnnnnnnnnnnnnnnnnnnnnnnnnnnnnnnnnnnnnnnnnnnnnnnnnnnnnnnnnnnnnnnnnnnnnnnnnnnnnnnnnnnnnnnnnnnnnnnnnnnnnnnnnnnnnnnnnnnnnnnnnnnnnnnnnnnnnnnnnnnnnnnnnnnnnnnnnnnnnnnnnnnnnnnnnnnnnnnnnnnnnnnnnnnnnnnnnnnnnnnnnnnnnnnnnnnnnnnnnnnnnnntccatctagcccaccggtctgagctccacccgccacgtcctcgtaggcgccagatccaggcaggactttcggtcagcaggaactgagggcagcagaccccccacgggtcagctccaggaagccacacagggagtccacaagaccccacccctagcggggacgcttccccggaggccacgaaggtgagagccgagggcgccgggcgggagaaggcacacaccccggacgtggcctccagcctttgggcgcggccaagacaagtattgccaggaaccctgcc

SEQ ID NO: 440365 - DNA, 1464 bp, Homo Sapiens
  misc_feature (1268)..(1301): n is a, c, g, or t
ggtctgcctagataggtcctgatttgctgggggtccatctgtctgaatagctggagatgtgtactcatttgggggacttgtctgtcaatctggaggatcatgtctgactagctggggtccatccatcaagacatcaagatgagagtctggccggctggctgggatgtcaggattccatgtggctgatgtctgcctgtctggcagtccatctggttggttaggagtctgtctggccagaaggtctgtcagccagccagcccacctgagggtgggggtggggtctgagaactctgtgtatctgttcagcaggggatctgtttatatctgtctagtaatctaacttagggggtccacctggctgtccagctagcagagatgtctgtcttttgggggctctgtttggtggtctctctggctgcactggtctatcaagctgttggctggtctctctctctctggctggggatccctttgtccacctgtggactgtatctctgaagctttggctgtctgtccaggttggtggtccatctgtctgtctgcctatctggaggtctttttatcggtctgcctggggttaatctgcttggctgtggttatgcctggcttagttctgcctggatggcgaagtgtccatccacttctctgtgtggtcccctgagtgtccaagtgagggaggctcaggtgctgaggatggactagtgctgtgtggtgaggagagcagtctccggaagctcatctgtcccttctccccttcataactcaggggtcatgccccttcctgatcttctttcttgaatctgctctgtgcagcctcaccagccactataccctagctacctcctccagcctcaagccttgaatgctacagtcattggggcaaagcccccacatttcccaccctgagaaactttaactttgatccaggcccactgtttccattctgcgcacggcgctcagcagcaccggggcatcagcagtccgagctcacaagaggcaacaggcaggaactggcgttagacttacacccgggtccactcagcaggcgggtcccggggacccttcggcctcccaatgcgcaggttgaaacctagcccaccggtctgagctccacccgccacgtcctcgtaggcgccagatccggcaggactttggtcagcaggaacgcggccaggcagcgtccccctcgcgtcctccgcgtgcgccccgggtcgctgggcgcgcggcgtcaccttgctgtagagcggcgcctcctccgcgctgcgcgnnnnnnnnnnnnnnnnnnnnnnnnnnnnnnnnnnactcccggcgcccgctggagccccgcgcttctgcaccaccgcgtaggtgtcagccatggcgtggcccggggacccgggcacagagatgctcctgcaggcagggagggccgggaggaagtgaaacggcggcgctatcccgggaattccggaccggtaccagccg

SEQ ID NO: 440366 - DNA, 958 bp, Homo Sapiens
  misc_feature (90)..(90): n is a, c, g, or t
  misc_feature (673)..(703): n is a, c, g, or t
aagttgcaaaacttgttgtgaaaaataagggaataattatttgaccttcttgtacaatgtaaaataaggtgtataataatgtaagtaaanaggttaatggctaatatgaaaaatattttttacattttcaagaaaaacccaggttgggtcaaatgtttattaatagaaagaccattttaggggccatttaaaaatcattaggggttaatttgtggaaacgaatttttactcattctgaaattaattactgtctttttggcatccacaaagcccaactaacaaagtgtgaacataaaggggccatcatttagtttattctgtttatctggacttataactatctttatatttgaactattaatagttgatttgcaaactgtattggcatctcttggttttgagtgacccctgcccccctcaagtcttttgagaatttggagtgggcttcactggccattcagacaaagggccttattcataagtggacaggtttccccatagggaccatcgcacatatacatataagtacatacttccatcaggcttgtaacaattgatttaaaatcactccacagtattgataaatagctctatattttcaaggtgcagaagaattccacagccttaattatttcagtgtcttgctggtctgccttaagtgtatcttctgggnnnnnnnnnnnnnnnnnnnnnnnnnnnnnnnctgctgttgttcattttgtatgcacacaatgtcgttttgtaaaggtaggttgtaaatattttatttgtaagtcaaaatcactcatgtgtaatgttgtaaagtgatgacctgctgtcttgttactgctacagtaaatgttataagttatggatgaaacttcaaaatgtacatctcacatgttatgcattcctataaatatactatactaaagatactatatggttgtctcttttttcctaattaaacctttgttca

SEQ ID NO: 440367 - DNA, 900 bp, Homo Sapiens
  misc_feature (9)..(10): n is a, c, g, or t
  misc_feature (19)..(19): n is a, c, g, or t
  misc_feature (25)..(25): n is a, c, g, or t
  misc_feature (38)..(38): n is a, c, g, or t
  misc_feature (853)..(853): n is a, c, g, or t
  misc_feature (858)..(858): n is a, c, g, or t
  misc_feature (874)..(874): n is a, c, g, or t
  misc_feature (886)..(886): n is a, c, g, or t
  misc_feature (891)..(891): n is a, c, g, or t
ttttattannataaaattnatactnaaaattagtattnctacattttaattacagaacagtctactgttcctaaaaggcactaatccagaataggagatacaatcgatacaggactcatttgaactattttattcaaaacaatagagcgcttgtttctttgaccatttacatctacgaaacaagggctttttgctacagccattacacattgttataaatatgagtcctacgggtgaaggtgcagtatcactctccctagaggaggttcccattaagtgggaccactgtggagctcagaggcggatggcgcagtgggtggggcctgggacctgccacatggttggcccgtcagcccctggacacccggagcttgtctttcagcctggcctcctggtggttggtttctggccattactggcagccactttcaccccctcttgtgttttagcaccggcaaagtgggttctgagaagctccaggtaactggggctggaggtgtgggggatgaagcgtcagcagcggggaggcattgtggtaacctgatctgaagaaaggcagcaactactcggtagagggagacgaagcccagggacagccaatgagctgggctctacagccaggcagagccacctgctgctttctgggcaaacttctggccccagaatatgagggtctgttccaaagttcagagagatcctgtgtcccttcctggtgacccagaagtgacatcggatcatcttttgtcttggaagctgatttttacaagtggaattttgcttcccagagggaagtcaacatacagtgaccagcctgaagtgggggagccctttccctccctcagtcccaccccangagtncaagtgggtccaggcnccaggtcccacnacacnacgtacggg

SEQ ID NO: 440368 - DNA, 2000 bp, Homo Sapiens
  misc_feature (72)..(86): n is a, c, g, or t
  misc_feature (186)..(254): n is a, c, g, or t
  misc_feature (267)..(277): n is a, c, g, or t
  misc_feature (331)..(340): n is a, c, g, or t
  misc_feature (362)..(370): n is a, c, g, or t
  misc_feature (432)..(487): n is a, c, g, or t
  misc_feature (555)..(556): n is a, c, g, or t
cgccgccccccccttgattggcggcccccacaaccacgcaggtggtttttttagaagaagaggataccccannnnnnnnnnnnnnnaaacttttttgtgggggagggggttcaccacacaaacgccccaggggtggaaaacaccacggtggttttcccccggggggggcccacaaaaggagtgttnnnnnnnnnnnnnnnnnnnnnnnnnnnnnnnnnnnnnnnnnnnnnnnnnnnnnnnnnnnnnnnnnnnnncacccaactgtgnnnnnnnnnnngggccccccagggggaaacgagcctcctctctgggggcccctccccgccccccnnnnnnnnnncaacccccggaaaatgtttttnnnnnnnnntcccctggccccggggtcctttgggtagggccaaataaaaccaggttttggtcccttgaatnnnnnnnnnnnnnnnnnnnnnnnnnnnnnnnnnnnnnnnnnnnnnnnnnnnnnnnnggggtccccaagcccccccaattaacttgggggccccaccaatttgcgaattgcccatgttttctagnngggatgtctgtgacagaagctggtacaggctctcacgctcagccaacacctctagggactcagcgccctctgcccaccgcttcaccatccaggctgcatcaaaggctgccaggaagccccgtgccactccagtgcccaggggccagaagggctccaccaggcagtcccccaccagtcccagcagcaggcgggcgccatgcttctcttgcacacgagcagaactctctgcccgcatcatgctcgtgaagtcaaaggcagagacatcaggctgcccatgggcatcctgggcaaactctagtttcccgagcttgccatgggtggcaaagtcagcagctgcccgggtaaagcgctgcagagcctcgggcaccacattggcactgcccagcagccgattggtgtctggccagtcctggcgcagcacccccagccgcagcaggcactgcttcttggctgtcatcacaaagtagtgggtgtcgtccttgtagtacacaatgttctccagatcaatgcctgtggctttgagaaggctctggaagaagctctggttgtagatcctggctacaccactgatctccggcacctgtgtctcctccacggtgcgtccattcacaaagttggctgtgatgccaatggccagtttgcctcgcatttctcgaactttgaagccttcagggacgaatttacctcctgcagccgagataaggacgtcaaattcatagttggccagctgggcaggggggttgggttggagctgggcacgccagccactccccttcctaggagggggctggaggccagtgaaagtgacaccccagtgaatttccacccccagcagcaatgctaccttcagcagaagcagctggagctgcctgatgctgatgtggtccagggtgccggtgcagaagcgcccgtagaacttcttagcaccgagtgcccgcaggtcgtggatggtgaagggccagaggtggagcacgttgtggcgagagaacttggtgcgcttttccaccagcaccactcgggcccccagcagcgccagctccacagcgacccgcagcccgcaaggtccagcacccaccaccaggcacttggtgctggtgcaggcccggccctgctggtagacaggctggcctgctcgcttgtccagcttggtccacagtgacttggcgctccagtagttgagctggtccttgatcttgtggtactggggcagccccccaccgggttccagccccagggccccacacagctcctggaagctgctcagcacgtcctggcacagctgggcctgcaggaagctctcaaagtgggcatgcgctgggttggtggaggtaggtgaagccatggaggcctcctggggagggcagcagctgggcagagatgagtggctgccaggcgtggttcccgagcgaccgcagctgcgtttccccggaagatcccgggaatt

SEQ ID NO: 440369 - DNA, 1002 bp, Homo Sapiens
  misc_feature (915)..(915): n is a, c, g, or t
  misc_feature (917)..(917): n is a, c, g, or t
  misc_feature (927)..(927): n is a, c, g, or t
  misc_feature (929)..(929): n is a, c, g, or t
  misc_feature (939)..(939): n is a, c, g, or t
  misc_feature (949)..(950): n is a, c, g, or t
  misc_feature (953)..(953): n is a, c, g, or t
  misc_feature (961)..(961): n is a, c, g, or t
  misc_feature (965)..(965): n is a, c, g, or t
  misc_feature (971)..(971): n is a, c, g, or t
  misc_feature (974)..(974): n is a, c, g, or t
  misc_feature (988)..(988): n is a, c, g, or t
  misc_feature (991)..(991): n is a, c, g, or t
  misc_feature (1000)..(1000): n is a, c, g, or t
ggaagccggggccggggctgcggggcgaggtgagagcgggcgggcttgggagccggcaggtgcgggccgagggcgggcacagcggcttttggcgctgaggcgcgcggcggggaaagctcggccggcctcccgggccccagccttctccagaacccctgctacccacgactaagccccgaacaatctgcccttgggcttgttctcttcgcagttgtcggccctgggccgggagctggagtcccagactcataggtcccggcccagcccccgaagagccgcctcagccggggggagttgctcggactcaaacgtccagtcctcgtgcgaccgcgctgggtcggaagtgagcaggctgaggccaccatggagcagtgtgcgtgcgtggagagagagctggacaaggtcctgcagaagttcctgacctacgggcagcactgtgagcggagcctggaggagctgctgcactacgtgggccagctgcgggctgagctggccagcgcagccctccaggggacccctctctcagccaccctctctctggtgatgtcacagtgctgccggaagatcaaagatacggtgcagaaactggcttcggaccataaggacattcacagcagtgtatcccgagtgggcaaagccattgcacaggaacttcgactctgagatctgtggtgttgtgtcagatgcggtgtgggacgcgcgggaacagcagcagcagatcctgcagatggccatcgtggaacacctgtatcagcagggcatgctcagcgtggccgaggagctgtgccaggaatcaacgctgaatgtggacttggatttcaagcagcctttcctagagttgaatcgaatcctggaagccctgcacgaacaagacctgggtcctgcgttggaatgggccgtctcccacaggcagcncngctgggaacncnacagctcccnggagttcaanngcnccactgcncttntccccnctngtaggaggcccccnaancctggaggncc

SEQ ID NO: 440370 - DNA, 1927 bp, Homo Sapiens
aaatgaaaagggcagtaaatacatttgttcaaagttataaaacaacggcattccgttctaactgggactatttacagtgggagatggtacatactgttgaggctgtagtgggaggaagaggtgggccaccgctggacactcttgggccgaggggcaagggtggacatagcattggcatggcagcaagagacttggctgagggcaggggtggaaggatgtctactgctgaagaccaaatcccttgccactctgtcggttgctactaagtcaaacgcaaacagaaacaggaaaagacagcaggagcacagaggccagcatctccctttccttatgccatggagccaggtgccaggcgtgggctggtccatctccctcctcagcctctgccaaagggctgctccagtgctcccctcagtggaactcctcagccaggcgctctgaaaccaaccacagtccactgaagttgaccaccctaccgagacagaccaaggctcacaggtgaaaacccctttcaacaaaattccttccaggtaggaatcagaatatgatgcgtttcccatctgccgggttctgctccatgggacagtagggacacttcagctttcctccattaatgagcttattgagtgcatctcgggagataacatggccacagatgagcttgatgggagggttggaatctgacgtctgctggcggaggatggggcaagcgaacacggagtgttaccagcacttcatgcctagttcaatctcaatcggtaactcgtccttgtgattccagaccccagtgcactgccgctgctcaatcacagccttgatgttcatcaacacaggcagcgccacacagccagaggcaaagctgacgctaaggggggactccacagaaagccccagcagggaacaggcgtcccgggtaaaggtctcacagatctctgcccagtggctgctgtccagcaggtggcagtagggtgacttctccaagcccagccgcaggtacaccaggctgcccatcatcacctggatctcccgctggtgcagccgagcaaagggctggaagtgccgagcatagctgagggcctccagctgcttcgcggggcctcctgccaagaggcggatgaagtgcagtcggtgcagcttgaactccagggagctgttgagttccagcagcgctgcctgtgggagacggcccattccaacgcaggacccaggtcttgttcgtgcagggcttccaggattcgattcaactctaggaaaggctgcttgaaatccaagtccacattcagcgttgattcctggcacagctcctcggccacgctgagcatgccctgctgatacaggtgttccacgatggccatctgcaggatctgctgctgctgttcccgcgcgtcccacaccgcatctgacacaacaccacagatctcagagtcgaagttcctgtcaatggctttgcccactcgggatacactgctgtgaatgtccttatggtccgaagccagtttctgcaccgtatctttgatcttccaggcagcactgtgacatcaccagagagagggtggctgagagaggggtcccctggagggtgcgctggccagctcagcccgcagctggcccacgtagtgcagcagctcctccaggtccgctcacagtgctgcccgtaggtcaggaacttctgcaggaccttgtccagctctctctccacgcacgcacactgctccatggtggcctcagcctgctcacttccgacccagcgcggtcgcacgaggactggacgtttgagtccgagcaactccccccggctgaggcggctcttcgggggctgggccgggacctatgagtctgggactccagctcccggcccagggccgaccactcgccccgcagccccggccccggcttccgatcccgggaattccggaccggtaccagc

SEQ ID NO: 440371 - DNA, 551 bp, Homo Sapiens
gggtggacatatgtttttatttcttctggtatatccttcggagtggaactgctggatcaggtggtaactctaggtctaacctggcagttaaacagaatcctatgcatgctgtagtccatgagttgaaataaacacttttcccatagtaagtgccagatcattttcatttcacagcaaccagtaatttcacatatgaggaaatgaaggctcccagaggtgaactggccttttcccatttgagcagttccaagtcagacagttaaaaagtggcaggacctggaagagaagctagttctttcaccctggcattcagggctgcctcctgggctacggggctggcatttagaatagagctaaggtctgctgccaaggcaggtgccccagtctgcctcctctgtgtccttattccactttctctgcagccctccaggggacccctctctcagccaccctctctctggtgatgtcacagtgctgccggaagatcaaagatacggtgcagaaactggcttcggaccataaggacattcacagcagtgtatcccgagtgg

SEQ ID NO: 440372 - DNA, 1374 bp, Homo Sapiens
  misc_feature (155)..(214): n is a, c, g, or t
cgagttgtcggccctgggccgggagctggagtcccagactcataggtcccggcccagcccccgaagagccgcctcagccggggggagttgctcggactcaaacgtccagtcctcgtgcgaccgcgctgggtcggaagtgagcagggtctcactcnnnnnnnnnnnnnnnnnnnnnnnnnnnnnnnnnnnnnnnnnnnnnnnnnnnnnnnnnnnngctcaagcaatcctccgtcccacctcagccttctgaggagctgggaccacaggcgtgtgccaccatgcccaggctgaggccaccatggagcagtgtgcgtgcgtggagagagagctggacaaggtcctgcagaagttcctgacctacgggcagcactgtgagcggagcctggaggagctgctgcactacgtgggccagctgcgggctgagctggccagcgcagccctccaggggacccctctctcagccaccctctctctggtgatgtcacagtgctgccggaagatcaaagatacggtgcagaaactggcttcggaccataaggacattcacagcagtgtatcccgagtgggcaaagccattgacaggaacttcgactctgagatctgtggtgttgtgtcagatgcggtgtgggacgcgcgggaacagcagcagcagatcctgcagatggccatcgtggaacacctgtatcagcaggcatgctcagcgtggccgaggagctgtgccaggaatcaacgctgaatgtggacttggatttcaagcagcctttcctagagttgaatcgaatcctggaagccctgcacgaacaagacctgggtcctgcgttggagtaaggaggcccttgggtgggccagcagcactctgcttcggcctctcagggcacagggcttgactgtggtcttcatttcacccagatgtacttgacttgcctgcagccctgtctcaagagcctcacacaggcttttggggccctcctctcaggtgctggctctcaggtcctagcccccaccagctctacactaaactgggcccctttcttcccagatgggccgtcttcccacaggcagcgcctgctggaactcaacagctccctggagttcaagctgcaccgactgcacttcatccgcctcttggcaggaggccccgcgaagcagctggaggccctcagctatgctcggcacttccagccctttgctcggctgcaccagcgggagatccaggtgatgatgggcagcctggtgtacctgcggctgggcttggagaagtcaccctactgccacctgctggacagcagccactgagcagagatctgtgagacctttacccgggacgcctgttccctgctggggctttctgtggagtccccccttagcgtcagc

SEQ ID NO: 440373 - DNA, 1156 bp, Homo Sapiens
  misc_feature (224)..(224): n is a, c, g, or t
ggtttaaaaactccccaccccctttgatgtgtctatagaagaccgaggtgaaggggcccaccaaagccagggagggcaaagatggcgcttaaagggggggacttcccacagaaaagccccccagccagggaaccaggcgtcccggggtaaaggtcttcacagatcttttgccccagtggctgctttccagcagttggcattaggggtgacttttccaaagcccncagccgcaggtacaccaggctggcccatcatcacttggattttcccgctggtgcagccgagcaaagggctggaagtgccgagcatagctgagggcctccagctgcttcgcggggcctcctgccaagaggcggatgaagtgcagtcggtgcagcttgaactccagggagctgttgagttccagcaggcgctgcctgtgggagacggcccattccaacgcaggacccaggtcttgttcgtgcagggcttccaggattcgattcaactctaggaaaggctgcttgaaatccaagtccacattcagcgttgattcctggcacagctcctcggccacgctgagcatgccctgctgatacaggtgttccacgatggccatctgcaggatctgctgctgctgttcccgcgcgtcccacaccgcatctgacacaacaccacagatctcagagtcgaagttcctgtcaatggctttgcccactcgggatacactgctgtgaatgtccttatggtccgaagccagtttctgcaccgtatctttgatcttccggcagcactgtgacatcaccagagagagggtggctgagagaggggtcccctggagggctgcgctggccagctcagcccgcagctggcccacgtagtgcagcagctcctccaggctccgctcacagtgctgcccgtaggtcaggaacttctgcaggaccttgtccagctctctctccacgcacgcacactgctccatggtggcctcagcctgctcacttccgacccagcgcggtcgcacgaggactggacgtttgagtccgagcaactccccccggctgaggcggctcttcgggggctgggccgggacctatgagtctgggactccagctcccggcccagggccgacaactcgccccgcagccccggccccgatcccgggaattccggaccc

SEQ ID NO: 440374 - DNA, 911 bp, Homo Sapiens
gggctttcttcttcccagccccgcccaagttcctccagatatcctcttcccatgcagacctagaggaggaagctgccctagcgccttctgaagaggcttctctccttccccagctctgcggaaagaccacagctggggaaccttagccatcccaagctgcagaatgagaaaggcaccttgccttgccgtgggctctgaaggaaagctctagcggtcctttggagaagcagagagtttacttgtttggagactccaagccctgactcaggcctccgccagagggcgcagagcaaggggctcgggaaagttctacaggcgctttggataacccggctggccaattttccaggaagtgggggcagactgttgtcccgacggcaccgagtcttcctgtacacctcgcctccacttgctactcaagctggaacaactagggctttagatttctaggcgtcctatctgacccctaggagtagcccttaaattccccagcggtggaggaagtgggcgctcacatggggagtccgctccagccccggggtcttacccgcgttgttgataagcagcagtcgctgcagccccttgggccgggggagctcgcgcagggcgccgagcagctgctgcaagccggcctcggcgcccaggtcggcgggcacccgcaccacgcgcaggccagaccgctcggcgcccagctcggcctccagctggcgcagtgcctcgtcgttgcgggcgctaaggacaagcacggagccgggcgacagcagcgaggccaggagcggggccagcgtccggccgaagccgcgggaggccccggtcagcaagcacacagcacgccccagcccgccctccatgctcctgttctccgccggcggcgctggcacccgagaccaggcaggaggcggtgcggccgc

SEQ ID NO: 440375 - DNA, 1458 bp, Homo Sapiens
gaaaaaaggacaatctgtattttatttgtatctgcctttggcgtgtatacagacacccaggagccccttctcccagcctgggggaggggtggtagattctgaaggaaggagacatcagagtgaggacacaaagttcaacagaaggtcctgctaccctcagcaaggggcatctatgtgggctgggacatgtaccgtctgcccttcctcccatccaggccatctgcgaatctacatgggtcctcctattcgacaccagatcactctttcctctacccacaggcttgctatgagcaagagacacaacctcctctcttctgtgttccagcttcttttcctgttcttcccaccccttaagttctattcctggggatagagacaccaatacccataacctctctcctaagcctccttataacccagggtgcacagcacagactcctgacaactggtaaggccaatgacctgggagctcacagctggctgtgcctgagggcagggcagcaggcatgaatgcttctatgtgtaaggcaggactgcccctatggcagggtgtggggagccacagggctctggggtatgtctaaaagtgggggcaaaaaggttcaggaagccaaaaacatgggcttatttgtcatagaagtccacgtgggctccagacttgaactcgtccttttccagtaagctcagcagtttctgggctgacaccttgcaatccaccagcttcccctttgccttcagctcctgcagcccttttcgcatgtctgggtccacggaggtctcccgggccaactgctgcatgtctgtgtccagaggacctggggcatagttcagcaccctcacattaggttcctccagcgccaggacctggaacagcatatcacgagcagcctttcctgcacagtacagcgcccagcctttgaaaggttgcagggcacagagggacgagatgttaaccacggttctgttgaggccaggactgtccgggaaggccttcaggacgctggaagtcaggcagagcatggaggtcaagttcagtgcccagtagttgttcacttgagtggagtcactcaggtccacgaagcctttggacacatccccaagagagcccgcgttgttgataagcagcagtcgctgcagccccttgggccgggggagctcgcgcagggcgccgagcagctgctgcaagccggcctcggcgcccaggtcggcgggcacccgcaccacgcgcaggccagaccgctcggcgcccagctcggcctccagctggcgcagtgcctcgtcgttgcgggcgctaaggacaagcacggagccgggcgacagcagcgaggccaggagcggggccagcgtccggccgaagccgcgggaggccccggtcagcaagcacacagcacgccccagcccgccctccatgctcctgttctccctcgtgttgaattcgccacccaggcctcgctacct

SEQ ID NO: 440376 - DNA, 1048 bp, Homo Sapiens
tattgctcggggccgcggtcggaataaagcagggggtgcggcccaccgcttcgccggtgggggcccggtccacccacaaacatcgaggggcttccgtaagcgtagagaaaagcgcgtcccccgcattcagcaagggggggcgggaagcccccggggtcttctaaattaaatcttaaaaggtgggcgcaggaaaggtttcaggaaacccaagacccggggggttcattcgccatagaaattccgcgtggggttccagacctgaaactcgtccttttgccagtaagctcaggcattttctggggggacaccctgcaatcccccagcttcccctttgccttcagctctggcagcccttttcgcatgtctgggtccacggaaggtctgccggggccaacctgctgcatgtctgtgtccagaggacctggggcatagttcagcaccctcacattaggttcctccagcgccaggacctggaacagcatatcacgagcagcctttcctgcacagtacagcgcccagcctttgaaaggttgcagggcacagagggacgagatgttaaccacggttctgttgaggccaggactgtccgggaaggccttcaggacgctggaagtcaggcagagcatggaggtcaagttcagtgcccagtagttgttcacttgagtggagtcactcaggtccacgaagcctttggacacatccccaagagagcccgcgttgttgataagcagcagtcgctgcagccccttgggccgggggagctcgcgcagggcgccgagcagctgctgcaagccggcctcggcgcccaggtcggcgggcacccgcaccacgcgcaggccagaccgctcggcgcccagctcggcctccagctggcgcagtgcctcgtcgttgcgggcgctaaggacaagcacggagccgggcgacagcagcgaggccaggagcggggccagcgtccggccgaagccgcgggaggccccggtcagcaagcacacagcacgccccagcccgccctcccctcgtgccgaattcgccacccaggcctcgctac

SEQ ID NO: 440377 - DNA, 592 bp, Homo Sapiens
  misc_feature (191)..(191): n is a, c, g, or t
  misc_feature (573)..(573): n is a, c, g, or t
cccccccaaagcaaaatgccacttgtttcgaaaagggggcccaaaaatgttgaaggcggtcaagggtacctccgaccccctgttccgaagcacagcttagtggttcaaaagttccaccgctccgggggcttacccttgggaccggcgccacccgcctggccaggggcccgcaagccccgattcttgccccncccgttgctgcccggtccagccatcccgggtccacgccggatcggccgcgctgtaagcccaacttgcggccaccgccccgggccggctggagaaaccacatttcccggcgagccctgcgctgacggtgcggcacgtccggccagcgccgcacttgcgccctccagctcttcccgacaagcctagcgcttgccgagacaccgcgggcgagcgcaggatgcggttgtcgaccgcgcggcgagcgtgggaccttctggggagcgtttcaggctatgtactggcgctgcgttgtcccttccagtgaatgcagtgtgtcgtccctgccccgtgcgactgctcttcccgcgcctcccaggcccacgcagcccgaagacccgcggccgnctcgcagttcccgcatccc

SEQ ID NO: 440378 - DNA, 1631 bp, Homo Sapiens
  misc_feature (1548)..(1548): n is a, c, g, or t
  misc_feature (1582)..(1582): n is a, c, g, or t
gcctttctcctttccttcccggatcccagacctgcctcgatcccaccacctgctgaggagaaaaattcttcaagactcagagcacacagccagcaccagaggccccatgaccctggacagaccaggggagggggccaccatgctgaagacattcactgttttgctcttttgcattcggatgagtctgggtatgacatcgatagtgatggaccctcaaccggagttgtggatagagtccaactacccccaggccccttgggagaacatcacgctttggtgccgaagcccctctcggatatcaagcaagttcctgctgctgaaggataagacacagatgacctggatccgcccttcccacaagaccttccaagtttcattccttataggtgcccttactgagtccaatgcaggtctttaccggtgctgctactggaaggagacaggctggtcaaagcccagtaaagttctagagttggaggcaccaggccaactggccaagcccatcttctggattcaggctgagacccccgctcttcctgggtgtaatgttaacatcctctgccatggctggctgcaggatttggtattcatgctgtttaaagagggatatgcagagcctgtggattaccaagtcccaactgggacaatggccatattctccattgacaacctgacacctgaggatgaagggggtttacatctgccgcactcatatccagatgctccccaccctgtggtcagagcccagcaaccccctgaagctggttgtagcaggactctaccccaaaccaactttgacagcccatcctgggcccatcatggcacctgggagaaagcctgaatctcaggtgccaagggccaatctatggaatgacctttgctctaatgagggttgaagacttggagaagtccttttaccacaagaagacaataaaaaatgaggcaaatttcttcttccagtctttgaagatccaagatactggacattacctctgtttttactatgacgcatcatatagaggttcactccttagtgatgtcctgaaaatctgggtaactgacactttccccaagacctggctacttgctcggcccagtgctgtggtccaaatgggtcagaatgtgagcctacggtgtcgaggaccagtggatggagtgggtcttgcactctataagaaaggagaagacaaaccacttcaatttttggatgccaccagcatcgatgacaacacatcattcttcctcaacaatgtaacctacagtgatactggcatctatagctgccactatcttctcacctggaagacctccattaggatgccatcacacaacactgtggagcttatggttgtagataagccccccaaaccctccctgtcagcttggccaagcactgtgttcaagctaggaaaggccatcacccttcagtgccgagtatctcatccagtactggaattttctctggaatgggaagaaagagaaacattccaaaaattctcagtaaacggagacttcatcatcagtaatgttgacgggaaaagcacaggnacctacagttgcagctatcgcgtagagacacatnctaacatctggtcacatcgcagtgagcccctgaagctgatggggccagc

SEQ ID NO: 440379 - DNA, 1207 bp, Homo Sapiens
  misc_feature (223)..(231): n is a, c, g, or t
  misc_feature (1158)..(1158): n is a, c, g, or t
ggaggggcaaacagggggaaaacgggatgggttattgagaatgggtatgttttgagcagtcgaatgacgaccggtacgtggtcccgtgcaggagcggggagtaaaataagtgtgagggggtgtggcacagttgggcgagtggcgattctgctcggttatggattcaaaggagatggtgacgggagcattctcggttggccgtgcaaaagggacggggaaaaannnnnnnnnctggtgccatcgccctatttcaccgccccgggccggggggtaccccttgtaaaggaaagtaatgccacatgcataagggctttttcaaagatgattcggaaaaagatgctgctggtgtacgtccaccacagcgacccctctatccgaaccttctgctttttaatgtcctctatgtctttgaaatcattcctcttctctcctcgcctgaacttgcgagtggtttcgtgcctgtagtaggccacatgcatggccaccagcagcgctggggtggagacgaagatcagctggagggcccacagccggatgtgggacaccgggaaaaagtggtcatagcacacatttttgcatcccggttgcagtgtgttgcagacgaagtcctcttgctcgtcaccccacacttcctgggcagccaccacgaggatcatgactcggaaaataaagatgactgtgatccacaccttcccgatgctggtggagtgtttgttgacacccccgatgaaagtgtgcagcgtcccccaatccattgcgctggtttatccctgagtcctgtttccaacgactgccagtgtttcagacccaaagaatgagggcaagatccctctgcgagggtttcagacctccttctcctaccccactggagtgcctagaagccaatggtgcacagtgatgatacgaatgtcaatctttgctcggtcagtgaggatgtcgccctgacccttcctgctccccaggaagggaggtcagccccgtttgcaaaacacaggatgcccgtgacaccggagacaggtcttcttcaccgacaggaagtgccttctggtgcctgcacgttttaactgctctgcggccggcggccctggcgcgggctctgcgcggggcggcgcccttcgctccggctgggcaggcaggtcgggctcgggcgccgccggntgtcgggctctcgtcgatcccgggaattccggaccggtaccagcctgct

SEQ ID NO: 440380 - DNA, 1232 bp, Homo Sapiens
  misc_feature (254)..(263): n is a, c, g, or t
  misc_feature (343)..(353): n is a, c, g, or t
  misc_feature (491)..(491): n is a, c, g, or t
aaggcgggtgtggcttgtcaaatctagttggggcgcgcgatatgtggcccccgtcgcaggggcgcgcaaagagcggtacacctccggagatacggggggcggataagcgggagatacgagtggaaagttatataatgaggggcggtggagatagacaaaaagagtcagcgccatatatgtgggcgcggcgttcccaggttcccactatttctaccgccccccgcgggcgccggtttggtacaccgatgtttatnnnnnnnnnnaaaaccgcggggctattaagaggtgtggttaaagaggagggatttagggggaaaaagaagatttccgggggggtgcgggnnnnnnnnnnnaagggacccgcctttttttccggaaccctttgggcttttttaaaggtcccttcaaaggtccttggaaaagccattgctttatttttcttccttcgcccggaaccttgcggagggggtttccgtgcccgggtagtaggncccacatggcatggccccccagcaggcgcttgggtgggagacgaaagatcaggtgggggggcccccaggcgggatgtgggaccccgggaaaaaagtggtcatagccacacatttttgcatcccgggttgcagtgtgttgcagacgaagtcctcttgctcgtcaccccacacttcctgggcagccaccacgaggatcatgactcggaaaataaagatgactgtgatccacaccttcccgatgctggtggagtgtttgttgacacccccgatgaaagtgtgcagcgtcccccaatccattgcgctggtttatccctgagtcctgtttccaacgactgccagtgtttcagacccaaagaatgagggcaagatccctctgcgagggtttcagacctccttctcctaccccactggagtgcctagaagccaatggtgcacagtgatgatacgaatgtcaatctttgctcggtcagtgaggatgtcgccctgacccttcctgctccccaggaagggaggtcagccccgtttgcaaaacacaggatgcccgtgacaccggagacaggtcttcttcaccgacaggaagtgccttctggtgcctgcacgttttaactgctctgcggccggcggccctggcgcgggctctgcgcggggcggcgcccttcgctccggctgggcaggcaggtcgggctcgggcgccgccggctgtcgggctctcgtcctcgtgccgaattcgccacccaggcc

SEQ ID NO: 440381 - DNA, 1045 bp, Homo Sapiens
  misc_feature (961)..(961): n is a, c, g, or t
  misc_feature (963)..(963): n is a, c, g, or t
  misc_feature (971)..(971): n is a, c, g, or t
  misc_feature (974)..(975): n is a, c, g, or t
  misc_feature (990)..(990): n is a, c, g, or t
  misc_feature (993)..(993): n is a, c, g, or t
  misc_feature (997)..(997): n is a, c, g, or t
  misc_feature (1001)..(1001): n is a, c, g, or t
  misc_feature (1005)..(1005): n is a, c, g, or t
  misc_feature (1015)..(1016): n is a, c, g, or t
  misc_feature (1023)..(1023): n is a, c, g, or t
  misc_feature (1027)..(1027): n is a, c, g, or t
  misc_feature (1031)..(1031): n is a, c, g, or t
  misc_feature (1033)..(1033): n is a, c, g, or t
  misc_feature (1035)..(1035): n is a, c, g, or t
  misc_feature (1041)..(1041): n is a, c, g, or t
tctggtacggtcggaagctttggatatgtcgaccagcgtcgctcggagtcggtgggtgcagatggcggcggcagttgtggtggcggagggggacagcgactcccggcccggacaggagttgttagtggcctggaacaccgtgagcaccggcctggtgccgccggctgcgctggggctggtgtcttcccggaccagcggtgcagtcccgccaaaggaagaggagctccgggcggcggtggaggttctgaggggccacgggctacactcggtcctggaggagtggttcgtggaggtgctgcagaacgatctgcaggccaacatctcccctgagttctggaatgccatctcccaatgcgagaactctgcggatgagccccagtgccttttgctactccttgacgcttttggcctgctggagagccgcctggatccctacctgcgtagcctagagctgctggagaaatggactcgcctgggcttgctgatgggcactggtgctcaggggctgcgagaagaagtccacactatgttgcgcggagtcttgttctttagcacccccagaaccttccaagagatgatccagcgtctgtatgggtgcttcttgagagtctatatgcagagtaagaggaagggggaagggggcacagacccggaactggaaggggagctggacagccggtatgcccgtcgccggtactaccggctcctgcagagcccgctgtgtgcagggtgcagcagtgacaagcaacagtgctggtgtcgccaggctctggagcagttccatcagctcagccaggtcttacacaggctcagtctgctggagcgggtcagtgccgaggctgtgaccaccaccctgcaccaggtgacccgggagaggatggaggaccgttgccggggcgagtacgagcgctccttcctgcgtgagttccacaagtggatcgagcgggtggtcggtggctcngnaagtgttnctnnagacggcccccaagnccncatntccnaggncggaaaaccnngggcgangggngccncngnaaaggntttt

SEQ ID NO: 440382 - DNA, 1520 bp, Homo Sapiens
  misc_feature (1234)..(1261): n is a, c, g, or t
  misc_feature (1391)..(1431): n is a, c, g, or t
  misc_feature (1440)..(1440): n is a, c, g, or t
aagcacctgggtccgcttcccaccaataaaaacgccactccagcaaggccacaggctgtcatattgctttggtaaaaaagacttagcccatgtccaggcctcagcaatacaaaaagttcatcagtatattgctaatagcaatgattaataatacattacaggctcaaccctgatcataccatgcatcttcttccagttattttgagtacattttcattggatgctcacaattgctctctattgtaacagcttttctcctggtcatactgtgagattatacagggagaaatgcccacttctgatgttgtttttcctgagttctaaagaaggcgttccctttcctcccatctcctttcctttttctctgccttctctctctcataggctgccctgcccttttcttccttcgctgtctgagctttcttgaagggaaccaagggtcgtagatcccccagggctgggcccttctgaaaggctccatggtctctggagagcagtcaggtgccagactgaacccaaccgggcccagtgacacaacttcccacttaggcaactacacagcccccagatcccattcctggcagcttcaaaaccctgggctccgccacaaccaggcacaactgcctccctccaggtttccacttgggtgaatgaataggcttgaaggcgactccagatgcaggaggcgcgtcgcggagaaacgtgtcatttaggagaaagtttgtttcctacagagactgcagttggcagctgcagccccagtcggttgcgagaaaagctccccacctggggaagcgaggccgctcccgtgtgcgctcggcggggaggacgcggtggcggcgggactcgaactcggtcgtcgaagggcgccccgcagggtcccgtctgtagcccggacggcgagcccaggttggagtgggagggagccggcgtgcacagctgtctttggtcgggctcaggcttccgctccctgcctgctcccctttccagcctcccgccccagaaacgatctcgagcgttgccagtttgattccagagccccactcgggtgggttcttttgtttctttgttttaatgacagttcccagcccttcagcatgtcatgcgcaattaattccctggctctcacgaaggcagctggggtgaaatttcttctgcatcatccttttggggatgtttatgatgtgacgtcagtcggattgatttttctctcttgaatgaaggatgggagggnnnnnnnnnnnnnnnnnnnnnnnnnnnncgcacagatgtgcacggaggccacagacactgacatttggaattccttcagggtaaaaggacaccggaatgggagcttagaagtgtgttgctaagatttccggctgcacggaattattaagtttttcttnnnnnnnnnnnnnnnnnnnnnnnnnnnnnnnnnnnnnnnnnccccctccncagcgagccacttaggtgctgctttcacgccagagtcccctgttaaggtggcagcccttgataactaatctcgggcatcc

SEQ ID NO: 440383 - DNA, 1921 bp, Homo Sapiens
  misc_feature (85)..(117): n is a, c, g, or t
  misc_feature (122)..(257): n is a, c, g, or t
caggctggagtagtacaatggcacaacgtcagcccaccgcaacctccgccccgtgggctcaagcgattctcctgcctcagcctcnnnnnnnnnnnnnnnnnnnnnnnnnnnnnnnnncccannnnnnnnnnnnnnnnnnnnnnnnnnnnnnnnnnnnnnnnnnnnnnnnnnnnnnnnnnnnnnnnnnnnnnnnnnnnnnnnnnnnnnnnnnnnnnnnnnnnnnnnnnnnnnnnnnnnnnnnnnnnnnnnnnnnnnnnagccaccgcacctggccacaaattacttcttcaagtgcattcaaagagggtctggctttaaaaaaatataacttaaaatcaagatttttgtgttttcacttccggatataagctacagaatataccatacttaaccaaactatttgattcatgggttaaatcctatctgttgataaaatatgtaaaatacaacaaagatttgtaagtacttactgtaagcattttattagtaaacctctaaaattcatcacacttccaacacacaagaattactacattgaagcagaaattagcatatttgttatacctatctctcttctactgtatggtattctgaatgttcaaaagaactagaaatatgagtaagaatttaggtctaaaggatatctgaaagtttcatttataacattcaacactgaacagccttattaatttagcaatacaagtggatgttacttagtgaagatgacatcaggcatgaggataaataaaagaaataaagccaagcataaataacctatttttacttaagccaagtaaatgtatatagaaagtttcaacttgtaggtttaagaaaatggcttttctttcttttaacagaaaggtccacacttaccactgtaatggtagacgtttgaggtattctggtccagaactgcagacagagcatataaacgtataaaatctgtctccaaatagcattggcttttgaaggcattgcacacaagcctcatgaaaccactgcttacatttgcagcactgtagcatcttcaaataccagtctccagggcctccacaatagcagtaacactgctggacattggttttatgacctgcatcccattcaaggtctgccacactatagggtaatgtctgcttcatgacttgcaatgctttggcatttggtcctttcttaagtgcaccacccctctttgttgttgttgcaaaaacacactgccgacagagccatttttcatctgaatcaatcacactggaatcaatatgaggtgtgtgacacaactgatgatatccttggccacacttgtcacatataaccatttcattgggagcttctgaatactcttcttgacatattgtacagaccatttccccacttccagtggctcctgtttgaatgtccttccagagaacccaggatttagaactgtcttcaaatatgatgaagcagctctgtttcaatatgtttatctttttgatagtgccaagataaaacaagccatctgaccatctagctaggacatcctgaccctcttcaaatttacatgctggctttttggctttatgtccatcctgtaaagacagcttggtcaaggatgttggggtcttttggtttcgacgtaaaggagaccgcttgtggaccagtgaattacctgcccctgtagagtctctcattcggtcacttcagtggtgccaaccgcttcatacaggaaaaaacaaccaatccgtccccgtgggcgcttcccctgcgagtccgagcacttactgggcacccgccccaccgggtacccggcacatatgcacgcacaaaccgaggtccttggagacaagggttgggggtagaatgagcgttcttacaccggcctcaaacacagcccacttcaatacagcccctcgccattttggatcccgggaattccggaccg

SEQ ID NO: 440384 - DNA, 2233 bp, Homo Sapiens
gctagcagggtggttttctacctttaattggggatacaaaaggcacctctcccagtacaagaggatcaaccaagaggtgagccccagtgctgtggtgcccggccagaaggaacagaggaaggatggagggcaaggcagcggaggggcagtggggccccagcatcccctgaagcctcacctgcagcctggggctgatgagatctcgcccactgcgcgcagagttgcagcttcgtacctgggccgccgcagctcctcagggggcctccacacctccacaccctaccctcagtggccagccaaagccatggggccccatgcagcagagcagggaagggacaagaggctcggcagaatttccactgtggccagcctccagccaggcctcgactggcagtgtgggctctgaagggctccttggggcatgggcccggagcagggtatcactcagtgaaggagagtcacactgggtcaagcagccagccagccagccagcctgtcctggggcctccacttctcagcaaagtctcatggtcagctggggtgggaaaggaggcagagcagccagatcccactgcagcgcagacctgtcccccagttcatcccactgcctccacacccccagccacagctggggcagctccgtcttcaaagaggaggaaaagggggtaacaagccacccccaaagcagccttaacaccagaggagggagggaggtcccagcctaagggtgtgagagcagtggggacctgggctgcagggtgccagaccccacactcataaggcaaacagcatgtcatcatctttctcctgggtcttcttccggggcgctgggccagatgggggacccgggggcccctcagctgaggggctggagaggttgggcaatcggtccgcggctttggcccgttcttccaggaatttgtcaaatttacttcgctggtgacccccttaggctcttccgcatcattacccacgtcagtggacagccactgctcgatgtcctccatgaggcaggcctgggtgactgggatcgcgccagtgctctgctgccgggcgtccagggctccagccaggccgtctgttgcttggggggcttcgtattttacctctttccgttggtcagccagtgagctgccccgtgtcagcgcaaacatgtcaaactcatcttccagtcgaccagaggcctccagagactgcaggccagctctcacactgctggagcccaggttcattcctgccagctgggatgagaggttgccggtggctgctgggtcagggcccatgtcgatcaggtcagctgccggctcggcctcacttggggccttggtggtctggcctgttcggaaccgttcaaaccgttcatggcgcaggaacacattgttgagattgtcattgacgatgagcagctcctctgtcagctgctcattggcgatctgagggatgagctccaggacccgctgctgcatggctcggcacgtgcggttgagctcctgcagcagctccaggtctgcgggctcggcctgggtgggcaccagctccgtcagcatctccgacatcaccctcacgttcccactcaccatctccagctcactgcgcagcttcccaatctgttccggggttggtgctatgggcgtgtcaccggagagtatgggcggggcgggcagaggggcagcatgctggccagagtcctcttgctggctggagtcagtgcccacagaatcctgtcctgattgtgtctctgagttgaacacggtcctctggggtgtgtggatgggtgacagcatgtccaggtcagtcatggggaactccaggcctttcctccgcaggtcctcatagatggtgaccacacctgtcagatcgggcgagctgcggaacgcgtcagcccaggactggactgaggttgagcactttgtcatgcacgatggtgggtgggttgttcttgggcaggatggtcctcaccagcacacctcctccacgaagtccttggcgtggccaccagcacgtggaaccggtgcccgcagttcttgacacaggtttctaagacccttcctccgtctcgttgatgatgtcgcagatctccatgttgagggcccagtcctcgctctgcagggagccatgctgtggctttctcgatgcgctgtcccactggagagctgaacgggttccccaggagaaagtccattgctgctaccgcgcgctgccaccaaccccgggaagtcagctgacagcaacc

SEQ ID NO: 440385 - DNA, 859 bp, Homo Sapiens
  misc_feature (767)..(803): n is a, c, g, or t
tttccccaatctgttccgtgtttgtgcctatggcgtgtcaccggacagtatggacgggccggccagacgggccagccatgctggccagagtcctcttgctggctggagtcagtgcccacagtctcctgtcctgattgtgtctctgagttgaacacggtcctctggtgttctgtggatgggtgacagcatgtccaggtcagtcatggggaactccaggcctttcctcctgcaggtcctcatagatggtgaccacacctgtcagatcgggcgagctgcggaacgcgtcagcccaggactggatgaggttgagcactttgtcatgcacgatggtgggtgggttgttcttgggcaggatggtcctcaccagcacactctccacgaagtcctggctggccactagcacgtggaagtggtgcccgcagttcttgacacaggtttctaagactgtgagagccagcatcacctcgtggaagttcttattccccacgattctcttctttactgctcggagggcatctttgggaccttcctccgtctcgttgatgatgtcgcagatctccatgttgagggcccagtcctcgctctgcagggagccatctgtggctttctcgatgcgctgtcccactggagagctgaacgggttccccaggagaaagtccattgctgctaccgccgctgccaccaaccccgggaatcagctgacagcacccgccagcgccaccgcccccgctctcgacgaattcgagctcggccgatttggcctgatnnnnnnnnnnnnnnnnnnnnnnnnnnnnnnnnnnnnncgccgccaccgcggtaactccgagtcgcccatagtgatcgtgtcagtccccctgcc

SEQ ID NO: 440386 - DNA, 1222 bp, Homo Sapiens
  misc_feature (39)..(39): n is a, c, g, or t
  misc_feature (1135)..(1167): n is a, c, g, or t
caatgctgaaacccaagtttcaatccctgccaactgggnaataaaaagttccggtggctgctggttcaagggccccatgtcgaatcaagttcaagcctgcggctcggccctcacttggggcccttggtggtctggcctgttcggaaccgttcaaaccgttcatggcgcaggaacacattgttgagattgtcattgacgatgagcagctcctctgtcagctgctcattggcgatctgagggatgagctccaggacccgctgctgcatggctcggcacgtgcggttgagctcctgcagcagctccaggtctgcgggctcggcctgggtgggcaccagctccgtcagcatctccgacatcaccctcacgttcccactcaccatctccagctcactgcgcagcttcccaatctgttccggggttggtgctatgggcgtgtcaccggagagtatgggcggggcgggcagaggggcagcatgctggccagagtcctcttgctggctggagtcagtgcccacagaatcctgtcctgattgtgtctctgagttgaacacggtcctctggggtgtgtggatgggtgacagcatgtccaggtcagtcatggggaactccaggcctttcctccgcaggtcctcatagatggtgaccacacctgtcagatcgggcgagctgcggaacgcgtcagcccaggactggatgaggttgagcactttgtcatgcacgatggtgggtgggttgttcttgggcaggatggtcctcaccagcacactctccacgaagtcctggctggccaccagcacgtggaagcggtgcccgcagttcttgacacaggtttctaagactgtgagagccagcatcacctcgtggaagttcttattccccacgattctcttctttactgctcggagggcatctttgggaccttcctccgtctcgttgatgatgtcgcagatctccatgttgagggcccagtcctcgctctgcagggagccatctgtggctttctcgatgcgctgtcccactggagagctgaacgggttccccaggagaaagtccattgctgctaccgccgctgccaccaaccccgggaatcagctccgctctcgacgaattcgagctcggccgatttggcctgatnnnnnnnnnnnnnnnnnnnnnnnnnnnnnnnnnatgcgccgccaccgcgtcagctccagtccccatatagtcatctttccttgggtgt

SEQ ID NO: 440387 - DNA, 395 bp, Homo Sapiens
  misc_feature (317)..(317): n is a, c, g, or t
  misc_feature (349)..(349): n is a, c, g, or t
  misc_feature (365)..(365): n is a, c, g, or t
gtggttttctacctttaattggggatacaaaaggcacctctcccagtacaagaggatcaaccaagaggtgagccccagtgctgtggtgcccggccagaaggaacagaggaaggatggagggcaaggcagcggaggggcagtggggcccaggcatcccctgaagcctcacctgcagcctggggctgactgagatctcgcccactgcgcgcagagttgcagcttcgtacctggggccgccgcagcttcctcagggggcctccacacctccacaccctaccctcagtgggccagccaaagccatgggggccccatgcagncagagcaggggaaggggacaagaggtttcggncagaattttccatttntgggccagctttccagccagggtttcgatt

SEQ ID NO: 440388 - DNA, 1453 bp, Homo Sapiens
  misc_feature (645)..(702): n is a, c, g, or t
ttggccttctgggtaaattggtacattaaaggcgcacatcagttttttcgacatccttctctctaagaggtcttgcattctcccccgaaatcctatgggcccacgtctatgtgcctttcgtgggccgtagccattctcccacttgattttcctctttcaagtgatttcttgtggtggcgcacaaattctttttccaaggaccccccgcctctggtacccaaggacgggtgctaattagacgctgtttgtcgtcccccctcttgtaatatacataggcgttcccccttgttgggaccctccaagaggccttggaacgcccggcctcgattgatggttcaccctgcgccaaccgccaagcggcccccggatctcccatggccatatgcagcgttcgcttgcaagacacggggccgaaaggcgggcccattgttcccaaaggggccccgtcggggtgcccgaggtcccgggcggcgaagccgttggtgtgagcggggcttcgggtccaggccctgaatggtggcactcacgtgctcgcagacagcgcagccattcctccttggggcgggagggcactgggccgagcggggcaggggcacgggctgggaccgggcttcggggcagaaggcagccgatgcgactggggcnnnnnnnnnnnnnnnnnnnnnnnnnnnnnnnnnnnnnnnnnnnnnnnnnnnnnnnnnnatgccacccccgccacgtacagccgccagctgctgctcccagctcgcgcaccaccagccgcaggtagtcgaagctggcacgcgacagggccttgacccagccctccatggcatcctgactctcagcggccagcacgtaggtgcgcgcccgggtccccgcaaagcgcacagcgaaggcgaactcctcggcggcctccaccagctccacagtgcagccctccaggatgatgacgcccacgggctcacggctggcagcgtcctcgaagtagaagagcatgttcccgcgcagcacgaaccagcgccggtggtaggccgcgttgccgcccacccttcttgtacaggaagcctgcattgtccaccggggcgtcacaggtggcgtagaaggccaggctgcgctcgttcagcttcatggtggcaatcgcggggcctggaggggagcctggggcctctcaggccaccacttgcctccctgccctctgctcagctccagcctcagctcgctcttctctggattcaaatgtcagctctgcagcatctgggctgggggaccccaggcaggctattcatctctctgggcctctgtttctgcatctcgcagcgcaggcctagggcggcgacgggacgggaggcgcgaggttgcgcggttggcccggccatggttcgggactggcccggtggcggcgacggcgcgccagccgctttgcgaccgcgtgggtcgacgatatcccgaaacttccgacctgtaccaccct

SEQ ID NO: 440389 - DNA, 1114 bp, Homo Sapiens
  misc_feature (919)..(919): n is a, c, g, or t
  misc_feature (937)..(937): n is a, c, g, or t
  misc_feature (971)..(971): n is a, c, g, or t
  misc_feature (989)..(989): n is a, c, g, or t
  misc_feature (1014)..(1014): n is a, c, g, or t
  misc_feature (1035)..(1035): n is a, c, g, or t
  misc_feature (1044)..(1044): n is a, c, g, or t
  misc_feature (1053)..(1053): n is a, c, g, or t
  misc_feature (1058)..(1059): n is a, c, g, or t
  misc_feature (1067)..(1067): n is a, c, g, or t
  misc_feature (1074)..(1074): n is a, c, g, or t
  misc_feature (1081)..(1081): n is a, c, g, or t
  misc_feature (1091)..(1091): n is a, c, g, or t
  misc_feature (1108)..(1108): n is a, c, g, or t
  misc_feature (1111)..(1111): n is a, c, g, or t
agcgggacatgagggctccgtctcccgagtgatggcagcgcgcgctgcttcgccgcctccgccgctcagccccggactccttacgtcagggtagcggggtcccccctccgcgcgggagccagcgaacagcgagagagcacagcagagcgcgccgcggtgccggggcgccctcactgcgctaggagccccactaaacccagcggagcgcgagcctggcgggaggcagcgccgcggagccagcgccggacgccgcaagcagactccccggccagcgcaagcactccctggccggcgccggaccctcggggcgccggattcgtcttgtgtgccccacgtcatgcgcgcgggcgtccgcggctctcccgaccagccccagcgcggtgggcccaggctcagaggtcccggcgcctctcgctgaagtagttgggtagccggggctgggggtcgccacgtcgggggcgcggccaggacccgcggagccggtccccgagcgcggggagcggggccgcccgcgccgccccaccattacctccccgggcggcaaggaggagctggtggcggtcgcctcccggctgtggcagcggcggcggcgtgcctgcctggcggccgtcggcgtactcttggccatggcgctcgggctgctcatcgccgtgccgctgctgctgcaggcggcgccccgaggcgccgggcactatgagatgatgggcacctgccgcatgatctgcgacccttacactgccgcgcccggcggggagcccccgggttgcaaaggcgcacaccccggtacccagcacggccgccctgtaattcatgcaggacttcagcgccaaccttcttcctcctttcatccagggacccaagggggaccgggggcgaccgggcaagccagggccgcgggggcccctggagagccgggccncctggaccaggggcctcnggagagaaggcgactcggggcggccgggctgcanggctgcactgacggcggnacggcagcgggtcggggtggtggcngcggggcgggtaggtgcgatncgaggtgantgacagtcnctganncacttcancgcccanatgcctntatgtggttnagagcccacgaggtatnagngtg

SEQ ID NO: 440390 - DNA, 617 bp, Homo Sapiens
  misc_feature (462)..(462): n is a, c, g, or t
  misc_feature (543)..(543): n is a, c, g, or t
  misc_feature (571)..(571): n is a, c, g, or t
  misc_feature (577)..(577): n is a, c, g, or t
tctagaatattgatccagatccagatttctatattaaccatcccttgtttcttctgagcttcagccagagatcactggttggttcacagaataagtagggttagtctaaaatacagacaaaaacttaaaaacaactaataaaactagaatttaatgacaagtgtgataagttttgaaactctccagtcttcatttttgttaaaaacaaatcataataggattgtttgcaaaataaactttagtcttatacttggcctgattatttgcataaagtacagcaagaataattatttttcacatatgcttttaaaattggctctgatggaattctgttccataaggaatatcagaaaagactttttaaagtcaagcccagcaatgggtttgtaccctccaatacctatgagttgggtaaattcctctcttcttgaggtcccaaggataacttgggggctcctgggncctgtttaggaaaggtgacattcctttactcatcacagggttggggagccctgttacaaggggctttgtagggccagggtntgagggccagttttctcccttttttttngggccntgcaagttccaggtttgattcccttaaagggggaggcaca

SEQ ID NO: 440391 - DNA, 178 bp, Homo Sapiens
gcatacctccgcctcctctagaatattgatccatgatccagatttcctatattaacccactcccttgtttcttctgagcttcagcctagagatcaaaatagtttctgaattctagagaaaccagcagaggaacaaatactctccatattttgttcactggagtataccttactcaatt

SEQ ID NO: 440392 - DNA, 859 bp, Homo Sapiens
ccaaaagttttcttcacattttcccaaagccctactaaggtccagagggcacaaaatatgggccaaatagttcttttatcttagacataaagatgtgttttgctgttttttagaaccatgtaggatggctaagagaaccaactttacggagcttagctgttctcaggcatctgaatgggggtgtggagaagtcctcaagttacaagaatcacagttactttttttaggatgaaaaaataaaaacattgcatttgatgacattacagtcaaaatgagctctaatacaaatgtatgtggagaggttttgaagaataaatcggatatcccaggggaggttctgctgcttgtaccgtaagatttcttaaaagtagtggatgagcttgtatactataacgttcttcatcatcgtttgtggcataaagtaattcccatgaaagattggcccactgacctctaacagcttcaggatttaactttcccacttggatcaataattcttgaaggctaagcactctcccagtgtaaattcccatattagaatcataccccagagaaaacaagtatggcttttcttgtaaaattgcttccttccacttttcatcagataccaaaccaatgtaccagtcacgttcatattcttcaaggtacttaatcagttctctaaagtcttctattggacctaaacttgctttatcaatcattagtttcagagtatacctgaatgctttcagtgctagttgaaacagttctggcttttctgtgagccagtccaaagcaacagaccaaggcaaaacaccaccgtaaactctcaatatatgaccaggaactaggagccatattgtctattccaaatgactgc

SEQ ID NO: 440393 - DNA, 411 bp, Homo Sapiens
  misc_feature (179)..(180): n is a, c, g, or t
  misc_feature (371)..(371): n is a, c, g, or t
ttattaaaagttttttaaagtttatgaattgaagtctatgaaaacaaactacttgatacaaaaacattcagatattagatgtcaaaataaatcagcacatttgaaaatactataaattatatttcaaacaaatatatacacattatgttaaccttcaacagggtcccttttcactactnntgggaccactgatatgtttatctcttaagtatgtaaaaattacataggctgttaactttgtatgggcaattcacctataacacatttaaggaaaggcattacaaaattcattatatggataattctacaaaagttttctcacatttaccaagggcctactaaaggtccgggggggcacaattattgggccnaatgggttcttttatcttggggcataaaggtgtttttggc

SEQ ID NO: 440394 - DNA, 1046 bp, Homo Sapiens
  misc_feature (149)..(149): n is a, c, g, or t
  misc_feature (898)..(898): n is a, c, g, or t
  misc_feature (943)..(943): n is a, c, g, or t
  misc_feature (947)..(947): n is a, c, g, or t
  misc_feature (985)..(985): n is a, c, g, or t
  misc_feature (987)..(987): n is a, c, g, or t
  misc_feature (998)..(999): n is a, c, g, or t
  misc_feature (1023)..(1023): n is a, c, g, or t
  misc_feature (1025)..(1025): n is a, c, g, or t
  misc_feature (1029)..(1029): n is a, c, g, or t
  misc_feature (1038)..(1039): n is a, c, g, or t
cgggatcgcgcgggtgctgggaggccttagaacgccgtggcgtgccgcagacgcgacggctgcagaacatccgccgcaccgctgggggccaacgttgtcggaccgaggagtccgaggtggcgactgagtgagatacccagctgtgcggnactaggacgcggaacatcccggaggccagcatcaacattggtggactaggaggactactggaagacagaaggccagcaagtagattgggtcggctgttttatagacctggtggttacagaccccctgtgaggggaggtcctgaggaggacaaatttgtagccagagcaggctggggccaggactcctaggttctgccccagccttaagcagctcatccatcactcccagcctccctccaatgtggggtagacacctggatctatctgccctgctctataggggatgggtctcttccaggtcacctgtgctatcaggtgagtgtgggacaaagtgcagcccaccactccccagttccagtatgcatggtcccccctgcactctgtcagcccttccctgctccaaccccaccctccctcctggcacagcccagcatggctgttatctacaggaggagagccactgtggtctgaagagatgctactgcctggagactggggtcttaacctccagcctggcactgagccacctgcaacctagcagcaggtgaccttggctcccagcctgactcagctgaacctggatcctgtgcataggcaagagctgactctgagccctggcccagccaagctgacccctacactagaccctacacaccggatggagctgatcctgagttccagcccagctgagctgactctggatcctgcgtgccagccaaagctgcccctgggattccacatgccaccangagatgaccttcaatcctggtcaactgagcttaacctggatcctngaanacagccagaggagacccagctctagcttggtgagttgncntggagctgtgnncgcgaccgagctctggatgttttntnactntcatgatannggccgcg

SEQ ID NO: 440395 - DNA, 1739 bp, Homo Sapiens
  misc_feature (1177)..(1177): n is a, c, g, or t
  misc_feature (1229)..(1229): n is a, c, g, or t
  misc_feature (1266)..(1266): n is a, c, g, or t
  misc_feature (1286)..(1286): n is a, c, g, or t
  misc_feature (1315)..(1315): n is a, c, g, or t
  misc_feature (1326)..(1326): n is a, c, g, or t
  misc_feature (1340)..(1340): n is a, c, g, or t
  misc_feature (1348)..(1348): n is a, c, g, or t
  misc_feature (1352)..(1353): n is a, c, g, or t
  misc_feature (1359)..(1359): n is a, c, g, or t
  misc_feature (1362)..(1379): n is a, c, g, or t
  misc_feature (1386)..(1387): n is a, c, g, or t
  misc_feature (1391)..(1391): n is a, c, g, or t
  misc_feature (1412)..(1412): n is a, c, g, or t
  misc_feature (1421)..(1421): n is a, c, g, or t
  misc_feature (1454)..(1454): n is a, c, g, or t
  misc_feature (1493)..(1503): n is a, c, g, or t
  misc_feature (1533)..(1534): n is a, c, g, or t
  misc_feature (1540)..(1540): n is a, c, g, or t
  misc_feature (1615)..(1616): n is a, c, g, or t
  misc_feature (1620)..(1620): n is a, c, g, or t
  misc_feature (1622)..(1622): n is a, c, g, or t
  misc_feature (1632)..(1632): n is a, c, g, or t
  misc_feature (1647)..(1647): n is a, c, g, or t
  misc_feature (1678)..(1678): n is a, c, g, or t
  misc_feature (1681)..(1681): n is a, c, g, or t
  misc_feature (1683)..(1683): n is a, c, g, or t
  misc_feature (1686)..(1686): n is a, c, g, or t
  misc_feature (1695)..(1695): n is a, c, g, or t
  misc_feature (1703)..(1703): n is a, c, g, or t
  misc_feature (1712)..(1714): n is a, c, g, or t
  misc_feature (1720)..(1721): n is a, c, g, or t
  misc_feature (1726)..(1726): n is a, c, g, or t
  misc_feature (1733)..(1733): n is a, c, g, or t
ttctaagcggcgacgcgcgggtgctgggaggccttagaacgccgtggcgtgccgcaggacgcgacggctgcagaacatccgccgcaccgctgggggccaacgttgtcggaccgaggagtccgaggtggcgactgagtgagatacccagctgtgcggagctaggacgcggaacatcccggaggccagcatcaacatgtttccatccttggggaatgaccacgcaactgggcccagccctggtgctgggggtggccctgtgcctgggttgtggccagcccctaccacaggtccctgaacgccccttctctgtgctgtggaatgtaccctcagcacactgtgaggcccgctttggtgtgcacctgccactcaatgctctgggcatcatagccaaccgtggccagcattttcacggtcagaacatgaccattttctacaagaaccaactcggcctctatccctactttggacccaggggcacagctcacaatgggggcatcccccaggctttgccccttgaccgccacctggcactggctgcctaccagatccaccacagcctgagacctggctttgctggcccagcagtgctggattgggaggagtggtgtccactctgggctgggaactggggccgccgccgagcttatcaggcagcctcttgggcttgggcacagcaggtattccctgacctggaccctcaggagcagctctacaaggcctatactggctttgagcaggcggcccgtgcactgatggaggatacgctgcgggtggcccaggcactacggccccatggactctggggcttctatcactacccagcctgtggcaatggctggcatagtatggcttccaactataccggccgttgccatgcagccacccttgcccgcaacactcaactgcattggctctgggccgcctccagtgccctcttccccagcatctacctcccacccaggctgccacctgcccaccaccaggccttttgtccgacatcgcctggaggaggccttccgtgtggcccttgttgggcaccgacatcccctgcctgtcctggcctatgtccgcctcacacaccggagatctgggaggttcctgtcccaggaggagtgctggcatctccatgactacctggtggacaccttgggcccctatgtgatcaatgtgaccaggncagcgatgtccttcagtcaccagcggtgccatgtccacgggcgctgtgcccngcgagacccagaacagaaggaaacctatctacacctntggccagacggcaaccaagnagataggaagccccccagctgccactgtnactggggctgngctggccccacccnccaggagnccanncccggnccnnnnnnnnnnnnnnnnnnccagacnncccnccactgcctcccccttccccngctgccacnttaccagaccaggaactactctgtcccaccccngccctattcagttaacagtcaacccccccaagcacacannnnnnnnnnnttagaatccctgaggggtagaaggggccannaaaaangcttataaaaccagaggccctcggagatcatgtgagtcctccatggcaaggaagcagttccagggagagccaggnnccancnagatagggcngccagccttatggcntttagcctacaccacactaagccctataganagntnacngatgggccntttacggncagatggcnnnctaaanncctcncgaagcnggtaaa

SEQ ID NO: 440396 - DNA, 1481 bp, Homo Sapiens
acccaagagagcctttattcagccacactgacggctctgagccagagccacctcctggccccactggtacccaggaaacatgcccaggttaaagctgccccccaggggctaggggctgaggtatggtcagtgggctgaggcttgtagactgtcggggcagtctattgaaccagaaagacagttccttgccctggatggcctcagatgtctttttccatccagaatatggggcgccccctcacattttgatattgtgtctccagcaggctttttgaagggggccctgatggaactgggggtgagatggtcaggcactcaggtaggggagggggtggtggcaatggaggtcccttgggaccccttggggcagcttgggcagtcaggtttggggccttccagggtggccggggagagggggctgtggggaaggcattaagcagggtggcaggcagccgtctgctggtgaagaccaggccctgcacaggctcacccagctggtagcccaggtgggtaatagaagtgcacctggtcatgggtggtgagatgcagcttgcggaagccccgggcccgagcaaagacctccaggccctccatgaggcggcggccaaagccacggcccctcagggcccgggccaccaccactgtctccactaagaggctctggggctggttcagcacccgtgacaggcgggcatggcccaccacaacgggtgctgcttcaagtgtggggtgggggcttagcagcatcaggcagagggggaaggcatctgaggactggcccagggagtgcaggcgggaggtgcggctgcggggccactgatcattgatgaggtcagcacaagcatccaggagctcgggtcggcggtgcacaggctccagggtcaactcagccaggctaggagctggggtctcctctggctggtgttcaggatccagggtaagctcagttggaccaggattgaaggtcatctctggttggcatgtggaatccaggggcagctttggctggcacgcaggatccagagtcagctcagctgggctggtactcaggatcagctccatccggtgtgtagggtctagtgtaggggtcagcttggctgggccagggctcagagtcagctcttgcctatgcacaggatccaggttcagctgagtcaggctgggagccaaggtcacctgctgctaggttgcaggtggctcagtgccaggctggaggttaagaccccagtctccaggcagtagcatctcttcagaccacagtggctctcctcatgttgatgctggcctctgggatgttccgcgtcctagctccgcacagctgggtatctcactcagtcgccacctcggactcctcggtccgacaacgttggcccccagcggtgcggcggatgttctgcagccgtcgcgtcctgcggcacgccacggcgttctaaggcctcccagcacccgcgcgtcgccgcttagaacatcccaagaattcc

SEQ ID NO: 440397 - DNA, 898 bp, Homo Sapiens
  misc_feature (496)..(496): n is a, c, g, or t
  misc_feature (499)..(499): n is a, c, g, or t
  misc_feature (503)..(503): n is a, c, g, or t
  misc_feature (508)..(508): n is a, c, g, or t
  misc_feature (511)..(511): n is a, c, g, or t
  misc_feature (516)..(516): n is a, c, g, or t
  misc_feature (518)..(518): n is a, c, g, or t
  misc_feature (550)..(550): n is a, c, g, or t
  misc_feature (563)..(571): n is a, c, g, or t
  misc_feature (575)..(576): n is a, c, g, or t
  misc_feature (582)..(582): n is a, c, g, or t
  misc_feature (589)..(591): n is a, c, g, or t
  misc_feature (632)..(635): n is a, c, g, or t
  misc_feature (637)..(637): n is a, c, g, or t
  misc_feature (664)..(665): n is a, c, g, or t
  misc_feature (667)..(667): n is a, c, g, or t
  misc_feature (670)..(670): n is a, c, g, or t
  misc_feature (672)..(672): n is a, c, g, or t
  misc_feature (684)..(684): n is a, c, g, or t
  misc_feature (686)..(687): n is a, c, g, or t
  misc_feature (699)..(699): n is a, c, g, or t
  misc_feature (703)..(703): n is a, c, g, or t
  misc_feature (714)..(714): n is a, c, g, or t
  misc_feature (719)..(724): n is a, c, g, or t
  misc_feature (731)..(732): n is a, c, g, or t
  misc_feature (746)..(746): n is a, c, g, or t
  misc_feature (749)..(750): n is a, c, g, or t
  misc_feature (753)..(753): n is a, c, g, or t
  misc_feature (756)..(756): n is a, c, g, or t
  misc_feature (766)..(767): n is a, c, g, or t
  misc_feature (773)..(773): n is a, c, g, or t
  misc_feature (779)..(779): n is a, c, g, or t
  misc_feature (786)..(786): n is a, c, g, or t
  misc_feature (789)..(789): n is a, c, g, or t
  misc_feature (794)..(795): n is a, c, g, or t
  misc_feature (798)..(798): n is a, c, g, or t
  misc_feature (813)..(813): n is a, c, g, or t
  misc_feature (830)..(831): n is a, c, g, or t
  misc_feature (848)..(848): n is a, c, g, or t
  misc_feature (851)..(851): n is a, c, g, or t
  misc_feature (855)..(855): n is a, c, g, or t
  misc_feature (857)..(857): n is a, c, g, or t
  misc_feature (859)..(859): n is a, c, g, or t
  misc_feature (867)..(867): n is a, c, g, or t
  misc_feature (870)..(870): n is a, c, g, or t
  misc_feature (876)..(876): n is a, c, g, or t
  misc_feature (878)..(878): n is a, c, g, or t
  misc_feature (888)..(888): n is a, c, g, or t
  misc_feature (890)..(890): n is a, c, g, or t
  misc_feature (892)..(892): n is a, c, g, or t
  misc_feature (895)..(895): n is a, c, g, or t
  misc_feature (897)..(897): n is a, c, g, or t
gtttgcataaacatgtttaatgatatagaaaatctattccaaatcaatcattaaaatctaaagcgaaaaatatattacattttaaatgaagggaaaacatctgattttattcaaggttgtggtgactctgttccgcaacttttaaatcaatttaaagttaattcaggtgccttttcaatcattgcagttacacatagggaatactgaaccgaaagatgacaaggcaattgtctgtgtccaaacttaagaaaaactatatttccctggacttttcatcccaacagatttcaaattctcctttccaaggagtatttgaccttcacatttcaggccctgatatctcattcatttcctataccaccatatgttagaaaactcaaactgggctacaagtatatatttctgttaactgactttaatgaattttggttgttttcaaaatctgcgatctgtccattgtggcaaccctggattgcagggaagtcttagagtgtgnatnaagnatggntcntgggngntcgtgcctaaagggcggataaaattgtattcntgggggcggcgannnnnnnnnaacnngagggnatgaagnnntaacggggcggagggtgcgcagggaccgggtggaaggaatnnnntnggggcagtgggagctagtggttggtgnngnggngncctcacgcgccncnncgcctaaacttntganagtgaggcagntgggnnnnnnggccccnngttccccccgcccnctnnccnttnttctcccccnncctccngcggcntgatctnttngttcnnttncagccgcgttaaggncgccagttatgccccgnnttatattttgatttgtnatngttntncncccccgantcntggggnanctttcaggtngntnccncnc

SEQ ID NO: 440398 - DNA, 1403 bp, Homo Sapiens
  misc_feature (36)..(36): n is a, c, g, or t
  misc_feature (91)..(91): n is a, c, g, or t
  misc_feature (1324)..(1340): n is a, c, g, or t
cacttcctaacaagtccatcttcaacctgaaccacntctcttgtttaatcaaattttaaactttgccgaactgagttgttctacaccaagnaaaatcaatttctataccacctacattctctaatacatttaacatataatttcactcaatacaaggaggtttcttcttaacctggacatcgaaaagaatctttaacagatttcatcttttcaagcaatgtatcaaatacacaataaatacttgtaaacttttcaggtggcaacaataaatctttgttctatggctgaaatcccttgcttcacaggagtattgacaatcttaactcccaaggagcaatccaagaatcccggccagctgctgggtgtccctaatcagatttaaaacaaaacatacatacagcaagaactcagaagtacaaagatttcgctcgcttttgtcaattcttatgtatctaaaaccatacaatttatactttcatacagaaagatgtctgtttcttttctaacaaaagaaaaactctcagctcatgtgggttggattattaattcaaaagcattttagtgatgagaaacaagatttgtaagtcaaaataggagttaatgttaaactcttctacaacgaaaccttcaaatattgccaacctgaagttttcagcacaaggtgttgtatttcaagtcccatgggggcaattatctataatgagattaagaatattcttaacctgtttcagctgggtaagtaaacgttttctttatagccccaataacgagtttgaggcttagattagttgcatgatgtaaacaatatgaaattaaaatttttttgataatatctacagcatttataaggttacaaaataaaaggaccattaatcaattctttttttcctaggctctatgactaatagctttcatatttgaggcctacaagagcaaatggcaatgttctgtgttatgagacactttcttagaaggccaaaaataaaactggataccaaaagatacacattactattatgttgagatcatccttactgatatatgtataattagaaatagatttgccttccttcaatctttagccaggagactgagagatctttactatgattttgagagtaaaaacaaaaacaaaccagactctaacagctatgggaactgtaagccgaaaataatacaaaatgagtcaatacaacacatctcctcttaaaatcctcttctttgtagttaacccagttgtccccaaatgttattccaattttgtaaccatgtagtggtttttaagaaattagaactagaacaaaacaacctgtttgtcctttcnnnnnnnnnnnnnnnnnatcccgggaaatccggaccggtaccatcctgcttgttttacaaacttgttctatagtggcttt

SEQ ID NO: 440399 - DNA, 358 bp, Homo Sapiens
  misc_feature (289)..(298): n is a, c, g, or t
gatctctcccatctgctcccccttcatcccggtccccttctctggcccgtaaatccaaaccctttgtttctctcttccccaatgcattccctttgaggactcttcggaccccagccctccagaacaccccctcgtcaaatctagccgctgggatggcgagcctgcccatcctaaactccgctttcagtgcggcgcctcctgcgacctcctctgtccctttccttgggctctgtccctgaccaggtcggccccatcagaaagccaaaccggggggggcccccacctcaannnnnnnnnnaaccacaacatactcatctttcctaatacactcctcataattttcactcacctcccctcc

SEQ ID NO: 440400 - DNA, 944 bp, Homo Sapiens
  misc_feature (205)..(213): n is a, c, g, or t
ttttaaatagggactttgtgttgtggggaacgccatacccgggttgccaatcctagagggaaaaacaactcacttccaggtgcttgtcatatcaaagcacccacttaagtacacacccaaactatgaccctacaggctctcatgtcctggcccttcccccttacttaaccaatcccctgccagtcaccatataattagttacagnnnnnnnnntcccagatcccactacatttattaatactactctctctcacccatgttttctcttttaatctacaaaaaattgccctctccctccttaccaacccctgtgcttctctgtttggccctgcatggtggggccatgtgtgcctcctgttcccagggacccgagagcatgaacctttcccttcatgacagtcatttccatgactgtgtgtctttgtgtttgattaaaacacatcttgggtgcccttcacacagcctggcatgtgggtgcagggcatctgacatgcacaggcattgtaggcatcatggatcagcagaatgccaggaggccggagcgggcctgtgtctgtttcattccgacacagatgtgtgaaaggcagcaggcactggggtgaagagtgtaggctccgggttagagggtctggctgtgaatgtgggcccctgacttcccactcacacatcatagatgcaacccttctacgtgtccatttcctcctctgtgaagatgggatgatgccataaaccacctcaaaaggctgtggcgaggattacacgatcaatgcaaagcctgaactctgggccgggtgcttagaaagcactcctagggtgagctttttttgttacctcattgttcaatgtttattcagaagtaaacctatgaagtcaaatttgagttcttatattaaagcatatctcataggtcacggtggttaaatgttggcaattttatagggccc

SEQ ID NO: 440401 - DNA, 2479 bp, Homo Sapiens
  misc_feature (364)..(372): n is a, c, g, or t
  misc_feature (1005)..(1005): n is a, c, g, or t
  misc_feature (1008)..(1008): n is a, c, g, or t
aaaataaccaacttaggtatttgctaatggtagtagaatgatccatatgttatattcacgaaaatagtacttctgcaaatttctctctgtaagaattccatacattccaaggaaaagtaaagactcaaggggtttgggaaataaacccaatgtttaaatctacataagtttaatttattccctaactttctaagttcttccagagttctggccttcagaatatttcttaatttttcttcctgagttctgcactaactcaaaacctatcctaacgatctaattcctgtattacctatatttaatataaagtacaatatatagtcaacattgtatcactagaattgtgaagctcttcatgactttnnnnnnnnncttccaaaacaattaagctatttttatttaacatgtaatagtcataaagcaactccatatatttagttttctgatatcctaatgtatttccacaaaccttttaagtctacaattttatatagttttccatcagggaggcaagatatatataatttctttttatatttaactaaaggttttaagagggcttagtctctaaatcagtaacaattagtcataacaccatacaaacacatttaaatattcaggaaagaggttgttaagattattgcttagtcttataaaatggtgaattttaaccaaattgatacctctgtaatcttatttatgtttcctattaacatcatactgcttggcaagtaatgtaagttttgacataatttaaaaattcaagtagttgtaaacaaattctaatttgttaaacaattcatatattcccctttagttactatactacctcagaattaatcctccttaaaaaagtaatcatcccacatagaaaaaactgcagagcttcatctcttccttaaatattttcaagtactgtaagaacacaaatccatgaaaaaactgattaaaatttgacatttcatcttgctttactaattatggaataatacaaaaacataaaanaantgttccttaatatttctttgcttaacagagaaatccaaagaaatactgcaattatggttatgggctactttccagccctcttcaagtataggacacaactatggttcctaccagtagggagaaatgaataatcaatcttacataacacaaaagaaagatgagaggcacaaaaagacaaactgactttggcttttaagaacctaatgttaaccctgaaatgccacattcagtaacacaacaacaaaacaaaagattacagcagcaagccaccacttcacacagtattaaaaattcggaaataatgtaatagccttccttccatctcccactcaatctgttgtgtcatctttttgtttttcctgctttttagctgcaggcagttcaaggcttgcccactgcatcggttcagcttttctcatagtgatttcaatctttgttgcagtcatagttacataacttcgctttacatcaatcacaccccataatttcacattttgatcaaattccttttctccttcaaatacaatatgcacatttaacaatgtgctatttgcttctactcggctaagttctggaagtgagtttttagcatatactgaaatggtaacttcacctccagtctgatgccagtcatgtctacatggaacaacttttttcccagcatcttttttagtccacatgtgtttcccttttgtacagccctcttgggctaagaatgtattaaaatcagaagtttttcttctacaacagctccagtatttcatcccctcatggaaaataggtactccagaatgatatacacagacttcttctagactctctagaccctggtatgtctttgaacaccctccattcttacatgaggtcccaatcttaatttcatcattgtcttcttctttcttattttcttcattccctgatgacagtttaagtttatcaagtgcttgttttagggaggcagatatttttaattccaaatttgtcattggttcatctgggcttggtctttttattgcttctactggcttaggggcttgaatgatgtgttcctgaaatttgggttttaattcacatagctccttcttctcagtagtcttgacttcaggtttgactggctcaggtggcttctcactattatgtctaccttttgtacagcctacaatgcttaagaaatcagaaaaatcagttgttcttctcttacagcaagaccaaccctttaatgcatcgtgaaagaccggaacacctgggtggtatgtgcaagcatcgtcggaattggtctcaggatcgaagcgctgaccgcagccccggttgtagcacagcaaggccattttcttttcccaccgtcacaggcaaggcccaaacaccgggaacggcaagaggatgcgtttgccactcccgtgtcgctagcaccggtctgacgactgaggcggctaccggcttccggaaacgatccgttgcgtttcacgccgct

SEQ ID NO: 440402 - DNA, 887 bp, Homo Sapiens
  misc_feature (282)..(294): n is a, c, g, or t
  misc_feature (578)..(578): n is a, c, g, or t
aaatttagtttgggtgctgtgagggttaaatgttgtggtttgattatcacacgtttttttatttgtgtggaaaacttgagatgaaaccatcttttagaagtaatttactgttgcatagttttaaaaactaggttttattagtaaactcaaaagtgttcatttattcccatttctcctcagataacttcaagtgatgtacgaaaaggtttggagttcatttttgtggaaagactttaaattggtgttagaaccactaaacatcttcaaatggtactatgaggnnnnnnnnnnnnncatttttctaaatattcaactataactgctgttttctgactaaaataaccatctaaccacttgtttctaaggcactgcctattccagcactttcaagtagctgtgatattacatgttgtcatcacagtccatcagctatccacccttgaccttgtgcatttggtcgacagtttctacaaaaatgttacaaattttgttttctaaacaatttgttgattaagtgatcaacaacctgaagaaaatatcaatttttaattgacaaagactttatatcttagtgattntagttttgtttctctttatttggcaacattttcatctgaattgtatagatatatgattttctagtgagtgtatgttaggaacaaaagacaaaatagtatcaacacattataaatatttagcttactaaatatttgaattatttttacatccatttatttctagcttgttctccagcactttagtgtttgaaagtttcatcctaaaatatatactacaggaaaagctgcagtttcattttcatgcatgggatcattacatttttcacttggaaatgtagggttttaatgaaaattaaacatttccccttt

SEQ ID NO: 440403 - DNA, 1322 bp, Homo Sapiens
tttctctctgcttagggaattcaagatcatatctaacttcgaattccaggggtaatgacgcggcttctattctccaaagtccagtgtcattagggataatctccctctttcagttttatcacaattccattttgaaattctacaacctgtagattaactggtaaaattaaccatattcaaccaaaattgtataacccagcaagaatggaagaatgggtaaagtctacagtccatttctagaactggtcatgagaactcatgtttatgatgatggacttttgatctggtggagggacccaaaccttcagttctgaagctcattagtggtcctacctgtgtgacaggcatttactattggactggcagtcccaggacaaactccaggaatccccccatgtccatctctactcctgccctcttttacgtagcagcaatcatattttcccttgatagggttcatcattctagatactccgatgacttctttataatgagcctgaagtggcctggtggctgcctcagcttccagttcagttgaatagctactacgtctttgaggatgtgctccttgctgggggactaaactctccacgccagcccagtcccaaacctaaacctcgggtatgagaaaagcattgagatctagcaatagcagggccatgtccacactgcgtcctatccctgaaggagaaacagcgccaggtatggttgccggctccaagcgcatgctgcctcctgcaggcctgacccagcctctcggggtgttgtttctggtgccatagttgaattttcaacaaaccatttcaccaccctctcaagacagctgctgctggtttgtgggttcctgacaagatgagtgaatgcctgcccatcaacccgttactcttcttttagctgtaaagtgaattctctggttgggtgcagtatgtgaggaggtcacatgatgtttatggcatttgagaattccatggatattgatggcaggagaggcatgatgggttagaaaagcaaatccaaatccagaacaagggcccaaaagggccaagacaaattactgcccctctcagagccacaggtgtagacaggtgaaaacactggacagtgagtgagctacccacacacgacccactggtgccttcagagccttagcctggagcgacagtgtacccgttgataatgggaacgcacctggccaatgccagactttatggcttagacggtccagataacacttcgaaggggcatcttgggcaccaagtgtgcccgggcccaattgttcaggctctcccagaaccccagtggtggagccacaagggcctttt

SEQ ID NO: 440404 - DNA, 1814 bp, Homo Sapiens
  misc_feature (1574)..(1650): n is a, c, g, or t
aggggagctttttgccgtaaaacctgcaattgagtaaaatactgtttaagcccttaggcggccctccaaataaatagggactatctcccccactttttccttcattctgaatcctctgtttagattatctatggctgaatagaaccccatatctggggaaaacaactcccttcctggtttggggctctggacccaattgactcaggtggaatctaggatctcattaagcataattaggtggcaagtcaaggaaaagggctgatcttcccccattatatgaggggataacagcccctttatggacagtggttcccttaagttgagggaaatcctcctccaggcacccccacaaatataacaaacttttatgattgcctttttgtcttctgcacagaacagaggaaatgtgattcccagcactgggagaagaatgttgggaaaattaattgaacaaatggctggaattgttggaattactactcttccagggactcagtcagaatttccaaggaaatagtccattcagtttggagtcaatgttttaaaattctaaagctacaaatgaactcatgattatatttaaaccaatggttacttttctcctgaaaagcccacatctatacatgcccctataacatactcctaatatcttacagtctcaggacctactgcatctcatgcatgtattcttccaaattaagaaccccagatctcgataaatgcagaactacttcttggaatgaaaacaaacgtttatggtatggaacttgggctgtactgacagaaggctttgatgagtctcggttagactcaaaatggctacaatgaagcaacatttattcctcatggtaagtggcaatgcttggctgtgatgacctccaagagtgttgtgtctcacatgtgtaattactgtcaggccaatgactcatgcaggtctgtggaccatcgagatccccatgatcgctattaacacatggagccactgagccactataacatgagccctaaccacaaccacaagcaggacactatcactgacatacagcgtggtgcccatttgtctgatttataggtgacgtcgtggcaaatgtggcatcagtttcatttcggggcagtggcaagttacagatatttccttcacaacaagaagtgcagaccttgtggccttcatgctcggagtctctgcagccagtggataagcactcttccagtgggacacagcgtttggtgactgagatactgtttcctgtgacttccattgtgtgctgagtgtagcagtatctggtctctcgagggcagtagatgtctggagcccatcggttgcactcataattgtctgctgccttttcacaggtgaaacatttaaatccaccaggatatggtgtggttgaaggatggaggtagataatgtctttcactgtgaagtctcgggactgagcagctttcagacaatccgccagcaggctcaggagcaggagccaggccagagcagggccaggttccatggcagactgaagtgtcactcatacagagggcctgggagtgggcactcagggcaacaggagagaacttgnnnnnnnnnnnnnnnnnnnnnnnnnnnnnnnnnnnnnnnnnnnnnnnnnnnnnnnnnnnnnnnnnnnnnnnnnnnnncaaaatagtgccttgttgctcaccctgcaacttaggattaggtttacagcctctgtgctcacacagtagcttttgcataactttttctcaggctttttgatgatattcggtaattgtgcacttccatctgtgtctcttccataagactgtaagttccttaaagg

SEQ ID NO: 440405 - DNA, 801 bp, Homo Sapiens
gaaaggcttgaagctgttgaagctggcgtgggggaggatttaatgagggggcggagcccagagggataacggactgagggaagcatgtgacctccaagctgaggggcaatgggagtcatggcagccatggtggtcaggtaagtaacttgcagaggcatctttgaactgtaggtcagaagaccagtgaggacgcgggggcagaaacacagtggggagaagatgggggcctgcattgagggaggcagggagagaaggggactgctaggagagagatttacgggtagaattgaatgtaaaagtgtctgattgaaaagctctaactctttaagagcttaaaaaccactcccctgtttgtatcttgaatctcattcctgctgggacacccagtgattcatgccagggcacagttgtttgctgtatgggggtggtagtgagtaagcaggaagttgggtaaacggaggttttgacaccttgcaccaagccccaatccctaacacaggcccttaatagagtgggcggtgaaaataccttacttaatactggatatgaagcgagaagaactctattttgcatccctccgttcgaaagtaatttgtttttggtcgtaatttttgttgaaaaaacacccggtgctgagtcgcccccgccgtcggtattatgagggcaggttttttccccaaggttcagcggtatgattgcgtgatgccccgtacccggccgctgtattgccctctatcttgccgcgagggtatgtgtatagcatcgtcagctgagtatcccgccaccatagcctggtgggcc

SEQ ID NO: 440406 - DNA, 1548 bp, Homo Sapiens
  misc_feature (89)..(89): n is a, c, g, or t
  misc_feature (132)..(132): n is a, c, g, or t
  misc_feature (396)..(396): n is a, c, g, or t
gggatagaagagggcgctgggttggacctgggacgcctggggtggtgagaggtggtcgatgctggtcatgctgtgaagcagtctcagtnagttccaggcgaatgagcagattcgttttagggagtgcctgtnaagagcaaacgctcttttttggtgttgctgccagatccaaggattaatgtcgtgcttgctggtggccacgttgtgccccgagatgagatccggaagctgatggaaagccaagacatcttcaccgggactcagactgagctgattgctggaggccagctcctttcctgcctctcacctcagcctgctccaggggtggacaatgtcccagaaggaagcctgccagtgcacggtgaacaggcgctgcccaaggaccagcaaatcacngccttggggagagaggaacctgtggcaatagagagccccggacaggatcttctgggagaaagcaggtctgaaccagtggatgtgaagccatttgcttcctgcgaagattctgaagctccagtcccagctgaggatgggggcagtgatgctggcatgtgtggcctgtgtcagaaggcccagctagagcggatgggagtcagtggtcccagcggttcagacctttgggctggggctgccgtggccaagccccaggccaagggtcagctggcggggggcagcctcctgatgcactgcccttgctatgggagtgaatggggcttgtggtggcgaagccgggaccttggcccccagcccctctgggatggcaggcctctcgtttgggacacctactctagatgagccgtggctgggagtggaaaacgaccgagaagagctgcagacctgcttgattaaggagcagctgtcccagttgagccttgcaggagccctggatgtcccccacgccgaactcgttccgacagagtgccaggctgtcaccgctcctgtgtcgtcctgcgatctgggaggcagagacctgtgcggtggctgcacgggcagctcctcagcctgctatgccttggccacggaccttcctgggggccttggagcagtggaggcccaggaggttgatgtgaattcgttttcctggaacctcaggaactctttttcagtgaccagacagaccaaacgtcatcaaattgttcctgtgctacgtctggactcagaaagacaccctctttcttggcagggggctccgatccagatgtaggcagtctctaggaacaggggcggtgggcctgggtgacagggagctgttactactgaccggcaccctggttgaccttggccaaggccgcggtttccggagagcctggttggacatgaaccaacaaaccggttggggttggttgggggcccttggccttatgcacaagcggacagaatagcccaggacagttccttcaccgtggtagctggccttagggcccgtgtcctttacagaggagccagggctggacgtcacgttcccttcacgccccgtatcgttagcgcgggggttgtgtccctacgcggagactcagaaggggccaccttcgggatcgttcacctcga

SEQ ID NO: 440407 - DNA, 1845 bp, Homo Sapiens
  misc_feature (44)..(44): n is a, c, g, or t
  misc_feature (80)..(80): n is a, c, g, or t
  misc_feature (132)..(132): n is a, c, g, or t
  misc_feature (183)..(183): n is a, c, g, or t
  misc_feature (241)..(241): n is a, c, g, or t
  misc_feature (555)..(556): n is a, c, g, or t
tcttttccaggttgtgggaggggaataccaccgcacatatgtcncgagacaagaaggcgagtggcccatttcagagaagnaaggcattggaaacccatcttcctcccggttttcagagaaagaagcattttnaaataatgtccaacaagggtttttaaaaatggcgccaattataaagtaagncccatataattttaaaacccccacaggtgagccctcctataaaggacattttctcaanaaccaccataccaaaatttaaggttaataggttttctccaagcctatctttactttccgatataggacaaaaacaaagggcccctatgaacaatgtccaaacccatttagggaaaagctattccttaaaaaggaaccttttcataatgcctaacttaaagtaatgtagaatagttttcctcaggagaaaattaaagtttgggcattatttcaaatatcactaaatttctaagaggaaataaggaatcacctgcatatatttatgaagtttctgcaaagcatcctctgcatctttaaaggtctcatccaaagcannagctttcttatagtaactttcagcatttaaaaacttttcttcttcttctaactgtcctcctctctctacaagtgtctggcagaggtattttcttgcatttctgtgagttggacagttttctaatgcaagctcaaaatcttctattgctttgttcaaacttccttttgtcgcatataatgctccacgagctaccaaagcttccacgttttgtttgtctatttccaaagctttattgtattcattcatagcatccacatggcgtccaactttaaaatagtcaactccgatcttcacacattttaaagcccaagatgcggattgtttttttctcaatgcagaagcaaaatcatcttcagagaaatttttgctttgtaggcctctcattaaagatggttgattagattcatctattcctagtttttctagaaggaattcaactactcctggattaacaaatcccaaggaactctgcatgacattttcataggactccaaagaattgctatttagctcaccacttctcctgtagtataaaggaagcttttcagagcttattaccacctattttaataccagataggtgtggtggaagagaagagctatccagagatactgctagcttttcatggtatctgtcaatatccttgattccagctcgaatgatgtcaccagtttggtatatgataagggatccccatggttactgtagaaggcacatctcttagggacaaagagctgtgatttctaagtgggctatatctctcatgataccacttcctaaccagatcaacaccatgaaaaagccgaattcccgaatagaactatttcttccaatcactatatcaccacgctcaatatctcggaaaaacagctctctccgatccatactaggtatctccatgaattgctctaaaggtggcatgattgcataatgatcttcactgtcttcattaatttcagaagttgcaggtgcatctgattcccaggaaagtgcaaaaagcagatccgcttttttggagatgaatttctgtatctcgatgttgtcaactctcttctcttttctgccctgcaacgggtgctggggcggcgggccccgggctggctcggcggccgaccccaggaggctacggaagtgtggattgtcctgctgttcgctccgaagtagagagagcaaagacgacccgtggcaatttagcgactgccgcaaaaggtcccggtccatggctagagaatgcagggcccggaggccgacgggctgatagttccctgttccgtgtccgctacttgag

SEQ ID NO: 440408 - DNA, 897 bp, Homo Sapiens
  misc_feature (816)..(852): n is a, c, g, or t
tctggtatttccttcttgtggttaaattgctgtccggtaactttgctctgctgctttcaacccgtttcaggctattctgcactatgcctagattcatccacgcagcggcaaagtctggctgtatttgaacagccaaagacagcagctcctcagcttcctgtagctcattcctttcttttaagatatttccaagattattcatggcatgaacatacttgggatttaatcttacagcttcccggtagtatctgatggcagctgtctggttgcctttatcagccaggtttttgccaatgttgtagtgaaccttagcattgaggggacacacagacagagcacttctgaaaagctgttcctcactccgccactcgccgctgcgcagcacacatctcagcgtgttgatgaataagattcccagcacgacagcggcaatgagtttcttaagaacagaaagacatggtaattgtcaccagtgagatgcatccggtcattctgttcatcagctggcaccactctcagttgatacctttttcttggtatgtttgctcagggctccgaatccaaaagtcagcagcacacagtacccaacgctggggaggtagaggacacgctccgcgaccacgaagcccactcggaagaacaggttactcgcagggagaaatgggataacgagaaatcccaggcccagagtaaggatccttctcttgtggccgtcttcagagcacagggcttggcatatcaggccaattaggcagaaccagagtgctgcaagagcccgctctcgacgaattcgagctcggccgatttggcctgatnnnnnnnnnnnnnnnnnnnnnnnnnnnnnnnnnnnnncgccgccaccgcgttcacccaggcccctatagtgatctatacatt

SEQ ID NO: 440409 - DNA, 2020 bp, Homo Sapiens
ctagatagaaacatgtgaaagactttaataaaaggtatggctagttggtctcactatgtcattttattataaataagaaaataacccatctttccttccacaggcacagggcaccccgcgcttaccagacgcccgaggttgtagtaacagtctgggtatttccttctgtgtttaattgctgtccggtaactttgctctgctgcttcaaaccgtttcaggctattctgcactatgcctagattcatccacgcagcggcaaagtctggctgtatttgaacagccaaagacagcagctcctcagcttcctgtagctcattcctttcttttaagatatttccaagattattcatggcatgaacatacttgggatttaatcttacagcttcccggtagtatctgatggcagctgtctggttgcctttatcagccaggtttttgccaatgttgtagtgaaccttagcattgaggggacacacagacagagcacttctgaaaagctgttcctcactccgccactcgccgctgcgcagcacacatctcagcgtgttgatgaataagattcccagcacgacagcggcaatgagtttctttttcttggtatgtttgctcagggctccgaatccaaaagtcagcagcacacagtacccaacgctggggaggtagaggacacgctctgcgaccacgaagcccactcggaagaacaggttactcgcggggagaaatgggataacgagaaatcccaggcccagagtaaggatccttctcttgtggccgtcttcagagcacagggcttggcatatcaggccaattaggcagaaccagagtgctgcaagtgcaattaccctccagtcgctgatggacttaatgagggggatgcagcccattgaccaatcaaaacacagccaccagggacacagcagcagccaggcattcaatgaatagtagtaattgtagtttacggccctcaccagcatgctgtcagcaaaggaggccgggttgtccacctcggtgaaggccggcgggcccgtgcccatgatcctccagcgcacgtagagcatcccagcccctccagaggtgagcagggtcattctgaagaggaggcccccgttcctgagcatgccgagattctctaatgacttgtccttatgtagtaccttctggacaatttccagaacattgaatttgcctatcaccaagatgtcaaataccgcatttaaacccagcacagtgatcccttgctctttgcacaagcatggccactgtctcccagaaagatactcagcaggcacccagaaaggtggaagaatgcgctccctccttgttacgtttctctaaatgctttacagtagccaaggaaagataacaagaagaacagggcacacaggaggtctgcacggccgacaacaccagcaacacactcggtgtgcacaggatggacagcaaacagcagcgcggccagcagggacgccctgggggcgaggtgcagcctccggcctttactggtgtactgcaggccgccaaacagaaccgagaagacgtccaccatgaggacagagatgccactgtgcaggaggatgttgaccacgtgaaagcccacggggtggaagcctcccgagaggtagtagttaatcctgaaagtcaggacggtgagaggccggtaggacttgtggctggtgttgctgctcagtctactgccccagaagtcatgatgccacaggtcccccaggggcgtttctgcttggaggtccttattgttaacaatagcttctgagtcatcaaagacaaagtctccatcatagctgcgtgcaaaacacacaatggcaaccgatcccactactaacttagcccagaatggaggaagaacagaagatggaagaatgtgatccaaatcagtgtccaacacggccattctgaaaactgcaggttggtggctcccggctccagcattatgctggttaggaatctgcaaggagcctgagccccggccgcatctccctcccgggtgcggaaactctccgct

SEQ ID NO: 440410 - DNA, 1600 bp, Homo Sapiens
  misc_feature (567)..(567): n is a, c, g, or t
  misc_feature (570)..(570): n is a, c, g, or t
  misc_feature (574)..(592): n is a, c, g, or t
  misc_feature (625)..(625): n is a, c, g, or t
  misc_feature (629)..(629): n is a, c, g, or t
  misc_feature (638)..(638): n is a, c, g, or t
  misc_feature (641)..(642): n is a, c, g, or t
  misc_feature (644)..(644): n is a, c, g, or t
  misc_feature (649)..(649): n is a, c, g, or t
  misc_feature (651)..(651): n is a, c, g, or t
  misc_feature (655)..(655): n is a, c, g, or t
  misc_feature (660)..(660): n is a, c, g, or t
  misc_feature (665)..(665): n is a, c, g, or t
  misc_feature (669)..(669): n is a, c, g, or t
  misc_feature (697)..(697): n is a, c, g, or t
  misc_feature (715)..(715): n is a, c, g, or t
tttttgaaggcttaaaacaatagaaatttattctcttacagttctgaggccagaagtccaaaatcaatgcattagcagggctgtacttctacgggaggattgaatatctgtccttggccttctccagctttagtggctgtcagcattccttgatttatgatcacattactccattctctgcctccacggtcacaactactccctcctcttctccatgtcttctcttctgtcatatatgaatacatgtcattgactttacagtccaccagataatccaggatgatctcctcatctcaaggttcttaattacatctgcaaagacctttttatccaaattaggtaccatccacgattctaggattagggggaaggcttaccttttgcaggggccaccattctacccctacatcttacctaagaataaaattttttcttctttcaagctttgcctcttgaagctctgaagaaatttaagacctgttcttttctcatcaccttagctttgaagacttaggtctccatttaagcactcttttggcaaattcagtctattcttttgtctcagtngcntttnnnnnnnnnnnnnnnnnnncttcttcttttggttaaatggcaccaatgggcnaaanagttacttngtnnanaaaananattnttttntgggnttgngatttccacttttcaacctgaaggccgntgttttcccatgtttagngttctattacgttttccataattcctcaaagatgagtaccactgttctcagatctcatttgtacttttccccccaaaggctgtaatgtaaaatactactgagcaaatgttataatctaaattcaaactcttaggtactctcttagattttcttcccctaattaggaacagtagttgctgttctgtcaatatctataatatgcttctgagtaatattaacaagttgctcactggtgtgagcctggctcagcgttttgaatgtattacttctattaatgagaaaaatctgatgggaaggatatcgctatgtccattttacagatggggaaaaggatacccagaataatataactagtaatgttgtcaaagacaaaatttcaacaaatgttaagatctaattggctcttattagtgattccagaattgggcagcatttcattctataaaatggaatactgcttcacttagtttagcataggaagtgtatttttataggcttaaaggttctatagaaagcttaactgtggaatacaatgtgtgttgatcatttcacaaagtttcttttgtttatagggtttaaaaagagaggactttcttatcacgcttatgaaaactggcctgtttggagatttgcgggatggcatccttctgattttattgtaaggtgcatcaacaacttacttctgtttgtttgccctgcatttttagatagattaactcccttttttgtccgtgtcttaggttcctgccccattaccccagcccaaaacattcactcccttaaatttggtaaagctatgtatctacattatttatccccctgctgttttttccccccataccctgtggtttggttttcgtgggcccccttatcgttattgtcttt

SEQ ID NO: 440411 - DNA, 899 bp, Homo Sapiens
  misc_feature (723)..(731): n is a, c, g, or t
  misc_feature (815)..(825): n is a, c, g, or t
tttatatcctaaaatacgtttattaaattacatagcaatatacatcccaaaccttttctcaaaattgtcattagctttttaaattcgttaaatattttcatctcattaaaaatggtttcttcctttaaaatttcccagaaagtgtggcctctgttttctgctactcagtttaaacacatcatcaaggatagataattaatgtcaggtgagcataaaaggagattataaaccagaaatgtgttttctgggaaccaagtttcaagtgactcagataagttttattaatttcatgggtgaagcccctgggataaagcagtgcctaaatcaggcttgtttacccttgggcattatggtcaccaaacactgtttcaggatactggaagtacatacagcttgggaggtctttggcctgagcctgttttggccaagcccatccagaatgaaaagtacaaaagaaggctagtgtgtgtgcaaagcagcatggcttattttgaggtcctattagctgtgggccaacaaaacattggcaggactcgaaggaagaaatgtattgcaatagtccatatccttctaaccacaaagggagactgaagaaatgctggctttaggcccaaaaaccctggtttcaaacagctttcttccagggctcagaggtttatcatattaatttaggtaaaggaccttttcctgttaccactcttccgaaaaggggtctttaaccannnnnnnnntgcccatgggttttttttatgtccacaaactttttccataaattattgttttcaacccatccctgtttcttccccccatgcaannnnnnnnnnncaaaaattatttttcgacaacctgcctggcccatatatgggttatcaacccttgtaaatcacatgaactctcgg

SEQ ID NO: 440412 - DNA, 806 bp, Homo Sapiens
  misc_feature (11)..(11): n is a, c, g, or t
ttttttttaancaaggttgcattaagctttataacaacacggttttcatttagcgggagaaatgacagtttaataacagctgaacagatttaactccccccactcatacaaatttccagttttactagaacaattcctggttttggagatctgtgaacaagtgctttatgtcaaatgatgcattttaattgaatcaaactgatgggaagggacacttcattcagcagctcttgatgggggtttctgcagacagcccttgctcacccccaaccctcataaactggatctgatgaatggagtcagctttctcgccactacctcactctctgccatctctaaatagagaaaatgaagcccgaggaggtggttggtggggcaaattggaagaatgctgactgctcctttctccattacatggctaaggattattcctaataacagacttgtcaactctctggtctttgcccttctagggaccctaggggacagagtccaccccaaaaacatgctcagaactacagtgcttgggagagatggtcttcaggtaaggtaacctcccaccaagaggacaggatttcttcttttacccccagatttggccactcatctttgccaaccccagagctctgacctcggttacaattactctactctttgagcagccctgtgggccttgatccgaacacaagggcatatgcttagcttctgctacaccccaggatactcattgaagagtgagacccatccccatttaaaggtcttttggcaaagaaggcttccaggtgcggtcaccttttcatttcttc

SEQ ID NO: 440413 - DNA, 1691 bp, Homo Sapiens
  misc_feature (79)..(79): n is a, c, g, or t
  misc_feature (81)..(82): n is a, c, g, or t
  misc_feature (99)..(99): n is a, c, g, or t
  misc_feature (148)..(159): n is a, c, g, or t
  misc_feature (177)..(177): n is a, c, g, or t
  misc_feature (215)..(215): n is a, c, g, or t
  misc_feature (221)..(221): n is a, c, g, or t
  misc_feature (224)..(224): n is a, c, g, or t
  misc_feature (226)..(226): n is a, c, g, or t
  misc_feature (273)..(273): n is a, c, g, or t
  misc_feature (281)..(281): n is a, c, g, or t
  misc_feature (376)..(376): n is a, c, g, or t
  misc_feature (395)..(395): n is a, c, g, or t
  misc_feature (397)..(397): n is a, c, g, or t
ctttgacctcagatactcagagaagtgcatggccactgccgtaatctcaggctctgcttcctcaggatgttcagttcgntnnatgctcgactgataaanacagcaaatataagtcaaaccatcatcattggggataatgaagatttgnnnnnnnnnnnncctaacatttattcctanagtactaaaatcttgaggatgaacattaatactcagtnaattanaananagaatgccatgttgacaatgctgttaacagtaattttcttatttaanatttaaanttatatgaatctattctaaatatttctatgatatgctctatttttcccctataagtatgtcttactatagtcttcatctcttttagtggaaaaanatggaaaccatcatacaananaaactcacttcaataatttgtatagcatggtacattactgtgaaaatataacggaatgcaggagaatacagcttttggcctactttggtgaaaatggatttaatcctgatttttgtaagaaacacccagatgtttcttgtgataattgctgtaaaacaaaggattataaaacaagagaatgtgactgacgatgtgaaaagtattgtaagatttgttcaaagaacatagttcatcacaaggaatgagaaatataaaacatgtaggtccttctggaagatttactatgaatatggctggtcgacattttcttggggagtaagagtgcaaaaatccagtcaggtatatttggaaaaggatctgcttattcacgacacaatgccgaaagactttttaaaaagctgatacttgacaagattttggatgaagacttatatatcaatgccaatgaccaggcgatcgcttatgtgatgctcggaaataaagcccaaactgtactaaatggcaatttaaaggtagactttatggaaacagaaaattccagcagtgtgaaaaaacaaaaagcgttagtagcaaaagtgtctcagagggaagagatggttaaaaaatgtcttggagaacttacagaagtctgcaaatctctggggaaagtttttggtgtccattacttcaatatttttaataccgtcactctcaagaagcttgcagaatctttatcttctgatcctgaggttttgcttcaaattgatggtgttactgaagacaaactggaaaaatatggtgcggaagtgatttcagtattacagaaatactctgaatggacatcgccagctgaagacagttccccagggataagcctgtccagcagcagaggccccggaagaagtgccgctgaggagctcgacgaggaaatacccgtatcttcccactactttgcaagtaaaaccagaaatgaaaggaagaggaaaaagatgccagcctcccaaaggtctaagaggagaaaaactgcttccagtggttccaaggcaaagggggggtctgccacatgtagaaagatatcttccaaaacgaaatcctccagcatcattggatccagttcagcctcacatacttttcaagcgacatcaggagccaatagccaaattggggattatggttccaccgaagcctattaatagaccgtttttttaagccttcatattgcattcttattacaaccgaatcttaatgtacatagaccctctttcttgtttgtcagcatctgaccatctggaacaataaaggctgttatccctgt

SEQ ID NO: 440414 - DNA, 1003 bp, Homo Sapiens
  misc_feature (297)..(297): n is a, c, g, or t
  misc_feature (390)..(447): n is a, c, g, or t
  misc_feature (897)..(956): n is a, c, g, or t
gtgaagcacacacaacatttattaggactaccatcttttatgggcatagtttgtgatgccccaaaataattacaatagtaacatcaaagattactgatcatagatcacagtaatagattaaaatgtaagagagagacacgaagcgagcaaaaatggtgccaacagacttgcttccatgcagggttgcttgtaaaaaacttgtaaacttgtaaaaaatgcaagatctgcgaagtgaagctcaataaagcaaagcgcgcgggaaactgaggtgtgcctttatgttctgctttagcggancactagggtgggcgagcgttatttgaacgtttacagggagggccctgtgtatctgcgggctgcatatccctggattcgaccaaccaggattannnnnnnnnnnnnnnnnnnnnnnnnnnnnnnnnnnnnnnnnnnnnnnnnnnnnnnnnnaaatcagttctccctattttgtgcagtattttacattgcatttaggtatctataacgtaacttgtgagcatgattttataaaggttacgcagaggcttatgcactacatttacatggttaaatcaccacttcctacccttttttgccatggaactctggagcattctggaggtattcttgggttattttgcattcgtctgccttgataacctaacctcccctgtcaatatactcaaaggtgcatagtaattaacccttacctttgccgtgcacccctcgctatttccccaactgtttcgtgtcccggcgtttaagttcattactctttacttctttacggtgcccgggttgtccccattagatctttcacccacaatccacttctcgtttgcctttttgtatttaccttcatttctttcctccacctccattatttttccagtcctaaannnnnnnnnnnnnnnnnnnnnnnnnnnnnnnnnnnnnnnnnnnnnnnnnnnnnnnnnnnnaagtgttatatttccagttactttttgtaatccctcatcgtgcgtat

SEQ ID NO: 440415 - DNA, 940 bp, Homo Sapiens
ctgaaaccaaacacaaatactttttattcatgggatatcattttacatcaatgtcattgaaacctaaaaccagtttgctgtactcaagttaggtggcataacagtatttcagttaagctgggagtcacaggacttgcacacttttatgaatgtaatgcaaatactgacgacacgaagcattcacagttataggttacctgctgtcattgaacagtaacccccaatagaaattattttatgaaaaaagcaacccacgttttggtctcatttacagacacccaacattttagttggtcaatgaaatctatacatttattatacaacatatgaaagaataaaggataaggcttacagaggtattttagcagttttaagaataaaaaccaagggcacaaactaacttttaaagctttctgtataaacttcaaaagcactgttaaaatggagactgagagagaaaataaatccattgtgaaaccagaaatctaggtttgcctagtcagatttataaaaacataattcagagttcatgcttcaaaaaaggtgcatttaatattaccgtggatgttttgaggcaaattaaataatacaattttctgcacactactttcaggcagtaccacactctaaaaggtctgccattctcatgcacaccccgcagtatttggcccttgctggttggtttcgcaaactccatttccaacaagctaccaacgcggtttggtgacacctttaaggcacctataagttaaaactctctcatggatggctccccctcaattttatttctaacatttaccctctgtacattaagtggccttgatgaaattgccccaagtttccgtgccacactgtagttaagtttttttaaggaaaatagctctcatttttacctcttggatctgacaccccaattttctcttcctttcgaataataaat

SEQ ID NO: 440416 - DNA, 834 bp, Homo Sapiens
  misc_feature (48)..(48): n is a, c, g, or t
  misc_feature (624)..(676): n is a, c, g, or t
tattacgtactatacataattgcatgtgctatacttttatacaactgnaagcacagtaggtttatttacagcagcgtcaccacaaacacctgagtgatatgttgcatgacaacgtccacaagtgataggaatttttcagctccattgtaatcttatgggaccaccattgtatatgtgtccatcattgagtaaaatgttattacatgacacatgactgtgttcatcaggaatatgtatgctagtatgaacctataatgagagtgttaaattttatgaagcaaaaactaacagaacaaaagaaatagatccacaagcataattggaaatccacaattatatctcagtaattgatagcacttgtaggcaagaaatttagtagtatatgtaatcagctcttcatatatgcagattcaaccaatagcaatgcacaaatattcagaaaaaacacaatgacagtaaaaaaatacaaattttaaaatacagtattaaaattatttacatagcatttacattgtattaagtattataaaaaatctagagatggtttaaaatatacagaaggttgtgcataggttataatgcaactactacaccattttatatacaacttgggcatcaaaaaannnnnnnnnnnnnnnnnnnnnnnnnnnnnnnnnnnnnnnnnnnnnnnnnnnnnctgtatagaagatatgaaccacaccagtcaacatgacctaattgttgtttacagaacaccatacccacattgaaaattacattcttttcatgtacctcccagtccccatgaatagactattggctggaccataagtcacataacttcaaagatatcca

SEQ ID NO: 440417 - DNA, 1005 bp, Homo Sapiens
  misc_feature (806)..(806): n is a, c, g, or t
  misc_feature (817)..(817): n is a, c, g, or t
  misc_feature (827)..(827): n is a, c, g, or t
  misc_feature (849)..(849): n is a, c, g, or t
  misc_feature (866)..(866): n is a, c, g, or t
  misc_feature (868)..(868): n is a, c, g, or t
  misc_feature (876)..(876): n is a, c, g, or t
  misc_feature (888)..(888): n is a, c, g, or t
  misc_feature (891)..(891): n is a, c, g, or t
  misc_feature (897)..(897): n is a, c, g, or t
  misc_feature (905)..(907): n is a, c, g, or t
  misc_feature (916)..(916): n is a, c, g, or t
  misc_feature (918)..(918): n is a, c, g, or t
  misc_feature (922)..(923): n is a, c, g, or t
  misc_feature (930)..(930): n is a, c, g, or t
  misc_feature (936)..(937): n is a, c, g, or t
  misc_feature (941)..(941): n is a, c, g, or t
  misc_feature (944)..(945): n is a, c, g, or t
  misc_feature (953)..(953): n is a, c, g, or t
  misc_feature (964)..(964): n is a, c, g, or t
  misc_feature (971)..(971): n is a, c, g, or t
  misc_feature (975)..(975): n is a, c, g, or t
  misc_feature (978)..(978): n is a, c, g, or t
  misc_feature (984)..(984): n is a, c, g, or t
  misc_feature (988)..(988): n is a, c, g, or t
  misc_feature (1003)..(1003): n is a, c, g, or t
aaactatatccatgaaataataactacccttttccccctgcccccagcccctggcaaccacgacaagaaacctacaaactctcactacaagcgttaatagcctaaaagtgggagaccagtaatactttctgattttatgaggtggactactctagatacttcatatgagtggaatcataagtagttatctttttgtgattggcttattagaatatcctcaaggttcagccacattgtagcatatgtcaaaatttccttccaaggctgaataatattacattgtatgtatatgccacatgtattagtctgttttgtgttgctataaaggaatacctgaggctgggtaatttataaagaaaaatggtttatttagcttatggttctataggctgtacaagaagcatagtgccagcatctgcttctggtgaggcctcaggaagcttacaattatggcagaaggcaaagggagagctagcatatcacatggcaagagggaacaaaagggagagggaggaggtgccaggctcttttaaacaactagctataggatgaactcatatccatgtggaggacaccaagccattcatgagatccaccccataatccaacacctcccactaggcgccacctccaacactgggggtcacatgtccgtgtgagattttgagggaacaaatatccaaatcatattaccacattttgtttatccattcatccactgatgaacatcttgggttgtacgtatttcttggttattgtgaataatgctgctatgaatttctcctttttttatttaagtacttaanattctctcaantctgccttantgtatccttccaattttgatangctgtgtcacttttcananttccaaanattttcccttanttnatcaangatctggnnnacttagaangngttnntaaattnccagtnntganggnngtataggnttctatatatnggttctnaagncanccccgnaacngggaaactttgtaantt

SEQ ID NO: 440418 - DNA, 497 bp, Homo Sapiens
  misc_feature (136)..(340): n is a, c, g, or t
cttatggtccagcccaatagtctatcatggggactgttcaggtacatgaaaagaatgtaatttttcaattgtgggtatggtgttctgtaaacaacaattaggtcatgttgactggtgtggttcatatcttctatannnnnnnnnnnnnnnnnnnnnnnnnnnnnnnnnnnnnnnnnnnnnnnnnnnnnnnnnnnnnnnnnnnnnnnnnnnnnnnnnnnnnnnnnnnnnnnnnnnnnnnnnnnnnnnnnnnnnnnnnnnnnnnnnnnnnnnnnnnnnnnnnnnnnnnnnnnnnnnnnnnnnnnnnnnnnnnnnnnnnnnnnnnnnnnnnnnnnnnnnnnnnttaaaatttgtatttttttactgtcattgtgttttttctgaatatttgtgcattgctattggttgaatctgcatatatgaagagctgattacatatactactaaatttcttgcctacaagtgctatcaattactgagatataattgtggatttccaa

SEQ ID NO: 440419 - DNA, 1994 bp, Homo Sapiens
  misc_feature (380)..(477): n is a, c, g, or t
gggaggtgggggaataggtacatcgagacccaaaaaagtgagagaaagtctagtacaagaagtgagtagagctagaatgattaaaagagcgaagaagcaagggtttagtgttatattcgttgatactgcatgacactaagatgattgattgtgaagagagtatcggttgcagtaaggatagttcatatgacatgattagattagaaagtgaagagggaacggagagtgatatgagagagtcccaggatcgaggatagaagaacgatggggtggggcgagagcgtcttgaattagttttgatatgtttgtgattatttatttgtagtatgcgttttattcttttcttttgcgttgctgttattgtggtgtagttggcttannnnnnnnnnnnnnnnnnnnnnnnnnnnnnnnnnnnnnnnnnnnnnnnnnnnnnnnnnnnnnnnnnnnnnnnnnnnnnnnnnnnnnnnnnnnnnnnnnaggagttgtgagtgaattgcatttttatttacgtttaagagtctctctccctccttgtgttctagtctgtgaatggctcacacttggacttagtgtaggctcctatgggaggagcgggcggtagtgagaatcttcatcaaatggagtaacatgacccaaatctctagaggtttcataattttgctcttgcttctaaaaacataatcatctcttatggggtgttatgtgctttgtatcctgaaattttccacttgctgcttcttggtgtgaggcgagaaatgccaccacgtggcactgcaggaggagactggtggaagccacagggctaggccttcacttcccagtgacactgttcccaattccctccaggataagctgagactcctcaggatgtggttctgcagcagatgaggtgcgaacaaagcctgctctgccctgggcacccaggatggcactgagttctaaaaggcaaagggtatgtggtgaggggccaggctgaggccctggtgtggtaccatcatgggcagcagcaccatttgaggccgggtaggagagacgtgcagggcctggccccccaagagaccagcagacaaactgaggcggcagagagagagattccagtgtcaccaggaagactgcagatcataacacaatggttgctgatttggcatcaaagaggtggcactgtcaacgccgtaattgctgaaaatggcaccaacatgctgcagctggagagagtgggtgaccaacatttgtttgaagaacaacatgatgctctttgaatggctcagccaacagcccaaagttttaagggaagacctctctgccagcttctcttggacagtgtctcatgtaaaacctccaaggcacttacatagcatatttttgtgtccactctcttgctagtctgttgtacttctctctgtcggccttgtaggtgtgtgctatctctggcaccagggggtcatcggggttggggtcgcagagcagcgagcagatggacaagagaacttttgacacagtcaacgctggagaccactgagaccgcaggatatcaaggcagatgctgccattgctgttgatattagggtgataaattttggttgtgaaagcaacctttgggggcttgaacgggtaatctgtaggaaagtggatggtcaggaagaaaacacctccttggtaaggactgtcattcgggcccatgatggtggcctgccagtggaacaagtcatcaccgacaggtcctgcagaacactgggcaggaggatccctctgcaagtcgattaaattccaggtgacacgcctgcttctcctttgctttctgccatgattgtaagcttcctgaggcctcaccagaagcagatgctggcaccatgcttcttgtacagccttctggatccgctttagcgccatcctaccccgctgccggggacccgggcggcccggccggggctgcctgaggcggcccgctgccggctcagccgccaccaagctgcacgccgggagccccccccgct

SEQ ID NO: 440420 - DNA, 541 bp, Homo Sapiens
  misc_feature (93)..(93): n is a, c, g, or t
  misc_feature (223)..(223): n is a, c, g, or t
ggagaaatccaagcagcataatccacaatacccaagaaaacgtacaaccccaaagttcacaatggaagaaaggaataaacaaaagtggtaaanaggatttggaatatttgttcccctcaaaacctcaacacggacatgtgaaccccccgtgttgggaaggtggcgccctagtgggaggtgttggattatggggtggatctcatgaatggcttggtgtcctccnacatggatatgagttcatcctatagctagttgtttaaaagagcctggcacctcctccctctcccttttgttccctcttgcccatgtgatatgctagctctccctttgccttctgccataattgtaagcttcctgaggcctcaccagaagcagatgctggcactatgcttcttgtacagcctatagaaccataagctaaataaaccatttttctttataaattacccagcctcaggtattcctttatagcaacacaaaacagactaatacatgtggcatatacatacaatgtaatattattcagccttggaaggaaatt

SEQ ID NO: 440421 - DNA, 1307 bp, Homo Sapiens
  misc_feature (1193)..(1194): n is a, c, g, or t
  misc_feature (1205)..(1205): n is a, c, g, or t
caggaacattcctcgtttatttattgttgtcaattcagaaatgaaccaaaagaagcacatctcaggtgaaggaacaactccttattgcagtcatagcccagctctcctgggatccggggaacgccctctctcctctccctcactccctcctgtttaacttgggactgaactggaactcaactcttcccccaaacattttaaatccaaaaagaccagcagggggcgccctttcctcagggtctggccctgcaggcagggcaggtgagggcctgaatacccacacccagctctggcaggccccctgccttcaacttggcacttgttccagtgcccggggacccctcgtgcatggagcatctgtgcctctattttgaaacggcaccgtccaacccaaaaaacaacacaggatctcgctaacctgcgggcaggactaacccagactcagccctctgcaggctgatgctgaattccttagtgctttgctctccccagatgcatcctctcttggcaatgggtaggaggcagctggggcagcagctgctcgagaaaggatctgagtgtggccttgacattctcaatggcggaatcgctgcagcacatactggcgggcagctggggagggctcaggggatgagaagtacgggtgggccagggcagtcttggctgtgatccgctggctggggtcatactgcaggagttgcatgagcaggtccctgccctctggctccagattgggcacaatctcttccagtcccttcctggtccacttagggaagctgcccttatagtcaggcagctgggtgaccccgggccatgtgtcttcgctgggtgtccccagcatacgaaagatacgaaagagcttggtcaatctcaagagtcaccaggaaacagggcttttcgagtcaccatctctgcaaagatgcaaccaatgctccagatatccacagctgtggtatagaacctggttgccaagagaatctcggggcgcgatacacagtgtcaccacctcatggtgtaggtgcgcaggggcaccccgaaggcgcgagccaggccgacgtcagccagcttgatggcacccaactcattgatgagcacgttctggggcttcaggtctcggtggatgacccgatgtgagtggcagaaactcaccccctgcagcagctggaagaagtagctcctgatgacgtgcaggnngagctctgagncctgcgtggagtccatgtacttcttcacgtcctggctgaggaaactcaacaccagatagagctttctctcgctgtgcaccacgtccagcagtcggacgatgt

SEQ ID NO: 440422 - DNA, 1058 bp, Homo Sapiens
  misc_feature (11)..(11): n is a, c, g, or t
  misc_feature (14)..(14): n is a, c, g, or t
  misc_feature (120)..(120): n is a, c, g, or t
  misc_feature (336)..(336): n is a, c, g, or t
  misc_feature (786)..(1011): n is a, c, g, or t
  misc_feature (1032)..(1032): n is a, c, g, or t
  misc_feature (1049)..(1049): n is a, c, g, or t
tttattcagangtntatatttgtgtactaaatgggctttcagcactatctgtggtaggcgacaaataacccagaaacactaacccttggatttccaccaaatctcaacagacagacaggngtctctattggatggagacaaaaattgaggtaggtttctgcagactatttagaaaacaaaacaatacaaaaagagcctttaattaaataatcagtacgaactaacatattagtttcctaggtctgctgtaacaaattaccacaaacttaatgctcaaacagagatgtattctctcactgctctggagactaaaattccaaaatcaaggtgtcagcnggtgtgtcctggctcccaaggctctatgagaaaatccttccttgcctctggtggcttcaggaattctttggcttgtggccacgtaactccagtctctgccttcatcttcacttgccttctcctctgtgtctgtgccctcttctcttctttttgttgtcaaggacatttgtctttggctttagggaccaaccagataattcaggatggtctcatctcgagattcttaacgtagttacatctgcaaagaccctttttccaaataaggtcacattcacaggttacaggaattaggatgtgggcatttttggtgggaagtcactatttaacccactataactagtaaactaatagagatcaaaatcattgcctactgtggtatcgggtgtcattccagcatcattatttgaaattgtattggcactaaatataattaattatttcattgtgaannnnnnnnnnnnnnnnnnnnnnnnnnnnnnnnnnnnnnnnnnnnnnnnnnnnnnnnnnnnnnnnnnnnnnnnnnnnnnnnnnnnnnnnnnnnnnnnnnnnnnnnnnnnnnnnnnnnnnnnnnnnnnnnnnnnnnnnnnnnnnnnnnnnnnnnnnnnnnnnnnnnnnnnnnnnnnnnnnnnnnnnnnnnnnnnnnnnnnnnnnnnnnnnnnnnnnnnnnnnnnnnnncagaggtgcattgaccgtganacacactgcactcagcntggtgaagt

SEQ ID NO: 440423 - DNA, 1168 bp, Homo Sapiens
  misc_feature (150)..(403): n is a, c, g, or t
tttaaaataaaaaaatttattatttttaattacatagattaaccaaattatttcacttacatgattctagaaaaattaatctaactgaagtggagaataaaatggtgaccaccagatgccaacatatttggaaaaaagaggggtttagannnnnnnnnnnnnnnnnnnnnnnnnnnnnnnnnnnnnnnnnnnnnnnnnnnnnnnnnnnnnnnnnnnnnnnnnnnnnnnnnnnnnnnnnnnnnnnnnnnnnnnnnnnnnnnnnnnnnnnnnnnnnnnnnnnnnnnnnnnnnnnnnnnnnnnnnnnnnnnnnnnnnnnnnnnnnnnnnnnnnnnnnnnnnnnnnnnnnnnnnnnnnnnnnnnnnnnnnnnnnnnnnnnnnnnnnnnnnnnnnnnnnnnnnnnnnntacagacggtatgaaagacactaaaagggcagctgtttcttatggtctcatgactggccactctgtgaacacagtaaacaagtttgcacgcaaaataatagaaaatgtttttatctaaaagctgccatgatcttcgaatgttttccagagaatatgaccaagaagttggctagagttaggtgactaaatgtaaaaactgtagactgaacttcacccactaaaaaaacatataaaactgagaaaatttctttcaaattgtaatatgaatatggaaaagaaatattactccaggtttcaaaatcacagaggtcattttactattttgcaatgtttaatgttcacacttacaaacagaagattttgcatggaaacgtacattgtggcataagtatactgtagaaaattaaattaaaagtttaatttctaagatatattttcaagcaaattttatatttgccacactttgtgtaagaatttaataagattattctttaacaaacagagaaaaacaacgctaaatgatttaatcctttcatctgtggacactgtatgctttttgttttaatttaactgatcagaaaattatattgatatgcaaaatctccagttaaaaccaatcttgcagtgcatttaaaataccgatttctcatcaaaacctacaatataccatgtgaaatgacatggtgtgaagagaacagtgagaaaactgtagccacagcacagcaaaaaggagggctgtgatgcatacacagctgaaatacacat

SEQ ID NO: 440424 - DNA, 1025 bp, Homo Sapiens
  misc_feature (16)..(16): n is a, c, g, or t
  misc_feature (42)..(42): n is a, c, g, or t
  misc_feature (45)..(45): n is a, c, g, or t
  misc_feature (53)..(53): n is a, c, g, or t
  misc_feature (60)..(60): n is a, c, g, or t
  misc_feature (70)..(70): n is a, c, g, or t
  misc_feature (78)..(78): n is a, c, g, or t
  misc_feature (92)..(92): n is a, c, g, or t
  misc_feature (95)..(95): n is a, c, g, or t
  misc_feature (100)..(100): n is a, c, g, or t
  misc_feature (109)..(109): n is a, c, g, or t
  misc_feature (113)..(113): n is a, c, g, or t
  misc_feature (144)..(144): n is a, c, g, or t
  misc_feature (153)..(153): n is a, c, g, or t
  misc_feature (158)..(158): n is a, c, g, or t
  misc_feature (160)..(160): n is a, c, g, or t
  misc_feature (172)..(172): n is a, c, g, or t
ttccccccagcagcancggtcacagtccccgccaagtccccnggnagtacgcngcccccnggcccggggnttggatgncagtccagcactgngtnagttnccactggtngtcncagcaaccagtgacaacccaaagcccggtgnctccccagngttgncncctttcatgtgntctgtgtaaatatagatatcagttatgaacttgttgaggatgctccttgcagaatccacaatccggttcgccatctgaggtgacacacgtacagagtacgccattcctctaatacgtttgatttttcctggatctgtgagttgaatgggcttcaagaccttcctcacaggacatgagaaaaccacttcgcctcctcctccggggaggcattccccgtcgcacaatcttcagttcaaatgattcaccatcaatcccaaattgtttcaacaaagggagtgctgttgccttaagaacatcaactgaagggtcaacctgatcattggtcactcctcgtagaactatttttaacgggtgcttcataaatggagccaagcaaagaagactctccaggtaatacccaatgccacgaaggacgctacagtcatgttccacagatccaccatacaggaggccaggctgataatataaggttgttcctgtttggtttatttcaattcgagaaccattcgttattttgtccaatagccttatgaagctggcttcaaaatctcggaggcccgggttgtcgtctctggcccgaatctttcggattttgacggggcgcccgctcagggtagacaggaccagacgttggcgcaagaagttgcaccctgcgtagctgagggagtgcgcctgagtcgccatgtgcgcgctctccgaagagacgtgagcagcccgagagcggcgacttcggacagacgcgggactcgtgactccgatggtggtggtggcggcgacaccgacggcggcggctcgggctgcctccagcagcccagacgcgtccacgtgcctcgtgccgaattcgccacccagg

SEQ ID NO: 440425 - DNA, 1492 bp, Homo Sapiens
ccttaaatgaggagatttaatggtctttacattatacattttaaaggaacaaaacaccctttatgaattttctcatggagatagcatttacatcacagagctattgtgaaaataaaataagaatgtacagcacacctggaatataaaaaacatcccaataacttacttggagccccgcagccatccatccctcacatataaatacaatgaaccagatgaagatccgtgtccgtgtccatgacagcaatccattcagaagatcaaagataaatagtctaatacaccaatttctgacatttgcttagcactgcaggactcatgaagagctgccactcatattatctcatttaatccctacaacaaaaaccaaggctcaaggaggtgagtccttgcagaaagaacagtaacagactccacaggtttggaaaacagccatatgacagagggctgaggaagcctatgatagtaggctgaggaagcacagctgaactgcagctatgagactgttctagcagcacgactgtggcctgaaggcacattcttcctccaggtaaggcaagggagctctcatggtgactgggcccctcctgggcaatggcaatgccactggagaaacagctggaaaccatatgctacagggatgtcttttatttgtatattgatatttcttcacagaaaattaagcaagtggctattctgtcctggattaatccatttggacttggtcccattggtgtccgtggcagcttctgctttgtctgtaggcattggggccttatcttgtgatggttatcacttgagggtcttgctaaggttggagaaaccaatgccaacacaggtcatcagcactttatccccacccttgagttcttcaccacatggcttggtttcaattttaaacataatctggaaaaagctcttcaaatgccgcaaaaattctatctgaagggtcaacctgatcattggtcactcctcgtagaactatttttaacgggtgcttcataaatggagccaagcaaagaagactctccaggtaatacccaatgccacgaaggacgctacagtcatgttccacagatccaccatacaggaggccaggctgataatataaggttgttcctgtttggtttatttcaattcgagaaccattcgttattttgtccaatagccttatgaagctggcttcaaaatctcggaggcccgggttgtcgtctctggcccgaatctttcggattttgacggggcgcccgctcagggtagacaggaccagacgttggcgcaagaagttgcaccctgcgtagctgagggagtgcgcctgagtcgccatgtgcgcgctctccgaagagacgtgagcagcccgagagcggcgacttcggacagacgcgggactcgtgactccgatggtggtggtggcggcgacaccgacggcggcggctcgggctgcctccagcagcccagacgcgtccacgtggtttggaacaggaagacggag

SEQ ID NO: 440426 - DNA, 1141 bp, Homo Sapiens
  misc_feature (946)..(946): n is a, c, g, or t
  misc_feature (962)..(962): n is a, c, g, or t
  misc_feature (965)..(965): n is a, c, g, or t
  misc_feature (974)..(974): n is a, c, g, or t
  misc_feature (988)..(988): n is a, c, g, or t
  misc_feature (997)..(997): n is a, c, g, or t
  misc_feature (1013)..(1013): n is a, c, g, or t
  misc_feature (1015)..(1015): n is a, c, g, or t
  misc_feature (1023)..(1023): n is a, c, g, or t
  misc_feature (1026)..(1026): n is a, c, g, or t
  misc_feature (1029)..(1030): n is a, c, g, or t
  misc_feature (1036)..(1036): n is a, c, g, or t
  misc_feature (1046)..(1046): n is a, c, g, or t
  misc_feature (1049)..(1049): n is a, c, g, or t
  misc_feature (1063)..(1063): n is a, c, g, or t
  misc_feature (1070)..(1070): n is a, c, g, or t
  misc_feature (1084)..(1084): n is a, c, g, or t
  misc_feature (1089)..(1090): n is a, c, g, or t
  misc_feature (1095)..(1095): n is a, c, g, or t
  misc_feature (1104)..(1104): n is a, c, g, or t
  misc_feature (1110)..(1110): n is a, c, g, or t
  misc_feature (1112)..(1112): n is a, c, g, or t
  misc_feature (1119)..(1119): n is a, c, g, or t
  misc_feature (1121)..(1121): n is a, c, g, or t
  misc_feature (1139)..(1139): n is a, c, g, or t
gcttcctagcacgtttattggagccttggttaagcttggatgcggatcaggagcccccaccagagcccagccaggctgactggggcagggcactgcggggccaatgtcctttttccccattatagacaacagtattaaaaaaaataaactttacaataatacattttcgctcatctgttggggtattatttccatagttttgttgcttaaaaaaaggaaagaaaggggaaaccacacaatatatgtatatggatgtgtatatacatatatgttaggagaggagccccggtatgtacatacagttgacgtacgtctaggaaatgaggaaagagaaaggggaaaggaggaggagggagaagacagcaggaaagcttgagggcccacggtgctgcagacacacacccggctgtggtctctcccctccctctccccaaagggaggcctgccaaaggacccacgagaaagcaaagaagccaacaaaggaccgtttctctctgacttcaaaatttctgccaccgagaaagaagctggtgcccaagttttaatgcctcgccacaagggctctcccaggcaggctgagctctcaagccctcctggagctgggccccagcccgaacactcggtggtagagtgagggggagcccagcacggtgcgaaacccctccaccgccatccgtggggaagttcccacaccagctgcagacccaccagccccacccgagggcagagagggagggcaaaaccatctccatccttgaagccaaagggctgaaggtggaccctcatggccagccccgctgccccgctgaccgatgccctctgccagcccccagcgggtccccagagtgggcagcctggggaagcagctgtgttgtcctgcccccagccagcctcagggacaggccagagtcccttgcgctgcaggctcttgtccggtctctgcttnagaagggtccagaganaanacactaggngaaagtgaaggggntttctagancttgtgccctcccggnancagagttnccntcnnagggancctggggcanctntcaggtgctgtctntttgttngtttgtttcaaaanttttnngaganaaactgggngggcangnttatggnangggggaaaaatttttttntt

SEQ ID NO: 440427 - DNA, 579 bp, Homo Sapiens
attcattggcatgagataaattatttttctaaattatttttagtacagttttgctatataccagagcttctgatatatatataccatttttattgtttttgagatattttacaattttagttttgactttggctttggagtgggttgctgagaacatagcagttgtttcactaatcccagtaaaaacctactaggctattgttttcttctactcttcaatgcagttagttaacatatttgacttctgaatctatcttcataatttccagttctttcaggcatcaaggttaacactcataggagctgccatgatcctctggagccagggctgaggatttctgaggtgaggtccaattagctggcatggccacactgggtctcaaccctttttctgtagggtgtctgaagcttggcagtcatctgtgaactcaagcagagctgctctgaagagatgggctggagtctagaggaaaatctggcccaggggctccccagagacacccagaaacctcaaagatttatcggtattggaatatgaaaatactcctgacaccagcggcaaaaaagccttggaagccc

SEQ ID NO: 440428 - DNA, 1940 bp, Homo Sapiens
  misc_feature (613)..(621): n is a, c, g, or t
  misc_feature (833)..(842): n is a, c, g, or t
  misc_feature (1258)..(1258): n is a, c, g, or t
  misc_feature (1315)..(1315): n is a, c, g, or t
  misc_feature (1318)..(1318): n is a, c, g, or t
  misc_feature (1359)..(1359): n is a, c, g, or t
  misc_feature (1367)..(1367): n is a, c, g, or t
  misc_feature (1370)..(1370): n is a, c, g, or t
  misc_feature (1381)..(1381): n is a, c, g, or t
  misc_feature (1387)..(1387): n is a, c, g, or t
  misc_feature (1401)..(1401): n is a, c, g, or t
  misc_feature (1429)..(1430): n is a, c, g, or t
  misc_feature (1492)..(1492): n is a, c, g, or t
  misc_feature (1658)..(1658): n is a, c, g, or t
  misc_feature (1663)..(1663): n is a, c, g, or t
  misc_feature (1680)..(1680): n is a, c, g, or t
  misc_feature (1682)..(1682): n is a, c, g, or t
  misc_feature (1694)..(1695): n is a, c, g, or t
  misc_feature (1826)..(1826): n is a, c, g, or t
  misc_feature (1870)..(1870): n is a, c, g, or t
  misc_feature (1888)..(1888): n is a, c, g, or t
attgtaaaaagacactttattcaaataagtacataatctcacagctgaatactttccatgaatattctgacacatttatttaaatttttgaaattttactttatgcatgttataatggaaaatagaggatgaatctctttataattttatctcatttatcgttaaatacaaagatattctagatcagaactaacaagatgaaagtaatttattaaaagtatgaaatttcattaaacgtacgtatttaattttttttatgttggcatgattggtctattaccaacaaccttcaaggagctaactcttttataatctttattcctggtgcttgattttcctctttatatcaatccactatgtgttccacaattctaatctcagatttaaaaaataaacggtcaaagggagtgggcaaaatatttgaattgctttcagaggtttgatgggtaggacccagaagacatagagattgccagaattaacataacagaggattccatgtgctcctgtgagaagcattgattggggtgggaatacaagtctgtttcaagctttctgtactggtagtaactactcacagcttctactcttgcttcttaaccatagctttccnnnnnnnnnctttccagggctataagatttttatttgatttcaataatcttccacctgtatctcctttttacttataatgaaaaatttcagttctgtaagacaccaatataatgacttacttgctttatctcataatatataaacagttgcaaaatatgaataacagcactacaactagcaatatgatgattgcttaacagctaaagattatttttagggnnnnnnnnnngccgtgattatttcttaaggtataaaaagtcaaattactacacagctttcctttataatgggcaaccaagtaccataggttgaagggctactcttcagcagttatagcctcacttgaaaactcggctgacctctgctaagagcttccacttagcggttggtagttgtgttcagactctgcctctgctacttactagctctatacctttgtgaaagccatttaatgtctctgcctcagttttcaaattggaaagaagagagggaggaagaaaaacagaaggaaaaaccctattttacatggtttttctcagactaagaaaaaatatataaagcatttacctcaatgcctagagcttaaaaattattaagcaaatggtaactatattatttagctcatgagccaaattctttccagantagaatttttagaaatcaatagaaataaaacttgccacgtaaaaacaattttccacnttnaacagaaatatatgggtaggtaaattctgtcttatgcaaanttttgtgnttntttaaaattanccgtangaggaaaaagattnacaatgtattttgggggggaggggcggnnatggcagtgagggagacaagaaatatgtagggaaaatcatcttagaaaaaataaagcttctnaaaattgatataagcagagggtggaaactgaggccgggagattattactcgtccatcgcttacagggtggggtggggcagcgttctccagggtttcgcctttgccgaagacccgctccaccttctctcgacccagatgcccttgtcgggaagagtatgctgtcctnagtgnctgggacaagctcacantntctcgtttgttnnaggaattccagtccaagctcagtcctctctccatcccggggcatcttaagctgtgtctttgaaccgcactgtggagtttcactccgataagtccttcttacagagcaatcttcctaatgtgtatgggctgnaaagcacatagagataaatggaacagtgtcgtaagttggaaggnccgtgcgtggtggcagcnccagtgtggggatgagatgctcacaggacggtttttaggcggctcacaaggg

SEQ ID NO: 440429 - DNA, 706 bp, Homo Sapiens
tcgatacctgttagttgagatgtggaccatccaccagatcgtaactaagagaaagtctggcacgagactgaaacctgaggaagaagtagaaaaggcaaagggtcaaaggtctcatgggaaggaaggagggtagagacagtgagatctatgggtccgttgtatggttcagacgttccttcttcatcgactctccctaagttgctcttcactgttcatccccagcaacttttcttcccaagcatttcctgcgggcttttattaccccaggagtgccaatcaaggcgtggaacagataaagctgtgtagcaactaacgcgtgactcttgtgagtgtggagggcaaacgaagctccctgaaacctccgctctgctctcctgccttacgccgcgcggcccctgttctgaggtttaatacttgcttcacagataagcgctgcggccacgttccggtgcccaccttctccttggctagggcacgacgccagcccagggggcgcggccctgagctgctgcgagagacagctgaaagcgccggcccgacggccttggctccctcggtgcgctgggcgcagagcactcggagcctgggcgcccactgctcgagtacctgcgcggctcctagccaggcttagcccaggcgcgggctgagagtcagttcgccaggtgggcctggagccatgggctgggtgggcgggtggcgccccgct

SEQ ID NO: 440430 - DNA, 2609 bp, Homo Sapiens
gggggcatgtccagggtgccttttcccagccccccctgtttttcccacccgcggcggaaacctgggcggttgggcctgtgttccggctgggagaggacgcccctcgggaggaaaggtctatctttttgagggtgttgccagccgaaatctgggcgctctgtggccgagagggcagctggccattgctgctgagggatggcggcctgtgcacgtggggcctgggctgctgggacttgcgctttgaggtccctgagctgtcttttcggaggatgcctggcagccttgtgtccatccgtcccttgtaaatgtggccatccaggcccaagatgttcacctcatcatgcgtttgtagcagggggagcccaggcactgggcgtgcagcagctcgcggattatctggctgctggccttggtggagcccccgaagtggatctgcaccttctcaatgttcatcagcatcttggagtgcatggagcgcaggcgccccacgctctgctccatctgcgccaggtcaccccgagggaaggcgctgcccagcttgaggttgcggctatgctgccggacctgctccagttcaaacaccgtgtaggggcggatggaatggtgcccaggtaggcctggacccgcgggggtcacggggatggcatgtccagtcacaggtgtctccaagggccggtcacatgagaggcagtggaaatgtgccaggagctgcctccgcatggcagccgcctcgtctgcctggtagagtggggggcgctccctgagctgctgtcgcagcgatttccaccgatcctccagcaactgcttcactgggtccagctccaggcggtccagcttgttgtccatctctgtgagcagcctgtccagcatcttctgccagtcctgctcctgccccgctcatcttggccaccagctcctgcatcatgtggttcagctgctccgtggtggcatcaaactggacacggctcacttgggtggccagagcactcttgtcggctttcacatcgatctccatctccaggtgctccctgttggcttttccttttcgagcttctccagaccctggttacagcatagcaatgtccttctgtttctgccgatggtcctcgatgaggttgctggtggtgatgttgagcttctcgcagtcaccctgcacctgcaggatggcactctgcacacggcccagcagctcctcgtcctgtctctggagcttggccttcttggagggtcgggagacggccaggctgttgaccatgtcttggagttgctcatagcgccgcaccagcgtgctgacctgatggctcacatccaggctgcaggctggacaggtggcctcagggtcgatctggccaggagccaaggtgtgggccttgtgcggggccatgctcatggacaggagcgtggaggaggaggtcagcatgctctcaatgatcatcctgagcttgtccaactggtcctgcaggtaaagggaggcttcagagacagaattttccatggcagccttgcccctgtcttggctctccctcaactcggccagctccttttctatgtcagccacggtgactctgaggacacccagctgcaatctcagctctccagctttcagttccttccctgcttcttgattcccttccccttccaggatcctctgcagcctttccacttttgctttctcctgccaaacttctttggctagcgtctttacggtcttcagctgctcctgcagttcaggaggtatggtccttttgaccatctgtgccagcaggaactggatcttctccaagtcggtttggccggcctgctcctcatccagatccttcatactctcctttagccccacatagaggctactgagctctcccatcagatgaaatgtctccactgccgtggggaaactagaactcattctacgcagtgaattgcgtcgctcactcaggacttcactcgagacttcgctcccttctgataagactcggtcgacggagtctggactcctgaaaagagtgacatcttggcctggggccttctgggcaggaattccatgtcggtccgaggctcgtgttctatttggatccaaaccttcctggccatgctgatcagcacttagataccctgggccacgataaccaggatacattgaatcatgactgtcaaagagagagaaagcatggccatgctgagctgcatctgggtatacctggtcatgctcacctgggccaggtgatgccacatgctgttgatctgggtgtgtagatcccaaacctgtactcagtggtattgggctgtgctggtctgtgccaggatgcatcaaaccttgctgataagtttctggtggtaccaaactccttcgatctataccaggtgatgccaaaccttgactggctaggagtggtgacacctggccgtattgttctctgccaggaggtaccataccatgttgatatggacgtactgatataaaacctgtagaatctgcctggaatgttgaagagccacgaagctttgtgcctggtgctatcaagcctggctgatatgcaccaggttgtctcaaaccatactgatccattcctggctgcaccagaccacgtggatatgtcccagattgagat

SEQ ID NO: 440431 - DNA, 1168 bp, Homo Sapiens
  misc_feature (1144)..(1144): n is a, c, g, or t
gcctgggtggcgaattcggcacgagggtgaggtgccggcggctggcggccgcggagtcttcggcgagacctaccgggtcctgtctgtgccggccgtgagctgcggcaggacggctggagtaaatcttggtgccaataatggaacgaacactggacacaggactggggaagactggatttcagcttaggagaagaatactaagaagtttcagcagtggaatgcctactcttcttataaccggagtggaaacggaagcattttgtgagagggctggagggaagattacttctctaacaggatcaccagtttgctccacaaagcacaatgtctcgatcacgacaacccccccttgtgaccggcatctctccaaatgaagggataccatggacgaaggtcacaatcaggggagaaaatctggggactggccccaccgacctcataggcttgaccatttgtggacataattgcctcctgacggcagaatggatgtctgcaagtaaaatagtatgtcgagtgggacaatccaaaaatgaccaaggagacattattgtcaccactaagtccggtggcagaggaacctcaacagtctcttttcagctactcaaccctgagaaaataggcattttggatcagtctgctgtgtgggttgatgaaatgaattattatgatatgcggcctgaccggaacaaaggaatttcgcccttggtccttacgtcctgctaacccgcttggcattgagattgaaaaaattaatttttcgcagaaggacttagaaatgctattccatggaatgagtgctgattttacaagtgagaatttctcagcagcctggtatcttatagagaatcactcaaacaccagttttgagcagctcaaaatggcagtcaccaacctaaagagacaggctaacaagaagagtgagggcagcctggcctatgtgaaaggcggtctcagtacattcttcgaagcacaggatgccctctcagccatccatcaaaaactagaagcagatggaacggaaaaagtagaaggatccatgacgcagaaactggagaatgttctgaacagagcaagtaatactgcagacacattgtttcaagaagtattaggtcggaaagacaaggcagattccactagaaatgcnctcaatgtgcttcacgatttaagt

SEQ ID NO: 440432 - DNA, 1322 bp, Homo Sapiens
gggaccacaaactgttgggcccggagtcggaagagacccgggtttgggaaggaccccagggtcaggcgtcctggtggaagggcgggcctctttctctcttgctcagcagggagtccagagccctggaggaaagccagctcagctccgcatcggcgtcggcggttgggacgcacacactctgcgtcatggagggctgaggccgatgatgaattccggagtgcctgtcaggcttgctgtgtcactcggcccgctcggcgcgccccttcccagccgcccttccgtaccggctctcgggctcttccggtctccggccgccccttatttgcaggctcttctcccgccgcggcccggcgctctccgagtcgcccctgcggactggtctcgcacagtgcctgggcaccgggcgccagacagacactggccatgacgagcggcgcaaccaggtaccggctgagctgctcgctccggggccacgagctggacgtacggggcctggtgtgctgcgcctatccgccgggagcctttgtgtccgtgtcccgagaccgcaccacccgcctctgggccccagacagtccaaacaggagctttacagaaatgcactgtatgagtggccattccaattttgtatcttgtgtatgcatcataccctcaagtgacatctaccctcatggcctaattgccaccggtggaaatgaccacaatatatgcattttctcactggacagtccaatgccactttatattctaaaaggccacaaaaatactgtttgtagtctatcatctggaaaatttgggacattacttagtggttcatgggacaccactgctaaagtctggctgaaatgacaagtgcatgatgaccttgccagggtcatacagctgcagtgtgggcggtaaagatcttacctgaacagggcttaatgttgaactggatcagccagacaagactgttaaaactgtggaaggcctggaagatgtgaagaggactttttccagggcatgaagactgtgtaagaggtttggcaattttgagtgaaacagaatttctttcctgtgcaaatgatgctagtattagaaggtggcaaatcactggcgagtgtcttgaagtatattatggacatacaaattatatttatagcatatccgtttttccaaattgtagagactttgtgacaacagcagaggacagatctctgagaatctggaaacatggggaatgtgctcaaactatccgacttccagctcagtctatatggtgctgctgtgtgctcgacaatggtgacattgtggttggtgcgagtgatggcattattagagtgttt

SEQ ID NO: 440433 - DNA, 1901 bp, Homo Sapiens
  misc_feature (16)..(16): n is a, c, g, or t
  misc_feature (112)..(112): n is a, c, g, or t
  misc_feature (191)..(253): n is a, c, g, or t
  misc_feature (337)..(349): n is a, c, g, or t
  misc_feature (592)..(636): n is a, c, g, or t
accgttagataatgtntgaaggggtggcgcggcggcgtatggaggaagaagggtttttctaagtggtcggcggttgttattcaccaggggcgggaaatatatatattaccgncgcgtaagcggagagcaaaagggtggtgtaaattttaggcgcgtgggcgatatagcgcggcgtgtttcacacgatagcnnnnnnnnnnnnnnnnnnnnnnnnnnnnnnnnnnnnnnnnnnnnnnnnnnnnnnnnnnnnnnnaacgcccggttctaataaaaatattctgccggcgggcggcaggtttaatttttaatattcggaacgcgtctgtgggacttcccnnnnnnnnnnnnntcccagtaaggggcgcgccggaggatcccctttttgggggttgtttaggataaccctcgggtggccggaccggggggttgtttttgttgtgtgggaaacccgaggccgctgatttgtaggtgccggggttttttcttggagagaaaaggttggggcccagtttcgcctttcctgttttgggcggcgcgccgccaagaaaagggtttgtggaaaattttttgcgggggcggaggggtcccaaannnnnnnnnnnnnnnnnnnnnnnnnnnnnnnnnnnnnnnnnnnnnggtttgttttgtattattgtgatgtttgtagtgggttagtgttttggcgttgtgtgttgtcttttttatagaaaattttttgtaatatggaagttgtaaagctgtgttttaataggattaccttaggaataagaggactgctttttaaagatacgagatcccgctgccttggcaattctgttatcagaaagatagtgattttgatacaaaacagtaagaaactgtagaattgcaggacccataatcctcacaaggaagatttagagagtgctgtgtgtcaatcactcatcagcacctcacagatattatctcaattcgtcctggcaaccatcactgcccctacttagcagtctcagagaggagactcaactcacacaggggccaagagctggaccacggccaaccaggtctccccacccccaccccagccatgcctctccccaccacaacagcaccccgcctgaccctagtgtccaggtctgtcccggtggcctccaaggaaatgggacaaaacatcctttctgccaactgcaggggcagcagaacgccccagtggttgagcatggcctctggtgaaggatggcgggggttcaaatcccagttctccacctctctgcttcgctccgattcctgggcctctgagctggtctcctccgctgtggagtaacagtgtgactgctcatctgcacagattccttctgtgctggacacggttccaagtttccaactactcccgcaggagctcatttagtggagacaagatcttgctcagtgtcatagtgaggaagaaatggaaatatctgtgcagggcccaagcccggcctggtgcgggagaggcattaataaacgcagcttgagttcagaagcaggtggtctgtggctcactcagcctggcttcctgctgggtcttcagcagtgctgggctaccttcctggagagaaccaaagtccaggctgtgtagatgcctgtggtccaccagcgcaaagcagcggcccatcaggacgcttcggaggtagatgcgtctgagttccatgacatcggggacatggccccactcctgttctggaggtcacgggcctgctgaacctcttgtaccaggtcagccaccaggttcatctggcaggacctgagagcccccagccaggtgggccactgttgcgttctccttctctgtgttcttccagattctcagtgactcccgcacacgcatctgtcaggttgcgccctcgtgccgaataacactaggctcgtactagacctagtgc

SEQ ID NO: 440434 - DNA, 1577 bp, Homo Sapiens
gggacgggctttttaaaggtatacgaggatccccgctgcccttggccaatttctgttttccagaaagaatagggatttttgatcccaaaacccgtaagaaacctgtaggaattccagggccccataatcctcccaaggaagatttagagagtgctgggtgtcaatcactcatcagccccctcacagatattatctcaatttgtctgggcaaccatcactccccctacttagcagtctcagagaggagactcactccacacaggggccaagagctgacccccggccaactgcaggggcagcagaacgccacagtggttgagcatgggctctggtgaaggatggcgggggttcaaatcccagttctccacctctctgcttcgctccgattcctgggcctctgagctggtctcctccgctgtggagtaacagtgtgactgctcatctgcacagattccttctgtgctggacacggttccaactttccaactactcccgcaggagctcatttagtggagacaagatcttgctcagtgtcatagtgaggaagaaatggaaatatctgtgcagggcccaagcccggcctggtgcgggagaggcattaatacacgcagcttgagttcagaagcaggtggtctgtggctcactcagcctggcttcctgctgggtcttcacagtgctgggctaccttcctggagagaaccaaagtccaggctgtgtagatgcctgtggtccaccagcgcaaagcagcggcccatcagggacgcttcggaggtagatgcgtctgagttccatgacatcggggacatggccccactcctgttctggaggtcacgggcctgctgaacctcttgtaccaggtcagccaccaggttcatctggcaggacctgagagcccccaccaggtgggccactgttgcgttctccttctctgtgttcttccagattctcagtgactcccgcacacgctctgtcaggttgcgggggtatctgtcctcgatgctgtcgatcttggtgtctgagactttgagctgacgagccagccttctccaatctttccccacattatcacatatgacgttaaatgctgcacacaggtcttcttccccaggcgcggccccggccgccgcccccgcctcgaagtcgtcgacgcgccgcagcaggtcgtggcgccgcagggaggcgagcagctcgcgcaggagctcggtgtgcccgggctccaggtcgttctgctccagcagcatggagaagaggtctaggccgctctgcacgcgctccagcttgcgcttgcccacgcgcccgaggcataggaacttgagctcggtcagctcgctgctcgacaggctggacgacaccgagtgcagcagcaccaggaacgggtccatggcggggtctgcaagcggccggggctgcggcccggccctccgtgcgccctctgtcctcggctcgctggccctggccaggtctcgccgcttgcccagcggcccaaggattccacccccgaacctgcactccggtgcctgattcactacaggaaatcccgctctcgacgaattcgagctcggccgatttggcctgat

SEQ ID NO: 440435 - DNA, 2881 bp, Homo Sapiens
  misc_feature (399)..(399): n is a, c, g, or t
  misc_feature (675)..(675): n is a, c, g, or t
  misc_feature (713)..(713): n is a, c, g, or t
  misc_feature (878)..(878): n is a, c, g, or t
  misc_feature (1424)..(1425): n is a, c, g, or t
  misc_feature (1436)..(1437): n is a, c, g, or t
  misc_feature (1442)..(1444): n is a, c, g, or t
  misc_feature (1446)..(1446): n is a, c, g, or t
  misc_feature (1448)..(1448): n is a, c, g, or t
  misc_feature (1451)..(1452): n is a, c, g, or t
  misc_feature (1563)..(1563): n is a, c, g, or t
  misc_feature (1859)..(1859): n is a, c, g, or t
  misc_feature (1863)..(1863): n is a, c, g, or t
aaggtttggggaaccgggggaacatataagtcccttgccaggccttaagagatgggggttcccaagggcaaccctaaggtggaagttccggagaatggggcgggcccgaaacgggccggaaggttcaaaacctcccgttctgccctgaaggtgcccattaatcttctgggcgattgttgaccgcctcgggcgccacagggccaaccggatcgctgtactcaaagcccgcctcgaactcctcttggtggccttgggctgggactccaccagtgagcaggccgccaggctctcctctctctgcaggtccccacttgggtctccctgctccgcgtcttcatcaaggccctccccctgcacgtcctctggctcctcgccgcccgcctcgccgcctgcgggtangcttttctcggactcgaggtacgaagcacgcgggtcgaagtctgcggcgatgcgcttctccatagggtcaggggcctgaggccgcaggatcagacggtagggcttgcccgggtgtttagccagcagatggcagcaggcggcgcccagaaggggcactgtggccagcaccaggaggaatacgctcactgccactatgaccagcagcgatgggagctccttcttggtggaaaacaccacttgcacgtggcaggcttcgcccgccagcgccaggcacancggagtagttggtacccggccgcaggccgcggaaaccnagtaggcgttgacgccttcctctacgggggaccactgcactgccgcgccgccccccgctggacacagattagagtaggcgcaggggtcgccgcccgggtcgcggggctccgccagccccgccgggcccagggccccagcgcgcagccagcggagtcagctgcacnccgcgcctcgcgctccgccacatccagcgcgatgacgcccagctcgaagacgtgcggcttgagctctgcgctctggttgaacgcgtggttagaaacgtaccgagaggggtccccgttgccacagcgctgctcctccgccgggtccgcgaggatttggtcttcggcctcctctccctgacttgtgtcttcctccgggtccgtctcggtctccccgagaattgtgaccttggccaggccttggcctttgattttgccctcgggtttggaaggcaggacgctgttgccccggcccttggctgtggacttgcgctcagaggtcgggtcctgtccgtcgggttctcccccggcgccaggcgcgtgttttgggggcccggttgctgccaccgccacgcgtattgacgtatagttggcgcccagctcattgtgtgcacggcaagtgtagacgtccgcctccttggcactcaggaggggcaccaacagggagccatttgcgagggccaggaagctcggtgtggctgggggcgccggccaagcgggtgctggagnnggcgtttgggnntgggnnngngncannaaatccccatctccttctccctctccttcctccgccccaaccccgtcgtcctccccgctcagaaccggtggctctaagactacggtgccaccggggatctgaagttgccanttgcaggcgaggcgtagggtggccgtcggcgatgcagtgtaacacgaacgccagtcctgcgcgcagtggggtgccgggtgcttcaagcggtggctcggcactcagatgcacgctgggcggtgcacagggcagggcgggcaggcggtacaccggcaccccctgcagcgcgggaggcgaggcacaagcaatggagtcgggctcgggtaaggacacccgggtgctcgcggcccaggcctgcagccacacaaggccgcagccgcagtggaagggattgtgatagagttgcaagtgtgacnagcngctaagcgcgtcgaaggtgccaggcgccagcgtacgcagccggttgttgttgatgcgcagggaacgcaggtcgggtagcgcaccgagtgcgtcccggggcagagagcccaggcggttgtggttcattttgagcagctgcagcgcgctcaggttgcgcaggtcgctccacggaaagctggatatgaagttgtggctcagatcgaggttcttgagctgactcagcacggccagtgcgcctggctccacggtgcgcacctcattgtgcgccagccacagcgacgtgacctgtgtgacgtcggcgaaggccccgcgccgcagcacagtgatcttgttcgcggacagactaagcgtcgtcacgttggcaggcagtccttccggcacctcacgcaactctttgtaagcgcagtccgcgaactggtgagcgtacttgtccacgcaggcgcacggctccgggcatgatccggccactcctagaagcgcccagaccaaccacagggcccgaagggggaacatcgcggctcccaatattcgccgactctcagtaaatgtcctggggctgaaaccccttctccagacccggcgtggcagagcagggaagatagcccaagcaagatacacgcatgtgttgtggcctcacgcgcctgtcccgccagcgcccgcgagcttcgctgctaattgaatgcaagccgcttttacgccctcactccaggtcttgcctgctccaggagaacggggcacggaagctgcagcagacagtagcacagacaaggatggtggcaaaacgtccgctactcttgagcacggtgggctggggacttcaggcccgagcatttctcccatatctgccccccatatcttcacagcctctcaagcagacacacggtcaaccccacacgcactatcccccaagccgcggtggcccctcaccgccccgccgtctcacaccctcacacaacagccggcttcggcagactcgctgttcccgactgtcgctccctagctctgatgaaaccccgac

SEQ ID NO: 440436 - DNA, 1182 bp, Homo Sapiens
  misc_feature (320)..(324): n is a, c, g, or t
accagtaataatagttttatttgattttaaaatagtcatcaatgtgaaaatttctcaaagcttaagagtaacagtctagagccaaggttgggagtgggggccaggcctcacacagagcccagcttgaggcccctgagccccaccctcctttccagagggagggaggagacagctgagggggccctgaatcagtcctctccctcgtccccaaggccagctgtgccaggcccctggagggcaacagctcatgcggaggactggggggggaagcaaacaggtaggaaacggaaatgaggttaacaattacaccatcacccccnnnnnagttacagaatgacaaacttgtgactatgaaaggatggaagatgaatactgataaactcctcagctccccagaaaagcccagtctgggctgggttgggctgattggaggaaaggtcttgagacccaactgcatgttacctctgaagaataaatattctaagaaaaagggaaaaccatgaggcaagctgctgcagtcagtcaacgcagctgacaggcctggcatggcccacaacctgaccccatccacacaggaaacagctgtgcgggtctggatagaggagaggtcaagggcttggactggggaccctgagctgccaaggtgtggggactccttgcagtcctggtgcagcaatggcaggaaggccagcaggggccctagttgagcaggttgccctgctcctgggcctgggtcaggctgtccttgcggtgcaggtggtgaacccccatcctcttggggctgcgctgggggcgactggagctggggagtggccaggccctgccctcggtgtgggaagtgcctggcccctcctctgtgcccctgttaatgggcagcaggctctggcgctcttcctcaggactgataggcaggttcagctcttcttcctccctgggaaagccagagtcaggttctgtgggtagcaaaagctcactctcttcgggtcgggcagaaggtgcctggaccacctcatctctgtcagcggggctatgggcaaaatggcgctgcagctcagggagggcatcgcgtccaaaggctgtgcgctgggccacagcagcaggtggtggagacggggttgggtaggggttcagctcgacgcgtgggtcgacgatatcccgtaattccggaccgtaccagccgct

SEQ ID NO: 440437 - DNA, 1573 bp, Homo Sapiens
  misc_feature (850)..(868): n is a, c, g, or t
tttatttcaaatagctttttattcacataggactagaggaaaatctaattcagtagaaaacacaaaacaaaaggggttattttattctattcaaaggagagtcatgacattaacaacaccaacaataatttggaacacaccattgcattttcaaatacaaaaaaggaatcagaagaaggtggacattccatgagcatgttcaacaatggtattgttattagatattaatcctttattagattattatttttcacatctgggaaaataccactggcagcacaattttaagaaaagtttggcaacatgtatttttctcagcagctctggatgacagatcttggtgatgctagccaaaaaaaattaagggcaaaaccactggtgcacagaggacaacaaactgatcttattacagaaacggatatcagaccacaatagaaaagacatttttattttacactaagccaaaaattctaggctattggcatacatatcaacaagcctggtctagaatgtttaatcacaaaagtactaaatattggtttcctgcctgccctgctcaccttatttaaaaatatcaggatatttgctttcaaatgacacagattgctgaggctgtaacctacaaaatggtcactcatttttaacggcttgtttgttatacctagaaaccactgaaaggacaatttcctatatcatagttactgtggaggtagacactgacgttgcttccccagaaagaatttgagactattaaagtgtaggaagaacaaatcgggagttttatctaaaaacaacccttacatacccaaggaagtgccattccacttcagattttgcaattcttctctgnnnnnnnnnnnnnnnnnnnaattactccatttctgttgaattttaagttaataaaaccaatagccaaatattgctgcaagatctctatgaattgtcacaaaatgccaactccaagaaggggcatcacaatgaaggattaaggacatgaccacaatgtcccaggaaacagtgaactctccctattatatttaatattgcaacatttgcttctattgtgcctaaggcccaaacaaaaaaataaaacgattccaatttgctttaaaaagtctggaaatctcttcctttcaaaacatactgatttaaagtttctccttttccagttttctttcaggtgagagttcatgcttgtgggtttgactcaaagacatctcccaaaggacaaggaaatgtatgtacaattttctttccacaataactagtacaacatgattaggtagtagccagatgatggcaaactatgtttgaaacaaaaagaataattctgcattagtaaaacaaactgccaagtccaaaattgtagaccaaaatacaataactaaatctatcttttaagaatatttgaaaaagtcaagtgactcttgaaaagagaagagataaaaaacaaaagacagagtatctatcaaaatgtttatataaaatggcatgaaagacagtaggcctagtggtatctcagaaaataagttgtcaaggtcatttctactaaggaaacagagatttcagaaac

SEQ ID NO: 440438 - DNA, 451 bp, Homo Sapiens
  misc_feature (400)..(400): n is a, c, g, or t
  misc_feature (409)..(409): n is a, c, g, or t
  misc_feature (420)..(420): n is a, c, g, or t
  misc_feature (441)..(441): n is a, c, g, or t
atttcaaatagctttttattcacataggactagaggaaaatctaattcagtagaaaacacaaaacaaaaggggttattttattctattcaaaggagagtcatgacattaacaacaccaacaataatttggaacacaccattgcattttcaaatacaaaaaaaggaatcagaagaaggtggacattccatgaggcatgttcaacaatggtattgttattagatattaatcctttattagattattatttttcacatctgggaaaataccactgggcaggcacaattttaaggaaaagtttgggcaacatgtatttttctcaggcagctctgggatgacagatcttgggtgatgctaggccaaaaaaattttaaggggcaaaaccactggtggcacaggggncaacaaacngtccctttttncagaaacgggttttcagaccncattaggaaa

SEQ ID NO: 440439 - DNA, 461 bp, Homo Sapiens
aaaataaaccattcagtagattttattaaccaaacaaagcctcctgagattggttctgtcacctcggagccacaagctgggaaaagataaccacacccacccagccagcttcccccacccccagctgtttccaggcctgggactggagccctgctgagaccttgtcccacatctaggaccctctagggcctttgggcacagacaagtagcaagggcctctgccaggaacacctaaaaggatgtccaactgggtgcttctccactctcagtctgtttgctcaaatgtggaattctaatccctggccagtttgcatcccggggatccctgaagagatcccaggaggggagtgctttgtgcactgaaggcgtggaacagggcactggaggaggaagacccagagccctggctctcaagacaggcctggctccaagcacctgccatccttcccagggagaaggaa

SEQ ID NO: 440440 - DNA, 895 bp, Homo Sapiens
  misc_feature (799)..(799): n is a, c, g, or t
atggagaaataaatacatctgtgtagaagaaccttttgatggaacaaatacagccagagcagtgcacgaaaagcagaaatttgatatgatcaaggatcaatttttaaagtcatggcacagattgaaaaacaagagagatttgtttttttactacctgtaagagctgctgtcctgaaaagataactggcctctatttcttaataaattcttccaagaaataaagaacaatagtttcatcataatacattatgtttacctccatcatagttgcttttttcatagttcttgttttcatgttttatttttaaaaagacatataaagattgcatattttattatgacatttcctaataaacccctttgatttaaaaatgtatttttaaaaatgtttacattgatgatgagtaatattgcatgtgttttcaggtgatcagataaaatatattttgggaaattaactgaacaagtaaaaagtttttgatataacttcaattaattgtaccacatgctaatcctgaagagatgtgtagaattttggaaagggtctaattcatacatgcttaaagtataacctacgttagatagtttgttgtcaaagtctggtctagtaaagtgaagattcaagtcagttgctcagttacttgaagcaaacgaaatctttcatttcagtcaaataactggagtcatgaaatactgaacatatgccttaagtctttgccttgactcactgtggatgactcgtaggctttgggcgggcctcgttttaagcatttgcattatctcctacacatgccttttngaaggcactctctgaggaattgatgatacatatttggatttggaacacacacagttacatgtcttgtcacttggcatggtattggagaaccacctc

SEQ ID NO: 440441 - DNA, 1144 bp, Homo Sapiens
  misc_feature (161)..(161): n is a, c, g, or t
  misc_feature (163)..(164): n is a, c, g, or t
  misc_feature (167)..(167): n is a, c, g, or t
  misc_feature (177)..(177): n is a, c, g, or t
  misc_feature (1120)..(1120): n is a, c, g, or t
gggcttatggaaatttaatagggaccccccttttggggggacccggcccgattttcccccctttgttccaagaaaagctggttgcagggaacaagctaattgcccatgtgccgttttcattacttctttttcccgcccccgacataggagccctggagttngnnggnttcgggtgcnttttttacaaactgggagctgtttattggtcgccgtgagaagcctatatacaaagaaggcacaaggagggggagggaattcccctgctacagtaccatggaaggggctggggctggggagtgggcctgccaacaggcaggggtcaggagaggttttctggaactagcctcagcttctcaaatgggccttaggacacagcccatgggggagggggcagagccaggctggctctgaaagccaaggatagctaagaactccacctctaggcccctgacgcatggtcagcgtggggtctggctggatggggtggggcagggccccctgcctattctacattcaagtgtcgctccctccgtggtcttgcagggtctctctggggccttctgaggctggctggtagtggtgagtgagaagtggcatctcctctgtatcctcccaacatctgtctgtccagaattggtcccctcctctctgtggaggatcccgccgtgccccagcacagtgagcccaggctacgttgccgtttgcctgtctttgttccttcctgctgcactccctgcgagttcagtctgtggccaaggagagaggcttcacagagatgcaggaaagcaagccgttctgggtccttctttctagttcctttgctgttgggtctgagcacgccaggtcctccaagtgcccccgtagacaaccttaggcaggatccccacctctctggcatgggtgtcattgggggcccaccagccagcggcccgggggctgctccctgtcagtagttttgacagcaaagtcaatccagtgactgtggctcaagatggatccagtgtgaaagggggaggtgtcaccacattgcagggggccttttcctcccggctctggtgggaggctcttttgctttttttggcgctggcagaggctgagacacggcgagcccatgcaccanccgtgatgcaccagcacagttcac

SEQ ID NO: 440442 - DNA, 2934 bp, Homo Sapiens
ggagggctttcaccaagaggatgcaaggaaaagccaagcccgtttctgggggtccttcttttctagtttcctttgctgttggggtctgagccccgccaggtcctcccaagtgccccccgtagacaaaccttaggcaggatccccacctcttctggcatgggtgtcattgggggcccaccagccaggcggcccgggggctgctccctgtcagtagttttgacagcaaagtcaatccagtgactgtggctcaagatggatccagtgtgaaagggggaggtgtcaccacattgcaggggccttttcctcccggctctggtgggaggctctttggcttgttttggcgctggcagaggctgagacacggcgagcccatgcaccatccgtgatgcaccagcacagtccacgagcagtgggccccacgtgcatctagggcacaggaatgcagtgcactcggcgttgtaaggtccacagcgctggccctcctgtgggaagatccccagggccagacagcatgtgcatgctcttgacgaggtgtatgtgcctgagcctgctgctaccagccaaaggtggtggcccctgtggactgtcagaggcataacttatgataaataggaagaaaggggacactgggggaggagggggtgggatcagggaggacgtcagtagtattggtcccgagtctgccagctggtcacccagtgcttcttggtgggcagggtgctccctggaggtgggtagcgctcctcctcccggatccgcactgcgtggtacttgggcatgatctgataatagcgggtccgcttaaagaagtcacaccaggtgggccgggggcggggggctgccccctcagtagtcgtcggtcagcctctctgtctctgacggctggctcttcatctccgccttctgcctcttagcttcatacagggcgcgagtgcgggctcgcttgaagaagccgcacttccacagcaggaggatgatcagccccagcagcagcagccctgcacccacggccaccagcaccagccacagctcgatttcggccggcagctcctccaccagctccgagtcaatgtccacagagaaccacgtggtcttgttctccatgttgatggtggggatgctggttcggaggaatagggtagcccagccatttacccggactcggtcaaagtctctgtaatcctcgatgaaggtgctgttccacactcgtgccttcacagtcacgttggtgacaacgggggcatcagggatggggcactctagccacacacagtgggcacgccctgtggcacaggtcagcacagtctcagacttggcttttttggcagcagccagagtgacaggtggggggccctggcctccccctggatccagctgtcgccgcctgcgctgtggggatgatggcctgtccccagggtcagaaagagtgaggttgagagggttgataaggtctccaggtggtcggcagggccaggacccattgccatggacggtgatctccgtgggatacagcagccacttgccattgctgacttcgtagggccactccagacctaggaccagggtccccaggcccaccagcccctcccccattgggcccacctggaattcatacttgagggggcttcctacatcctccacagttttcatgccagactcacccatcactgtccccccaaagaagctttgtagccggtgatttaccatgctaagcgaggtctggagtgtatagtccaccagcagagtgaggatcatgggccacaggttgtcctggtgactcgacgtggagagctgcagctgcacctgaaggtcccttgtgtgcagggtcaccccgatgacctcaaaggtgatgagcagctccatcctctggttccgtttgaaggggttccccagctcgcaaaagatggtctcattagcttggcaggccccgggggggcgcactgaggacagcagcagggcgggaggcaccaccagggtgagcagcgcctcgtgggcgtcctccccggagcgctccgaggtccgggtgttcgtcacgttgatgctcaggagcaatttccggacgtctctgctgtactggagcctgctcagcttctgctgctgctctgacacgaaggctgcccgcatctgcaagttgctctcacacttgttgtcaggcccgcactccttctggaactggacctcagtgtggttctccagagcctgtgcctggttgaggatcgggtaggcgtccagggaccgcagccccagccgggggcgatcgggcatccgcaaaggtaaagagtagttcatggagatgatgatggggcggagtttgtcacggaggttgtccatcaggagcagctccagcttctggcagcgcatctcgggcatggagaagaagccgtggaagacagcggactcactgccggcaaagcggagccggggcggccggcggtccctgtcagcctccagagtgtaggccagggtgatgtttcgcctgtagttggggttcccggcactctggttgtaagcaaagcacagctccacttgcacacaagaggtggccgtgcaaagtgcagggtccagcacagctggcctgggcaccaaggtcttgtggacgatgttgatgacgggccgggcccgcagcagcacaatgtggtctgacaggcttcccactagaaggtctgggtagaagttctcatccacatccatctgcccactgagggaatagccgaaggtggccaacccaggcagtcccagcttctctccatggattacctgctggggctgtctaaggagccccttagagctactgtgatagatgtacactttgcccaagccttcaaacggagctcccacagcaatatcctgaaatccatcctggttgatgtcaccaatgctggccacagataaaccaaaggccctcgtaccgaattcgccacccaggcctcgcta

SEQ ID NO: 440443 - DNA, 487 bp, Homo Sapiens
ccctttacagttttattaataattattatttttcgtataccggttgcactgattcatttttgctcttttattttttaggcagatggctggtttttgtaggattaagcagtgaggaaaaacagcaaactaaaaatgctacttcaaatatagcaacagtcactacataaggcttaaatcaatatattgcaagtaatttctatgaattttgaacaatacaatgtagtgtatgtggaaagatcttgcctaataagtttcattctactcctcaaagttactgaagtcagtcaactattaataacagaattgtttttatagaaagattccatcttctttactgttagatgttatacgtgtcttgtactaggataaaataatgagcattgtgcatcgcaccttctgataatctcatacttctataaatactaaggataaataatcactcttttaaatttagagagagttggttttaggctaacgattttttttc

SEQ ID NO: 440444 - DNA, 1640 bp, Homo Sapiens
  misc_feature (433)..(433): n is a, c, g, or t
  misc_feature (443)..(443): n is a, c, g, or t
  misc_feature (456)..(464): n is a, c, g, or t
catattcctgcaaaattcctaagatttattggagactaggcctcttctctggatccacaaccgtgtccagcccagaatcaggacccccaaacgtgtctgggaccctgtccctttcattctggtctagacaagtccccacacgtggccaaaggacagcacccagactctgcccctgaccagtcaatgtgcagcaaacccacttcagtaggcagaagagtctacccctagggagaaggcgccaggagcaggcaggtgggagggaaagtgttcggcagggcagaaaccctgcctggctgtatccaactgtcactcccactggaggcgctgtgtatgcagggcccggcagtaagcccagctgcctacagccaaggcccagcgacagacatcctccttcggtagcagcagcagcctgtcctcctccagccggctcagnaggcctgccncacccagcatcgnnnnnnnnnacatcccataagtgttggccgtgaagacagctacaatgaggatggtcactgcgaccaccaacagcattgcctgaccagccacagagcggccctcagggccgaggtggccgccagccactgccagcaccatgcctcctcccaggagcaggttggcagaggagcggtccccattcacccagtggaaatcgaaggccggaagggggatgccggtggcggtcccaggttccagcaaggcagtcttcatgtgtgctcagccctggggccagcgtggtgttgccagccaagacctggagcaggaagccagcgagcagcccctcgacttgcctgtcaacacagggtaggagagaacacgtgggaaaaagaggcggggtcacccttttaaacaggaaaggttttggggcttccatggagacctggtcttagacgcacttcccaccaacctgtctctaattcaggaaactaggtccattgtggtttgggaggtatggggatgcgcaccctgcagcagccccagtcgacttgcctcggctgtgctcacggctgcgtgcagagacaccactcccagcaccagatgggacagggctgtgctccactcggcccccggcttgggggccatggcacctcaggcggcagtatgtatgaggacacagataggagatactcaactttggagaggaagaaagcgcagaagccagcgacctggagccctacgcgcggcactctagtacgcccaggttccaggtccccattactggatgttaggagaagttcagtcctagactttccggatccctgaggccactgcacacacctgtggagaagaagaacctaattcagccgggaaacgggggaaaacgactcagggtctaagctggggggaacgtcagccctggggccctggagcccaagtgggagtgcgggcctggggaagagagagcggcgaggcgctgcaggcccacgcggcggcctcggcctgctccctgcgttccgggaggcgttgtcctgggaacccgggtccaggaggagcgacggcgcaggactccgggaggccagccgtgcgcagttaccgggctgcgcggtcccaacgcagcggcgagcgggaggcccgagcctgcgcaacgcaccgcccaccgccgtcggcctgcctcctctgccgtgcccccagttgcgggagcg

SEQ ID NO: 440445 - DNA, 2062 bp, Homo Sapiens
  misc_feature (105)..(105): n is a, c, g, or t
  misc_feature (147)..(180): n is a, c, g, or t
tttagataaatgctttattattttctcaaaatgtataaaagtcattcctcctagtacagagagctttatacattttatctagtaatgaatacaatctagtttacnactgatctattttactaacatttccttaatttcaattcgtannnnnnnnnnnnnnnnnnnnnnnnnnnnnnnnnnaggcttctgtcaccacaaaatgttacttggaaaactagatcccagcagatgacctgtacttctctgctctctcccctactgcaaagaggcagtgagggcagcattagtaagcctgactcaggggaaggtaagtggcctgcagagaaatggtcctaggtccgcaaccgaggcgagtgaacttgtcggacagatgaagactctaactggaagaaacgatcagcgcattcacggatgcaccaccatccagaaatctcccggtggcttccatacaaaaactgatgtttctaaagatggaaagaacaggtctaggaggcagaagagtatctcctagcaaagtgttctgtagctcaaagggtgagtgggctttggtagcaaaaagctttgaaggcttcaccctgggtgaatctgacaagggctggagccagacgggacctgcagcacctcctcagcttggcctcgtctcccctgaccccgcctccgtgcatgctgcctcagtttgccttctcagcagagaagcccccaccaccaggggctgggcatgcccagggcaggtgtggggcctgtagtggggcagcagcaactggtgggtgcccctctagtgggcgctcagctcacagctgctcaaatgggaacaggtgggaagctgctgctttcttttcccttttggtcttcttgggcccacccttcagcttctgcttttcttcatcttctcggttttgaggccaggaggcagccagtatcctggccgcttctgcttgagagctggtcccctcctcttcatcagaagagagtccacctcctgcatctgtgtggggagctgctgcctcactcttgggcccgtagcgacgcttcagcctctccctgatgagcagacctttggccagcaacttccagttccctagagcccgcttctcctttttctccttctccttcctttcaatgactgcctgctcattttcccaggcagtcaggagcacgtctttgaattcctcgcagacgatgtatccatcagtcacgggatgggagtagccgccatggaaatcaaagccagtgatggcctggacacagtcgatgtccagcttgcgggccacgcggtgtagattgggcaggttcagctggacacagccaataggcatcatgctgggcaggaagaggtacacattcccaaactcgttccggggcaccttcccgtccacggccactgggggctgatactccttctgtctgcccagtagccaaaacaggcccagggtcattttcttccccgcagctggggctcagcaagtcgggctttccgagcacggttagaaaagcctttcaccatcttgtagggtacttctccaagcctcaccactcttgctttcttcagccacgtgtccctggaatgcagagtgtgcacacaatccctggagtagaccgcttctccacgacaatacccaaggatggcagctgtctcgggatagatggcctcatatttcaggagatgccgcttcagggcatacagagggtggttcttatataagccaatggcagtgggcaaaggctggtccatgtgttttgcctgaaactccaagtcttctttcttctccctgtccataaatgggctctggtatggtctcaaggtctcggcccaccactcagcatcaacccggcacttgcgggtcactgtcatccagactgggtcgtacctctgtgtgacatctcggacccagccgtcactgtcaatgcccaccacataggtcatgggcttggtggcgtacttgtaacaggtcagaggctggcccaccacaccgtgcacacagtctacacatacccacttttcctcctgctcacagaacacctctagccactggtctataccagctatgcttcttttttctcc

SEQ ID NO: 440446 - DNA, 362 bp, Homo Sapiens
  misc_feature (132)..(180): n is a, c, g, or t
agataaatgctttattattttctcaaaatgttataaaagtcatttctccttagtacagagagctttatacattttatctagtaatgaatacaatctagtttaacactgatctattttactaacatttccttnnnnnnnnnnnnnnnnnnnnnnnnnnnnnnnnnnnnnnnnnnnnnnnnnaggcttctgtcaccacaaaatgttacttggaaaactagatcccagcagatgacctgtacttctctgctctctcccctactgcaaagaggcagtgagggcagcattagtaagcctgactcaggggaaggtaagtggcctgcagagaaatggtcctaggtccgcaaccgaggcgagtgaacttg

SEQ ID NO: 440447 - DNA, 1702 bp, Homo Sapiens
tttgcctgcagaaaaaggagaagcgggctctagggaactggaagttgctggccaaaggtctgctcatcagggagaggctgaagcgtcgctacgggcccaaggtcagtgcaggttctttgcagagaagacaagctcagggtcagtttcttggagatgcagctcagaaaggcctggcccagattctgccccagcctcaagtcagggatagctttgtgttaggacacctcagtcttctgtctctaaggccgcttgtttttaccttgttgggaaaggtgtccctggagtgaggcctcagctggctcttctgccccaagccctgtcccagtgtccccgtttctactgtccacatgagcaatgccatgggtctgatttggcgctgaacacattagggagggccaagtgtcctgcatttggtgcacccttccgccttccagtgttcccagtgcctgtgaccatgctgcaggcctgcagtggcccgctcagtacctctctcacagcacctgccatgtgccaggccaggcttggacacaggtgtgaatttgacatgcagccctcaagggggcccctccctggggcagatggaccctaggcccagttacatggtatagtcagtgctgtgtcagacacagcagaaactgctctggcatgttttgttccctctctccaaccctctgtgctgcctgtttgcctttcaacattttttgtcacgctcctcattccagtccctctggtggagaaaagcccttcatctgactttatgttctgaccagctccttgccgccttctccatccaaaccctccctagccatcccagctggcagggagtgccgcctcagatcttagggctccgagggctgaactgtgcatcttgcccgttcaagacatcatgtgctttggtccagaaatgaggtagcaaatgcaaggcacgaatcacaggcttccccagatgaggcagtgtgctcctagagggcagcttcctgcccagccatcatccttgtgttcccctgcactcagctcgtagcaggtgctccagtgtctgcttggatgcaccccaggctgggacggctcagtaagaagggtctggggctctctccctgccctgtcccatgcccttgtcctcccagagttacacagcttagggcaggctgggaacttgctgcctcttcatggggcttcctggtatctgattactaaccctcgcctgtgtcctcccaccactgccacctgtccagagtgaggcagcagctccccacacagatgcaggaggtggactctcttctgatgaagaggaggggaccagctctcaagcagaagcggcaggatactggctgctcctggctcaaaccgagaagatgaagaaagcagaagctgaagggtgggccaagaagaccaaagggaaaagaagcagcagttcccacctgtacccatttgagcagctgtgagctgagcgccatagagggaccacagtggtgtggccactaaggcccaactggcgggctgccagcctgtgggggggtccgggcaaagcaagaagcaatggcgaggggccaggagaatcgcctctggggtgggcgtccgtagtaactgagatccggaggctagtggtcaccatcaccagaaacagagatctgcacaagtccaaacatgggcaagaagacgaacatgccatacaacaccagaccctattcgccgagaactgagc

SEQ ID NO: 440448 - DNA, 1639 bp, Homo Sapiens
taaaaggccaacctttatgttcttagttctgtccccctccttctgcccccaggagtagggctggttgaggctctgggcccagatcctgggcctcccttgcccttcctagcacatgttggagctcagcctgggccctatataagccattgacttcctgtacgtggaagaggtagaatgcacctgcccacagcaccagccctacactgggggtccagagcagtatggcagcttccccggcccctcctccagccgccaggacacacagcagtgccaggagaagcagccccaggccaatcacatagctagcgaaggtggcccaccagcgagcctgagccatgcccagacccagctccgtccaggcctcctttagcacacacatcaacggcgacctctctgctggtccgtgggtagagttggggttctgctgtggggggctgtgcttcacaaacagagtggccatcggggcttggtgatgagagaggggggtgcgagtgtgagggtcaaagcctgtagtggtttcaaaacttttacaggagatgtaaaacccagaaactgccttgtaaagcacgtagtcaatgcggacaccaaagggaaatggcttcagctcctgctggctgacgtagcagttcttgggtaccattgtgttgccttcctcagagcccttgaagtcccgagtttcaagataggcatcatgaagccctgtccactccttcagcaggcagcagcccaggtcttctgggtgcatgttgaggtctccacacaacagaaccacgtctgccttcttggatgtgtggtggatgaactgggccaattcccaagcttgggccacacgatgtgctaggtagatgtccttctgtcgattgtattcggcatggagatgggtcacataggcgttgagcaccatgccacttagatggagcaccagcagccccacagccttcccactgaaccagtcaccatgatggatcatgtaggggtagccattgagagtgtagatgtgctgggtaagctcctggattggatgtttggagaagacacagaggccactgccaatgattccgctccggaagtggtgtgcagctgggtaggtaggtgacagcttctgtctcaggtactggaagtcctgctcactccacacctcctccagcaaagccaggtcgaagctctcctggttcagaaagtctcccaggcgcctcatgcggtcggcccggtgcttgctcaagtacggaatgccccagcagttgaggttgaagatccgcagtcgcagggagaagttgggcttcatggttggggagctccaggggcgctaggcggctcgaactctccagcgacggccgcggtggggacgggggcggccggcggcgccttctccctagaccgttccttcttcgcaggcggcgcgcacaggtgggcaccaagcccgcgtggctcaggtcgggcccgactcccgcgttcccccggcaaccggccggctgttcccaatcaggcgggccgccaacccggaaaggcgatccgctgccgaaatccgggcgcccaggcatcggtaagggccgcgcgctaggacctgggggtccggagagcgcccccgggtgggcggctcccggttccttttcctccaagctcgtccccggcggtcgcg

SEQ ID NO: 440449 - DNA, 1781 bp, Homo Sapiens
  misc_feature (68)..(68): n is a, c, g, or t
  misc_feature (394)..(394): n is a, c, g, or t
  misc_feature (1150)..(1199): n is a, c, g, or t
  misc_feature (1530)..(1530): n is a, c, g, or t
  misc_feature (1596)..(1596): n is a, c, g, or t
ggggaactgactgataacccttggcagcaatcaaagtgccagtggctcctcgatgtttacattttttnctattttgttcagtcttttgttttaaatgattctaaagagattaaagaaaacagagttttaaatgtcctgtttacatgttaaaggatttggggaaattgggtatgtatgtgaatgggtgtacatgtaggaacctgtagttcagcaaagctgcgctgggcacagcatgcttgtacttgattgacaaaatcgtgtttgccagtccactttctatttttcctttaagtgatgctgatcactcaaataatgcttttaagctattgtttgtttttatttgacatgttaagccgcagcactttcttcttcatctttccatttactgatattngggggaacaggctatcaaaggttccggcttgaagggaactgtcactaccccctctaggaagttattttatgtagcatgtttgcatatacgcattgtgtggcatgtgcatagaggcttgttttacacctatctgctcattttgttgtgttagcttttctggtttatttcatagtttgttcttgctatttattaagaacagaatatcaaaagattatgaatagcctcagctctagaatgcttaccactgttaaaacaacaaaaagactaaacctctaatttcatgcaaatctttgttagcttattctaagaaatttattaagtaaaacaaagaaaaaacagaagtgggagatagttattttgtgcgtatttttctttaaatcattttgaatgatgtgaaggcattcagtttgctgtatttttttaatcacttcatacaaggaaaacttcgacatttacatttctagatgtagtaacagtctactttgatatatgagtatttaaactaaggcattaagagatattagatatttcttaatgttttcatagtgctcaataggtgtagtagcaatgatattacctgctgaaaccaaatactcttttatccttgattccactatgggaccttataactagtccatgaaaccaagctcagaaaagctttaactcttatatttgtgtatatgtatgctgcttctgaaaatataatttttctaagttgttgtaatgactttaatttgtaatcagctaaggcttaannnnnnnnnnnnnnnnnnnnnnnnnnnnnnnnnnnnnnnnnnnnnnnnnnatatttagttcagacctagagccagtagaagctctcacagtgagttcaatttgttagtgaaacattgtactgcatcaccagtttttcttaccttctgttgacagctgaatatttctgttactcagtacttgcaaaaacagtaactaaaatgcactatgctgagtggaaagcaccgtcataacaattgattgccatagcaagttccaaagtgaatttcagccttgcttcacatttgtatcaataaatatgcacattttttaaaactttctaacatatagtctttggatttgtttttagttatgagccgcattctttacttgatagaactcangattgtcttagcctattgccatatagtactcaccttataactatgtaactttctcgtaatgtatcntgttgtgcaatatggggaagctgtgagtggattcatagcttttttggttaaatggacattatggggggtgatatatggatataggatattaaaaaaggccaaaatcttaggctcgcttccctgttggtggggaaaaaatggttcccttaattttccgggcaccaaattgggaaatcctcctaaat

SEQ ID NO: 440450 - DNA, 1807 bp, Homo Sapiens
ttgacaagatccctctttggggttaggacatttccgccaaaagaaacaaaaacaaacgctgcttctggtgttggagaaaagaacacttaaagaccgggagttttttggcccgcccgtcctcaccaggacaagactcaagtaagcgatgcagttgcccgatggctttcacttgtgattttccacactgcatgaacgtgatcttgttttgtatggctcgaatagcactgactggatcctccagcagtcacctggcaggcagactttagttctagagaacccacaggttgggtaccacgacgaggaaggggttggggaggcaccaggtggggagggccagtggtagttttggtgaagtgactctgctgtggtacttgactgttactcttctcattagttccttgctctggggaaagggtaagaccactgagtacttcctccagctcctggatttgtttgatcaacttctgacccttgtctggaagagcctggatgttcactgatgccagtgtgctcttcttttgtttcagttgtgttgtaaggtagacacgccgggctactgggtctgagggttctaccttcttggaaacacctgaggcaggagacacctttctttgcacacttcgatcagggaattggaggttttccttcgtctctaagtccagagtcgagtcaaagagtagggggctcccaggcttagaggaaacaaaaacaacatcatcttcctcctcgtcgtcactgcttgtggcagcttcacggccctcacccagggaaagccctggtgctgctggtgcagcctgagccgctggtcctccaggagcaggcacactgtgggtctccggccgctcttggaaatgcccctgaggcaggcttttttgggtgggcctgtatgctaggggccatcctttgcctttttttctttagcctccccagttcgtgtactccttgttgaggggtccccctttctggggcttgcttattgagttgtgactgtgaacattttgaggcaaaagctgggtaaccttttctctcagagggttctgattctctttggacatcttgactcttaccacttgatttctcctgagaagatgcagatggtcttgtaagctcattaccttggcactgttgagatttaatttcagaaaagtctcttttgtgtgtgcctccagtctctgcctcacactgaatctctgctccctcttcttgcttcttctcttgaactacagattgttttttctttggtaccaggccagatgagaggtctttctccatcatttcaggcttctgttctttcttttgatcgaaaagctgatctcccttttctctttgcttcttatcagccttcttttcctcaccttcacctttgatgagctgtttccagagagctggttcttgattcttgtcaagtaccttgaatggatttctcagccagttggaagaatgatgaaatgtctcagatgcatgctgagacttattggatacagaatgttctttggaatcaggatcctgccatggaatacttccacaccagcgtttcccctctgccttacttctaatgcatcggaagaacaatctgtattctttcttgtcctgtggcagaagcaaaccctgaagctctaccacaaagtcctcatgcaataagcaatgggaaacaggaatgtcggtggcccgcacgaagctgcacgtgtctgcccggcacacgtagaagctctttcctttattcgggccatcgcggacgccggtcttaagaaagcagaaagtcccgtgctctggacacctacctcgtgccgaattcgccacccaggcc

SEQ ID NO: 440451 - DNA, 1323 bp, Homo Sapiens
aaaaactatacagaatgggggacacgagggaaaaaagtcagctatgccaacataatcttcgcatattattgaaaagtgatgtaaaccactttcctcaacttacaaaacctctcaccatctttaaaaacttctatgtttcgcctcatgcctattacggactgtttcttggtaccaactggcttgaactaagcagatttctaacttatgacctcactacctgttcagaaaagcttccatggttcttttccctatcattggtattttgttcactacaaatatgccctggaccacaggctgcatcttcaggtgaatgttctgtctgtctttcctggctagtattattttgttgtttcgtactaaccatttcatcttgagaagacctctgaatttcctggctattctgatggacaaactcagtatcaccagcagaacttttcactaatggtacagaatctaactcttcaaactcatctcttacttcacagttaaatgagggaactggtggtgaaagaccagtgtatgcctctgcctctctgttttccaactcaaatactgtattgcctaatgattcctggtatctactaccttccacgacttctgcagaaatgttgaagatggtcattatcttctccatgtttgccatctggatcataagagtctgtatgaaccaatgcaattccattttggacacttgaagcactacaagctcctggaatatactctccctcagagtgattatgaagatttgtactgcttcctaaggtatccctgccttcctcactgtgatgtactgcaacaaaggattgactgctctcagtggtttgattcaatgctgaaccacaagtgggaatttctgtttcacttttttcaaatataggttcacttggtaaagaagaatcaacttgatccaaaggactggaacctgaggaattttcctttggaacatcatctagttccaacacttcatagtcatcaccagcccgacctaagcttctttcatgtctggtcatacatggtttaaaactgacataagcatgtcttcttccatatctcctgcctgtaattgtctgataccctcctgctggtttgggccagacagccttaccagattcttggtccattgctgctggctccttttcagtgtactgtgacatatatggcagcgtctgtatgaccagttcagtagaattatagatgtgatttagtttttattcacactatggacaagccgcagaagattccgaaatgtgcagcggctccggagcgagaacagctgctcgaacctccacccgccaccaccgccttcttctccgcctccccgct

SEQ ID NO: 440452 - DNA, 1422 bp, Homo Sapiens
  misc_feature (650)..(650): n is a, c, g, or t
ataaggttcttaactttaactttctggacgcttgggctgcgatttcagccacagtttgaattctgtgattctagcacagacgctggctctgggtggttggctttgccaggcgactctccttggagtgtttgcccttggctgctcctctgcacgcctggcactccgaggtcaggcactgtgagtttaccttgcagggtgtggacactttggtaacccctagatcatctggagctttgttctgggataaagtgaattatctgggaatggtttgatcattttaggtcttgcttttatgattttgtaggcgagtcaggagcagggctcagtctagggctaattatccccattcctgaggcaagattttctgagaactccacctaatgctcacagattgggagttttcctagtctggctggtgggagtgggtcctgtccccagcccacatgagtatcaggaattgatctattgagagtttccctagtctggctggtgggaacgggtcctgtccccagcccacatgagtaccaggaattgatctttggtcttttcaaaggttgctcccagccttggtagcctccctgtttgagtgtgcgaatgggtagcaacccactaggtgctggaggggctgatctggtgagtctttccccatngcaggcatctctctctggcactctgacctgccaactcctgctgacttggtctcttcaactcacggaggctgctgggctcttcctgggcccctccctgcactgaggcctgcaaactctcaaggcggagggaggtctgaggccatcaccgggctcacctcccgttttcctgtctctcagggatcgcggtcctttgttgccaaatgtcttgtgtcttgacatcttttgtttcatgtttagtcttttttgtcttgttttaggtctgtttcctatgctgttgtcttgggtggaagtggaaggtttgttttttaaataagacaaagttataaatttgtttgaaaatgttagggaatgtctaaaatcctgggaaatacctggacacctgctgtgctattccctctggatcgttccagccacgcgatgggcaccgccacccccagagtcatcaggcctggcgtgctgctccctctgtattgttctagccacatgatgggcactgccaccctgacagtcatcaggcctggcgtgtgcggctcagcagcacagcaggagccccctcacacactgcagcctgggtgcccgtctctagttctggctctggctcatcttcctcgacgcaggctctgatatcagatgaccaggggctgtgggcagggctccataggcccgggtgggctgggctggaggacacaagcaggcccagcgaccccaggatggaggaggactggctgctagaagaggaggtgctgctgtctgagatggtggagtgtggtcg

SEQ ID NO: 440453 - DNA, 1685 bp, Homo Sapiens
  misc_feature (596)..(633): n is a, c, g, or t
  misc_feature (1182)..(1198): n is a, c, g, or t
  misc_feature (1663)..(1663): n is a, c, g, or t
agcaggctggtaccggtccggaattcccgggatcagcagccccgggctggggaaacactagggaggaggccacctggagcccaccctcccaacaagaagcccagaggacgccggcatttggggctagccctgcacccccacctccagcccggagacccaaaggcagctctgatccagtcaggcccttgttgcagtgcagtgcaggacagccagcccccagccaggatggcaccaagagcccccgccccacctccatgaccgccaggactttcctcggggccccacatcagttcacaaagtgccacgcagggctttgagggcccagtctctccagccagccgcagtgcagtggcccgaaccctgccctagctcccaccgggtccctgggtcctttgtctccaccaaaccccagcggggctcctgtgggcgtgctagctgccctggagccctccagagtgcatgggctgcgggttcccatggccagctgggctcaggttgtctgtggccagggagggtctgggccctgagggtcagtgcgaccaggatgcagctcctggccctgtggcctgcagtttgagtttccctcgaccagctgnnnnnnnnnnnnnnnnnnnnnnnnnnnnnnnnnnnnnncattggtgccgcccagggcaggaccaggcacgcccgttgctgcgcacagcaggcactctggctgctgcgctgcctcctccagcttctcagcctccctcccagtctcgccggcagggcccgtggcctgtaaagccccgtgccgccgtgtcagcgcgttagtcagcctctcagcccaggcgagccaccgcgccgtggagtccctataaactccctggcgtggcctggccccaccgagtggggtcagtgaggcccataggcagagcagagtcccgagctgcggtgctgcgggctcagcaaggggcaggacctggaacagggggccaagcctggcgtgggagcacacggccactgtagcctccagggacgccctctgagctggcctgaggccggctggtccatgagccagggcccctggggagcagacacctggtgaaggaggcgctggatccagggccatgtctgggaaacgaagtcgagttcgcaaaccccgggccaggagggcaggcagggcccagccggcagctgggcagcagggccctgaggtcgagnnnnnnnnnnnnnnnnnagggggccctcagggtgaagcgggggtggcccctacagggcacgtgaccagcatcgagccagcacctcagggacaccccagggtggccaggccagagcagccacaggcagcctcgagaccggtgccggccactgctccggggtctgagctggtgctggtccttgctgggcacatggaaggctgtggagcaggggaccccatgccggccctgggcccccgaactgctgaggctccatgaggtccagctgtgcctggcccaggagcagctgctgctgggaggaccggtggcgggcaggtccagctgcagatgcagctgtggcgggaggagcagctattggttgcagcagctacaggagaagcagcttggggcttgagcaagctacaggagggagcaggcctgggttcacctgggaggggccttcaccttggccgggtccctggaagcactacggagggaggggcttnaaacactggagaacccagggcc

SEQ ID NO: 440454 - DNA, 408 bp, Homo Sapiens
ttttgttgttagccattattttattatttaaaatacataacagtcatttaaaaatttttgtataacaggacatatatgtttagaaaagcaatctcagcaacaggtctcatagagaaatacatctaataatttgcttcaatggaaatcactgctgcttcttcagggcaataacagcataacatctgggagatttcacgggatcaaacaacttcacaagagcagaccatgcaatatcttcctgtaaattaataagtgatttagatatacaaccatttgttgaagaaaaaaattagacgcgagttggattatatattgtaatataaaaaatacataaaaacaaagctgtttcacagaaaattcttatgctttgttaaacaaaattaacattcacaattacaccttcaaaaa

SEQ ID NO: 440455 - DNA, 557 bp, Homo Sapiens
  misc_feature (378)..(411): n is a, c, g, or t
tttttttcgtatggctaatggtgacacactttattaatttaaaaacacgcccttcccacatagtgcgtgaggcatgtgcacattttcctagaaggacatgaatagtgatgtggaggtacggtggaggtcaggcatctacagggtcattcgaggaggaacagattcaagctttcggacgatcagtgttttgtaaatagcagcatcatcagatctaagacaacattggacctggcagggccttttctttgggtggcattaattactccagattcagaccaggccatcctctcccggcccaggatctgcctctccctcctctgtccccacacctagacatgaaagccataacccttgggcccctcagagggaaaacacaannnnnnnnnnnnnnnnnnnnnnnnnnnnnnnnnncattgttgagcagtcctctcacggctgggagcctctgctgcttccagttaactgcctttctggaaagcgattctattacatgatggaggcagcggaatgaaacattgaattacacggcacgagatccaagctagttgttctatccc

SEQ ID NO: 440456 - DNA, 400 bp, Homo Sapiens
cgtatggctaatggtgacacactttattaatttaaaaacacgcccttcccacatagtgcgtgaggcatgtgcacattttcctagaaggacatgaatagtgatgtggaggtacggtggaggtcaggcatctacagggtcattcgaggaggaacagattcaagctttcggacgatcagtgttttgtaaatagcagcatcatcagatctaagacaacattggacctgggcagggcctttttctttgggtgggcattaattactccagattcagaccagggccatcctctcccggcccagggatctgcctctccctcctctgtccccacacctaggacatggaaagccataacccttggggccccttcagaggggaaaacacaagggggtgcgagggggtgggg

SEQ ID NO: 440457 - DNA, 1356 bp, Homo Sapiens
  misc_feature (179)..(179): n is a, c, g, or t
  misc_feature (661)..(661): n is a, c, g, or t
  misc_feature (909)..(909): n is a, c, g, or t
  misc_feature (1012)..(1012): n is a, c, g, or t
  misc_feature (1018)..(1018): n is a, c, g, or t
  misc_feature (1097)..(1097): n is a, c, g, or t
aaaaaaaatataagaggttctctctctaagaaacccttttaaatttccgtgggaaacctttccaagattgccaaaaccccaggacataaattatggtgtagaccaaaagaaaaaattccttttttctttaaaattcaaggccccattctgacaaagtaaaacgcccagcataatggtcnccaataaatcccctgatagaatacatttgaaatgtttctcaccccaaagagaaagtatctgaactcttttaaactttttccaaaatatactctgaaaagaaaaattagacatgcaaaatattaaagatttcttataaattactttaaaatgtctttcattaggaccaataccctagagatatataaagtatatgatttggggaacaaaacatactttacttaaatgtgcatttattatgtaggttgtgtgacacatgacatactgtacattataaatttatgtttttacagagtatatagaataataactaattgggaagtttataagctacatttaacagaaggctgttaaattaagacagtttctgcctttattagagcagtaagaccacaaaagctctctgtactacttattgcctgtatgtcatttgctttggtcagctgaaaaactacattaagagtgaattatcttaatcacatcncctgtaatttctgcctactaatgaatactcctatttctgcaatatattctataatcactactaggattcttttcagagtaacaaccaaaactgaagtagaatttgctgtgtaaagccattttcctttaaagcagggttccacaagccaagttcatacacaaggtcagaaggatcatgaactccccaactggataataaattttgtgtatatgtgcatttttctggagttgaaggtccaaagagggtgncagatacttcaaaggagtacatgatacccctccccaacaaaagtcccctatctctggatttatgcttaaaatgaatgcatattttacaaagccattaaagatnttagtnataaatatcatgctagagacttaggaactgccaatgaagtacttatcaactaaaaagtctaacgaaaaacaagattatntttgatgagtctgttggaatgggaacataaaatagctattcttattttcacctctgattttaccttctgggagaagcatttatccagtgctcagttaccgtaaacacagagagatattaaaccaccctccatttcctcaattgtgtattaagagagtgaactaataaaatgttggacataatcatttaactgttcagaatattgcaaaaaatcaaatagcatattttttaggtaactcaatttttgttcccaatttgtt

SEQ ID NO: 440458 - DNA, 2038 bp, Homo Sapiens
ccctgggcaggccaggtgggccagctgggggcacaggtcagctggaacaccccccaggtgcccgtgctgccagtcttcttgcagccacctgtggtcagcatgcctggcccccggctgcggatcacgtagccttctgccctgtcccttgccagatggcgccctcggaaccgcccggagaaaccaggtgtggtttggcctccgagtcccccccaccgcctgctgtgggcacagcactcagccgcgagggggacagcgggtgggcagcaagactgcttcctttgcggcttcagaccctgttcgctcctaggttcctgtggtccacgcgccgtctccacacccacttcctatacttgagttgatggttagaaccttgtcgtcaccctgcagaagtacagtgccttgaatgccagcttttccgttccctgatgaaaagatatgttaaaaaaaattatcggacaaaggtttcatttgcaattggcttgtgcattgataatctttatttactgttttaagttgcagagatgtgaatggtttacaaatctgaagctgaagttcaatctttggttttctgttgtaaatgccttttacaaacattgaattagctaccttaagtattgaagagcttccattgctaggtgagccctgctttgtcctcagtagagtgccggttccctgggctcatccaggggctgagagacggcgggacgctgggggcagggcacactggcggactgcttgctcagtagggaatgtcagttgttgcgctgggccatgagaaatccgccagaaaacgttaggtgagcagacatgccccccatgccagtgggctgctgtgagtgaggataaggtgtgtgttgggcatagaaaccctggctgcccgcccaccctgtggagacaagtgcagctcctccagctggagaggctgccctctctcctgcccacttccctcccttctccatgatttccatggagacctgtggctctgctcacccctggcatgcagaccgctctcccgtccagccctaagcctgctctgcggagggcggggtcattcttctcctggagatttcagtgggactcgtccccagtgggcacaacacagcccttggtgggaggggaaggccccagcctcctccacctcccactggaaagcagactgcttgggactgcccagctgtgaattgtatagtttctgtacttattagaactgggtaaattattttggttcaaatctattattccatcaattcagttagaattgaattttctaggtgattatgcagaatcttctgccagggcacgatgctgtcgtaagagatttctgttctctgtactgggcccccttgccctgttccttgagtgaagtgggggctgccctcacctgtcccccttgcctgtgaatcccttccttgtacatggtggtcagtggcacggaatccccaatagattgtatatctgaaggagaaaaataaacacttttgctcgaaaacagtgtgaaacaacatctttttcttaccctctatccatataaaatccaaagcaaccagcctcctagggagcacaggagttgggagccagttctgggctcagctgcatccacacctctggaggagggtgctgaggggctgcgggtgctgggctgggctgtccccggcaggggtctgagagcagggcatctggcagggctgcctggccccccacactgcccccgccagctgtggcctgggccccgagcacggtcagctctgctggtcgggttagctggctgggctgcccaccactctgcacctgattacacttagcagtgccacgggctgtgaccatgatgggagggagccagccttctggtcagggagacacacctgcagcccctgtttccaggagggcttgtgttggattacttgcttgagcccctgggccaccctctttgctccagatgggccgagctcaaggggaagtgggagcctctcagatgagcttggacttgttgagaggaggacttggggcctgggggtgccccatggatcatgcagggggc

SEQ ID NO: 440459 - DNA, 1378 bp, Homo Sapiens
  misc_feature (1104)..(1158): n is a, c, g, or t
ataggacacagtttattagaggccatcagacctcaggcaccaccagcatgtggagtctgagctgcccacctcctccaggaaggtcacttcgagtccgtgaaggaggcaggcaggtgtgggggagtgaccacaaccaaagtagcaaaagcacccctgtcccaggtgtcagagactagggtggaccccaaggatctcataacctgcactgaccctgagtattgaccctgagtgacctctgagcccgagtggccctgatgcttggcagtgacctgtgtctagtggggggactctgggacattatccccaaaagggttttaggcctcccctaggtcatgtattaaatagtttttccttataggaaccctctggacctctcccagcattgaactcctggcggggtgtttggccactaggtggtgggaggtagggatatatgggtccgtcttcacaatctgggcctcttccttatttaaggtgccagggtggtcagagatggtcctcggcttcctcaggctggacgtccgggcagcaggtggccctgggcacagcctcgctgtccaatttcgagagtagccgggctgtctcctgggtaatctcaaaatgcttgggcagcggggtgcggcgcagggggctgccctcaggggaggcagctgcagggctgggcccccgcccccgcaaactccctctgggcactgatgtgatgggggtctcctcgcacagcttggaagccaccagggccagactggacagctggtgggttacaggcctcacaccgccccggggatacttcactggctggcggctgaagtggccacgagactgtgtccccaggagtgagtcctctgggccttggctggacactgtgtacggggtgggtggtcagtgcagagcaccttcaagtttttctgtatttccccccaggagtcattttttagcaagcccccctggggccaggggacccccagaacttctgagcctctctctaacatactgaccttcccctcccccatctttggtgtcttcagccacgtcctctctctggtcactctgtggagttggaatctcggtaggtgtggccgtgggatgctgctccagggtactgtnnnnnnnnnnnnnnnnnnnnnnnnnnnnnnnnnnnnnnnnnnnnnnnnnnnnnnngtcaaggtgcgggggtggcggttgggagctggttgtgaggggcccaggggctgggctggagtcttggggcgggggctcagtggcctgggggagctcatccatcccaaagatctgctcgtagtgcacgatgaggaactccacaagctgggcctgatgcccagagtccagcaggcaggtgacagggatggcgctggctgcccgcgggccgtccggcggccgc

SEQ ID NO: 440460 - DNA, 2203 bp, Homo Sapiens
  misc_feature (641)..(650): n is a, c, g, or t
cgctgggaccctcagtcccgtgttgaaatcacaagacctctgaggcgcttgtgagccttcagctgatgtgcagggttcctcgctccccttcctcgctggctttccccatgaattgaaaacgtcttgattcctcatgggaacttagtcactttctttaggaatgattcagttcagccgaaactaaacacgccatatgttttctgatgcgccacagttaatgatcacatttgtttgaaaacaggatctttgtcctcagaaataatcttgattgtaaagtaagagagaaacatatgttctggaatgatttctgcattatacatagctttataattccatgaagtatcaagctgctgtttaaaatgcctaaacagattaaagaaaaacctagattaaatgttcttttccaaatggggagttttgaaatccaaatagcagtttgagtccatctttctatgaagagtatgtttttgattgaaaccgagtcagcgtaagcctatttcagcccctttggctctttgacaatattcatcttaaactttagttctataaattactaagtacttcagtgttgtttgtttcagtggttgtgagggtttcttgtttcctttagatctttaccttaggccaaactcagtttaggnnnnnnnnnnttgtttgaactattctgtgttgtaatagcacatttctgttgagttaatagtggtcttcccaccaacccctaaaaccaggttgatttgctcaatctcagtttgtataaccccagtaagcgcatggaggtgagtttctacttcgacttgtggcgacacagtgccagtttcctgagctgtgtgtactacttgcaagaggcaagtctgctgaagaaccccttcttttaacagtggaaaatcaagaacagaaaatctgttcacacacctgtgtcttattctttatatatgctacatggtagaggagcagcgaccaataaagtatccctcattttaaaccaagttgtcagatttctctgctgatagaacgctgcatagtatcttctagccctaaaaatgaccaggttgggcatgagttaacaggatattgtggcaaaaggaattttctgcttagaaaagtaaatgtagataaacctaaactccaccctgtactgagccttaggctagggactcatgtgtaaagatgacttttctccccagatatcttgtcattgacaggccttcctagtctggtagtcctacatttgggtgttctcctgagagtgagaaaaaacccaaggtcatgacaagattcctggcaggtgacagacttcattatgattctgactctagactgaccccatcaagatagtcgtttccgtcagtgaacagatgctgaaggccttgccattacaaaggagacaactgagttccctgggtcataaggagtccagaaattagtgtgagaaggtccttctggaagtgaactcaaaattcatgtccagctgtcatcgttaaacccttaggcaggtgagtataacccattctaacctcttggagaagggagtgtgatcaatgtgaatcacaatagtattgctcatctgagacattcctcttatatccaagcagctatctcccatgagtgaacatcccagtggtttcagaaaatcatgtcctgaacagattctagccagccccacaccaccctggccaactgcaaccgctgctgctctagcagtctgggtcaattcctacaggcttgggagcccaccccagggaggcttttatctcctgcagcctcatccccagcaccctcaaggtagactactcctcagcctgaatcatgaatgaaacctgaacatctgccaacttcattatctagcccagtatctcttccctcacagagaagaagaaaatgaaatacaaagttgatccatttgttggctttctctggccggagaaacctctcgggttgttgctgtgagctttgatgaagttgtgataaccagggccatttgcacataggtttttttaaaaaacatgaaaagttcccttctcctttatttagcagtgtttccgggctgaaagacgccctcctccccctctgcgcttacccaggacgttaattaattgcactgtcatttaaaatattatgttgttaattactcgtttgtgtcttcccacccgtgtcacagcctggagtttttattcaattaaatctctgtctcttgcccaaaaaa

SEQ ID NO: 440461 - DNA, 1457 bp, Homo Sapiens
  misc_feature (646)..(657): n is a, c, g, or t
  misc_feature (1215)..(1265): n is a, c, g, or t
ttttttttaacaaatccaagtaacaactttattgtagtatacagcacaatttttacatacatattagtggttttgacagtgttacttttgagtagaccttaaatgaatccacaaagttaatatattaaaaataaaatatacacagtaaaacaacaggcatccagatgttcagaatcatgcagataggagtggtttggttggtgttatcactgggtaccttgcctatttaactcgccagcaaataccacttcttctgtttctcattcccatataattcatcaaaatcagagagttctaaacatatacaaaataaacctcttttaaagccacatcagtaaaaaatttcaattaataaggttatcatcaaaccaagaattccactgatcatttgatcagcccattactaggaaacaggcaatatcagcacccgatctaaaggcaagcctatttcatttattaaaacaccaacaagagagattaatcaacaaagcaattattaacaacatgttaatcttaatataagacactgagagaaaagtaaaaataatacataaatatcactccactgagccaggatataactcatggactacagatacatgagtttctaccctgtcaaacaatgctttaaatattttttctaggnnnnnnnnnnnncacacaatatatgagaagatgcaaaaggaaaaggcagaaatgtgaatttatgcatctagttccacaatgttaaaataaatatcaaactgacaatataaagctaagtgacaatgacttaaccattgggcaccaaacaggcaatacaactgctcactgtaatacataatgctcttcaggagtttccagcagatggccatcacaacaatactgtcataatacagaaaaaacatttatccactgtggaaagagaccctgaagagaatgtggcaaaggcatagagaaaaagttggatcttttgaaaaagttaatgatatcaaaatacttttccatcactggtaaaccaagctaggtcaagtatatgtcccaaagcagcactgaattcagagtaagaggttggcagaaaagtttggaaaactgcagtttttaaaaattggcaatttctccatgcttaataaaactatcagaagaggtataatgtttgtgcgtttgtggaatgttgactgcttgctgcaaaaatttacaacatgaatgaggacctgcagagatgcatatcaatgnnnnnnnnnnnnnnnnnnnnnnnnnnnnnnnnnnnnnnnnnnnnnnnnnnnaccatgttatgccaagatgaaacatggtaaaaagtagtgtaagttctgtccatgattctttacctagtgaatgggaaagtaatagaaacattttcttcttaaaaaggaaggtttgttattgcactgacttttacaacctgacatagtaatttagaaaaatcattctacgggcattgcggaccgtaccgcctg

SEQ ID NO: 440462 - DNA, 921 bp, Homo Sapiens
tatccagcagtaatcagtgattgcaggattaatggaactttttccttgttactacgcccattcccggcgatgaacgttaccttaaccgccaaggaagtcattgttattgcaccatacatgaggacctggagcttttccgaaagcgttgaaaaatatacatatacaaaatggaattatatttgacatttcctgacacctgcattaatactgtatgactaataaaagcatgtcagttgcctggactgaaccagcgatcaacatgcgcccagaatgcacacgagtaaaaatgcagtaaaaggaagtagtcttcattgcctataggtcacttccagtcaaaggttaaagttcaaagactgaatgatcaaagtgctcattttctcagtaggactatcttctgctaggaggatgataacagtggcatcaacaagtatcatcatgataccaccattttgttttctttggattcttgttacatgttcgcacataaaaagaattatccggtggtcgtctcttttccttgcagctggaaagcatgctaataatgctaagacaaactgattggactgagagcgctggggaccagtcttctgttagaatggataaacagatatgaccattgctataaacatgaggatgaacaggaatattttcaccagtaaacatgacctgaggagagtcaaaaggatatcgactactaaatttaaatagaagttgaaatttttccccttcatataaggtacctggtgcaccttccatgtctacaatccactgtgtaattgaattttgaacactcttctcatttaaggtcattccaggaggtgggtcattttgcaaagccaacagttctttctgtagtcgtttctgcattgacgccatgatggaaccatccccccaagaccggcgaggccagagccgcccgct

SEQ ID NO: 440463 - DNA, 1121 bp, Homo Sapiens
  misc_feature (217)..(236): n is a, c, g, or t
gctgagttttattagcatgctttccagctgcaaggaaaagagacgaccaccggataattctttttatgtgcgaacatgtaacaagaatccaaagaaaacaaaatggtggtatcatgatgatacttgttgatgccactgttatcatcctcctagcagaagatagtcctactgagaaaatgagcactttgatcattcagtctttgaactataattccannnnnnnnnnnnnnnnnnnnaagcttttggaaaagcttccgggtcttcatgtattgtgcaataacaatgacttccttggcggttttggtacgttcattgccggcaatgggcgttgtaacaggaaaagttttcattacttcctgccattcaatgattaatgcatgataagggcctatgaaatgagcttactggttatagtgggaatataaataaagtgagggatccagcattactttaaaagtctccccaactgtttatatttggattctatgcactgtgatcctaaggttaacagcatgaattaacatgcgtctttaaaggactgtaatgaaagatcattgcatatttattgaattgtttatatctactgtcaagttgttttgacatggaagattttcaagtaacattggcagagaggtacagtatgttatccctatggtgaaaataaattaatttgttgtatatagttcctcaatctctgaagtaaaggtatgagtaatatagggtatgaatggtttaatcaaggctttattttggaagtaagaaaaatggcagtgatgattaaattgctgcagtccataatttgggcttgttatttgtacattaaagattttttccaagtaagttacactctgttaacttcctgctagccatcagcatgagccctactggcctaaacactatttcatttatttatgtttggaaaccccgtaaacatttttgtttgcaatcttgtttcttttgttataagtcaagtttgaatgttacaatacttttattgaaacttttgttaagttttttcttgtaaattttctttacttgtgagtatcatcttgtcctttaatcctgtaccctaaaataagaaatacatttttgacagaggcttaatgttttaacaaaaaaaa

SEQ ID NO: 440464 - DNA, 1752 bp, Homo Sapiens
tatagtgttttctgacttttaataacaggagataacccctcataatctagtgttgctaataaaaaatcagaatacaacagattcccatttattttaaaatgaaattagctaggcatcatatatatgaatgaaagatcagaatgaaacacatgaagatgttaacaatgattgttttgggccacagaatcaggcacaagctcgggagagaagccaacaaaagctcttctgcacaatgggagggagacaccattgaaaaaggcatcgttccttcttcatgcaagcgaggcctggctcccacaggcatggtctccttgcagctgcaacagcagaggagggcgctggcagggctctgcgtccaggtgtgcctctttttctctccatactctttctggaggttgactagtaccttctccactggtcatgctcatactgtctgcttcctggtccctggtctctccacggctgtccctgactggaacggctatacccagagcccgtcctgtggtagctggagccctgtcttccccacctccctgcgtggtgtgagccccagtgggctcggccagtgatgcgtctgttctccttcatgcaggccttgcagacgactgccttcaggttgtggaatttggtgagcccgagattctattttgttctaaaagaaacctccacagcataacccttttcagattgcaagtacttctgatgaaaaagcttcccgtcaaatacattccagggcatgaaatcactcgtcttccaggggaagccacatgcgctgttgactaaaaccagagtggtgaggccgcggacgagaagggagcccagctgcacggctctggggttgatgtaatcaggctgtagatttacaagctgcgaggtggattttccttggaggcacaaggcctgcgcaataaacgcatgcaaatcctccaggcaaagcgtgtccacctggacaaagaggtagatcaagaggcagcacaaagcttgaaatgggctttcgacagcctgcagctcttctcttgaggaggaaagattgaaacaggctaggagtgtgtccaagcgccgaacctgtatttctggctcttggttcagccataatattttcaaactaggcgttccccctggaatggtcatctgcagcggcctgacgaggtccgggtgcctcagtgggttcccaggatacacaaaccactccttgacagctagcgcaggtgctggtgacatcttgacagtcctccagtaagagtgagtagacccgctgtcgaatgggacgagtaaatgaaggcctggctgggtaaggcctggtcaagctcatcttctagtggtgttgctgcattcaatctctccactgctcatgatgttgtacaccaggtagctttctgcttggacgtgatgtgttctagcaacctttaagatttcagtgtctgaaaccatggttacttgttgctttacttcaggccccacatttgtggggtcttcttgtttaatttcagggtttgtacacatgagagcttctagcttaaattcaaaatctgttgctacaggtaatttttgattgatttcagcgtgtgtacacatggagtcttcttgcttggatataggatctgtacatatgggaacttcctgtttggattcatggcctgtacacataatttcttgcctagattcagggtctgtccgtattaaaacttcttgcctggattcagggcctgtatacatgggaacttcttgcctggattcagggcctgtatacat

SEQ ID NO: 440465 - DNA, 1133 bp, Homo Sapiens
  misc_feature (622)..(670): n is a, c, g, or t
  misc_feature (676)..(723): n is a, c, g, or t
  misc_feature (895)..(904): n is a, c, g, or t
tacggctaggtgcgaggctgggtgtcgaatcggcacgaggctcctttgttttccgcctagcgacaagggatttgctcgcacggcattggctccatcccctagtcgctggacagctctttttttgattggctcaaatcctgtaaagggcttgaccagtctctacatagtcaccgtccgcttttcctgagttctccctcccaattggctccagcttcctgggggcgtggccaagccctcctcttcccagaattggcccggggccttcaatttacgttctttacactacggggactggggtcgtctttgcccacgtcccgacaacttgttccctgaccccctcagggatggccccaaactgtccctgcctctggcaccccctttcattggttccatccatccccacaacagcctgccaatcgaagcccgtccctgcatccaggatggtaccagctcccgcccctcgccccccacctccacaggtgccttaaagggccctcgtccacccaaggtggggggcaggggccctcactctccggccctggtgtgggggagagagtgaggggttgggggatcggcagttgggaggggcgctctgagattaaagagttttacctctgagatnnnnnnnnnnnnnnnnnnnnnnnnnnnnnnnnnnnnnnnnnnnnnnnnngggggnnnnnnnnnnnnnnnnnnnnnnnnnnnnnnnnnnnnnnnnnnnnnnnnggtgtttttgtgtgaaaagagggggcccccctatagatggagcgtgcattttattatacgcagaaagcaggaggagcccgggattttaaacaacgtttggagagtggtggaaaaccacgccgccatacagtggaaaaaatttgtggtaaaaggagaaacctaattgctggcnnnnnnnnnnagcacaaatattggggtgggacaaaatatcctccacaacgagaagataatttaaaagccgctctctgaaagggggcaaaaatatataagaaattgttaaggcggttactaaaagtggggtgaaaaacaaacctggggtcgatttatgtttgtggtggggtgaagaaaaaatgtgtgttaataacgggtattggtgcattgatgaaaaaacaatttttttacccgggggg

SEQ ID NO: 440466 - DNA, 828 bp, Homo Sapiens
ttaggatgattcaactttatgatttttcaactttttgatggtataaaagcgatacataatcagtacaaaccatatacataccaccatttttcagtacagtactcattacatgtgtcaacacctttattataagataggttttatgttagatgataacaccagcatcttgctcaataaattgaagccagctttttcaacagagaacattattagaatgaaactagatgcaagaacaggaaagtaaacacctgtgttatgttcaacaagactgaactacggagcaaagaatcacacagtgttgcaagatcttgaactgactagatgatatgattacaaaaaccacacagctattgctggaaaattatgtcatgcagagaacagactggcacgattacatatgtgggtttgtcctacacaaatcagacctttaagtgaaacaagtctatccaaccatcttcccataaaacctagtttctatggaaaacaatcaattaagctaaacccctacattttagatgtatattcatttatagaagcccaaaattacagtggagttcacaaataattttatattttagatgctttcataatttaaaaagttaacattacaatttgcgtcactaaaatgcaataacaggatttggcatgctgtcttatgcccgtacctgaacattttgggaggctgatgcatgattttcttgagcccaggattttcagcccagcctagggatttcagggaatacccatttttacccaagacgcaaatactggcccagctgtgatggcaatgcccctgagagttttgttctactctgggagggctgaggt

SEQ ID NO: 440467 - DNA, 1405 bp, Homo Sapiens
  misc_feature (1341)..(1349): n is a, c, g, or t
tagaatattttgagaaaatacttcattttattaaagacagaattcttgtttatcatggagctaataatcctaaaggattgctggaagttcgggaagccctggaaaaggtacacaaagtagaagaccttcttccgattatgaagcagtttaatactaaaacgaaggatgggttcaccgtgaacacaaaagttcccagccttaaagaccaagggaaggaatatgatggattcacaatcacgattacaggagacaaagttggcaatatattattttctgtggaaactcaaaccacggaagaaaggacacaattatatcatgctgaaatagatgcactttataaagatttgacagcaaaaggaaaagtattgattctttcatcagaatttggggaggctgatgctgtctgcaacttaatcttatccttagtttattacttttataatttaatgccactctctcgaggatccagttgtaattgcttactcgtgtcatcgtgggagcactgatggcaagtggaaaagaagtagcaggaaaaattcccaaagggaagttagtcgactttgaagctatgacagcccctggttcagaggcctttagcaaagtcgccaaaagctggatgaacttgaaaagtatttcaccttcttataagactcttccatcagtttcaggaacgtttccaacgttaaggtcgatgattgaggtgctgaacacagactcttctccacagtgtcttaagaaactctagttctgctgctgtatttatacaaagtaaagggccggacctcttgcttcttaagttattttttaaaacatggaattataaagaaattaggtcctctattacttttgataccaatttttataggaattgaatacttgaaatcattttctttacttttctgaaccataatgaaaatcatgaaagaggctttcggggggaaaaagctacttgacttggagggaaagcgtatgtattagccggcagcctgttggttcccacttataaagtcatataactccttccttacagtaaaaaaaattttcctcaacaactaaaatataatactgaagatgaacaaaaacaaaaccaaataggagtgtttgtattcctttagagatctggatatttttcaaagacttgctttttacgcacattgtgaatagagcatcttttgttgactcacgtaacctccatgtgtgggtcctttgttttattagaaccatggaagaaggttcctgggccatcagtatgtgttgcagagctcacagccaggaacacttattttgaacaatgcagacagtacttgccagagtcccaaatgctgaattattgaaccatgnnnnnnnnncctttgttgaaaaaaataaaccagggtgatttctataaatcaccagtttttggcaa

SEQ ID NO: 440468 - DNA, 609 bp, Homo Sapiens
  misc_feature (129)..(142): n is a, c, g, or t
ttttctcattatgttatttcacgtcttttattactgtattttccctctcaaaaggacacccaaataaatgtggagcgactcattatagagtaaggaatcacaaagtaccatagtcacgtaacaaaagcnnnnnnnnnnnnnngcaattgttttacctttcaactgctgatgttatgtacaatctatcacaagaagcatagctgtgcattcatgagctgattgtattaacctctagaattttagaaacgagcacatctaagcatgtggatactctcttaccttacaaagtaaaagcaagcattttctattttaaaatttttatatctgtagtaaaacgaagaatttctgtaggttaaattagaaaaatataccaaactcaaagcactattaagtcatgaaacgaatactctgaggtacaagtcaagcaatataattcacaattttagttatttccagcaaccatcgtattttgtaagcaagatggatctttttttaaagtctgaacttcccaaaaatcaatactcttattctgtaattatcaatatgtaaatttttttacccgattcccctcctcattggattcaacctcttttaatacccaaacacttt

SEQ ID NO: 440469 - DNA, 389 bp, Homo Sapiens
  misc_feature (252)..(301): n is a, c, g, or t
aaattcaatatatttttattctttgtaaatacaatgagtacaaccttttaacttcacaaatcagttaattcactttgtacaagaaaagttttactcatcctatgatagtccaagtgctgaattttttttcctcagtgctagtacctaataaatcaaaatgtgaaaagtacagcagctatttaaaaatgtttgtttctacatttccataagtatagagtcataccaaaggaggcagcttaaagtgtaggacgnnnnnnnnnnnnnnnnnnnnnnnnnnnnnnnnnnnnnnnnnnnnnnnnnntcattcaagggctttactaggaaaccagttttcgggaaagggcattgaagagtctcagggctgttagcaatgggatccagttcaagga

SEQ ID NO: 440470 - DNA, 1012 bp, Homo Sapiens
tattttttgtgaaaaaccaaacctcaaaaagccactttaattccggcctaacagcgccaggtgcaatgtctggggacagactctgggtacaatgctgtgtggcgaccactcactcacacacggctccaagaaggcccccaaggggggacttaccttcagggggctgagccaagggggaaaggggtggccccagaacaggggaaggggcaggcatggggggaaaaggtgctacttcttggcaaaggagatcttcatggcgttgttctgcgtgatcttaaagccctgcagggcatcgcgagctgcccctgcctgtacctcattgtcaaactccacgaaggcgatgtcatgccgcccgggtaccagacggacctccttgaagccagggaactgattgaaaagcatggacagcatgagctcgttggtctcctctggcaggttggtgaggaacaagatgtgattcggtggattctcagaaagaggctgggcagggggcatctgtcctggcataaagctgctgcgggggcatggcccctggtgggatctggccaggtgcaagcctggcggggcggatcataccagggggcggcatgtagggcggcttggcccggcatgttggtgcataattgcggggcgcctgagtcatcggcggcatgccccgggacctggcccttggacaggccccaccacgggggtggctcgccccgccttgcacaggcttcttgggtggccgggggtctccatggctccttggggcttccttcttctccgggctttgcgggtcccagctccacgaagggtgccttatcatacttggcaatgcatatcttgagatccgagtccttggaacatacttggcataacgccatagggatttgtaccgcaacgacaagggtaaacagctgtgattggagacgccagggagtttggtgggacgcatgtgaccctccttgaagaatgaccaaggccttggcaccatccatcttcagggctccgtgaataccaggatatcctg

SEQ ID NO: 440471 - DNA, 1026 bp, Homo Sapiens
  misc_feature (9)..(9): n is a, c, g, or t
  misc_feature (21)..(22): n is a, c, g, or t
  misc_feature (25)..(25): n is a, c, g, or t
  misc_feature (31)..(31): n is a, c, g, or t
  misc_feature (35)..(35): n is a, c, g, or t
  misc_feature (43)..(43): n is a, c, g, or t
  misc_feature (56)..(56): n is a, c, g, or t
  misc_feature (71)..(72): n is a, c, g, or t
  misc_feature (101)..(101): n is a, c, g, or t
  misc_feature (106)..(106): n is a, c, g, or t
  misc_feature (115)..(361): n is a, c, g, or t
  misc_feature (366)..(399): n is a, c, g, or t
  misc_feature (485)..(485): n is a, c, g, or t
  misc_feature (617)..(617): n is a, c, g, or t
  misc_feature (846)..(857): n is a, c, g, or t
atcattctnctgtggacgggnnatncagcanattnttgaattntttgcactaatanaataatttttcatgnnactactaaaataagtatcgccgtgcatgntgctnatgcctgtnnnnnnnnnnnnnnnnnnnnnnnnnnnnnnnnnnnnnnnnnnnnnnnnnnnnnnnnnnnnnnnnnnnnnnnnnnnnnnnnnnnnnnnnnnnnnnnnnnnnnnnnnnnnnnnnnnnnnnnnnnnnnnnnnnnnnnnnnnnnnnnnnnnnnnnnnnnnnnnnnnnnnnnnnnnnnnnnnnnnnnnnnnnnnnnnnnnnnnnnnnnnnnnnnnnnnnnnnnnnnnnnnnnnnnnnnnnnnnnnnnnnnnntctcnnnnnnnnnnnnnnnnnnnnnnnnnnnnnnnnnngtatcattaaacctgggcattttgaagaataactgccctgtaggaaacaagtacaaaggctcaaaccctcaacttgtgtttgagtntcaggcaatacttgaaggtcaggcatggcccctcacaagtgaccattgttacagaaatgcatcctaaatgcatctgtatagatttctgataatgtgccaatactgtgctccgagtgagaaggtccttatagnatttacattctaggctaggagacacctttgaatctcatttcacctggcacaatattgggtacatacctgaagcctgataaagaactgtgaatgaatacatgagtaaataccaagcagctaagcaaattattactacggtgaaaaacatctctacaatgagaagatagaatttactagagcaaagcagattagcaccctgactcattcagtattttttttgagagaaggnnnnnnnnnnnnccctaaaaggaaagctttgatgtgaaaaggaaattaatgagatcacctatcttctcttttgaaaaaaaatcaatactatgcccacttacacagatacagatcctgctgggaacaatgaatcatgactgaaattatagttacttaaatcaggagaaatattttatccaag

SEQ ID NO: 440472 - DNA, 1137 bp, Homo Sapiens
  misc_feature (56)..(111): n is a, c, g, or t
  misc_feature (186)..(234): n is a, c, g, or t
  misc_feature (1122)..(1122): n is a, c, g, or t
ttgtctccaaaggcagttgttttagaattgggccccccctcacaaaaattaaaaannnnnnnnnnnnnnnnnnnnnnnnnnnnnnnnnnnnnnnnnnnnnnnnnnnnnnnnaaaaaggaaaccgcgcgggagggtcttttcgaagggacgcccccccgggagaaaaaaaaggccggaaaagaaaannnnnnnnnnnnnnnnnnnnnnnnnnnnnnnnnnnnnnnnnnnnnnnnntaatttttaaatggttaactttatttgatgtctcgccaaataacatatatatgctgtaatgttcattgaaattaaagattccatgagacaagtttaaattaaatgttcacactaaatattttgtaatgacattttaatcttagaatactatatttttgcttgttgaaaacatagttgagtaaaattatttcagtgtcagacatttttagtagcacgtacagtcgcttagctttcagaacagaaagttccttttcaccctactctgctactattattctagtatacatagtcttaagaacatacagtatctattgttcagtgtgttacaatttttctcttctattagtatctaatactaaaattagagtattcaagcttagagatggttttttcattagaaaagtttgtgcggtcaatgcgagaactagggcttccaaccttgctcagccaggacttcatggaattgactttgtcttctggcccctgcacttggcctgtcacggtgcctttgctggtattcttcacccagccaaccactcctattttcctagcttcatcttctgtatacattctgaagcaaacaccctgcactcttccgaacacctcgtagtccacggatttgagtgactgggcggtagacatggcggcggcgagccctctgttgaggagccggagaggggctcggggcgcagcgactgcggcggctgcgagagggaggggacacatgggactgcttggcgcaccccgcgcctgtcaccggtcccggacgctagcgcgccggggtcacgcgtcggaagcggcaaatgagaatgcggggcctgggagcgagggcagccggggacgccaggagggaagaggccgctgggccccaggcatcctaggcctctnttcccgatcccggga

SEQ ID NO: 440473 - DNA, 768 bp, Homo Sapiens
  misc_feature (85)..(105): n is a, c, g, or t
  misc_feature (675)..(675): n is a, c, g, or t
ggccgcattttttcttaatatttttcaaaaattatgtttcttctttattctttaagtatggatctctttcattatatatatgtcnnnnnnnnnnnnnnnnnnnnnagagatatatgtatctctctatatacacataaatacatgaaacatctaccacgtgctgagtaatgaggaaacaatagtgaattgtttttattactaagctccttataaaaatattttgatcgttttgagtataagagccaggtaacagtggccttggagtgttttaagttggcgggtgggggagataaccctaatataaaatcatcaggaattgactgtgcttaatttattagattttcttcatctgtatttaattatacattatactctgtggtattcttagagtgatatatacaatgtaaacaaatttaaatatcacatatatgcaaaaattacttagtaaaggtaaactcccattaatacctactgtgggctcattttagctgatccatgtatactttgtatgctaattttatttatttatctgtttttttataggaagtcctggctgagcaaggttggaagccctagttctcgcattgaccgcacaaacttttctaatgaaaaaaccatctctaagcttgaatactctaattttagtattagatactaatagaagagaaaaattgntacacactgaaacatagatactgtatgttcttaagactatgtatactagaataatagtagcagagtagggtgaaaaggaactttctgttctga

SEQ ID NO: 440474 - DNA, 467 bp, Homo Sapiens
attgttaactttatttgatgtctcgccaaataacatatatatgctgtaatgttcattgaaattaaagattccatgagacaagtttaaattaaatgttcacactaaatactttgtaatgacattttaatcttagaatactatatttttgcttgttgaaaacatagttgagtaaaattatttcagtgtcagacatttttagtagcacgtacagtcgcttagctttcagaacagaaagttccttttcaccctactctgctactattattctagtatacatagtcttaaggaacatacagtatctattgttcagtgtgttacaattttcctcttctattaggtatctaatactaaaattaggggtattcaagcttaggggatgggtttttcccattaggaaaagtttgtgcgggtcatggcgaggaccaggggcttcccacctggctcagcccgggcttcctggggttggc

SEQ ID NO: 440475 - DNA, 1114 bp, Homo Sapiens
ttttgctcatgaagtggacatgtccagcctttattagataaagccactgggcccatctgaccaggcgagctcagctgtaaacaagctcgccagttagaggaagggccctcaacagagcatgaccccgcaagcctagggactccgacatgctgttggggctgctccccatgggtgtctcaactaggtaggtaaggggttggggtctctgcaggacccccccgtctgggggtgctccccttcctttcctaccacagtgtgatgtttcatccgcagcccagtggacatcgagggggtcccccaagcctgcaggtccttgggccaaggcagtggcctcgtccccctgaaaacgcgggtcgggtggtttcaacaaaacctgcactcatctttccctcctcagcgccttcccttctccagcccccacaagcccaggaactctgacaatgatgctgacacgggggtcactaactggaagagcagtgaacaggagctgggggctcttgggggccatctgagctgagggcagctggctgttcctccgaggccataggtatccccacccacccctgcgcctgcagggaatgtgcagaatctgccagagcggaggccagagcccgcaggcagccacggctgttagaggaagcagatgcagcctcaccccagcccacgtctgtcaccacagccagggcctggcaggcgatggcacccgcgcagctttgggaaagaacacttggcctcccaaagggttctgccacccctgggggccgctacagccaccaaccctggggtctttccatcacttcagacactgagcagaacccagagagggttagtgagctgcaggtagggctgggacggggccccaggttccagcccagggtctcagggatccatggctggcactgcccacagggccaggcatgggcggagcagccttctcagcagcggggcccagcggccaagcctctgtcacacagcaccctgtgccagcatgccccgtgctagggagaagatgctttttaagccctctttagggggtatttcccgtctagtaagtgccagcaggcagacccactcttgacaggctcctaatgtccccaccagcgtgcacctgcac

SEQ ID NO: 440476 - DNA, 2144 bp, Homo Sapiens
  misc_feature (1534)..(1542): n is a, c, g, or t
gcaaggggtgtgtgtgtctgtgtgtgtttccatttcgtcaggcggctgttcttgtctgcgtagctttcaaaaatattctgactcggttcccacagcctacaaggccagtttcagcatcaggacagacagcacggtcaaggcagccgacggtctggctctgctggggcctgagttaggtttgatcaccttgttactccctgggatgatatttgtcgtgagctctgtgaagcacatgcttaactctttggagttgttggccttcagcccctgctcctggacagacgtgcaggtggtgatgacactggtccccaagctggtactgtcactgaggtcatctggcaaagaaggcgtcttctccacccgaggggcctgggtggcctggaacgaggggccttttggggacacgttcacgtccgtgccgttgccaaaggcctggatggcgttccggaggcatgggttctcggtgaagtccctgaggaacttctcacactcctcctccatgttcccgctgccacgacagctgcaccagggggacaccacgatgccagtggggctggagtccacatagttaggtgtcatgtcaaacccaatcatgccagcataagagcccagacacgcctggtaattgtccgcagggcagctggtgaccgtctggtaggaggctcgacaattggcatggaagtcggccagccgggaccgacacaggtggtcagtccggcacacgccacgcaggtccaggcagttgggcttctccttgtcctcataggagcagctgggcaggatggtttgccggcggcgctcagcgcacgcctggtcttggcaggagcagaagagcatgcggtaggtgtactcgctgggcacccggtcgaagaactggcgcagggccttgtggcacttgcggcggttgcagcgctcggtgggcgagatctcgcggttgcagatggagatgtaggaggagcgcagcttcttgcagttgtcattcaggttgcaggccttggcagcatccaggcaatggttgctcttggcgctgaccaccgggtctgcccctgtccctgagaagattgaagcaagcctgaagatgtccgagaggcgggaggtcaccggctcatagggggaggcttcgtagaactcctcaccctcggtcagccccaggtggatgctccagtagatctgcagacactgcagctccttcttcatgccccgcttgcagcggcagtcgtacagcgggctctcctgcaagacctccaaggccgcctggcactccttgttggccagcatggtgttgcggtcgcggcctgccaggcactgccgcagagtgcggtagcgagagctgcagttggattcggcggcacacagctcattggcccggacacagtccactggggggcgccagccgtggagctcggggccctgcagggaggaagggctggccaaagagcggagggtctcgtctagaaagaagaagaggcagaagacgtttgccaagatcatgttaaataaatcccaccgtttttttgtctttctcccttgggtnnnnnnnnntaatagtagtaacaacaacaataataatagccaagcagtggtaatcagccccaaatccaatgcggagatcccagctagtccacccgatgaagatcccgagtcctgcgattctcgcctctggctggagggggtggggtgagaggcgggcgatgggctgctgcctctcgacgccccccttgcccgctacaatcaaatatacgcgtatctgtgtatcggctttctaagccaacagcccagtcctggggtcagccctcccctccaatcgtccgggaaggcgtgagtccccgcgggtccaattcccctgcgcttcccaggaggggcctggggaggtggggagagaggcgatttgcgagtgaagggctggaaggaagcggcgagggagggggtcggaataaaatgcaaatagaaaagaaatccacagacgggtgtcagcgcccaagaacaatccagtcggagcttcgaggacgagagactggagtcgcttctttcgcaccaagacgaagacaagattcaaaaaaatcttctcccgctattctttgctgggctcacttttttctaatggaattccagtgaccgtgtgtctctgcgtgcgtggtgtgtca

SEQ ID NO: 440477 - DNA, 837 bp, Homo Sapiens
  misc_feature (68)..(68): n is a, c, g, or t
aggaacaaattcctgcaaatcccttgctgcaatcatcgttgtccttcttcatagaagttcgacatggntcccaaatatcaacattatttctgtataactcgggacgcgtcaggcgcggcgagccccggctgctccccggaggcgcaggggccgaggaggcccgagggcagcggcggggtccttcacagtgactcttgggccgcagcagcttctcattccctctccctccctttttccggtggtagttcgggctacagcagcgggctcgagtgctaatggcaggaaggcgtgcgagacgttcaaatggacgcgtccatcttgactttcccgtcttgcctcgcgccggggcggggcatcgcgggaggtgcgcggcgtcctagcagtcctggcgcctgcgctgttgagggaagaccgcggcgggttacaacttgggggctatttccaccttccgtgcgactgatgcgaaccccgaagccggattctgtctgctacagtcctggcgtccaagttctctttagctcatgtcactagggacctgaactgccttatagatctcagggttttttcttctggtttcgcttccgcctcctgaccccacgtggaggtaggcacctcaggctgagggtggggagcaggggttgctgattttctctacgtgcagtgaatgctctatgcctttttcggtccatactcttcgaagagtggatgaactgtgtgaaggtcctcacagaaacgttgcttgcaattcccagattcagagacacttcttaaggcgattcaaagacccaagttaagaaccccagcggccactcgcgcctgtatcccgggaattccgga

SEQ ID NO: 440478 - DNA, 1813 bp, Homo Sapiens
  misc_feature (1264)..(1264): n is a, c, g, or t
  misc_feature (1627)..(1701): n is a, c, g, or t
  misc_feature (1703)..(1729): n is a, c, g, or t
  misc_feature (1732)..(1732): n is a, c, g, or t
  misc_feature (1740)..(1740): n is a, c, g, or t
  misc_feature (1744)..(1744): n is a, c, g, or t
  misc_feature (1763)..(1763): n is a, c, g, or t
  misc_feature (1766)..(1766): n is a, c, g, or t
  misc_feature (1772)..(1772): n is a, c, g, or t
  misc_feature (1776)..(1777): n is a, c, g, or t
  misc_feature (1809)..(1809): n is a, c, g, or t
aaaattatttggttaaaatgtaaaaaacctgaaatttccaaccaaaaaaatttataattttaacagtatatatagaatttttttaaaaaaatattcggaactgtttttatataagtaatcaaatgttatttttttaaattgaaactccttttacagggtagaaggaggatatgtgggtattgccccattagaaatcaatccccatttcatttttttatggctggtacttcaactatttcaaagtagtcattggtagaatcacataactcttttctgatacgtcgtctttctctttctggaagtgaacaacctcctttaatttttcaagctgccgttcttgccttctgcatcgctgctgtgcggtcttgagcttctttctgagtttttcaacttgctgttctagctgatgaatccttttccgctggtgcattgtatcctccacagtatagttgtggtcacagaaaactgagagattaacaggggtctgaagaggcggcattagtaatccaatagcagcatcaacctgggaaacaggaggcggtaaaggaggtgggggaagctgttcctgtggctccagaagatcttctttcttgtcatgtggctcagtacaaagaaatattgtgggcacagcattctctttcagtaacttgttgttgcactctctcttaaagcagtctggagtaaagtgctctgaacaaatactgctatacttggtgggtttaaagttttttcttctgacagctgcctcccattctttacaaagactgggtcgagtaagaggaaacttgtggaaagaaacgggcttgtccttgtcgtagcggttcttgcagccgtaggcggagcaggactgcaccatccttccggtcctcaggcacttcacttctgccgccgcagaaggcaggggaagctgttctcagtgtcgctgcgctcggttggattccctcgcttcttttgtagctttggccaacagttacagtgatggtggcctccctcgggggtgactagtgtgcccgttttgttgtttgcattagcagaaggaccacagccatcgcccgtctcccatctccaagatggcggaggcagcttcaacctcacctctcgcgaggggtgcgtcccactgtctctgattagccccgaggtcagaggtaacgtttcctgggaagctaactattggctgaggccaggtgtttccggcggtggcttcagagttgccgaagtgggcggagcctgagcttccggcaggcaggaaggaactgcttgtggngggaggaggcgcggcgggaggccggattcctggggcatcctccagccccgggctgttcccgtgggttaattgatgcggaccttttctggggcagcttacagtagggaacaactagggcctcttggagaacaggtgtaaagccgaggtcgttggctgattgcgcccatttctttaaaagggcggacacagatggtgtatgattaataaaattgtggaaccttttcccagagtgctaatctttatcccattacctgtgtcttcaggtatcacaagtttctgtgagagccaacgtgacagatttttagcaatgaaaaaagacacactcgccaaatcatctcaattgccaacgcagaagcgttttannnnnnnnnnnnnnnnnnnnnnnnnnnnnnnnnnnnnnnnnnnnnnnnnnnnnnnnnnnnnnnnnnnnnnnnnnntnnnnnnnnnnnnnnnnnnnnnnnnnnnttntctccccncgtngcccaggtcagtctggganccnagcccnaggnnccccccaactcgaactcccaagggttgggatnaagg

SEQ ID NO: 440479 - DNA, 889 bp, Homo Sapiens
aggtctgaggttagtttataacttgttaaatattttgttaaaatgtaaaaaacctgaaattacaaccggaaatgtgataattgttacagtatatatagaattttgttgttaaaaaaatattctgaactgtttttatataagtaatcaaatgttatttttcttaaatgaaactcctttacaggctagaggaggatatgtggtattgccccattagaaatcaatacacatttcatttttttatgctggtacttcaactatttcaaagtagtcatttggtagaatcacataacctctttctgatacgtcgtctttctctttctggaagtgaacaacctcctttaatttttcaagctgccgttcttgccttctgcatcgctgctgtgcggtcttgagcttctttctgagtttttcaacttgctgttctagctgatgaatccttttccgctggtgcattgtatcctccacagtatagttgtggtcacagaaaactgagagattaacaggggtctgaagaggcggcattagtaatccaatagcagcatcaacctgggaaacagggaggcggtaaaggaggtgggggaagctgttcctgtggctccagaagatcttctttttgtggaaagaaacgggcttgtccttgtcgtagcggttcttgcagccgtaggcggagcaggactgcaccatccttccggtcctcaggcacttcacttctgccgccgcagaaggcaggggaagctgttctcagtgtcgctgcgctcggttggattccctcgcttcttttgtagctttggccaacagttacagtgatggtggcctccctcgggggtgactagtgtgcccgttttgttgtttgcattagcagaaggaccacagccatcgcccgtctccc

SEQ ID NO: 440480 - DNA, 632 bp, Homo Sapiens
  misc_feature (235)..(257): n is a, c, g, or t
gccggtctactatttttaatacggtggtcaaggcaggattcactgaatagacctgaaggtaagtgaaattagccacacagctcagctgagagcattccaaagggaaaacgacaacttaaatgcttaatgacagagtgcttggtatagaggattagccaggtcaattcagctatagcgcagaagtcagaaaaattgagttaaaaacggctgcaggtacaatggggaggctattttnnnnnnnnnnnnnnnnnnnnnnncctgttgcaggatttgaaacagtgctataatccatttcaaaatcagtaccctggctgatgctgaaaatagacaggagaggaagatgaccagttgactgtcacaataatccaggtgaacttcgcaggtctttgtttcattttctacattgtaaaaaattttatctaatggacccattttcccaacctttcgaggatgtgatcttacttcacgttgatcccattcatcgcctacaaccccatccgttatttctgagcaaatccgagatttatgatttcctccaaatttcttaaaaacctaaccaaatagtcatcaaacaacaagactccttaatgtatgttcaattagtgtacttgaatccagatctaagacgtata

SEQ ID NO: 440481 - DNA, 1362 bp, Homo Sapiens
  misc_feature (755)..(755): n is a, c, g, or t
  misc_feature (757)..(758): n is a, c, g, or t
  misc_feature (775)..(775): n is a, c, g, or t
  misc_feature (778)..(778): n is a, c, g, or t
  misc_feature (797)..(797): n is a, c, g, or t
  misc_feature (799)..(799): n is a, c, g, or t
  misc_feature (806)..(806): n is a, c, g, or t
  misc_feature (815)..(815): n is a, c, g, or t
  misc_feature (847)..(848): n is a, c, g, or t
  misc_feature (853)..(853): n is a, c, g, or t
  misc_feature (859)..(859): n is a, c, g, or t
aaggctggtactggtctggagtgtaaggatgcgactcatctctccagcgggtttatttttgttgtcgtgtgcgatcctcacactcatgaggcatacacaggtctacccccatcacaatagcgagatatgggagatcgcggaacaaaacccaggatttcgaagagttgtcgtctataaggtccgcggagccagccagagtttcagcccgaacctcggctccccgagcccgcccgagactccgaacttgtcgcattgcgtttcttgtatcgggaaatacttattgttggaacctctggagggagaccacgtttttcgtgccgtgcatctgcacagcggagaggagctggtgtgcaaggtgtttgatatcagctgctaccaggaatccctggcaccgtgcttttgcctgtctgctcatagtaacatcaaccaaatcactgaaattatcctgggtgagaccaaagcctatgtgttctttgagcgaagctatggggacatgcattccttcgtccgcacctgcaagaagctgagagaggaggaggcagccagactgtgctaccagattgcctcggcaagtggcccactgccatgacggggggctggtgctgcgggacctcaagctgcggaaattcatctttaaggacgaagagaggactcggggtcaagctggaaagcctggaagacgcctacattctgcggggagatgatgattccctctccgacaagcatgggtgcccggcttacgtaagcccagagancnngaacaccagtggcagcnacncgggcaaagcagccgacgngnggagccngggggggangcgggacaccatggtggtggggcgggaccctnnccatnacattnaacccagctccctcttcagcaagatccggcgtggccagttcaacattccagagactctgtcgcccaaggccaagtgcctcatccgaagcattctgcgtcgggagccctcagagcggctgacctcgcaggaaattctggaccatccttggttttctacagattttagcgtctcgaattcagcatatggtgctaaggaagtgtctgaccagctggtgccggacgtcaacatggaagagaacttggaccccttctttaactgagctcatgccccacggagacttagcaggttccaggagtgagcgagggcagcggaaaggagttcttccgggggacacgaattgcctggctgagtagcaagaaagacacactcttaagtttcttggttcagagcaggaaaaccttcaaggagctgactgaccacgtagcatgggggcaagaggcgtgggatggggattggggtgagatggatgggagcccgccggaaaggctgggtaccgagctcg

SEQ ID NO: 440482 - DNA, 1697 bp, Homo Sapiens
  misc_feature (21)..(21): n is a, c, g, or t
  misc_feature (41)..(41): n is a, c, g, or t
  misc_feature (134)..(134): n is a, c, g, or t
  misc_feature (177)..(177): n is a, c, g, or t
  misc_feature (274)..(274): n is a, c, g, or t
  misc_feature (966)..(966): n is a, c, g, or t
  misc_feature (1059)..(1121): n is a, c, g, or t
  misc_feature (1134)..(1134): n is a, c, g, or t
cggcgcggccccgggggccanaatgttgtcccaggagcccnagtagtggcggctgtcggtggccagccggggcggactgttgccggtgcccccgtgccagaaggcgagcaacgggtcggggtcagaggggcggncacccctttgcagggtgcggtacggttcgcggggccccagtcncgcccaggccggggcttctgcgcgggtgcgggtacgtccgaagtcaggacgtcacgctcgcggtaccttccgaagtcctccgtgtaaaaggggcggncggtggagtgggcccggggctcctcggggacatagcggggcccgtagggcaggccgtaggctcgtggagcctccccatagtaggagcgggagggcggttcctggattgggaaggtgcgcacctctcctgcgtagtagccgcccatgcgccttggactgggccccgagagctcctcggacggatagggcctggggtagtaggcgtcgaaggttgggccgggactggctgcaaagctgccccggaagccttggggctcctctgtatagaagaactgggtggggcccggcggggtggtgaagggcagactgcggcgctcggcgtagtcccggggcccgggcaggggcccgtcgcagtagaacgcccggggatccgcacagtatgagtcgctgggcgtcggggtgcgcgacagcgccatgtggcggggcccgggcaccgtgaggccgtggaactgcggggcggggcgggcccagtgcgcggcctcggtgggcccgcaggaccgcgagccccgggtggcgtgctggagcactgcgtcgtctggcttgatgtccaggcggcagcgcacgtggggggcgggacccgcgggtggctcgggcggtgcgcagcggcccgcggcggcgcacaggggcgcgacgcggccggggccgccccgctgcggctgcaacttgatgggatgcagctcgttggcaaagggncggagcgccgggtacgcgggctccccggcgcggcgatgcctcggcccgcgccgcacgctgggccctcccgccctcggcggggcaacaccggcnnnnnnnnnnnnnnnnnnnnnnnnnnnnnnnnnnnnnnnnnnnnnnnnnnnnnnnnnnnnnnncggcgtggctcgnttcgcgggtccgggcgcgcggcacagcggactccggcggcggtggctccggcagggtctccatggccggcccgtccagcgcctccaggaagtcgaagctgcggcagtggcgcttgttgaaaggcgcgggctcagcaggccgggccttggatcgctcacatggggagcacttgtaggggggtcccggggtcgccaccttgatgtcctggtacacggtcgacgccagcaggtccggagggtccgtacgggtcatcttaaaagaggtccccaggctggcggctccagctcacactgccttgcggggcttttgccctggggggagacgcgggtcagggcggccccctccgcagcccaggccccgttactcccccacgctggcccggcttacctggggcgcagcgggcggagcagccctggctgcgggcctgggccgagaacgcgggcgcttcctccatgccggggtcagaagcacctgggtgctgctctggctgtgccccggtgggctgtgccacccccaggtcggctcctctgtgtccccggcactgctgcgtccccgatcccggg

SEQ ID NO: 440483 - DNA, 1396 bp, Homo Sapiens
  misc_feature (46)..(46): n is a, c, g, or t
  misc_feature (49)..(50): n is a, c, g, or t
  misc_feature (1357)..(1357): n is a, c, g, or t
atatcatctaacactctccctgccgggccctcggggcggcgccggngcnngtcggtaccggtccggaattcccgggatcggggacgcagcagtgccggggacacagaggagccgacctgggggtggcacagcccaccggggcacagccagagcagcacccaggtgcttctgaccccggcatggaggaagcgcccgcgttctcggcccaggcccgcagccagggctgctccgcccgctgcgccccagggcaaaagccccgcaaggcagtgtgagctggagccgccagcctggggacctcttttaagatgacccgtacggaccctccggacctgctggtgtcgaccgtgtaccaggacatcacggtggcgaccccgggacccgcgtccaagtgctcgccatgtgagcgatccgtggcccggcctgctgagcccgcgcctttcagcaagcgccagtgccgcagcttcgacttcctggaggctcctggaccggccgggcatggacgaccttgtcggagccgccgccgcccggaatacgctgtagccgcacgacccggaacccggaaacgcccactaagcttcgccagggccgcggctccaagagtggcccctccgcgcgccctccgttgccttgccctcccacttccctgctttcacatcccgcggtttgcccctggcctgacgggagggtagcgcttatctaggcggtggccgccatggccctacggagtcaggtgcgctcccggcttgcccgtgggatagtgtcggggggctccggggacctactgccaagatgttcgctggcccccctccttcgggatagggccgaacgcgggcgaattgcagtaattcccctcctacaattaacgtaataacgacctcgcgcctccctcagaggccgataggtagatacagatgtcgagcaacatttcatgataacttccccaacacgacgaagaacgcccccgcatgtacacaacatacgtaggctcgctctcacgctagcaatggagcagataatacccagcctaggcaattctcaagcatgcgccttgcggtgcacaccccccatcaaccacccaccggttcgcgtgccactccctgctgcgtgggttccgtgctcctcctcgtgttcgcgcaagcgatccacactgccctctctgatacgattatggcggagcaccctgcacccagctcgacaaattctatcacttcgctaacgtctcactgtctccacctatatctcattccccgtatttccgctgtatgcggccgcgaccatagttttggagtggtggatcactacctatctggaccacggttctcctgaggatgtttacgtcagttctattgtgtacttntattttcaccatacactaactaagtagtatgcaacatta

SEQ ID NO: 440484 - DNA, 902 bp, Homo Sapiens
ggcctgcctcggacgccgccggtgtcgcggattctctttccgcccgctccatggcggtggatgcctgactggaagcccgagtgggatgcggctgacgcggaagcggctctgctcgtttcttatcgccctgtactgcctattctccctctacgctgcctaccacgtcttcttcgggcgccgccgccaggcgccggccgggtccccgcggggcctcaggaagggggcggcccccgcgcgggagagacgcggccgagaacagtccactttggaaagtgaagaatggaatccttgggaaggagatgaaaaaaatgagcaacaacacagatttaaaactagccttcaaatattagataaatccacgaaaggaaaaacagatctcagtgtacaaatctggggcaaagctgccattggcttgtatctctgggagcatatttttgaaggcttacttgatcccagcgatgtgactgctcaatggagagaaggaaagtcaatcgtaggaagaacacagtacagcttcatcactggtccagctgtaataccagggtacttctccgttgatgtgaataatgtggtactcatttttaaatggaacgagaaaaagcaaagatcttttatgccacccagtggttactttatgcacaaaatttagtgcaaattcaaaaactccagcatcttgctgttgtttttgctcggaaatgaacattgtgataatgagtggataaacccattcctcaaaagaaatggaggcttcgtggagctgcttttcataatatatgacagcccctgggattactgacgtggatgtttttcagtggcctttaggagtagcaacatacaggaattttcctgtggtggaggcaagttggtcaatgctgcatgatgagaggcatatttatgtattt

SEQ ID NO: 440485 - DNA, 953 bp, Homo Sapiens
agcggggggtcggaggagccttggctggggactgcctggaaacgggctgggcctgcctcggacgccgccggtgtcgcggattctctttccgcccgctccatggcggtggatgcctgactggaagcccgagtgggatgcggctgacgcggaagcggctctgctcgtttcttatcgccctgtactgcctattctccctctacgctgcctaccacgtcttcttcgggcgccgccgccaggcgccggccgggtccccgcggggcctcaggaagggggcggcccccgcgcgggagagacgcggccgagaacagtccactttggaaagtgaagaatggaatccttgggaaggagatgaaaaaaatgagcaacaacacagatttaaaactagccttcaaatattagataaatccacgaaaggaaaaacagatctcagtgtacaaatctggggcaaagctgccattggcttgtatctctgggagcatatttttgaaggcttacttgatcccagcgatgtgactgctcaatggagagaaggaaagtcaatcgtaggaagaacacagtacagcttcatcactggtccagctgtaataccagggtacttctccgttgatgtgaataatgtggtactcattttaaatggaagagaaaaagcaaagatcttttatgccacccagtggttactttatgcacaaaatttagtgcaaattcaaaaactccagcatcttgctgttgtttgctcggaaatgaacattgtgataatgagtggataaacccattcctcaaaagaaatggaggcttcgtggaactgcttttcataatatatgacagccccctggattaatggactgggatggtttttcagtggccctttaggaaggaagcaccatacagggaatttttcctgggggtgggagggcaagtttggttcaaatgcctggcatggatggagaaggcct

SEQ ID NO: 440486 - DNA, 1060 bp, Homo Sapiens
gctttcgggagggattttatgttccaaaatattttgagaagggcgctcaggtttttaaaaatatccggggggttgggtgggccgcatatttatttttcaattctaccctttcccacaaagggatttcgcatttctttcacattttcccaaaaggtgggaactgtttctttttttaaaaaaagaggaaagttgttttcccccgtaagggttttattgcaagttgtagggtaaattcaaaatcatttaaattaagtggttagttcaaatttccaccctaactttaattttttgagaggtacagcaacgtgaatttaaactggtaatccccaatgaaaaccaagaaggaaaatcgggcaatttgttttactgaactttttttactctgaaaagtcttagaaataaaatgctaccttgagacaggaaaattctcttccccaacacagaaccttttaaaaataacaggataatatgtatcaagttccaagcttaacttttgcaattatttttatccattgtatacaggtaacctatgcacaaaaaactgacttcagagtgtagtgttcaccagtcttagatactatcgtgcaaaattctgaataaagggaaagagagagccgagtctgatcttaacacaagttaaaacacaggacaggggaccagaatttggaggtaaagtctgccttatggtcactgcaggattagagagggctttgtttcaacatggaaacggatgtcttaaaccttgcggcgattttgaggccttccaggagcattcccgcaaatctctggcatttgagacgacgtcttggattttaacacgtgtttgaaaggcgtgcgcgcctgtcaccccctgggatcgggagcggggacggcgtgtgagatctgggtaagaatgaggaccattctccaattccgagccaagggctggctcgagaggctgtagggggcaaagcgcttctcaggccctgcgggtaatcccggacattgagagccgggtgcggggacccggccccagccgcccagcagccccagccaggagcgcagagccggaaggaagccg

SEQ ID NO: 440487 - DNA, 1076 bp, Homo Sapiens
  misc_feature (108)..(108): n is a, c, g, or t
  misc_feature (327)..(327): n is a, c, g, or t
aggttcacttagtggcctgttcgggatgaatttttcataaatcggttcctaaggaatttacataaatattggctttttcatcatgcagcatttggcccaacttgcctnccaccccagggaaaatttcctgtatggttgctactcctaaaggcccactgaaaaacatcccacgtcattattccagggggctgtcatatattatgaaaagccagctccacgaagccctccatttcttttgaggaatgggtttatccactcattatcacaatgttcatttccgagcaaaacaacagcaagatgctggagtttttgaatttgcactaaatnttgtgcataaagtaaccactgggtggcataaaagatctttgctttttctcttccatttaaaatgagtaccacattattcacatcaacggagaagtaccctggtattacagctggaccagtgatgaagctgtactgtgttcttcctacgattgactttccttctctccattgagcagtcacatcgctgggatcaagtaagccttcaaaaatatgctcccagagatacaagccaatggcagctttgccccagatttgtacactgagatctgtttttcctttcgtggatttatctaatatttgaaggctagttttaaatctgtgttgttgctcatttttttcatctccttcccaaggattccattcttcactttccaaagtggactgttcttgcggcgattttgaggccttccaggagcattcccgcaaatctctggcatttgagacgacgtcttggattttaacacgtgtttgaaaggcgtgcgcgcctgtcaccccctgggatcgggagcggggacggcgtgtgagatctgggtaagaatgaggaccattctccaattccgagccaaggggtggctcgagaggctgtagggggcaaagcgcttctcaggccctgcgggtaatcccggacttgagagccgggtgcggggacccggccccagccgcccagcagccccagccaggagcgcagagccggaaggaagccgccgacccagtcctacctcgatcccgggaattccggaccggtacca

SEQ ID NO: 440488 - DNA, 1876 bp, Homo Sapiens
  misc_feature (1185)..(1185): n is a, c, g, or t
  misc_feature (1434)..(1434): n is a, c, g, or t
  misc_feature (1565)..(1565): n is a, c, g, or t
  misc_feature (1627)..(1627): n is a, c, g, or t
  misc_feature (1660)..(1660): n is a, c, g, or t
  misc_feature (1674)..(1674): n is a, c, g, or t
  misc_feature (1718)..(1718): n is a, c, g, or t
  misc_feature (1723)..(1723): n is a, c, g, or t
  misc_feature (1727)..(1744): n is a, c, g, or t
  misc_feature (1780)..(1780): n is a, c, g, or t
  misc_feature (1803)..(1803): n is a, c, g, or t
  misc_feature (1830)..(1830): n is a, c, g, or t
  misc_feature (1840)..(1840): n is a, c, g, or t
  misc_feature (1853)..(1853): n is a, c, g, or t
  misc_feature (1856)..(1856): n is a, c, g, or t
  misc_feature (1874)..(1874): n is a, c, g, or t
agggggacgaggaagctgagaacactaagaaaaccagaagggccgggcggattttgcgatcgacggcctctgcatagtgcagaacattctgctgctcttaaagaccctcatccctcccgtgggagccccctttggacactctatgaccctggaccctcgggggacctgaacttgatgcgatgggaggctgtgcaggctcgcggcggcgcttttcggattccgagggggaggagaccgtcccggagccccggctccctctgttggaccatcagggcgcgcattggaagaacgcggtgggcttctggctgctgggcctttgcaacaacttctcttatgtggtgatgctgagtgccgcccacgacatccttagccacaagaggacatcgggaaaccagagccatgtggacccaggcccaacgccgatcccccacaacagctcatcacgatttgactgcaactctgtctctacggctgctgtgctcctggcggacatcctccccacactcgtcatcaaattgttggctcctcttggccttcacctgctgccctacagcccccgggttctcgtcagtgggatttgtgctgctggaagcttcgtcctggttgccttttctcattctgtggggaccagcctgtgtggtgtggtcttcgctagcatctcatcaggccttggggaggtcaccttcctctccctcactgccttctaccccagggccgtgatctcctggtggtcctcagggactgggggagctgggctgctgggggccctgtcctacctgggcctcacccaggccggcctctcccctcagcagaccctgctgtccatgctgggtatccctgccctgctgctggccagctatttcttgttgctcacatctcctgaggcccaggaccctggaggggaagaagaagcagagagcgcagcccggcagcccctcataagaaccgaggccccggagtcgaagccaggctccagctccagcctctcctcttcgggaaaggtggacagtgttcaaggttcggatgatggctggggtatgtccctgtggggcttgctcacctccaggccccccgcttatatcttctgccttttccagggtctgctgtggtacattgttcccttggtcgtagtttactttgccgagtatttcattaaccagggacttgtaagtgaggggttctagnaggggtttggaggtggcgattggggctgggacccacacagccccgtccatctcccctgtctggtatttgttgcagtttgaactcctctttttctggaacacttccctgagtcacgctcagcaataccgctggtaccagatgctgtaccaggctggcgtctttgcctcccgctcttctctccgctgctgtcgcatccgtttcacctgggccctggccctgctgcagtgcctcaacctggtgttcctgctngcagacgtgtggttcggctttctgccaagcatctacctcgtcttcctgatcattctgtatgaggggctcctgggaggcgcagcctacgtgaacaccttccacaacatcgccctggagaccagtgatgagcnccgggagtttgcaatggcggccacctgcatctctgacacactggggatctcctttcggggcncctggctttgcctctgcatgacttcctctgccngctctcctgatacncgggatcctcaggacgcaggtcacattcacctgtgggcagaggnacacntcannnnnnnnnnnnnnnnnnagagaccctccatgaactgtgctcccagccttcccngcaggtctgggagtagggaaggntgaagccttgttttccttgcagggggnccagcccttntctcccccttggnatnctccctccctcctgcctnct

SEQ ID NO: 440489 - DNA, 1095 bp, Homo Sapiens
aggccctgcgggttgttctatggaggggggcctccccggggctgaccggcttcttcgggcttcctttcttcccccctcccaggggtccctgggccctcaggaggatgtgagcaaccaagaaaatagctgggccagcagccagggcagggataccccagcatggacagcagggtttgttgagggagagggccgccctgggtgaggcccaggtaggacagggccccccagcagccccagctcccccagtccctgaggaccaccaggagatcgcgggccctggggtagaagggcagtgagggagaggaaggtgacctcgcccaaggcctgatgagatgctagcgaagaccacaccacacaggctggtccccacagaatgagaaaaggcaaccaggacgaagcttccagcagcacaaatcccactgacgagaacccgggggctgtagggcagcaggtgaaggccaagaggagccaacaatttgatgacgagtgtggggaggatgtccgccaggagcacagcagccgtagagacagagttgcagtcaaatcgtgatgagctgttgtgggggatcggcgttgggcctgggtccacatggctctggtttcccgatgtcctcttgtggctaaggatgtcgtgggcggcactcagcatcaccacataagagaagttgttgcaaaggcccagcagccagaagcccaccgcgttcttccaatgcgcgccctgatggtccaacagagggagccggggctccgggacggtctcctccccctcggaatccgaaaagcgccgccgcgagcctgcacagcctcccatcgcatcaagttcaggtcccccgagggtccagggtcatagagtgtccaaagggggctcccacgggagggatgagggtctttaagagcagcagaatgttccgggacggtctcctccccctcggaatccgaaaagcgccgccgcgagcctgcacagcctcccatcgcatcaagttcaggtcccccgagggtccagggtcatagagtgtccaaagggggctacccacgggagggatgagggtctttaagagcagcagaatgttctgcactatgcagaggccgtttgtc

SEQ ID NO: 440490 - DNA, 1753 bp, Homo Sapiens
  misc_feature (1687)..(1712): n is a, c, g, or t
gtgtgtgtttgtcttgttgcttttccatggataaaatcggcatttattcagaaggcatgatgccaggaagaaactccccaagtgggagacaatggctggcccccctgcaagggaaacaaggcttcagcccttccctactcccagacctgccgggaaggctgggagcacagttcatggagggtctctggggtgggcctgggtgtctgacctgtccctctgcccacaggtgaatgtgacctgcgtcctgaggatcccgagtatcaggagagctggcagaggaagtcatgcagaggcaaagccaggagccccgacagggagatccccagtgtgtcagagatgcaggtggccgccattgcaaactcccggtgctcatcactggtctccagggcgatgttgtggaaggtgttcacgtaggctgcgcctcccaggagcccctcatacagaatgatcaggaagacgaggtagatgcttggcagaaagccgaaccacacgtctgccagcaggaacaccaggttgaggcactgcagcagggccagggcccaggtgaaacggatgcgacagcagcggagagaagagcgggaggcaaagacgccagcctggtacagcatctggtaccagcggtattgctgagcgtgactcagggaagtgttccagaaaaagaggagttcaaaaagtccctggttaatgaaatactcggcaaagtaaactacgaccaagggaacaatgtaccacagcagacccttgaacactgtccacctttcccgaagggagaggctggagctggagcctggcttcgactccggggcctcggttcttatgaggggctgccgggctgcgctctctgcttcttcttcccctccagggtcctgggcctcaggagatgtgagcaacaagaaatagctggccagcagcagggcagggatacccagcatggacagcagggtctgctgaggggagaggccggcctgggtgaggcccaggtaggacagggcccccagcagcccagctcccccagtccctgaggaccaccaggagatcacggccctggggtagaaggcagtgagggagaggaaggtgacctccccaaggcctgatgagatgctagcgaagaccacaccacacaggctggtcccccacagaatgagaaaaggcaaaccaggacgaagcttccagcagcacaaatcccactgacgagaacccgggggctgtagggcagcaggtgaaggccaagaggagccaacaatttgatgacgagtgtggggaggatgtccgccaggagcacagcagccgtagagacagagttgcagtcaaatcgtgatgagctgttgtgggggatcggcgttgggcctgggtccacatggctctggtttcccgatgtcctcttgtggctaaggatgtcgtgggcggcactcagcatcaccacataagagaagttgttgcaaaggcccagcagccctcggaatccgaaaagcgccgccgcgagcctgcacagcctcccatcgcatcaagttcaggtcccccgagggtccagggtcatagagtgtccaaagggggctcccacgggagggatgagggtctgcgacaggtgacaaggatcaacgcccgattgccggtcccagctccggcttgtctagggcactcgcgccccgcgatccatcaaggaagctgggggctccatctcgagcgnnnnnnnnnnnnnnnnnnnnnnnnnntcgtactctcccccgccccgtctacagcagggaccctgaga

SEQ ID NO: 440491 - DNA, 1073 bp, Homo Sapiens
gcccggggttgttcgccgcttataagtaagcttcgcctcccttccccccccgtccaggcgggtaccctgggcgccctccaagagaaagtcgggaggcccaccccaagtgaataaacgtggcgccttccaatacagcggcaggaattttcccccgccatgggcacggcaggagtttttttaagggatagagcccaccttggttgggggccccacggttggtcagtgggcccccagaagccccaagttcccccccagtccttgaggaccaccaggagattcacggccctgggggtagaaggcagttgagggagaggaaggtgacctccccaaaggcctgatgagatgctagcgaagaccacaccacacaggctggtccccacagaatgagaaaaggcaaccaggacgaagcttccagcagcacaaatcccactgacgagaacccgggggctgtagggcagcaggtgaaggccaagaggagccaacaatttgatgacgagtgtggggaggatgtccgccaggagcacagcagccgtagagacagagttgcagtcaaatcgtgatgagctgttgtgggggatcggcgttgggcctgggtccacatggctctggtttcccgatgtcctcttgtggctaaggatgtcgtgggcggcactcagcatcaccacataagagaagttgttgcaaaggcccagcagccagaagcccaccgcgttcttccaatgcgcgccctgatggtccaacagagggagccggggctccgggacggtctcctccccctcggaatccgaaaagcgccgccgcgagcctgcacagcctcccatcgcatcaagttcaggtcccccgagggtccagggtcatagagtgtccaaagggggctcccacgggagggatgagggtctgcgacaggtgacaaggatcaacgcccgattgccggtcccagctccggcttgtctagggcactcgcgccccgcgatccatcaaggaagctgggggctccatctcgagcgccctacgacccaccacgccccacccatcgtactctcccccgccccgtctacagcagggacctgagg

SEQ ID NO: 440492 - DNA, 1669 bp, Homo Sapiens
  misc_feature (966)..(966): n is a, c, g, or t
  misc_feature (1015)..(1015): n is a, c, g, or t
  misc_feature (1076)..(1076): n is a, c, g, or t
  misc_feature (1124)..(1124): n is a, c, g, or t
  misc_feature (1235)..(1235): n is a, c, g, or t
  misc_feature (1237)..(1237): n is a, c, g, or t
  misc_feature (1241)..(1241): n is a, c, g, or t
  misc_feature (1267)..(1267): n is a, c, g, or t
  misc_feature (1300)..(1300): n is a, c, g, or t
  misc_feature (1305)..(1305): n is a, c, g, or t
  misc_feature (1319)..(1319): n is a, c, g, or t
  misc_feature (1376)..(1377): n is a, c, g, or t
  misc_feature (1423)..(1423): n is a, c, g, or t
  misc_feature (1425)..(1425): n is a, c, g, or t
  misc_feature (1446)..(1446): n is a, c, g, or t
  misc_feature (1451)..(1451): n is a, c, g, or t
  misc_feature (1470)..(1470): n is a, c, g, or t
  misc_feature (1485)..(1485): n is a, c, g, or t
  misc_feature (1546)..(1546): n is a, c, g, or t
  misc_feature (1551)..(1551): n is a, c, g, or t
  misc_feature (1558)..(1558): n is a, c, g, or t
ttctccaaggtcctcacctttcccccaaaaacaaaggaacacagccttcttgtttcaagttccaatatgttttcctgaacagggaaaaacttaagcttgggtgtctctacataccagacacagagctccaggccattacagctccggacatcaggtaccgcataggttaaagtcctactctcccaaaaaagttcttaaagtatttttttatacaatggggaataattctggattttggactcaatggcactaattaattcttctgagggtttatgtgtaaaaatatttttgtgaacctattcatttctctaaaaaggaaaaataaattcctgcaaaactgctttatgtgcttgagaggacagcagctggggcaactgctctgtgctcatcagacccagctgaagggcggcactggcactgcgcacatccaggggagggccaggcagggaaaaggcttctgaactgtggcataaacaagtagggcagcggcctcccctttcatttgaaatataaaattcaaagtctttctcccggcctaaaaggcccaccatctgctgcagactctgcccactcctctgttgggcctcatggcgtgaaccggcagcctcccttctgcctgctgaacacatccagctcaacccgctttagggccttgatgattctgtgcctggaacactccctccagggtggctctctgttgtcctgcaggcctcagtcccagtgtcaccttctcagagaagccttatctgatctcttatctagtgtggcacctccagccaatacctaccatgctgctagcctgttttattctcttctaactactatctgccactttctgttcatttacatgcttatgatctagccatcccccctaggacatcccagcaggtaccctgcctgtctctcttgtatctccccagcatctaggacaatcctgattcacagaaaatgttcaaagaatacttntgcacaaatggatgagtgtttagtctggagacgagaatactatttccanatatttaaaggtgttataaccagaaggaagaagtagtcttactgtatatggcaccaatgtntggaaattatggtggtggcagattttagctccatttgagaaaggattnataaacagggcgaatccaacatagtgtgggctgctttgagaggtgagttctttgatgttgaaggcattcgagcagaggccagaagaccctttggcagggacgctgtaaggntntggntgaggctcccacattgggcaggagcntgggtggagagtgtttcttcaaccacaagagcntgtcnttccaagtcatacnttctacactgcctggcacacggtacaggttccctaatgccagtctccagagtgtggnntgagaaagattttttcttggaagaccaaaatgttcggtaggtcccntntttaatcattgatctttgtgnttttntttttgcatgacaaatacntttaaactcaatatntctccacctgtagcaaattcctagggtgtttgttaacaattcagaatctggggctccccanttttntgggatntgaatcactgggtatgaggctcaggaaacaggagttgaacaagcagcccaggtgattcttatgaggaccacgctcctaggtcttccctcccctgcattacaaagaggagca

SEQ ID NO: 440493 - DNA, 1085 bp, Homo Sapiens
  misc_feature (17)..(17): n is a, c, g, or t
  misc_feature (20)..(20): n is a, c, g, or t
  misc_feature (26)..(26): n is a, c, g, or t
  misc_feature (32)..(32): n is a, c, g, or t
  misc_feature (35)..(36): n is a, c, g, or t
  misc_feature (43)..(43): n is a, c, g, or t
  misc_feature (49)..(49): n is a, c, g, or t
  misc_feature (56)..(56): n is a, c, g, or t
  misc_feature (60)..(60): n is a, c, g, or t
  misc_feature (62)..(62): n is a, c, g, or t
  misc_feature (80)..(80): n is a, c, g, or t
  misc_feature (93)..(94): n is a, c, g, or t
  misc_feature (119)..(119): n is a, c, g, or t
gacccgggcaacaccanatnaactcnagcttntcnnaatgacntgccanggagggntgcncntcccccgagcgtgcttgntgtgtcaccagtnnccatcagtcaaggcctgaagccttngtgagggagtcgagcagctggaagtaactatacttgaggtcgtattccatgtcataccagaaattcactgcgatgcagccctgggactgctggacgtggtggaaccacagagccggcagatagagcatctcaccggcccgcaccgtgcagcgaagggcctgggcctgactgtaactagggtaccgtgctatgttctggcgccaaggggtccagtgggatccagggcaccttctccatggcctccttcatccaccaccttaaaggtgccctcttcagttagctggtaggttgccggcgtgtacagctcataggggatgaagggccggtcgctgggcggatggaacaggaaatgcttctctcctgagaccacgcagtagaggttctcatagtggtccttgtgcaaagaagtcactgcagccgcctcccccagccagaagttcacagcatcgggcatctttcccagggcttcggaggcccagggcacatgggattccagatcaggcagcagctggggcagctcgctgggcaggttggagcactgcttctgcacatagaggactccagggtgctgggcccggccctccagcacatccagcacgaagctcaggggcaggcggcgctcagctggcatcatgaagcgatcccctctcacggcatccgcgtaaccatctggggtcacggccacactcacctctgtggagcccactgtggctctgaaataggggagggaccacttctggagggccggccagtgctgcagagcgttgcggataatgcacggcctgttggggcagacccagtcccggtagaagtggagcggagttgggggtttgtccaggtagggcacagcaagaggcacgcagagctcccttgcagcggccgggaattctcgtaactcgctccgcacggcttccaaagccgcctccgccatggctgcgtcagcgccggccgaatcccgggaattcc

SEQ ID NO: 440494 - DNA, 1003 bp, Homo Sapiens
  misc_feature (157)..(157): n is a, c, g, or t
  misc_feature (203)..(203): n is a, c, g, or t
ggacatacgactcacagctaccttttattcaacatgtcctgtgtgccagctccatgctggtcctcatagacatcatctccaagcccacaacagccccgcgaggtacagccattattatctctttactgacaggacaccaatgcccgagacgcagtgnactcgcccaacatcacagcgctggggagaggtgccgctgcacctgnatccccactctgctcacctgtgtgggcaacttcctgaggaaccctcacccaggacctgcctgggaccttgagtccttatgaccacattccaagatcctccaaagctgatctcaagccatgctggacccggggccagcagccagcatgcacactccaggctctctcgagaattgacctggccagggaggggctggctccgtcccccgaggcgtgcttggtggtgttcaccagtgctccatcagtcaaggcctgaagccttggtgagggagtcgagcagctggaagtaactatacttgaggtcgtattccatgtcataccagaaattcactgcgatgcagccctgggactgctggacgtggtggaaccacagagccggcagatagagcatctcaccggcccgcaccgtgcagcgaagggcctgggcctgactgtaactagggtaccgtgctaggtctggcgccaaggggtccagtgggatccagggcaccttctccatggcctcttcatccaccaccttaaaggtgccctcttcagttagctggtaggttgccggcgtgtacagctcataggggatgaagggccggtcgctgggcggatggaacaggaaatgcttctctcctgagaccacgcagtagaggttctcatagtggtccttgtgcaaagaagtcactgcatccgcgtaaccatctggggtcacggccacactcacctctgtggagcccactgtggctctgaaataggggagggaccacttctggagggccggccagtgctgcagagcgttgcggataatgcacggc

SEQ ID NO: 440495 - DNA, 2449 bp, Homo Sapiens
  misc_feature (102)..(102): n is a, c, g, or t
  misc_feature (104)..(121): n is a, c, g, or t
  misc_feature (166)..(166): n is a, c, g, or t
  misc_feature (2345)..(2345): n is a, c, g, or t
  misc_feature (2380)..(2380): n is a, c, g, or t
  misc_feature (2417)..(2417): n is a, c, g, or t
  misc_feature (2439)..(2439): n is a, c, g, or t
caaaattgcactcttgaattttagaaagaagatatcagaattgcattactatttcataaattctccttttacttaacatgctgacatgtccagctatccccncnnnnnnnnnnnnnnnnnnttttttggtgttcaagtttaaggaagaaaaatcatgtttcttttntttagcatatatgttttccaccttaattaactagatctttacaaatgaaaatgaaaaccttctctgacagcaatatttatcttgttgaaggataaataattcttcagagtgaagtgtggctagtctattataaaacgtgtcaggtgtgctcacgcgtggctcctcccgccggcacgcgtccgccttctgccgcttcctccgtctcacaaggtccttttctgagcgcgaggacctcagtgaagacagaccggttcaaatcccccagaggagttgccttctgctaaatccacctccccagctacttatcagggatcgggcagatccgaagtatccactatgactttaataaaaattgtatcatctttaatatatgtcccattttctagaacagtttgggccacaaagactgggcagccagaggcgatattcatctctccagtgggcttcttgaagctgctgctgttggggtcgggcttgaatgcatctcccaaatgacgtcgagaggacccctgatccatcagcatgagtgtcactttctgcttaaacggccaaggaagcagggcatcatattctccacgcatgatgacaaaaaacagcgacaagtgcgtccccttccccatcccgtccccgttcaggtagaccctggcacacatcttatagccaaagtaaccagtgtagaaaggctggctgtaaagggacagggtcttccccatgacggcctcctgcttccgccgcttgtagtcgcgaatcttccagatgagcactccattgtagctggcggtctccaggacctggaagcgcaggtccatgtcggctaggcggatgtcgtgcacactcagcatctggtcatgccggctcagctggtactccagcaggcctgtgttccgagccacttgccccgcgctctgtccacgctttccagctcggtcacgcggttctggagggactccacgctgctcttcatgctgtctgcttcctcccagttctgccggaagggccggatctccttgtcaagctccttcagtttctctgcttggctgtctatcactcgctgtaaatgaaggattttggattcattatttcgaagcatttccttttgtctctcaatttcaatttcaaagctacatatctgattgtgcaaactttgtatgctcttgtttttttctacactttcattctgcaacaaggaaaccttcttttcgagcgagttgctccactccttcagcaggttgacgtgctgcacggcggagctggcctcgtgggccttgatctgctggtttgtcccctgaaaaacgcagccatagcgcttaaaactacaggtgctgggggcattgacacactctgacaagtgtgcactcaactcgctcctcaggagagtctggacgctgcacttgtgagggcaggacaccaccacgcagggacagtcggtgtcttcgtgtttctgcagcgcgatcatcggaacctgactcttgcagtggctgcatgtggcttcccggtatttacacgccttctccacgtggtctcgcaggtctttcctcaagaccttttctttgcagtcaggacgcacacatggaagttcttcaaaatggcaatcattttttaaatgcaccagcagatgtcccagcgttaactgctctgcacaacctctgctttcattccgacaatagatctgaagagccagaatttctctcttgcagcaattatccttaaacaccttatctttaacgatgctctcttgacacgctgtacattttggacttgaagagctcagcagggccgccatgcagctctcgcagaagcggtgcccacactcggtctgcttcgggctgcacagcaccaggtggcacttctcacacttgtacttgtcctccacggtcttcacaaacttttccttgtaacctccttgttcagggacaaaaactggcgtcccagcactgcggtcagtgtgcagctttagcggcgggttagtctgcagcgcgccaggagagtccatctttttactcgactccattttaggaaagaggagttctcttctgtcaggacagcgatccttagaagagtagggagccaggagccaggagccaggtttctgatcctaggtctgattctgacctgctctgggaccttaaccaagtggcatcacttctttgggcctcattttcctcatctcgcggtccgntcgccgctcggccggctcaggggccggagcgtccntcgccgcggtccgcagcgttctgctccccgggctgcncatggcggggggcggggaagancggaagtcgc

SEQ ID NO: 440496 - DNA, 582 bp, Homo Sapiens
gacctgtgtacacgcttatggttgttgagatatgatctctgttcaaaactttgctcacatatatcacatttgtgaggtctctgatcaggaacaggtcttgacagcaacctgaggtttcccccagactccctgctgctctccccgttggtcagtgtgactgccctggggcgtctctgctccactagcttttccaggctcccctctgacttactgatgtggtcacaggcttctactggctcagatccctggggatcttcctcaccaaatgtctcctgtgaagtcaactccttgtactcagttctggtcccaagagccagtgagactaggttcccgtatgtctccagcatcacgtccctgtagaggcccctctgagcagggcccaggcggccccattcctcccgggagaggtacacagccacgtcctcgaaggtcacctcggcctggggtggggcagacaggaacaaggccgccattgcctgagggttgggctttctgagggcagtgagcaggagctggtcactgaggagctaccagaagcatgagactctcggattagatacatgtgatgcaactatttggcct

SEQ ID NO: 440497 - DNA, 1088 bp, Homo Sapiens
  misc_feature (3)..(3): n is a, c, g, or t
  misc_feature (9)..(9): n is a, c, g, or t
  misc_feature (13)..(13): n is a, c, g, or t
  misc_feature (15)..(15): n is a, c, g, or t
  misc_feature (19)..(19): n is a, c, g, or t
  misc_feature (33)..(37): n is a, c, g, or t
  misc_feature (49)..(49): n is a, c, g, or t
  misc_feature (52)..(52): n is a, c, g, or t
  misc_feature (60)..(60): n is a, c, g, or t
  misc_feature (71)..(71): n is a, c, g, or t
  misc_feature (73)..(73): n is a, c, g, or t
  misc_feature (75)..(75): n is a, c, g, or t
  misc_feature (89)..(89): n is a, c, g, or t
  misc_feature (93)..(93): n is a, c, g, or t
  misc_feature (96)..(96): n is a, c, g, or t
  misc_feature (102)..(102): n is a, c, g, or t
  misc_feature (108)..(108): n is a, c, g, or t
  misc_feature (117)..(117): n is a, c, g, or t
  misc_feature (121)..(121): n is a, c, g, or t
  misc_feature (124)..(124): n is a, c, g, or t
  misc_feature (145)..(145): n is a, c, g, or t
  misc_feature (175)..(175): n is a, c, g, or t
  misc_feature (204)..(204): n is a, c, g, or t
  misc_feature (231)..(231): n is a, c, g, or t
  misc_feature (238)..(238): n is a, c, g, or t
  misc_feature (242)..(242): n is a, c, g, or t
  misc_feature (268)..(329): n is a, c, g, or t
ggnatgggncggncnaganccggttaaggcctnnnnnccaaagggcgancangcccccgnccccccacccnancncaagttgagcggancacnaanacacanagtccntgcctgtcngganaancgtagcgcccggatgggacanccgggacagagcagcgcggcggcgggcctnaggggatgccgctgagacactcccgtggngcgggacgccaggtggaaggaaagggngaacccntgtntccgctgcagtagcgcaccatggggnnnnnnnnnnnnnnnnnnnnnnnnnnnnnnnnnnnnnnnnnnnnnnnnnnnnnnnnnnnnnnactggtcgccgcagtcttggtgaggcgctcgatagtctggttcttgtgctcttctgcccgccgcgccgcctggagccgccgcttccgcgcccgctcctcgcgcttcagcagcatctcctctgtgagggcgggaggtgggcagccctcagctacaggcagcggcagcataggggaaggttgactccgcgccttctggagcagagctcgctgtcgagcagtaagcagccgctcattgatctccttcttgaggtctccattgtcatccagctcccccttctccagggcatccagccacctctgttcctcctcttcctcctgaccccctaaccctcctgataggtcccgaagtggagagggagagagattactgtcttcatccagccaggcacggtactgctcaagggggactccttccataggttcctcttcattatccacaaccataaggggagagggtgagcgaggcccctctgggatcacagtgaaggtaggaacactcttggtccccaggacttgtcccccaagcttgattttgagtttgagctgaggcttggcaggggacggctgcgtgggcccggcgtcttcttcctgatggtgtttcttcttgtgtttcttcttgtgcttcttgtgttttttcttgtgcactccatggccatgggcacccgccaggctcaactccagggcttctcccggctcaggggcctccatagccccagaggtgctcccacgccgccacagcttactcatgaggtcctgcga

SEQ ID NO: 440498 - DNA, 1192 bp, Homo Sapiens
  misc_feature (362)..(362): n is a, c, g, or t
  misc_feature (367)..(367): n is a, c, g, or t
  misc_feature (371)..(371): n is a, c, g, or t
  misc_feature (384)..(384): n is a, c, g, or t
  misc_feature (446)..(446): n is a, c, g, or t
  misc_feature (467)..(505): n is a, c, g, or t
  misc_feature (516)..(516): n is a, c, g, or t
  misc_feature (1006)..(1054): n is a, c, g, or t
ttttagcaccggatgtaatttaatagggtggggaagatactcaagagcgggcatgggacggggcgcagagtccgggttaagggccttacgtagccaaaaggggggatccaggaccctcgggcccccccagccgcatctgcaggttgatgcggtagcactgaagactacagagtgcctggcctgtgcgggagcaagcgtagcggcgcggatggggacagccggggacagagcagcgcggcggcgggcctgagggggatggccgctgagacactgccgtgggggcggggacgccaggtgggaaggaaagggtggaaccctgtgctccgctgcagtagcgcaccatgggggccggatccgcagcncgtcnctcnccgccgtctcgcnccgtgcgcccccccggcctccccgcccactggtcgccgcagtcttggtgaggcgctcgatantctggttcttgtgctcttctnnnnnnnnnnnnnnnnnnnnnnnnnnnnnnnnnnnnnnntcctcgcgctngagcagcatctcctctgtgagggcgggaggtgggcagccctcagctacaggcagcggcagcataggggaaggttgactccgcgccttctggagcagagctcgctgtcgagcagtaagcagccgctcattgatctccttcttgaggtctccattgtcatccagctcccccttctccagggcatccagccacctctgttcctcctcttcctcctgaccccctaaccctcctgataggtcccgaagtggagagggagagagattactgtcttcatccagccaggcacggtactgctcaagggggactccttccataggttcctcttcattatccacaaccataaggggagagggtgagcgaggcccctctgggatcacagtgaaggtaggaacactcttggtccccaggacttgtcccccaagcttgattttgagtttgagctgaggcttggcaggggacggctgcgtgggcccggcgtcttcttcctgatgnnnnnnnnnnnnnnnnnnnnnnnnnnnnnnnnnnnnnnnnnnnnnnnnnactccatggccatgggcacccgccaggctcaactccagggcttctcccggctcaggggcctccatagccccagaggtgctcccacgccgccacagcttactcatgaggtcctgatcccgggaattccggaccggtcca

SEQ ID NO: 440499 - DNA, 871 bp, Homo Sapiens
taggggaaggttgactccgcgccttctggagcagagctcgctgtcgagcagtaagcagccgctcattgatctcgttcttgaggtctccattgtcatccagctcccccttctccagggcatccagccacctctgttcctcctcgttccgtcctgaccgccctaaccctcctgataggtcccgaagtggagagggagagagattactttcgttcatccagccaggcacggtactgctcaagggggactccttccataggttcctcttcattatccacaaccataaggggagagggtgagcgaggcccctctgggatcacagtgaaggtaggaacactcttggtccccaggacttgtcccccaagcttgattttgagtttgagctgaggcttggcaggggacggctgcgtgggcccggcgtcttcttcctgatggtgtttcttcttgtgtttcttcttgtgcttcttgtgttttttcttgtgcactccatggccatgggcacccgccaggctcaactccagggcttctcctgtggaaggaaagcctgtcgacagtgtttggccggagggtggcaggggaagccctgaataacctaagcccctactggatcccacccttcccgcagtactcgctgttaccataacaacagcaccgcctttctccttgccacctgtggccgaagtacctggactctccgaggagcaagaacgggacttcttttctaacacgacctaaattgcttgatctattcgcgcttacccggctccaggggcctccatagccccagaggtgctcccacgccgccacagcttactcatgaggtcctgtcgacgcgtgggtcgacgatatcccggaattccggaccggtacagcc

SEQ ID NO: 440500 - DNA, 1327 bp, Homo Sapiens
  misc_feature (7)..(7): n is a, c, g, or t
  misc_feature (12)..(12): n is a, c, g, or t
  misc_feature (16)..(16): n is a, c, g, or t
  misc_feature (32)..(33): n is a, c, g, or t
  misc_feature (40)..(40): n is a, c, g, or t
  misc_feature (47)..(47): n is a, c, g, or t
  misc_feature (60)..(60): n is a, c, g, or t
  misc_feature (71)..(71): n is a, c, g, or t
  misc_feature (79)..(79): n is a, c, g, or t
  misc_feature (86)..(86): n is a, c, g, or t
  misc_feature (88)..(88): n is a, c, g, or t
  misc_feature (90)..(91): n is a, c, g, or t
  misc_feature (103)..(104): n is a, c, g, or t
  misc_feature (106)..(107): n is a, c, g, or t
  misc_feature (111)..(111): n is a, c, g, or t
  misc_feature (119)..(119): n is a, c, g, or t
  misc_feature (155)..(270): n is a, c, g, or t
  misc_feature (283)..(405): n is a, c, g, or t
  misc_feature (1308)..(1308): n is a, c, g, or t
ctttatnttgcntttnccatatctaccagtgnncctgtgngtgtgtnggttgctcaagtncgggagagganaggttacngaagacntntnncaaatattcacnngnnatcntgatgggngttatatcttttcttcttttttgagacaaagtctcnnnnnnnnnnnnnnnnnnnnnnnnnnnnnnnnnnnnnnnnnnnnnnnnnnnnnnnnnnnnnnnnnnnnnnnnnnnnnnnnnnnnnnnnnnnnnnnnnnnnnnnnnnnnnnnnnnnncccgccaccacgnnnnnnnnnnnnnnnnnnnnnnnnnnnnnnnnnnnnnnnnnnnnnnnnnnnnnnnnnnnnnnnnnnnnnnnnnnnnnnnnnnnnnnnnnnnnnnnnnnnnnnnnnnnnnnnnnnnnnnnnnnntgagccaccacatccggcctaatatcctttcaaaaaataagcgcattccatacaaataagaaggttacaataaagtacttcaaagctcaagagccacagtactgaggtatgataactagcatgaggagtcttccaggcttctcttttgtccagtactcactgaagtctcatccgtttttcaggggggcctttagcactcactgtctgttgtacattctttgtggtctccttctcctcaggttttacagtttctggtataggttctgcctctttctttgtttgatccactggaacaggcttttctccaggctttagctgcacaaatttgggtggaaatttttgtctgaggtctaaaagtaaagcatccacacgttgtctctgaaaaatagagcttggttcttctttccttttggctttaggtctgactttatcttgctcttcatgatctttgaagtgccaccaataccctttggaaggatgatatcgacagtatgacatagcttcatcaaaagctgactgaataccatgcactgcagtaagcactctagagtttataactgatcccaagtctggtgcctgatagatcactccagcaatgatatagtaatcagctagtgggataacttgggcaggggactgccgctgttgcttccgaatgatgaaaaagaatgggctcttgagcatgcaaaaggatgtactcgattccaaccatctgattcaagtgttctaatgttagcctctgcattttgaccacttcattattacatgttctgtcataaaaaggattacttctttctgaaaagtaatccaggacactaccactgttcaaaatagggatccaagagctgtcaacccaagaaattcccagcagattgtctcggatatccaccgccgccataattncgagagcgtttacaggttc

SEQ ID NO: 440501 - DNA, 937 bp, Homo Sapiens
  misc_feature (86)..(94): n is a, c, g, or t
  misc_feature (403)..(403): n is a, c, g, or t
  misc_feature (406)..(440): n is a, c, g, or t
  misc_feature (915)..(915): n is a, c, g, or t
tataggaaaactagttctttattgagagattgtatattagtattagtggattctgtgtgtaacaatgtcgtcatgcacccgatacnnnnnnnnnggctgggcccaccatgcttcggaagggcaacagaacaaaagcagcgtacaatgagcagatggcccgggctacacgaccacagtacgtttcagcagggtaacatctctaaccgagcgctgtacattgtcaactgggggatgtaaaaaaatacagatcatgctttagttttagtacaagaaaaggtgaaaaagatacacaaccaaaaggatatttgatacagaaaaaattacccacaaaataagaacaggacgtaattcagcacagcagaacacgctacccctgtttaatggaaaaccattttgctggganttnnnnnnnnnnnnnnnnnnnnnnnnnnnnnnnnnnncagattgccaaatggcagtctggggaggctatttgggactttattttggaagggccctcaaagtaggggccttattcttttattattgctgctgttttgtttcagttttcaagcaggtctggttggcgaagcaagcagaagggagcgggctgttaaaggggcagctctgagggccagggcggatgtcccaaagatgctcttgacattgtacaattaaacaattaagacgctatggccatggctcccacttaagccagggaccttggtgcaccaagttttcagaggctatgggatagcagcaactgtcatttcatcaaagatttttttaatacatatgtttaacattttttgcctccaactaagtgcaatcttcagttatgcctggggtgctgccaagaagctaactgatagtcacccagataactgaaaaatgaagtgctgcagcctctaagccaaggcaaaaggaatccacttnacagggatttacagtgcaatgt

SEQ ID NO: 440502 - DNA, 1615 bp, Homo Sapiens
  misc_feature (37)..(37): n is a, c, g, or t
  misc_feature (51)..(51): n is a, c, g, or t
  misc_feature (56)..(56): n is a, c, g, or t
  misc_feature (58)..(58): n is a, c, g, or t
  misc_feature (69)..(69): n is a, c, g, or t
  misc_feature (72)..(72): n is a, c, g, or t
  misc_feature (74)..(74): n is a, c, g, or t
  misc_feature (76)..(76): n is a, c, g, or t
  misc_feature (244)..(244): n is a, c, g, or t
  misc_feature (247)..(247): n is a, c, g, or t
  misc_feature (261)..(261): n is a, c, g, or t
  misc_feature (281)..(281): n is a, c, g, or t
gatttaattaaaatcaatgtctccaacaatacaaaanctaaatattaaggnatctntnactcccatccnggnanangcaagagaaatgttttaagaaagggccagcatttcttactaaaatgctttctagtgtatttggcagatttgtttttatattctcctattccacataccactcaaagcactcatgatcaaacatcttgacccaaatcaagagaaaagtataaatagatattaatttatntanacggaagcagttcntgtttcaaaaattaaaaganactacaaaaagtatcatgtataaagttcaaataccagcatttaaatttctctgaagtaatttacggttcagtaattaagcaaaagaagagatgaagacttaagagaagaagcctattaatatggattgccctatggagtaactgttcactgagtactccgctccactgggatgatagtttgagaagggcttcatactcctttaagaaaatcgcacatccaccagggtaagatcatttaaattaacactgattcttattccccatgcctgtccatttataaagctcaaggggcttcataaagtatactaaacagtaacattttcaccttttattaaggcaagtttgtgaaaataatttaatacaacaagatctcttcatgaactttcaacttacaacctttttaatgtaagaaacatacaaaaaattgtgttttataaaaagtcgcctcaataccagaaaatagtaatgaaagattttgaacccagttttactctttaaagaatgctctttccttgtctcaaattccaagtgctactcatcatccttagagccagttttgcttaaatgcttcacaacatcaacccagttccagcctcgaggaagttctcctttgtgatctgttttgtctgccagcttacgcttctgggcttttgaaagttgttcttttttgtcttttttcttacttgatggggctgtattaggagtttcaattgagatgatattgcttatcgatgttgcggaattgatgggattgtgattctccatgaactgctctttattgtctttggcatattcaaacaatgtataggtcatagcggttccaagattagcttctactgcttcctgtagcttggctaatatactctgctttacagctgatgatatggtgttgttaaaaaaagcgttcatagatagaattggaggtgtttggggatatgtttctgtccaggaaatctctattaagaaggctttgggatcaccattttcacctatcctatattgaaaagaaactggacttaattcccggaaactttcatctccttcataaatagagcgtaatgcttctagttccatctcctggtcctcgttggcactcatcgcgccggtcgcggggcgcctcctgagcggacggcgttcgcaacaacgaagagaaagcgaaggcagcggcccagaggccgggcgtccccctttcgcgcctcggctgtgggggcggcacagtcttggcactggcagacgccaactgcgcgcgccccgagcctcggcagcgcccagccgccggcagtgggctgtgggctacgagccggagccgcggctggtggggcctgggaagtgca

SEQ ID NO: 440503 - DNA, 1736 bp, Homo Sapiens
acgcggtgggcccgtttgtggttttcctaaccagatgccacacacagaattttttgtgttggggggaacccaaaccaaagccccgggggcccaagccccttgccccccaaccccttgttttttagagaattcctgggggaaagaacctctggggaaccctgagccccaggatgacaaggagtttaagtggggcagtctatggccctgaacttccatggcaccaggcctgatccccggcctcctggacagaggagaaggcggctacaagtcaaggagacgctcctcacacgtctccacgggccacttggaggcccctccgaacacatcgacgttattgtccacccacgggatgatgttgcccggcatgtttgtggagcagttggcgatgttgacaatttcttgtgcgcgaaggacgcggtcccatatgttgaactggctgagctccccgacaaatgcctgagtggcatcaaacctaccccccacggtgtcctgctcttgtccaaggatcagcacgcccccgggcttgatggggtgccagggggccaggttctccccagtgcccagcttctctccgtcctggaatgcctcccacatgccatcccgtgtcgtccaggtgacacagatgtggtgccacttgccgtcactgacaaacaggggcagctgcgcaaccttgtcgttgatgagcagctcgatggggttgttgccccactcgatcagcacgatctcgttggcctgccctggcaccgcataggagaagggggtgccaatgcctggtgaggcgctggaccgcagccacaggcagatggtgaaggcgtacagctcaggcagcgtcttcttgatcttgccgtataggtagtttgtgcggagtgggagggacaccttgaacgcatctggtgacttaaaggcgctattgcctcgctccagctcggtgaccctctgcagcagcgcgttcagggtgctctcggtcttctgccggtgagccgaggtctcattgtgcagcagggacttctcgtcctccagctctgccaccttgcgcagaagctgcctctccagctcccccagccgctgctggagcacctcgcggaagtcgccgggcagcccagcattggacacgtttgctctgagctggtgctcgaggctctccaggcggtccttgagggtctgcagcgagcggctgagctgctccacgacgtggccggggtcccgcggcaggtcgcccatagtgtccttgcccgtggcccccgcgccgcgcgccttgccgcccgccagcccctcgcagcgcgctagcttgcccgtgagctcgcggatggcctctcgctgcgcgcccagcgtctccttctgctgcacgacggtctcgcgcagctgcagcaccgcggccctcagctcctcctcgggactctgcgcgccgccctgcatgggcatcgcgggcagcgggcagccggcgtgcaccgcctctgggggcagtgccgtgcacacgaagcggctaccgggcgccgggctgtcctgggccccagcggccacggcgagcgccacgctggcggccagcagcgccagcatcccgccgccgctgccgcgctcagctcggcatgggcgagcgggcgccgtctgggcgctccgcgggaggcgccttcgctgctggcagtagccgcgctgtcgtctcgagggtcgcgtgcaccgcggggcagaagtctcctgccgtctcacagccgcacccaccgcgatcccgggaattccgg

SEQ ID NO: 440504 - DNA, 582 bp, Homo Sapiens
  misc_feature (36)..(36): n is a, c, g, or t
  misc_feature (91)..(91): n is a, c, g, or t
  misc_feature (553)..(553): n is a, c, g, or t
ctgggaatgactctggaacctgacccagatgacaanatttaatggggcaatctaaggccctgaattcccatgcaacagcctgatcccggcnccctggacagaggagaaggcggctacaagtcaagaagacgctcctcacacgtctccacggccacttggaggcccctccgaacacatcgacgttattgtccacccacgggatgatgttgccccggcaatgtttgtggagcagttggcgatgttgaacaaatttcttgtgcgcgaaagaacgcggtccccatatgttgaactggctgagctccccgacaaatgcctgagtggcatcaaacctaccccccacggtgtcctgctcttgtccaaggatcagcaagcccccgggcttgatggggtgccaatgcctggtgaggcgctggaccgcaccacaggcagatggtgaaggcgtacagctcaggcagcgtcttcttgatcttgccgtataggtagtttgtgcggagtgggagggacaccttgaacgcatctggtgacttaaaggcgctattggctcgctccagcntggtgaccctctgcagcagcgcgttcagg

SEQ ID NO: 440505 - DNA, 1210 bp, Homo Sapiens
cggatgttgtcctaggtccctgcccgtcggttgtggaagtccatggccccctccttctgttgctccctgtttaatcggacatcatgggctccttgccgctcttccctcatgagctgatatggcaaggttcagcgtcatgcttgcctgcctctgtggaatgtcgaagagtcagcgttccttctgcgttagtgcttaatgctcactctgctttcggcgtctgggcacgaaaggtgtccctcggatccactctcatgctctgttcagcggcggcatactggtgctaaaatggctgcatgcagtctcagtggagctgcgcagttcgtcgtcccataatgcgctgtgctgctgggtccacagtcagcagcgtggctggagtactggtctgactctatgcgcctgctgcctagtctgacgcatgcaggttcctcgttcagagcctggcagatgctagctggggcatctgagtgttaggcggtgctgggctgggctggtgatgggatgaggcctgggctgagacaggggtgctgggcactggactgggccgggcccgctcactcccctcctctaccaggctctagggaaatggcctggcgtggtagcgtacagtgcagttgggcacgggggctgttgcgggggatccgaaccttatcctcagagaactctattaccctgcggccaggatacagtgggtgtggtggagacggggttgggtaggggttcagcttctcaaaggctggcaggggcagctcttcctccggggagcccctggcagtacccagagagtggcactccccattgggttgtggggtggggctgccaggggccgggggactggctggatcacctgggacaccctcactcatgtccacatgcacaaagacatcctcagccaaggggcgcccggcgctgcctgactgggctgaattgagcagtagagactccggcttctctaacactcgggcaatgactgaggtaggcaccacagcccctggggctaggctgggagcaggacctgggctggcggcctcttgaccactgtgcaaatgtttccgaaccatgtcctgtagctcacagggcagatcggcaaacttgtggtttcggaagtgggacttgttgcacttgaggagctgtacagccaggttgcagtccagccggtaccgctcattgagctcttccagcttgttgatggtgttcttggcatccagcagct

SEQ ID NO: 440506 - DNA, 853 bp, Homo Sapiens
  misc_feature (245)..(245): n is a, c, g, or t
  misc_feature (690)..(690): n is a, c, g, or t
  misc_feature (707)..(707): n is a, c, g, or t
  misc_feature (773)..(773): n is a, c, g, or t
tcttgggtttctctctgtaaatagcctttgtgtaatggtctttagattaatatcctttgactttattaataagtacctgtgtgcccaggtggatctcagctaagtcatccttaaattctgttcaaatagaaataaaccataaaatgagcctaactataacccacactcacttatcaagcattcccccaaaagttcagtgcgattcaggtaaccttgacctaaacttgtacactccggtgtacatnctttgaccataaactctgggagatttccctctggatttgggatcaggagcccagtagggccccattgctgaatgtttatcacacttctggctagggcttatggatgagcagaccacgtaggagctaggatttactcagttccacctcactgacaggctttcctaggtgccaagcaactgacttttcctgtgtaaggaagcccaagtacttgaccagtgatatatatggccatggcaaaagtataaatggatggatgtagaccatattcaacgcagaatacattttagatcggtatctggcattgtaatcattttgtcttttgaattaacatgccctgcttgtcttttctgaatggaagggtaggaaagtggaaggtactaaaaaggaaaatgtagttttagtttcttttctaagctaaagaactggctttactactgctatattntactaccacatagtagngtagatgtagtataacttgcttaggaatgctttcaaaaagttacctccatagtcaaaaaaaggggnagtatacagctgattgttgcatttatgaaactgctattcaatatgctatgctgttactgggcttagaccttccttacctt

SEQ ID NO: 440507 - DNA, 856 bp, Homo Sapiens
  misc_feature (726)..(781): n is a, c, g, or t
  misc_feature (789)..(808): n is a, c, g, or t
tcctgacctcaggtgatctacccgcctccacctcccaaagtgttgtgattacaggcgtgagccaccacacccagccctttcactaatttttggcagagttcacaatcccatcctatgtcagaaacttgaacctaacttaagaaattttgagtcatttttttggaggactgaggctttgttctacctactcttgaagaatcctgatgaaatattcaaacacataaagggatggccctggaggtctatcctgcatacctggagagcttctctggtcctgcccaccttgaaagttgcagactttgttgtaacatctatgtgatgagcttccctgtgaagccccatttgacaggtgggccagcagtgttttatcagcactctgatggcccacatttcccaggaaaacttcttgaaacttaccgttgtgggcagtggtcagagcgtgtagttcttatgactgtcttgtttcatctgtggagcacgtgtggagcacgttggtacagcagtttctgtggggtttggcatgggtgattttggttagtaaccatcctccaattgttgcttgtgaaagtcattcataacttgttccttttacttagttttgttgttaactgctgttgttgttggtttggttgggttttgagaccggcttctggctctgtagcccaagctgaaatgcggtggcgcgatcatggcttcctgcagcctcaaactcctgggctcaagcannnnnnnnnnnnnnnnnnnnnnnnnnnnnnnnnnnnnnnnnnnnnnnnnnnnnnnngggtatannnnnnnnnnnnnnnnnnnngtagaagatgggggtctaacttatgttgcccaggctggtctcaaattc

SEQ ID NO: 440508 - DNA, 1170 bp, Homo Sapiens
cagtaaggtaactttccattatgcacatactataccatcatcattcattgggtggagattagctgggaagtagctgtatatttttagtgagatcactgatggcaatggatctctggatcgtgctgctgcttatggttaaatcatatctaatgtgaaatttcgaattacatccagagctccagtatcaaagccgcacatatccaacatgcctctatcatctgggtctgcaatggtgaaaccatttgatgtcattccacaaacaatcaatttagctggaatatccattttctttcgatactccctcagagcaatagcaggatggacacctccagcaaaggtctcattatcagtgaatacaatgaagacatcagcaggtgtgtttgtcttctgagcccagatcattggaagagagcaatcagttccacctgctgggatctgactcatagccattaaaacctgttgtaaggtcatatctgtagtcactggacatggtaccatttcatcggaaaaagcaactacataagaatctttttctgttcgtgtgacaaccatgcacattgctgcagcaactgtactagcgttgagtatactacccaaaactctttggttcatagaagcactgacatcaacagctagtaagaaacgttttccagttggttcaactgtcttaaatgttttataaaaagcagcatccaatgctttcaaaatttcttcatcagggcgccacttcagtttccctctgagaccatgacctgtcttgtaagtttctaatgcgatcaaaatatgaaatggatgtatacgagccttttttaatagtttttcattacacagtttttcacatactaaagatacttctgaatttcctggttcaagtactgaattagcagtcatctttcctagattccttagtaatgcagtaagcggcatttcttgtaacaagccttccatacctctttagactttaagtgatttgttaaaagatgttctctaactaatctatgttcttctattagatgaatgacttctagctcatctcttgtgcgcttcactttctctacagcctccagatactttaataatttttcagtctccacagagagtgctttttctttatacaattcatgaacttctttccagccctttgtaatatatttggtcacaattgcaagt

SEQ ID NO: 440509 - DNA, 1151 bp, Homo Sapiens
  misc_feature (918)..(944): n is a, c, g, or t
  misc_feature (969)..(969): n is a, c, g, or t
  misc_feature (1000)..(1000): n is a, c, g, or t
  misc_feature (1014)..(1015): n is a, c, g, or t
  misc_feature (1020)..(1020): n is a, c, g, or t
  misc_feature (1023)..(1023): n is a, c, g, or t
  misc_feature (1027)..(1027): n is a, c, g, or t
  misc_feature (1036)..(1037): n is a, c, g, or t
  misc_feature (1048)..(1048): n is a, c, g, or t
  misc_feature (1051)..(1051): n is a, c, g, or t
  misc_feature (1054)..(1055): n is a, c, g, or t
  misc_feature (1073)..(1073): n is a, c, g, or t
  misc_feature (1077)..(1077): n is a, c, g, or t
  misc_feature (1085)..(1085): n is a, c, g, or t
  misc_feature (1087)..(1087): n is a, c, g, or t
  misc_feature (1099)..(1099): n is a, c, g, or t
  misc_feature (1102)..(1102): n is a, c, g, or t
  misc_feature (1106)..(1106): n is a, c, g, or t
  misc_feature (1108)..(1108): n is a, c, g, or t
  misc_feature (1121)..(1121): n is a, c, g, or t
  misc_feature (1128)..(1129): n is a, c, g, or t
  misc_feature (1134)..(1134): n is a, c, g, or t
  misc_feature (1145)..(1146): n is a, c, g, or t
ggttagtacacaaatagtttatgcagtaaataactgtggttacagttcattgttgtcagcaatacagcattttccatcacaattataggtgaaacaaaacctcatgaagtagtcatagcacattcatgctagcgagagcatattacaaagcaatgcacgtgcattataggggcagacaaaactggggaagggctatattttcactcacctctggttaactttgtgtattttgtcattaagacttacattatgtttgggtcaaacaaaaaacccaaagagcattttataaaagtttacaaccattaaacagtattgtttaatcccacaaatggataaagcaaactactatagctcaacaatacacaaaccaggtctaaaaatagtcaatctatgtatatagctagctaccatacaatagatattgaatatgctgagtctttacaaaggcattgactattttagacgagcaggttccagaaatacacttgtttgtttccaatgagaactaactgtagtgccatttcagttgaagactatgcactcctcagtgtcagacgtgagggtaagcaaactaggggaaggcagaggagggtttggagggtgacctgagcgggctctttggacagctcagcattactttctctgtgccgctccagacctggttcacaaggtgggacaaagtgtattgaaatttttggccctcaaaaagggcatttgtacaaagtcccatacttacagcccagattgaatggtaactgagtgcctctcaaaatgaactcttctatgttagaagaaaactcagggccaaaggttaatggaaatcagtgtttgaattactgtataaagataatttattccaaaatagaaaaaaatgaattttagagaagtattctcctggaaactagcagggggtgggcnnnnnnnnnnnnnnnnnnnnnnnnnnnatcatgctatgtgttttattacttngaagaagaaaagttttgtagaccatttcatnaggcatctgtaatnnccaanacnggcnccttagaannagtcaatggcnganatnnctttgaaaggcttgtttncttnggtgtttnanaagggggccggnttnccancnctcgggggcactntccttannaaaanaaataaacaanncaaaa

SEQ ID NO: 440510 - DNA, 1705 bp, Homo Sapiens
  misc_feature (92)..(92): n is a, c, g, or t
  misc_feature (182)..(182): n is a, c, g, or t
  misc_feature (426)..(452): n is a, c, g, or t
  misc_feature (664)..(722): n is a, c, g, or t
aacccttgtttgtccatatagactacttgtagtgcatttcagtgaagactagcactctcagtgtcagacggaggatagcaaactagggaagncagagaaggttaggaggagacctgaacggactcttggacagctcagcatactttctctgtgcagatccagactgggttcacaaagtagancaaagtgtattggaaatttttcggccctcaaaaagggcatttgtgcaaagtcccatacttacagcacagattgaatggtaactgagtgcctctcaaaatgaactcttctatgttagaagaaaactcagggccaaaggttaatggaaatcagtgtttgaattactgtataaagataatttattccaaaatagaaaaaaatgaattttagagaagtattctcctggaaactagcagggggtgggcnnnnnnnnnnnnnnnnnnnnnnnnnnnatcatgctatgtgttttattacttagaagaagaaaagttttgtagaccatttccataaggcatctgtcattctcccatacctggcaccttaagagagagtgcaatggctcgatattacctttgaaaaggcttcttttcctttgagttgtcttacagaaagggtgccctggattgaccatgccactccggggtcacacttctcctttagatcnnnnnnnnnnnnnnnnnnnnnnnnnnnnnnnnnnnnnnnnnnnnnnnnnnnnnnnnnnnttgaaggcctcaacaggcacagacttcctatgaggtcagaaaatcagtgaaataattaaattacaaagcacctcttgcaaaatacactgtttttgaaaaccacacaaaacgctttgtagtaacccctgctgagtgcttagaggtaagtatcctgaaggacacatgcttagtcccatgaaggaagcttgattttattatcaaggcagccgagggggtccccaatgcttctttgttatttgctgttttataattacagacaaaatggaaagtcaagaagtgcgtagacctcaatataaagaaaatgtttctctaataactaggaaccatgctgtatttatgtattcatagttgtatagctccatttgtagattcttgcagatgagtcactaacactgacactttttacacaaaatcccttttgcaaggacatattaaatttaataggctaaagagaacttatgcaatataatgcttgaaattttacacatgatagctgtgcagtggtaataaagaggccttgaaaaattgtttttgtctataaattactactgccctttagaaataaaagctccctcacaacccctgagctacttccctgtgacacacagtgccacaaacctcatggtgaaaattcagtgccaaacctagcttcagatgagttttgtacatttgtttctatacaatcaggaaaaaaagagatacaatttgtatcaacaaaaggtcatttctggttatttgaggcattgctcctagccgcttttggttcataccaaaaagaagaatgagaggagaatgacaatcgtttttagtaaatcagaaatacatatgctgccttaaaaaatattttctgtattgggaggagcttacacagtttctgagtactaaatatgaacatgttcaagacgaattgtaggtgacaagatgaatcttgtgcttctctgtaaattgtacagctagtggatagtgtggtgccattcatgatc

SEQ ID NO: 440511 - DNA, 1375 bp, Homo Sapiens
  misc_feature (200)..(219): n is a, c, g, or t
  misc_feature (622)..(649): n is a, c, g, or t
  misc_feature (999)..(1031): n is a, c, g, or t
gcacctggcctattttttcttatggcttcaagtttctgttcagtatcctttcatttcagcatgaaggactccctttagcatttctggtagggcatgtctactaataatgatctccttcaattttatttggaaatgtctggatttctcatttcatttttgaagaatagttttgccatatacagaaatcttggtttagaggnnnnnnnnnnnnnnnnnnnncacgactttagatatgtcatctcactgcctttgggcttccaagatttttgatgaggaatcggctgttaatcttgtcaaaaattctgtgtgacgagttgcttctctcttgctgctttcaaaatcctgtcttcaggttttgacaatcctaatataacatgtcttggtgtggatctgagttcatcctgcttggattttattgagctttttggatgtgtagattcatgtctttcatcagatttgggaaattttctatcattatttctttaaatattctttctgtcccttttctttttctgcgattcctatatgagtatatgagtatgaatatactaatgaatataataactatatgaatatatgagtacattagtatgcttgatgatgtctcacagctctctcaggnnnnnnnnnnnnnnnnnnnnnnnnnnnncttctcctttggataatttcaattattttctcttcaaattcactgttctcttcttttgcatgcccaaatctttgttgaatccctctagtgggttttccatttcagggattatactttttagctctagaatttgtttggttcctttttataatttctatctctttattgatattctcattttgttcatgcatggttttcctgatttcctttagttcttcgtccatgttttcctttagctcgctgaacatacttaaggtagttgatttaatgtctttgggtaataattccaatgtctggacttcctcaaggatggtgcctgtcaattttttttcctgtgaatggaccatggnnnnnnnnnnnnnnnnnnnnnnnnnnnnnnnnngttgagaactggacattatgagtattacattgtggtaactgagaatctaattctgtcatgcctcagagattgctgatttttgcttattgagggctggagccaactatttgtgacttttccaactatttttgtgaggtgtgtattctttgcagtatggggtcagtgaagtttctgttgtgatatctctgtggttaaccagtgagggtttaaagcaagggagtgccatgttctagttcattttttaggaagataattcttgctgtcatgtgaagcacagcctgcagggagggaaatcagttaagcagctgtggcagttgtccagataagaggtgagaacaacttga

SEQ ID NO: 440512 - DNA, 1252 bp, Homo Sapiens
  misc_feature (20)..(20): n is a, c, g, or t
  misc_feature (34)..(34): n is a, c, g, or t
  misc_feature (44)..(44): n is a, c, g, or t
  misc_feature (49)..(49): n is a, c, g, or t
  misc_feature (54)..(54): n is a, c, g, or t
  misc_feature (77)..(77): n is a, c, g, or t
  misc_feature (96)..(96): n is a, c, g, or t
  misc_feature (104)..(104): n is a, c, g, or t
  misc_feature (211)..(211): n is a, c, g, or t
  misc_feature (235)..(235): n is a, c, g, or t
  misc_feature (250)..(250): n is a, c, g, or t
aaagcttctctgtttgtctngtcccctggaattnctaaaaattncctcnaaaangctctggttctggtctgtcaagnaaaaatgtggaagggaatnccaaccangggctgtgtgcctgctgcctgtgggaatggttaaaactttggccccagccgccctctgtcaagaaacaactggccaaaaatcaaaagccaacaaacagcatccccanccccatgagactccctctcccaantgtccccagcagaantcaggcccctctcagtcgctgacctgctaagaggagaggatgtctccattgtctgggcgacctaccagattccaaatttgcatctctccttttcgtactgggaggagacaaagagctggggtgcaacaggaggaaaaatgaggagccagaagaagtggggagaaagggacagaatccaggacggggctctctgccaggggatgcctggaagtccccggtcaggcgtgggcgcagctctggagctgcttcctggttacatggcttctttttctctctgggagcatcggctgagtttcatctccgtcagctggatataccgaatcacgttggtgtctgttggttgttgggtccttgcttctttcaggtagtagagtgctttgtcatagtccccaaggtggtagaaggccacaccagaccggtaaagggccttgaagttctccccttccttcttcaagactttgaggcaatattccttgactcgttcatagtttaccagctcagcctggagcaggcaggctgccaggctgttgtaacagtcgatctcgatggcttccaccgtcttgctctgctcctccgagaggcggccgggcttcagggccccagccggggaggccgggcgcgagtcccgctcccgttccccggggggcggcagcagccccttcagctccagcaacgcccggtggtatttgcctatggcttcacggaatttcttgtccttgtagcactgcgccccttggcttttgaactcgtgcgctcgtcggatgagctcggccggctcggccgccgccccgacctggcccctcgctggggctcctccgccgccgcccgggacgcacagcggcggcggtggccgctgcccctctccggccgcgggcgggctcgggttccccttggccccggccgccgagccctttctctccattcggccgccgccccggcgcctggtgcgcgctgcgatcagcccgctctcgacgaattcgagctcggccgatttggcctgat

SEQ ID NO: 440513 - DNA, 1405 bp, Homo Sapiens
  misc_feature (30)..(30): n is a, c, g, or t
ggtgataaagttctatttttctgcctgtgnatatattacactggttacttcatatatttgctcccatttttctgcatttccagtttaaagatgagcaaactaaaattcagagaatgttaggtcctgtgttaacaatccatacagcaaatgagtggtgaggccagaaagcagattctagagctcctgctcttcctcctgcaggtgctccctgaggaataatgatagcaaactaatgccatcttttgatccataactgaaacatctatttgcactcatgcactattttgttttttcttcttcttcttcaccattaactaaaaccattcttttaagcagtgtttctcaaacttgactgttcagtataatcccctcaagggctcgtgaaaacacatactgcatgatctcaccctcatattccaatttaatgaattcgtaatgggccccgagaatttgcattttaacaattttcatatgattcttgaagctgctggtccagggcccatggagaactactactgttgtcaagtatttgctaccttgttgataaactgttactcatcaagcttcatcttaaaaagttaaataatgctaaacatcgtgctatagtgatataaggggttgagctacagggttttgagaacacacgctctgcctgagttaagtatacagtctgctgttatactaatgcacttgcctgtcaagaatttttttcctgaaagtagttaagaacacaaagaagagttctcagaaactattctaggctgccctccttgtttcacggaggagagactctcaagggcaattcaacagctccttgacacccagcatcctcttacccttgatgtggagggctccagagttatactttggcttaactccagagactctagtgaggtaaaactggaaggggttccctttatccagcatgtcccaaatgtcctggccctcccctgatgtctcatactcgtcttcctcctctttgagcctgtggcaggcgggagcgccatgattttcagttctttgggcagtgccgtcattgggagcagagatgtctttctcctttttgatcaccactttctcagcctgcttctgcggcatttctggttgcagctcatcatcactgctggacagacaccagccgaggtcctcctgggaaccgcttttctgccttttgggaggtaaaactgaatctgtattgctgaatttcacaggtgatattttcctcttgtgtgcagctttctgggcctcggaacaggtgtacctgggctcatttgctgctccttgcctggcacagagaagagaagaggtagatggcttgtctggttttggcttttcttcctcactttcatcactactagatatggtccacctcccataatcgccttcctgagacattatactcctg

SEQ ID NO: 440514 - DNA, 1094 bp, Homo Sapiens
  misc_feature (72)..(72): n is a, c, g, or t
  misc_feature (217)..(217): n is a, c, g, or t
tttcagagagatcggcttgggaatgacatcatcccactccctgagagaagggccatataagccatcaagtanctgatgagatcagctttaaaatgtgtggcgactctccagatttgtgggttccatcagcaattcgtgggtataaggggctcaaccatattccctgagttttctgggtgccagtcagcatggatgaggttggaggtgtgtatgacancccggaggcttcttcatagagcagcagcatcattttcgtgtggtgtgtcccaaacgcaatatccaactttgcctggcagagagagatgttctcgtaaggcttggcctgggcatggaggtgagccttagcctctcgcttatcaccatgcaccagcaggattggcttcttcctgaactctgttggatactggttttacgagccagtccacgtcaaagcggtagttaaactgagctgaagaaacaagcgtcccagataaaggagataaaatatccttgatgtggagggctccagagttatactttggcttaactccagagactctagtgaggtaaaactggaaggggttccctttatccagcatgtcccaaatgtcctggccctcccctgatgtctcatactcgtcttcctcctctttgagcctgtggcaggcgggagcgccatgattttcagttctttgggcagtgccgtcattgggagcagagatgtctttctcctttttgatcaccactttctcagcctgcttctgcggcatttctggttgcagctcatcatcactgctggacagacaccagccgaggtcctcctgggaaccgcttttctgccttttgggaggtaaaactgaatctgtattgctgaatttcacaggtgatattttcctcttgtgtgcagctttctgggcctcggaacaggtgtacctgggctcatttgctgctccttgcctggcacagagaagagaagaggtagatggcttgtctggttttggcttttcttcctcactttcatcactactagatatggtccacctcccataatcgccttcctgagacattatactcctgaggcgcacagaaccaacgcttgcctcggatcacggatc

SEQ ID NO: 440515 - DNA, 1364 bp, Homo Sapiens
  misc_feature (469)..(501): n is a, c, g, or t
  misc_feature (1113)..(1164): n is a, c, g, or t
  misc_feature (1299)..(1299): n is a, c, g, or t
  misc_feature (1305)..(1305): n is a, c, g, or t
  misc_feature (1342)..(1342): n is a, c, g, or t
cttctaccctcttatataccagttacctgttgtctcttcccccactagaaggtaagcttcatgagaacagaatttgtctttttccttgccgtttccctatttgagcaatgaattaaggaacctgtgagtagggatcaagctcctctttcacacagaagaaacacctggcctgggaggggtaaagggctttgtcgcagctggcgctgggtggagccggagtgtgaacagcgcccatcacagtgctcctcgcctcttccacccacccagaattctccccagtgacccaggaccaggcggctgccggggggccgagagccttcactaaatgtgacacatcagtgactacagccctgaaattcaaattggaagcctaggcttgtgctcatgtccagcaaatccaacaggtgaaaaatctagcttgtcagcttataatggttccattatcaaaagcttagccagggctgctggnnnnnnnnnnnnnnnnnnnnnnnnnnnnnnnnncttccaaatcatttctttttcccttatgagaacagtagaaaatatgggtaactatgcagtttatgtaagcattcaacaattgggagcgaattttctacaatcgcgagtgcggtcactgcgggaacgcatccgccccaggaaaggtgggcgggcagacgcgcgtgcgggcaaaaccgcaaggaggagcggctcggtggctccttctgcccgtgcgcccctgcttcccctcctcctgcttcaccgagatcaccaccggggctcctggaggtggcggtccccaggacactccgggagccggcggggtctcgctgggtcgtccgcccggaggctccccagacccctgcgcgcggcagccctggcccccgtcacccccgagcgcaagtcggcgaactccgagtggtcaggtcctccccaccgaggtgatttcggtccaacggcgatcggagtccccgaggacggtgcaggcgcctcccgcctccgtggggagcgcacagcagaaagcctggggcggaagcaagaggggaaaggcggtggtgttgagtgagaaccagccgagtgttttccaaatatccatttaatcttgcgtttatcctatgtataaaatcgtaacgnnnnnnnnnnnnnnnnnnnnnnnnnnnnnnnnnnnnnnnnnnnnnnnnnnnnatatgcggtggtggtctgaaggtggaagagctgggttcgaagccaggacggtctggggtgcgctccttccccgggggcagcggcggggcggcgtctagcgctgcagcagcttgccgagggccgcggcgggcgcgngcgggngcgggggctggtcgggcagcatggcggcgctgtgctnctgccgcgcagggcgaggcgcg

SEQ ID NO: 440516 - DNA, 1774 bp, Homo Sapiens
  misc_feature (18)..(18): n is a, c, g, or t
  misc_feature (155)..(155): n is a, c, g, or t
tgagttcttgacttccancgaggggagagaagatagcggatattacagagttattcagccaacggtgatccatgatgagggacactataaaaattatcccctcttgtattgttgataccagtactcatttctgggcttcgtagaggcttccaacnagcatctttttgaccagaaagacctccccatgctatgtgatatccaaaaccactgggcctatccccaacaccagcagctctgagcttcctaagaagttcgttgcttctgaatgcaatggactttctttccatagggcaccttgctctccagtcgctgaggctggtgtcatactccacagatataattcggagagcaggacagtcttttgctaaccatgtcttgggccagcacgtcgtatatctgtcttcatcctccataggtttttcaattacagcctgctcactgtcctgctggcgccatgttttgaatgcttgttcgatattggggatgcagcacatatacgccatcctgatatttttcttgcacagtttctcggtctagatttgccaggattctggcagcgtgtgaggactccataatgtggggagatttcattgcttctgccatgatggaaaaccagcctgagcgaactatagaagaatgaagatgttcattcaaagccatatttccaatgacacgcattatatttctctgtactttagggcagtccttgtgaagtcggtacagcctctgaagtagctgcaggcctccatttgcttcgattttatcacaatgtgtggatatctcagaatgttttactatagcttctaaacagaacatttccactgttgctgaaggaacttctccaaaactttcagcataaggaagtccatttcctccaaaacaccataaaccacccttctgagcagctagactctgactgctttcactaagagccaaagatgtaaaatactggatacactcatctagctctgtttgaggtaaggaagccagcaactgtctgagctcttcttcagtggaagtatcttcttttgaagatggcaataggaggtggtaggagaaataaagcgaagatcactcttcttcgcttcgtgccaagccgataagagttttcggatcacagggcttgagcaattatcctatactggtaatcatggccagtgatgggtctccgacatttcccgcacagcctcgagtcgcgtggttttgtcatctgacttgctcttccgtaggagcagccacacagcacactcatgatcttctatatcaactgtactaaaaggatcagcaaatggattccgcagtatcttggctgatgttgccaatacttttcttactgctttgtgaagttcttttcttgcctgccaggcaataccatgattttctcctttatctaaagaaactgtgtgcacatatatatatgacttcattttttctcgttctaccacttgagtatctaatgtcacagccttcttcagggccagaacttcatatgtaagaaataaagaacctcctaaaataagtgatccagtaaactttattatatttctgatatctctccagtgtgtgccactttttggtggggaagtagaggttcctattcttctgcaacagatgacgcaataagcagccagggacattctgccggcaggcggactcagcccgtgcccaactgctcgtcggaccccgttgtctggggagccctactctttccgcggctcccggccgggaccctccacccggcggctggcggctcgtgaccccgcctcctcccgct

SEQ ID NO: 440517 - DNA, 1732 bp, Homo Sapiens
  misc_feature (6)..(6): n is a, c, g, or t
  misc_feature (49)..(49): n is a, c, g, or t
ctgtgnggccaggggttccaaatgcatgtggctgggctggaggcgaggngttggcagggccaccatgttccttctggaggctccagcacgtagatagtccttcctggcccgttgccagcttctggaggtcacctgtattgcttgactcatggcttctcagtcttcaaagacagcagtggcgttttctccgctgtggcctgtatccctcctggatggtgactctgttcccttccttggggaagcttgtggagggtatggctcaggcctgcttgggctctggggccctgacattttctgtccctggcccatgggggcctcaggcaatgtgtggcccatgggtcagtgaataaatcatgaatggctaaggaagtacgtgcctctccacctggcagatcctgcccattaaagagctgtcacaagtcctttgtatccccagccccagctgtcacagctttgatcaccctggattgtgattgtttggctccctctccatcactggactgggaaccctacaggacaggcatccccagagtcgcccagtgcagcacctcgtccacacacaggagccacgtgcaggataaagcatagaaaagtcaggagagccaggaggttctcactgagtgtctggatggtcctccatgtcctggttgggtgacaatgcttttctctccctgcagaccccccaagacccaacctgacctcccacccagatggcagtgaagatctggagcctctggcaggaggaagcccagaagcaacaagccctggtgagtggatggagaggggccccttgtgtaccttctgtcttccagacctccatcctgaggctgcagccagctttcccacaggtctaccgagacattacaacgctcagcttcaggacttcactctgcttctcgctggcttccatccccttgtcctgggagctggggggatcaggacatttttatagaccctcactctggggtctctctaccttgcccttcagaacagggttatcctggtgcctctccacagctcctcctctttccttccagactcaacaagggtacgccctccactctctcagttggtctctctactttcctgccttgtgctccctgagtgtgttgaccctcattctacttcttttacctcctttccttcaggcccatttttccttcctatccctggggcatagcagatggccacatcagggagtaacttaagcccaggcctgaatgctgccaagagcatctgccctgccatctcccaagccggggttcctccaggtggatcaggttaggtggtgaggattcctggggtattacccatggtagagacgtccccagcatgagaagcagggccctgaaccagagaccacaggaatctcaggctgtaccccatccagtcagtctgcagctcccttcttggctcaccacgctcaggctcgtgtacatgaggcctctgcagcctcctcttcagcacatcagtgttcctcataggtgactaactcatgcacaggctctcacaacttctgctttctgtttctgtcacctcagcatattggctgtttccaaacataggtagccatgcctttactaacaaatatacctccatatcctctagtagtgacacttgagttgcatagttaccacataagcgtctttcccctttaacagcatgccgctcttggaagcagggcttagctgattcaccctgtattcccagctcctgacatcatgcttggcat

SEQ ID NO: 440518 - DNA, 744 bp, Homo Sapiens
ttttaggagaggaccatgtttatgaaagaagcagtattcctcttgggacttcccatggtaacttcccagggatggagttctggaacccacttatttgaggccatataaaggcaggccatgcatttaattaaaacagaaaaaggctccaagaggttcagggcatcgtcctccggccaacagaagcaggtaccgtgtgaggagtttcaccatgagattgagacttaagaggtaaatcatctacacgctttcttttctttttggggcagattatagacatctagctgtggtgagaaattaagtaacagagatgcttacttaagaaaaaggaaattctgaaaagaactctgttcactaaattgcttatgttctcaaggcactgtggctctcctggggcaaccgagggcagcttgggtgatgggagagtcggcgtcgtccgtgtaccgaacatctgtttccttcagatacgggtctcatttccttttatgatgatggtttttaacacataaacttgtggtgaggaggaattataagtttgtgagcgtcgtgggtagattttcactccagcagagtaggagctaagtcagagtgtagaagctttggggtaaggtttccttcaaaacagagattgtggcggtcggcttgcaaggtcttcaggctgtggcggtaggtgtgatagcccttcagggcctaggggtcggggtggaagctcttgagggcctcggggtcggtgtggaagccctgagg

SEQ ID NO: 440519 - DNA, 465 bp, Homo Sapiens
ccttccttttccttttggggccaaaattaatagacatcctacctgtggtgaaaaaattaagttaacagagatgccttacttaagaaaaaggaaaattctgaaaaagaactctgttcactaaattgccttatgttcctcaaggcactgtggctctccctgggcaaccgagggcagcttggtgatgggagagtcggcgtcgtccgtgtaccgaacatctgtttccttcagatacgggtctcatttccttttatgatgatggtttttaacacataaacttgtggtgaggaggaattataagtttgtgagcgtcgtgggtagattttcactccagcagagtaggagctaagtcagagtgtagaagctttggggtaaggtttccttcaaaacagagattggggcactcggctttcgacgtgggcctcctgtggctggagctgccatctttgtccgagaggtagggtaagc

SEQ ID NO: 440520 - DNA, 1457 bp, Homo Sapiens
  misc_feature (685)..(785): n is a, c, g, or t
  misc_feature (795)..(860): n is a, c, g, or t
atttggagagccagcaagtcaggaagatactggacccatgtcctaacgaaccatctttaaaggcatgaatctcaagcttctttgtacattgaaggggtacactgaaggggaacaaggaggagactgaggtgaggggggtggctggtgaccacagacacttgggcatcagcaggggcccaaggagattgcaaaactttgtccttgctcaggtcacagcgctcctacaagtcttcaatataacattgttacttgtgtgcatgcccttcttatctcctcagaggttagttttggaaaggaacgcttatcatccttgctttccagttaaactgtaatctaagttctttccatgattaacttggcccgtgtgcagaagtgcctaaaagcagttagcttgaggagtcagaagcaacatggagtcagctatgttcgatttctctccctattacactggcaacccattctatcctcttctgagaggctgagtgtttcaaaatatgggcctctcagtggctttcaggataaagtctaggtgtctttagaactaagcagggtgcagccctctgctcaggaccctgcatgtgtggcatggtatcctcactctctccttacaataaaggtagacaaaaaataaaaacagttcttttctttctctttactctcactcattaaaacaaacaaaatgaannnnnnnnnnnnnnnnnnnnnnnnnnnnnnnnnnnnnnnnnnnnnnnnnnnnnnnnnnnnnnnnnnnnnnnnnnnnnnnnnnnnnnnnnnnnnnnnnnnnnacggggggtnnnnnnnnnnnnnnnnnnnnnnnnnnnnnnnnnnnnnnnnnnnnnnnnnnnnnnnnnnnnnnnnnnccggccattgccagcacatggcacctgctcccctctgcaatttcaaatcgatcacccaagaaaacatcccatccacataattcctaaaacataaaagtccattttcaaatcacaaaataagtaaatgtttctatgggaaagccatcgttcttcctttttctctaaacacggccccaaaataagtatttatctttctcaggggagagtccttctcttatagcctgatccagtgaaggccttccctctgggtgaactctgtggggctttgtttctttgctttgggacctctgaaaaacagacgtatcatgcaatgaatttacagaagcagcagataaaaacccacccacgctgtctcgcagccctgatctcttccagttgcctgctttgtcactagaacagactctgcaggccactgggctcagggggcttcccaccgggttcttgcctttggcagatgtttttgtttttactttctcggcagatgttttcttcggctaaacttggcttagacacaggatgaggagctgaagttgagtcaagattactgttgtggtgtgggtgttttagaaactatgacggaggctggcaccgtgctca

SEQ ID NO: 440521 - DNA, 1952 bp, Homo Sapiens
  misc_feature (311)..(379): n is a, c, g, or t
  misc_feature (555)..(555): n is a, c, g, or t
  misc_feature (558)..(559): n is a, c, g, or t
  misc_feature (561)..(561): n is a, c, g, or t
  misc_feature (564)..(564): n is a, c, g, or t
  misc_feature (588)..(588): n is a, c, g, or t
  misc_feature (591)..(591): n is a, c, g, or t
  misc_feature (595)..(636): n is a, c, g, or t
  misc_feature (656)..(656): n is a, c, g, or t
  misc_feature (748)..(748): n is a, c, g, or t
  misc_feature (776)..(778): n is a, c, g, or t
  misc_feature (784)..(784): n is a, c, g, or t
  misc_feature (795)..(795): n is a, c, g, or t
  misc_feature (799)..(800): n is a, c, g, or t
  misc_feature (811)..(811): n is a, c, g, or t
  misc_feature (1277)..(1277): n is a, c, g, or t
  misc_feature (1852)..(1852): n is a, c, g, or t
agcgggcgggcagagctcgcctccctccgcctcagactgttttggtagcaacggcaacggcggcggcgcgtttcggcccggctcccggcggctccttggtctcggcgggcctccccgccccttcgtcgtcgtccttctccccctcgccagcccagggcgcccctccggccgcgccaacccgcagcctccccgctcgagcgcccgtgcgtccccgccgcgtaccggcgtctccttggcgcgcccggctcccggctgtccccgcccggcgtgcgagccggtgtatgggcccctcaccatgtcgctgaagcccnnnnnnnnnnnnnnnnnnnnnnnnnnnnnnnnnnnnnnnnnnnnnnnnnnnnnnnnnnnnnnnnnnnnncgccgaccgcggctgccaatgtccgcaagcccggcggcagcaggccttctagcgtcgcccgccgccgcgccttcggcgtcctcgtcctcggtctcctcgtcctcggccccggctccctcctcggtggtcgcggcgacctccggcggcgggaggcccggcctgggcaggtgggtgtnggnntnccntttccctccgctccgggcccggcnttncctnnnnnnnnnnnnnnnnnnnnnnnnnnnnnnnnnnnnnnnnnnggctacccggggtgggctgngggccggcagcgcgggggagactcgctcgggcctgagccccgaggctcggccggtgggcgcagcggggtcctctgggattgttaggcctgtncagcctcccgcagcatctcctctccctnnnccggtngttttgttgtnatgnnagcgggtggcntccccttcccacgcgtgttgggaggggttctcgggtagcggcgatggtcagccccggctcccccttccgcacgatcctccgcccgcagcgtggggatgctcgggcagctcctccactcccggtttaggtgtgaacgttggaggggtctggaggctgtggtggcgttttccggaacatgtccccctccatgggggacatctctggaggggagaagttagggccgcgtcccccgtgccggttaaaggggtaggcaccgggctcctccggaatcatcagggtctgtcggggctctctccccgccccctccgggtcctgggaaagatcggaggacggggtggagacaagtgggccttggcccccgcacccctctgcgttcgtgtccgaggcggcggcgggggctcccgaactcccctgaaatcgtggggctccatgtgggctccggcagcgttccaccctcccccacctnggggaagggaaggggtggggagtgcccggccccgtcccggccttcctccttcccccgccagacctctccggcgcgcgggtggtggccgatccgcattgctgttcgaggccgcagtggagaaggcgcctgtggaacatcgaggtcgaaacagtaacaaaggactgcctcagtctacgatttcttttgatggaatctatgcaaatatgaggatggttcatatacttacatcagttgttggctccaaatgtgaagtacaagtgaaaaatggaggtatatatgaaggagtttttaaaacttacagtccgaagtgtgatttggtacttgatgccgcacatgagaaaagtacagaatccagttcggggccgaaacgtgaagaaataatggagagtattttgttcaaatgttcagactttgttgtggtacagtttaaagatatggactccagttatgcaaaaagagatgcttttactgactctgctatcagtgctaaagtgaatggcgaacacaaagagaaggaccctgcagcccctggatgcaggtgaactcacagccaatgagggaactggaggctttgnaaaatgacgtatctaatggatggaacccaaagatatgtttcgtttaatgaaaaaaattatggcgcaggggccaccgttgaaagcagtttatttcggatac

SEQ ID NO: 440522 - DNA, 1701 bp, Homo Sapiens
  misc_feature (25)..(25): n is a, c, g, or t
  misc_feature (133)..(133): n is a, c, g, or t
  misc_feature (146)..(146): n is a, c, g, or t
  misc_feature (185)..(185): n is a, c, g, or t
gttttgggcatattcacataaaccnctaaattcagggatactgttgtatattcttatgcgctgttctaaaatactcaatcattcaaagatttaaaaagctcattgtagtacaactgggtatggctatttacanctggatatatctngatatgtattctttagctgggtatcacatgtaactccangtataatgttctcatgggatcctatttttaatacatttttgagttgagagattgcatctcagtatgaattcccatgttccctcaatactgtcatgaggtttttcacccgcttgaagagttctggcaggagttttccacagtaagacctggctggagtttcagggtttctccccgatgtgaactctctgatggacactgagtcgggacttcctgctaaaggccttcccacattcggaacactcatatggtttctctcctgtgtggattcgcaagtgtaatctaagagttgacctctggctgaaagttttgccgcactcagtacattcatagggtttctctcctgtatgagttctcatgtgtatgatgagctgtgagttctggataaaggattttccacattcactgcactcatagcgtttctcccccgtgtgaatcttctgatgtatgataaggtttgacttcttaaagaaggtttttgcacattcgttacactcatagggtcgctctcctgtatgaattctctggtgtgtggtgagttcaaacttttgggcaaatgtctttccacattcactgcactcatagggcttcttctccatatgtgctctctggtgtacaatgaggtttgactggtgggtgaaagcttttccacattccggacactcgaaaggtttctgccccagtgtgaattctctgatgtttgatgaggttggccttatgggagaaggttttcttacatacattgcattcatatggcttttctccagtatgtattctcttatgactaatgaggagtgacttaaaggagaaagccttgtcacagtaagtacaaatgaaaggttgaaccaagttttttattttctgatgtttaaaaatggctgctttatggctgagggcttttccacttttattgtattcagaatattctactccactgtgggttttctcttgcttcaggtagagaagtgcttttccaaattcattacactcatcagtctgctttcctgcatagcttctattactattaagcaagtctgaattatatttcaaagttttttcatataagtcatatttataaggtacttgtcttaaagaaacaaagtctgtgttcagattaagtgctttgccaaagagatcgcctctttcctcaattggggtttggttcttaagaattaaaaattgcctcgcctgctcgtctgggtttctgtggtctctctccatctggtcatcagccttccacacttccactgaaagtaagttgctataattctccagcatcacatccatgtataggatcctctgagaggggtccagttgttcccattcctcctgggtaaagtccacagtcacatccgtgaatgaaactgatccctgggatttgttcattttctgcagttttgggcaaaggcagagaactatgaaggcagaactggaggggcgcagcctccactcgtggcccagtgccacagcgggtcacggcgcagggcggcgaagacgcgcggagacgggggctctgtca

SEQ ID NO: 440523 - DNA, 1739 bp, Homo Sapiens
  misc_feature (1627)..(1627): n is a, c, g, or t
cagacacagtcgacctgccgccagaagatgctataggtcttctggatttggcgacatcttactgtgaaaacagactgaaaaaactttgtcagcacattatcaagagaggaattactgtggagaatgccttttcgctattctctgctgcagtcagatatgatgcagaggatttagaagaattctgctttaagttttgcatcaatcatttgacagaagttacacagactgcagcattttggcaaatggatggccctctgctaaaggaattcattgctaaagccagtaaatgtggagcctttaagaactgaagcgcgaggctgctggggttctgtgtgagtgctctggggcactgttgaggatgtgtcccagtttgtgctctccgggtgatgtgattctgcaggtaaaagaccatcaggttgtttttttccacatctgggacacagttgtttgtgtaggaacataacaagggtgtacggcttttcttgagcccattttaaacaacccttgtttccagataagtgtattttaaatgtgacctttcgtaaatttgggctggaacatgtaaaagggtgaaagttagtcgtttttggtcttgttttcatttttgattagaggaacttctgaacttggaaaggggaagttggcagcaactctcctgggccatgtatcaacaatcttctgacagcaggagcagtgatagttggggaattgtgagatgaatggagaggccccatcgtgaattaaagatgctgacctggggattgttaagtgctgccttagttgctagtttagtagccttactgtgaaggaataattaagattgtttcagacttttgtttgtgtgcttgcgttgatgacttttttaacttcaagataaatcaaagtaataagtttaacgtatattaaacctgttgaaatgataattatgtaaagataaatattctaggttagtcaagatttctcttaagatttaagtgcataaagaatagtaatttagaagtatccgtgaaaagttgataatgaaagaaatttgatgaaggtgaatattttataaattagaatctccactacttatccaatggtgttttatttcattaaggtagaacttgagaactcaagtttaaattgtcccccaccaccttcttctataaatgcaaacttaagaggaaaataatgacatgtatagtatactgttgccttcctaaattatgactgctgaatcatcatatctactatatatgactagaagaagtggttcttcaagtcaaccctcttacaggacttagtggaatttgctttatctactttaggccaaatccatcacacattggcttatttgaaacttttggttttcctctgtttttaaacatcttaggtataacagcacaatttcaccttgaaaaagcaccaaaattatggtgttcctgaaaagatcctattaaaagacagtagtttatttgaactggttatggaaggtgactttgggatgtaagagtgttcaactgtgagtttcatcatgtgtgtccgttgagcttgcttttaagagcaatgttttgctttgctctctggtccatgaactcatttccatttgagtgagctcccttaggtgaattttttctcctgcttnggaaagtctctcttctgaacctggagccctgatacattttcagagccaaattacaagtggggtgaagacatgcctacactactatttttagcaatgttttaaatttgtgtct

SEQ ID NO: 440524 - DNA, 1237 bp, Homo Sapiens
  misc_feature (691)..(691): n is a, c, g, or t
  misc_feature (758)..(758): n is a, c, g, or t
  misc_feature (824)..(824): n is a, c, g, or t
  misc_feature (826)..(827): n is a, c, g, or t
  misc_feature (840)..(840): n is a, c, g, or t
  misc_feature (846)..(847): n is a, c, g, or t
  misc_feature (855)..(855): n is a, c, g, or t
  misc_feature (876)..(876): n is a, c, g, or t
  misc_feature (887)..(887): n is a, c, g, or t
  misc_feature (893)..(893): n is a, c, g, or t
  misc_feature (904)..(905): n is a, c, g, or t
  misc_feature (986)..(986): n is a, c, g, or t
  misc_feature (990)..(990): n is a, c, g, or t
  misc_feature (1016)..(1016): n is a, c, g, or t
  misc_feature (1020)..(1022): n is a, c, g, or t
  misc_feature (1026)..(1026): n is a, c, g, or t
  misc_feature (1053)..(1053): n is a, c, g, or t
  misc_feature (1080)..(1080): n is a, c, g, or t
  misc_feature (1082)..(1082): n is a, c, g, or t
  misc_feature (1098)..(1098): n is a, c, g, or t
  misc_feature (1125)..(1125): n is a, c, g, or t
  misc_feature (1152)..(1153): n is a, c, g, or t
  misc_feature (1179)..(1179): n is a, c, g, or t
  misc_feature (1229)..(1229): n is a, c, g, or t
ctcgtgccggattcggcacgaggtatagtatactgttgccttcctaaattatgactgctgaatcatcatatctactatatatgactagaagaagtggttcttcaagtcaaccctcttacaggacttagtggaatctgctttatctactttaggccaaatccatcacacattggcttatttgaaactcttggttttccgatgtttttaaacatcttaggtataacagcacaatttcaccttgaaaaagcaccaaaattatggtgttcctgaaaagatcctattgtgttcaactgtgagtttcatcatgtgtgtccgttgagcttgcttttaagagcaatgttttgctttgctctctggtccatgaactcatttccatttgagtgagctcccttagtgaattttgtctcctgcttggaaagtctctcttctgaacctggagcctggatacattttcagaggcaaattacacgtgggtgaagacatgctacaactactatttttaggcaatgtttttaaatttgtgtctattggggtggggaaggggagtgaggccctaaagatagggattcactgatagctgaaatagattcaggcctaggaggcccagcccccttttcttgaccatatcacaagtgattgaagcccagtgaattagtcggttagaattcgttctacaacatgatagaacttntcttactagcttcagaaatgcacattgatttgtgctatgatgggtggtgtttgtaacaatcactgtnttataggcttatgatctgagcaaaatgtgaactcagtatgtttactattgctcttacttgaaaacnanntaacaaaaaaagnacaaannaaagtagnaaacccatacccatagatagnccactcattcnacaaanacttaccaagnncctaatataagtgaaggaccacctcccatattagattactaagtcatttgtatgaatatgtgtggcagtgaagagaacagntctntcaaaaagcatttgattatctttatntctnnnaaanacacccccccactcccccgacgtggtnttttgttaatcatagcaggatatgacnantcttatttgaattgantttgtcatctaatgtaataatggaagncaaagtattcatatttcttaagatagnnctaaatgtactcttgaacttcttacnggaacagagtgtttgatactctagtatgtaagctgtatttatgtaatatntagaacga

SEQ ID NO: 440525 - DNA, 248 bp, Homo Sapiens
ttttcctgttttaatgttactttgtttattaacatgtcgttctaaatattacataaatacagcttacatactagagtatcaaacattgttccagtaagaagttcaagagtacatttagggctatcttaagaaatatgaatactttggcttccattattacattagatgaaaaaatcaattcaaataagagttgtcatatcctgctatgattaacaaaaaaacaagtagaaaaataagagagtgtattt

SEQ ID NO: 440526 - DNA, 674 bp, Homo Sapiens
tttatgtggataatatttatttgtatcttatctatagaacaaatatttacagatacaaacggaatcacagcaaagttgctataaaaccatccagacctctcgatggccacttctgaaaacatccacggtgaagggcagggccaggcctggctgtggagtgggccagctgagtacctgggcgtcagccaagggaaatggttggggattatggcttcagcactctgccggagcacattcctgagcgctgacaacgtggagccctcaccgcccccacctaccccaacctcaatggggaaggaaaggggcctgagctgggcagggctgcccgggctcactatgtgcctgctccaggagtccctggcccctgtgctggcaggagcatccctgagctggaccgggaggcctctctggcctggggctgctccctgcccggcaggctgctgtttggcagctggaggtggcaagagctgctggtgctgccagggcgtgttggtcaggaatgatctcccagggcagtcctgaggaatgggtcttaggaagtgcctcctagctcactactaggagctggggactgtcagtgctcatcggtcctcgctctccaggatcaccttcccctccttctttttgcctacaatttgatatcgtaggtcctgtaaaaaggaaccaattctgcc

SEQ ID NO: 440527 - DNA, 956 bp, Homo Sapiens
  misc_feature (921)..(921): n is a, c, g, or t
  misc_feature (928)..(929): n is a, c, g, or t
  misc_feature (938)..(938): n is a, c, g, or t
ggtttccaggagcatatattacacaggtctgagtgcaagaaatggcaaacaactgctatgtttgctttaaaagctcatctggaaccaatgccaaatcccgatgcttttgatggccccctggttcttggcccctcctgaggctgggctcagacttctgggtgagggggcagcctcggcatggaacgtcctgccttctgtcacctgaggcatcaggcacttgggtgatgctcagggctggatcctctttcactgcttgtgcacactcagactcccatagccagccctggctgggatcctcataagatggatgggccagtctgggggcactaggtggctgtgtcttcccctgctccctgggagacaggttcttaggctgggctggagttgtgttttccaaatcctggaggttggctagcccacctgccatggttgcctttctgcttggggatgccctgtctgggccctcaataagggatttccaggaccacatgctcagcttcccagaggtggagctgggaggagagcaactgctggtgggggtgagtcccgaagtgctgggagaaagtgctgttagtgcctgggtgtggaggtgctgggccttccagcaaccttcaggagggatggggtctgtggctccagactgacctaggttggggcctgctgaggaggagctggcagcctcctcaatggcttgtgggctcccgagcctcctgtggggaccactgggactttccattctgggaggcccagtgtgatccctgtcaataggcttgggaccattgggcccaggctcctagggtctttggacgggaaaggatcctcttccccactctcttctgctcttttagggggcacactctggctcacttctgggtgaggtgccaagctcagctcctgtgcaccctggctgttctcaaggcnctttctnnggtgtcgtnctctgaggagtccacctc

SEQ ID NO: 440528 - DNA, 915 bp, Homo Sapiens; identical to SEQ ID NO: 238201

SEQ ID NO: 440529 - DNA, 784 bp, Homo Sapiens
  misc_feature (647)..(647): n is a, c, g, or t
  misc_feature (666)..(666): n is a, c, g, or t
  misc_feature (694)..(694): n is a, c, g, or t
  misc_feature (698)..(699): n is a, c, g, or t
  misc_feature (706)..(706): n is a, c, g, or t
  misc_feature (718)..(718): n is a, c, g, or t
  misc_feature (722)..(723): n is a, c, g, or t
  misc_feature (733)..(733): n is a, c, g, or t
  misc_feature (750)..(750): n is a, c, g, or t
  misc_feature (758)..(758): n is a, c, g, or t
  misc_feature (769)..(769): n is a, c, g, or t
  misc_feature (778)..(778): n is a, c, g, or t
  misc_feature (780)..(780): n is a, c, g, or t
cctttttaaagtaaattgagtgtaaaatgttttcaccatgaagccattgcaccctctcccccaggaaacagtgcctaaggatgatgtcaagttacagccagtttgctctgatcccccaggacctaagaaaactgtgagtgcttcagcatgcaaaggtagagctaccagataaggagaataacttggccatttatagcaaactgcctgactttggagtgagaaaccaagcaccttctaggtcctaggataggtgaattggaggtgcagctgctgaagttcccattttctacatacttcaggagccagggtgtttcatttggttttgtaaaactttgctgtaagtcatcacagttaattctttgaatggacattttagagtgtaactttttttcaaaattagcagaacagatatctctgctcattctctttatacatttagttttttaaagttcccctagtatacctgttaggcactctaaataggacacagttaaagctaaaagaaggaccagttgctccctagagcctacagttcagaactatcttgttgtcatgtcctggtttggtttggtttgtttttaactcaacaagttggaaaccatgagtttaaagcaaactatttccttttcttaagcttaaagagattnttttttaatctttagcccncatttaggtagtgaaggctccctgaaanacanngtgcccntctctggaaganaggnngggacaaaancctgagttatggttgangatttgancatcctttganaactttttntntttt

SEQ ID NO: 440530 - DNA, 934 bp, Homo Sapiens
ggcaggctggtacgcctcgggtaacgggatcggggcgtagtacggactgggcctggcctggggcgtccccgcgaagcctgggcctgtcaggcggttccgtccgggtctcggccaccgtcgagttccgtcgagttccgtcccggccctgctcacagcagcgccctcggagcgcccagcacctgcggccggccaggcagcgcgatcctgcggcgtctggccatcccgaatgctatggccgccgtcgccgtcttgcgggccttcggggcaagtgggcccatgtgtctccggcgcggcccctgggcccagctccccgcccgcttctgcagccgggacccggccggggcggggcggcgggagtcggagccgcggcccaccagcgcgcggcagctggacggcataaggaacatcgtcttgagcaatcccaagaagaggaacacgttgtcacttgcaatgctgaaatctctccaaagtgacattcttcatgacgctgacagcaacgatctgaaagtcattatcatctcggctgaggggcctgtgttttcttctgggcatgacttaaaggagctgacagaggagcaaggccgtgattaccatgccgaagtatttcagacctgttccaaggtcatgatgcacatccggaaccaccccgtccccgtcattgccatggtcaatggcctggccacggctgccggctgtcaactggttgccagctgcgacattgccgtggcgagcgacaagtcctcttttgccactcctggggtgaacgtcgggctcttctgttctacccctggggttgccttgggcaagagcagtgcctagacagggtggccttggagatgctctttacttggtgagcccattttctgcccaggaggccctgctccacgggctgctttagcaagttggtgccagaggcggagctgcggagagacca

SEQ ID NO: 440531 - DNA, 1216 bp, Homo Sapiens
  misc_feature (83)..(83): n is a, c, g, or t
  misc_feature (99)..(99): n is a, c, g, or t
  misc_feature (182)..(182): n is a, c, g, or t
  misc_feature (240)..(240): n is a, c, g, or t
gtaagatcggtagttttctcctattactttgtccgaagaaagagagtcgggggagattacatatggcgggcggggcgtcgccnccggtccttatgatgnagcgtggtatgccggggcggcgtcacagttgcgtcacaacatacactattcgcgcggctcttatcaggccgtcgctttattancactcctctattttatgtgtggcggtttggggggcgaatttcacttaggcgcggatanatgggtgcagagtgagggtgtgtggatggtattgggatatcgcgcgggggtacgcgtatgatacaaagacggggggtaagtgtgggtgttagaaggagcgccgaaatgtaatctgtggacgtggtgaaaggcgtcgtttcgggaacgcctgcgtgggccttttttcgtggcaactctggtgtaacattttaggggagttgtggtgggtcgcgcgtaagcgggaataataaggtacttgtacccggctggggggcagaccgggttgtaaaattcctgccgaagccctttactgaatttgcgcctgtgtgtccaggttagtggggaaaataatagttgctggaggagagaccccaatgagagataatctcatttcagggctcacaaatctctccgcaagttgctgtacgaaattataaatttcaatccagttatttgccacactcccagacttgtccaggacgaagtagagatcaaaggctcttctgcaggagggctgctcctgggcgcgcagcagccccccgggaccgctgagcaccaacagccacagcccggggaacagccagctcccggggctgcgggccggggaccgctccgccaccatcctgcggccgggggcctgagactccctcccgctcgcagtcccctaagctcaggagggtcgcaaaggtggcgggagtcaccctgcacgcactctggggtggggggcggcgagcagctgagacgccggcgcctgcggcagcgggacccaccagctgacagggagggagagagggaggtcctgagaggacaaagggagtctccgccaccgccgcagctgccgccggaactcttgacgaatcccagtggaagcgcgatccagtcctccccctcccgattccggagagttcctgcagacaatgcgggcccacggcgacagctcccgaaaggagttccgcaacggcctggggccgagcctcgtttttgaacgccacccagc

SEQ ID NO: 440532 - DNA, 1033 bp, Homo Sapiens
  misc_feature (6)..(6): n is a, c, g, or t
  misc_feature (23)..(24): n is a, c, g, or t
  misc_feature (27)..(29): n is a, c, g, or t
  misc_feature (37)..(38): n is a, c, g, or t
  misc_feature (46)..(46): n is a, c, g, or t
  misc_feature (50)..(50): n is a, c, g, or t
  misc_feature (54)..(54): n is a, c, g, or t
  misc_feature (56)..(56): n is a, c, g, or t
  misc_feature (65)..(65): n is a, c, g, or t
  misc_feature (67)..(67): n is a, c, g, or t
  misc_feature (79)..(79): n is a, c, g, or t
  misc_feature (84)..(84): n is a, c, g, or t
  misc_feature (88)..(88): n is a, c, g, or t
  misc_feature (90)..(92): n is a, c, g, or t
  misc_feature (94)..(95): n is a, c, g, or t
  misc_feature (99)..(99): n is a, c, g, or t
  misc_feature (101)..(101): n is a, c, g, or t
  misc_feature (103)..(103): n is a, c, g, or t
  misc_feature (112)..(112): n is a, c, g, or t
  misc_feature (123)..(123): n is a, c, g, or t
  misc_feature (134)..(135): n is a, c, g, or t
  misc_feature (140)..(140): n is a, c, g, or t
  misc_feature (143)..(143): n is a, c, g, or t
  misc_feature (147)..(147): n is a, c, g, or t
  misc_feature (158)..(158): n is a, c, g, or t
  misc_feature (171)..(172): n is a, c, g, or t
  misc_feature (188)..(188): n is a, c, g, or t
  misc_feature (199)..(199): n is a, c, g, or t
  misc_feature (202)..(202): n is a, c, g, or t
  misc_feature (210)..(212): n is a, c, g, or t
  misc_feature (214)..(214): n is a, c, g, or t
  misc_feature (216)..(216): n is a, c, g, or t
ttttcnttcatttttttcttcannaannntagccccnntatccctnaggntttnantcattttgntngagggaaatttnagaantcanannnanncagncncnaaaaaaaanactttcatgcnccccctttccnntgttngcncatntcgcccacatnacagttgttaaanntcacatgaacaagaanttaagcacatnatnacatggcnnngnantaatacaaatgtctgtcccccccaagaggccatcttttaaagtaggtactagttccaagcctaaaaaacaccctaacgggtcttcagcttcatctgaggatatgccacagtgatcatgcctgctatagaggacacaagacctccaagtccaatgatgccaggattggatttatagatccccagctggtccaaagggttcaggatatcacaaaggttcttcactgtgtccaggagcaagggaggatgctgcttcagagatcggaataaaagaagtagaaaggattggagccattctgtttcctcctcagccacgctgaaccaaagaggatcctgggatgctgatttctctttctttgccctgtcacatgtaactcgtttcatctgcagggagatttcatacagatccctgaccaggctcagcagaagagaatagtagtagtggtgagcagccctcgttcgccatttctctttgttgatgccagaggtgagacctacgctcctcacccagaggatggtgtcacagatgaaataaatcacacggttcaggttggctaatgttaagcataagcgaggtaccaggtcagtggcatgaatgctctgctcagttgcctgtatagcatgtaccacattgcctagtctgaaccctgaagagtcggtcccggccctgggtctggttggtgaagcgggtgaaggcgtccatggcttctagcccaaaggccacgagtcgcacggggctcaggcgtgggtcctctggggcccgtcggatccccagggaacggtcagtcccaggttatccgatcccgggaattccggacgc

SEQ ID NO: 440533 - DNA, 1144 bp, Homo Sapiens
  misc_feature (45)..(159): n is a, c, g, or t
  misc_feature (324)..(428): n is a, c, g, or t
  misc_feature (939)..(958): n is a, c, g, or t
  misc_feature (972)..(1033): n is a, c, g, or t
  misc_feature (1078)..(1078): n is a, c, g, or t
  misc_feature (1093)..(1093): n is a, c, g, or t
  misc_feature (1095)..(1095): n is a, c, g, or t
  misc_feature (1107)..(1107): n is a, c, g, or t
  misc_feature (1114)..(1114): n is a, c, g, or t
  misc_feature (1117)..(1118): n is a, c, g, or t
  misc_feature (1120)..(1120): n is a, c, g, or t
  misc_feature (1124)..(1124): n is a, c, g, or t
  misc_feature (1127)..(1127): n is a, c, g, or t
  misc_feature (1130)..(1130): n is a, c, g, or t
  misc_feature (1132)..(1132): n is a, c, g, or t
ttgggccaacgctccgttgggccaagcaccgtgttgggccaacgnnnnnnnnnnnnnnnnnnnnnnnnnnnnnnnnnnnnnnnnnnnnnnnnnnnnnnnnnnnnnnnnnnnnnnnnnnnnnnnnnnnnnnnnnnnnnnnnnnnnnnnnnnnnnnnnnnngttactatttaaatctcttttgctctctccttcaagagagacctcatcccattcagttgcttccatttatttattcatcttctgcctcctgggctcgagagatcctccagcgtgagtctcccaagtagctgggactacaggctcacaccaccaagcttggctaannnnnnnnnnnnnnnnnnnnnnnnnnnnnnnnnnnnnnnnnnnnnnnnnnnnnnnnnnnnnnnnnnnnnnnnnnnnnnnnnnnnnnnnnnnnnnnnnnnnnnnnncatgagccaccacgcccagccgcaagtacttttacacaaaatgcaaacaccattcttccatcataaaagtgataccacagcttccgtgaagttttgccaggtagtactcataattaccttgggtaaactttttgatgttaaactgtatcttcttattacgagtttttccattgtattaactgcttttacaacaacacaaataacaagttattttacaaaccatttagaaatttctgtactatggtcccagtaatgtaaaatatattaatgcctattacattcagataaattatacacttggaaaccacatacttatgacttacagaaacttacataaacaaattatagaaattacatgctcaatttttaggtatatagtcttaaattaagcttaaatatacattctcaagataaattaacagttcagggcttcacaacttgaaatctgtggaagatgacattggagacaacagaactctggtggaattcttagatggaatttgccgaaacnnnnnnnnnnnnnnnnnnnngagatggagtgtcnnnnnnnnnnnnnnnnnnnnnnnnnnnnnnnnnnnnnnnnnnnnnnnnnnnnnnnnnnnnnnggtcacgcaatcttctgcctcggctccgagtagctggggtgcagngcccgcgccacgccngntaattttttgtntttttantgnnangggnttnctntnttggcaagatgg

SEQ ID NO: 440534 - DNA, 1275 bp, Homo Sapiens
  misc_feature (24)..(24): n is a, c, g, or t
  misc_feature (897)..(937): n is a, c, g, or t
  misc_feature (994)..(994): n is a, c, g, or t
  misc_feature (1004)..(1004): n is a, c, g, or t
  misc_feature (1033)..(1033): n is a, c, g, or t
  misc_feature (1080)..(1080): n is a, c, g, or t
  misc_feature (1110)..(1110): n is a, c, g, or t
  misc_feature (1114)..(1114): n is a, c, g, or t
  misc_feature (1185)..(1185): n is a, c, g, or t
  misc_feature (1215)..(1215): n is a, c, g, or t
  misc_feature (1246)..(1246): n is a, c, g, or t
aaacactaactggaataaaccccngttccagctgaatcccaaaccccccagggccaccaggcctgaataggaaaaggccgaagagcttgaaaagctgggatggtggggaggtggaaaaagaggtggtacacacttcttgagagtcttctacagacgggtatattactccagtgtcctcaccagcagttctgtaattgcaggggtgcatgggagaggagctgggatagggacggtccacaaagtgatcaataataatccccatgataggtggggtcctctcaaattgcctggtagacatgaatgccaagttaattctgtaagcacaagaaagagtgatggtgcccacaggggtgcccactgtcccaacacgaactgtctggaagccttctcctaagccactcagctgaacttctccaaaatatatcctgtataatatgacatattcatgcccttgtttcctggagagcctataggctggtgtcaccctagttatagcaagaagggacttcagcagcaatgacagtctgttgtacaccgtgtaggaaactttgatttctttatcacacttttcattcatttcaagacaccatatttccagctccatggaatctccctcagaagtcttaagtgaaatctccacacacatggacctcccgactgcaggcagctgtcctgccagtgccttctttgcttcatgtgtaacctctgggatgtctttgattgctaagttgaaccaatctgaacccgttggagaagatgatgaacgagtgcaaatcttttcaccaagccgagcctggacaatcacttggacagtcttgagggcaaaaaatttaataaacttgtccaggtcctttctgtcctgggaattgagatcagtttccattgcctataggaatnnnnnnnnnnnnnnnnnnnnnnnnnnnnnnnnnnnnnnnnncttgagtccaagatgctgcgaagttgcggcacaaagagtggttccgggctttcattncggaggccgngacttgggaccgaccagccgcgcctcctngctgagggttccgcgctccggagctgcagtgaccgtacacttcgccnatagacacctaaggcttcagaagggtcctngttngcaggccccagacgttttgctcctaagactccgcgagttgtcgcacccacgtcgactggcgctcttcagtncttccctcactggttaagcggtcactcccnctttaagcccagcagccgttcgcttcccgcnccgccatcgttagtgtttgttttcaatcc

SEQ ID NO: 440535 - DNA, 951 bp, Homo Sapiens
  misc_feature (351)..(351): n is a, c, g, or t
taagggaaaagaggttgatgggtcgcccccaccaggggggtggcccccaatgttccccaaaccaggaaacggtttcttgaacgccctttttcctaaagcccacttcaggtggaaatttctcccaaaaatattatcctggtattattatggacatattccatgccccttgtttcctggaagagccctataagcctggtgtcaccctaggttatagcaagaggggacttcagcagcaatgacagtctgttgtacaccgtgtaggaaactttgatttctttatcacacttttcattcatttcaagacaccatattcccagctccatggaatctccctcagaagtcttaagtganatctccacacacatggacctcccgactgcaggcagctgtcctgccagtgccttctttgcttcatgtgtaacctctgggatgtctttgattgctaagttgaaccaatctgaacccgttggagaagatgatgaacgagtgcaaatcttttcacccaagccgaagcctggacaatcacttggacagtcttgagggcaaaaaatttaataaacttgtccaggtcctttctgtcctgggaattgagatcagtttccattgcctataggaatctgcgaagctgcggcacaaagagtggttccgggctctcattacggaggccgggacctgggaccgaccagccgcgcctcctggctgagggttccgcgctccggagctgcagtgaccgtacacgtcgccgatagacacctaaggcttcagaagggtcctggctcgcaggccccagacgttttgctcctaagactccgcgagttgtcgcacccacgtcgactggcgctcttcagtgcttccctcactggttaagcggtcactcccgccttaagcccagcagccggtcgcttcccggcgccgccatcgttagtgtcctcgtgccgaattcgccaccca

SEQ ID NO: 440536 - DNA, 1549 bp, Homo Sapiens
  misc_feature (438)..(438): n is a, c, g, or t
atcagaaatattttatttcaagagttaacacttttttcaaaaagtaaaaacaatataattacttccctgagtataaagaaccaattctacaataaaagaccattacaaaattaagcaattagaggtacataattctctgcattcaattatactctatttcaaatttattcttaaaaatgtcatgttttggaactttaatgtttcaaaaaaacctcagaacaactcattttgcacctatggtgttaaggttatcagtctgatctgtctttatcaaattcaagggcaatcttcaaagcggtgctattgaggccaacagattgcatgttacatatgatagaaacaatgattcctcttgggggaaccttgttatttatagtctctgtatccagttcttcaggaaggaccagcaggacactactggcacccactgcccctccngtatgtgaagcataatgccgttgctttctacacgaaccatacgtttgtttcttttccacaacaccccacgccattgcatatttaccctctttatcccaagacatctctgtgttagggactggggtccacatcataaccattgtttctggtttgaggtatccaggtaaaagattttcatttgagttcttaaacagcccaacttggtaaccataaagcattgcatttcccagatttcagaaggtcacccactgtagacagaaatccaccaccagcccatttataggagttatccacgtaaggtgtgttgacaagacgtttctttttattgtaaacataaaatcttgctctattgtaaatcactggctcgttttcttcctgcacagtcgtcagcatatccaagtcatggaatattttctgcatatagtccaaatatttacatcctgaagctctctctactatggctgccagtagggtatagccaaaagttgaatacaaaaactgactaccaggtttgaagaacaaaggatcatttttaaataatcttagggattcaattgaattttcaaacttttctctcaaatataattcgccttgttcaaaatcattctttttcttgccaggttttgaattccggcatttggcttcattctcctgctctgttttaaatttagtaaaatcattcttttcattacttttgccttctttttcttgctcaaatgcaacattctctttcatcatcttcaaggctttataagctttctcttctttcaccttttttatgtccttttcataatgacgaattccacttcaatgggaaatcagtaatcttgttgtgacagaaaccttttcaccttcatattctttttctgggacttcgggaacatacagttgtactggaatatcaagatccagtttccctccttcccacactttggcaagagcaaccatggtgagacttttgctgatcctagcaattcgcataactgtctctggtttacatggtacccggttcccaacaccagcataacctaaaccttctgaccagacttcttttccatctacagaaactccaaccactatgcccggtgcgcccacctcctccttgatcccc

SEQ ID NO: 440537 - DNA, 1069 bp, Homo Sapiens
  misc_feature (225)..(225): n is a, c, g, or t
  misc_feature (373)..(373): n is a, c, g, or t
  misc_feature (873)..(873): n is a, c, g, or t
caaaagtgttctcgcagttgggcacagagcagaacagagagctggttattggtatgtgtggctgtgttgcaaatggagcctgcggagagaggcacagttgtgggtagggatacctatctcacggccttatttccagattccttctgcaaattattcatcatttgccaaagttccagggcagctggacacagttattatgctagtaaataaatgtgacaacatagncttttgttgcttggcattgggaaggttctaaagtaagaaaagtcaggaaagttgttgggcaatgctggtaacgttttcaatactatatgattttaaggctgagtccctgttgaaaagagccatatctaaggaatgagatattacatancatgggctgccagcctttgtgtaaccacatgggcttctctctggagtcactgtccccaccgctatggatgagtaagctctgctctgggaagggatgcttggcttccatgttgatgcgcagcctcttcagaccacaaatagccaggtattcagtggggagagtgttggtgctgcacagggaaagcttcaggtcttggaccagcgtgaagttcagcaggtggcccagcgcagatgtgtccgtgaaccagatggtcagatggcccattgtagctggttcgctcctaactgcaaggggcaggacggttttacagttgcacatcaggttggccaaactgtagtcacaatcccggatgtccgcagaacagctgcagttccgaatggtgttttcccttgtgaagatgagcgtgctgttcttctgacctttggtgaagcagttaagtgcaaagacacccagagtgctgatcagaagaagacagtgcctggaaggtggtgccatgcttnccagcatgggccagcgtgtttatcccccctctttttgaaccaatttgttggaactcacctgttattgttgcatgtccccagctcagtgcatggctgtcttctgtatgtgcgtccactctcttggtgcctgcatgctgtcatctgagagttccaccgtgagcctcgcctctccactccacagacctctgcctggcca

SEQ ID NO: 440538 - DNA, 1149 bp, Homo Sapiens
  misc_feature (39)..(39): n is a, c, g, or t
  misc_feature (58)..(58): n is a, c, g, or t
  misc_feature (430)..(430): n is a, c, g, or t
atatacctggttttatttggtgttaaaaacactacagcnagatgttcgcagggccggnataaataatttcgaaggtatagtaaaacttccgggttccaagtagcccttgtagcaggggtattttcttaaaagaaccctcttggtaaaagataaaggtccctatttatatatttcaaacaaaggcgtttcagaggctagttaatggaaagcagccaccattatagattggggggatcccaccccccacaaataggcttaattagaatttcaaatccggatgggttttattttaaagccccaattccacgaatatataatgtttcaaaagataaggttgggttacctttagattttcttatccccccttttccaattttagaagggtaatgaatggaatacccctttaataaattgattctaaaatatcttngtggcattcagaacccttcatgagcatttttacatttctgctcctagttttcaataaaataagaagatttaaacgctcactttggtgcatttccaaatgttacacacatcttatagtatctcatcctgactaatatgactaaaacgtactcctggttttcattctttggaggtgatccaaaatgtttttcaagcaaaggaaaaagccatctcttgtgtaaatggtgatccaattcaccctacttaagactgaatttcacttttactaatggacactatttacattagaaacaagaacagcaatgactttttatggtcaagatacttattcacagaatccagagttggatattttgtatgggttagtttcaatgctattttgtcttctttgtcggtcatattgcaataggactcacccctaaggagtgatctctgagtttaccatatagataaataaaaaattgagacccaaagaagagaggtgatttaccatatcagttaatgacagactggaggctccggatatcttttgccaacatccatcccaccatgcccaaaatgccatttttgaagaatatattttttaaatatacataatgcctaaaagctccaaactgaaattacattttgaaatgaaaacttggctgcagtaaaatatttttaaaatccatgatttctgaatgagtttttctctttatttataactttagttgaatttag

SEQ ID NO: 440539 - DNA, 1841 bp, Homo Sapiens
  misc_feature (1053)..(1053): n is a, c, g, or t
gtggaccggtccggaattcccgggatcgcccccgccgagtcgagcggagccgagcgaagccggcgcgcctgcagctgggagctgggagctgggagcgcgccgggcgcagggccgggccggccgcgggagggtagtgtcagcgcccgcgtccagctcttcggccgcagacccgggctgtctggaggccgcgcggccacctgctgcgtcgccccggctttgggctggggctagacgcgcaccgcggcgggagcagccccggctcgccgcaccccgcggaaggtgcccttctctgcgcgtctcgccgagcccgggccacgctcctgtcccagcgagcttgacatgatttccacaagggtgatggacattaagcttcgggaggctgcagaaggccttggggaggacagcacaggaaagaaaaaatctaaattcaaaacttttaagaagttttttgggaagaagaagagaaaagaatcgccgtcgtccacaggaagtagcacctggaaacaaagtcagacgaggaatgaggtcattgccatcgaatccgggccagtgggctacgactccgaggatgagctggaggagtcgaggggcacgctgggcagccgggccctttctcacgacagtattttcattcctgagtccggacaggacgctactcggcctgtgcgggtgttttcccaagaaaatgtgtgtgatcggattaaagctctgcagttaaaaatacagtgtaatgtgaaaatggggccaccacctcctccaggggggcttcctgccaagcgggggagaggatgccggcatgagctctgaggacgacgggctgcccaggagccccccagagatgtctctgctgcacgacgtggggtcctggtaccaccataaaggtctctgtcgtgtctccagaccacgtgagcgacagcaccgtctctgcccggatctcagacaacagcctggcaccagtggcttgacttacagttatcctgcagaatccttctcctggcctggacaattctgcagcttagcacaagctccaggtcaagccccgccaccagcggntcgagtaagatgaggcggctctcatcgcgcgctcagtctgaatccctgagcgacctgacgtgcacccccgaaggaggaggaaaacgaggagaagccccttttgggagtcagcccagaagagcgccccagctcttgggcagcaggacgtggccgccagacagaggccctgagcctgggccaccggcgcccttgccgccacccggaggggcccgtgccagacgcgcccgcctgcagcactcctccgcgctcacggccagcgtggaggaggggggcgtccccggggaggacccctcaagccgcccggccaccccggagctcgccgagcccgagtcggcccccactctccgcgtggagcccccgtccccgccggagggccccccgaatcccggtcccgacggcggaaagcaggatggggaggcgccccccgcaggcccgtgtgccccggccacggacaaggcggaggaggtggtctgtgctcccgaagacgtcgcgagcccgtttcccaccgccatccctgagggggacacgactccccccgagactgaccccgccgccacctcagaggcgccctctgctcgcgacgggccagaacgcagtgtcccgaaggaagcggagccgacgccgcccgtgctcccggatgaggagaaggggcccccagggccggcgcctgagcccgagagagaagcggagacggagcccgagagaggagcggggaccgagcccgagagaattgggaccgagccctccacggcgcccgccccgagcccgccggcgcccaagagctgcct

SEQ ID NO: 440540 - DNA, 968 bp, Homo Sapiens
  misc_feature (802)..(857): n is a, c, g, or t
tgttattgctatattcttaatacaccttaaatgatttttctttagtcacaaggtcattagtttttagaagtttaaagtaaaccatttttttattacaattcagacatttaaaaaattctcagagctgtcaggctttttcaaccagcctttaaaaatttaattaaataattttcttcaatacaagtcagatattttaagatttttcaggagcatcagacttcttcaatcagaagaacaatgttctaaaaacatgtatgagatccatgtgtgtaatcgttcttgatataacaccattcaccttttcccaagcagagaaacctttcgtacttttccttctcctttcaggtgaatgacaaactgtaataacaatattataaacaatgtgtatatagtacatagacaatatgcatatgtacattacacacaatgtattaaaatatgttatattatcttttacttttaaagggcgtgtcacagaacaggaaactgatacaatgacacttgtttcttaagagaagctgattgaatcctgtaacacattactgcacaattaatggctttaaacgagttacaagtcgtaagttcttatgtttttggatcattttccggaaatgtattccaaatgaaaaaaggaggagaaagtgcacaacatattatgcttaatggaatgggataattcatgtcaattatttttacatttaaactgtgattaaatggttccaatctaaaagctcttactacactaatgcattacaagttattattttttacaaaagtttttaaattatttgcctcatccccnnnnnnnnnnnnnnnnnnnnnnnnnnnnnnnnnnnnnnnnnnnnnnnnnnnnnnnncccttccatatgtgttttttatgttccaaaaaatcgtcctcttctcgggtgttgaacccataacacccggtattctccttttttcctaaattacaaaacaattttttaaat

SEQ ID NO: 440541 - DNA, 1802 bp, Homo Sapiens
  misc_feature (1246)..(1246): n is a, c, g, or t
  misc_feature (1289)..(1289): n is a, c, g, or t
  misc_feature (1352)..(1352): n is a, c, g, or t
tatacaggcgccagcgccaaacaccagcaagaatccacaggggtccatatatttgagggcccaccctcccctgcagctggacagtccagcccatcaaaggtctcattggaaagaagccctcaggaaaagctgcaggtgggcatggtgccctcacacaggggagcatccaggcccagagagtaattgagctgctgcaggtggcaggcagtgatgtcagcaggtgttaaattcagcatccgggctgcacagctccgtatgggggtgtggttacaggtgaacatgttggcaatggcagaagtaaacacaagcaggacggaaaagatgccaactgcggtgctatgtgcccgtgagcggacaatgctgcgggacagacgttgcagggccttagggaacagagaaccacaggagtacacagcacagatcagcacggtgattagcagcagcaggaagatgctggcatagatcccaagcatcagggtggagtgtgggaagatgagaagctggatgaagcagatgaagcagaagaccaacagggcacaggcaacgtaggctcggaagcggggatccaccttccgggagtacttcttctcaagatcctctctctggaaggtgagcagaaaccggcgcacatggtccttccgcagctgatcaatgctgcgggcatcgatggcacggctcaggaactcatccacctcatcctcagggttcagggcatcttgggtgccccggttgtctttgctggaatcatcaatgcccatctggcggaaggccttggagtccttggtccgggagaaggcacgatcaggaacccagcgcggcatcagcccttccatggagttggcccgagtccgctgcagcttggccagcatggccttctcctctttccgtttctggctggcgcccaggatgaggaaagtctcaatgtgctgctccttgaggtacgcgttgcgctcgccaccacggcctggctccacctcgtagtccccgttcaggtactgcagtgttgcccgagtgatgtggatgcggccagcccggcctcctgcctccatgtggttggccagggtcacatcattggaccacacatcgaactgccatttccgcaagccaaggacgccgcagtgcacgcgcccgctgtggatgcccacgcgcatgttcacattcacacctgtcacctcacgtaccagcgagatggcctcaatcatgtctacccccatctccacacagcagtgggcatggtcggcccggnctccggcagccctgacacacagtagtaacagtcccccaagatnttgatcctcaggcagtgattctcctgaatgggaaggaattggagggaagggtaacctttactntcttgcccacccagcctgcatggcccaccaccctccacgcatactctatctgccctcaaatccccagctgctgccagcaaagctatgctctcaccacggtcaacacccaggcccaatcccaaggcccagcaccctcaccgcagccagcttgtcaaaccgggcaaagagctcattcagggtcatgaccagctcctgcgcagtgcactgggatgccaggctggtgaagccctcaatgtctgcaaacaggatgctgacattgtcatgcttctgtatgtagatcttgtggaacatcatgtcttctttttttgtgttgatgtcttctttcatctccatggcaacgtgctggggcaataccgacagcagcagccgctcctgctgccgattctcatgctgcaggtggagccgggcctggatgtaaccgcgggtctcctgaaaggcctggcgctgaga

SEQ ID NO: 440542 - DNA, 1012 bp, Homo Sapiens
  misc_feature (3)..(3): n is a, c, g, or t
  misc_feature (14)..(14): n is a, c, g, or t
  misc_feature (23)..(23): n is a, c, g, or t
  misc_feature (29)..(29): n is a, c, g, or t
  misc_feature (36)..(36): n is a, c, g, or t
  misc_feature (43)..(43): n is a, c, g, or t
  misc_feature (48)..(48): n is a, c, g, or t
  misc_feature (68)..(68): n is a, c, g, or t
  misc_feature (79)..(79): n is a, c, g, or t
  misc_feature (90)..(90): n is a, c, g, or t
  misc_feature (97)..(97): n is a, c, g, or t
tantgcaaggtctnttgataganaaattnccctgtnctcaaanatacntgtgggaaaactccatccanaatacacactnagacagatgtnctttctngcatctgcattgttcatgatctctctcttctgcttgtcagtgctgtgtgacacggatgatcttctcttgtaaaagtgtccgactagcatcaaaagtagcagtcactccacattccttctcccgcttctgttgcgctctaaacaggctgcaaaagcacagcctactgcatggctcaacctttcacctgtgtcccttgacagccatgaagcagtgacagatccagcgacgagtggtgccatcacggcatatgtaagaaaaaggctctatcaaagttcctgtctggggcacagaaagaaactttctctatcgtctggtcaactatgaggtccttagttttttcatccacaactctgagtccatctgctgagacccacagaactgctttaactgctttctttccagtagctttcaatctttttacagcatcttcacagatgtgcattcctcttgattcatcaacttctacatggccaaggtacttaaccgggaagctacattttccggtgcgaacgccttcttcatctgtctgccactgatgtggacgactggcctctggaacataaacatccttctttctcctaaaactttgccgtaatttgttcattttaatttttacagcctggctctgaatcttggctgtgccctttacaagttgtgtgattttggacaagtttcgtaacttcaccaagcctcagtttcctcatttgtcctaagtgaggcgtctgaggattgctggcccaccaatattccaatctatggatatagatcaagatcttgaattgtaacagtggctgcactggcactcttccccggaagaagttgcttaagcctcaaatctgccgctgcccccgaccaactcaagcgccactgcctctacctcggccgccagtggccaccaagcgccaccacctcccc

SEQ ID NO: 440543 - DNA, 797 bp, Homo Sapiens
ttcagtgcctgtttgtaacacggaatgatcgttctcttgtaaaagtggtccgactagcatcaaaagtacaggtcactccacattccttctcccgcttctgcttgcgctctaaacaggctgcaaaagcacagcctactgcatggctcaacctttcacctgtgtccttgacagccatgaagcagtgacagatccagcgacgagtggtgccatcacggcatatgtaagaaaaggctctatcaaagttcctgtctggggcacagaaagaaactttctctatcgtctggtcaactatgaggtccttagttttttcatccacactctgagtccatctgcgtgagacccacacgaactgctttaactgctttctttccagtagctttcgatctttttaccagcatcattcacagatgtgcattcctcttgattcatcaacttctacatggccaaggtacttaaccgggaagctacattttccggtgcgaacgccttctgtcatctgtctgccagctgatgtggacgactggcctctggaaccatgagaccatccttctttctgccgtgaaactcttgccgtgaatttgttcattcttaatttttacagcttgtcctaagtgaggcgtctgaggattgctggcccaccaatattccatgctatggatatagatcaagatcttgaattgtaacagtggctgcactggcactcttccccggaagaagttgcttaagcctcaatctgccgctgcccccgaccactcaagcgccactgcctctacctcgccgccagtggccaccaagcg

SEQ ID NO: 440544 - DNA, 590 bp, Homo Sapiens
caggccatggtgggtatttttaatggacaagaacccagaatgaagatctacagaggcttcctggaggtggtgggactgaggtcatctggtttggcaggatggaaggccagctttcccagggtggaaccatcagagtggaggccccgcccagaaccaacagcagcaccatgcgcacccatagaaggggtagcctggagggaggccaggcgtgcgcagaaggcagctggacatgtggctacacctcaggttctttcatagacaagttactgacacattgctggctccaggggaaaacgcaaaacgaggaaaaggcccctctccctgctctcagggatgctgtagtcttttgactctcggctgtgccagagcttccccggaagctcctgggaccagcatgcctcccactcaagccagtcagccagcatcttgctcctgggacaggctttgggccatgggagccaggcagaggccccagactagccaaggcccgggctggtcccacctcccgctcctgctcgctcccgacggctgcctaggctggggggctgcagactgtgccctgccgcgcagggactggagatggggcagcc

SEQ ID NO: 440545 - DNA, 2577 bp, Homo Sapiens
  misc_feature (25)..(25): n is a, c, g, or t
  misc_feature (59)..(59): n is a, c, g, or t
  misc_feature (1471)..(1479): n is a, c, g, or t
  misc_feature (1665)..(1726): n is a, c, g, or t
  misc_feature (1747)..(1760): n is a, c, g, or t
  misc_feature (1926)..(1936): n is a, c, g, or t
aactggagaagtgatgaggattttnccacgtatgcatgaggacatcaatgaagagtggntctctgataaaaccagatttgcctatgatgggctaaaacgtcaaagacttaccgagccaatggtcagaaatgaaaaagggcttttaacctatacttcttgggaggatgcgctctctcgcgtagtggaatgttgcagagttttcaaggcaaagatgtggcagcaattgcaggtggcttggtggatgctgaagccctggtagctctcaaagatttgcttaatagagtggactctgacaccttatgcactgaagaggtcttccccactgcaggagctggcacagatttgcgttccaattatcttcttaatactacaattgctggtgtggaagaggcagatgttgttcttctggttggtacaaacccacgttttgaggcaccactgtttaatgctagaattcgaaagagctggctgcataatgacttaaaagtggcccttataggcagtccagtggacctcacttacacatatgaccacctgggagacccccccaaaattcttcaagacattgcttcgggaagccatccatttagccaggtcctaaaggaagctaaaaaaccaatggtggttttaggcagttctgcactccaaagaaatgatggagcagcaattcttgcagctgtttctagcattgcacaaaagattcggatgactagtggtgttactggtgattggaaagttatgaatatccttcataggattgcaagtcaagtagctgctttggaccttggctataagcctggggtggaagcaattcggaagaaccctcccaaggtgctgtttctcctgggagcagatggaggttgtatcacacgacaggatttgccaaaggattgtttcattatttatcaaggacatcatggtgatgttggggctcccatagctgatgttattctcccaggagctgcttacacagagaagtctgctacatatgtcaacactgagggtagagctcagcagactaaggtagcagtgacacctcctggcttggcaagagaagactggaaaattataagagcactctctgagattgctggaatgactcttccatatgatactctggatcaagtaaggaacagattggaagaagtctctcctaatcttgttcgatatgatgatattgaaggggctaattacttccagcaagcaaatgagctctcaaagctagtgaaccagcagcttcttgctgacccacttgttccacctcagctaactataaaagacttctacatgacagattcaattagcagagcctcacagacaatggccaaatgtgtcaaagctgtcacagagggtgcccaggcagtagaggaaccatccatatgctgaagcttctactaggatcccagttttgccgcagataattaatggacaactgtagtgcagtgatcctttacaggtttatttctttgtnnnnnnnnntaataataatttgaatcatgtaatatttaaggttatactatgcctatttgaaaatgatattagttatcaactttgcagtttgaaaaacatgtattgtgtgtaaaggttaaataacaaaactatgcagatgctcttaaaagcattgataacctttgtgacgaacataaagagatccttaaattatgnnnnnnnnnnnnnnnnnnnnnnnnnnnnnnnnnnnnnnnnnnnnnnnnnnnnnnnnnnnnnncataacccggcgcacgccagnnnnnnnnnnnnnngaaagagagaggtctgtggcgggccgccctccgcccctcaaaaaaacttttcaaaaacctttttttggggcgccgggcccctaagagggaaagcgacacgcggccctcacttgtttccataagaaaacactgggatcatgaataacggccttgaatttccccaccnnnnnnnnnnncccgcccgcgggccacgccgcgccctgtttcgtcaaaaacgctccgaagggcggttggtctgggggagcgtattgcgcgggggttccttcaacgaacggcgggagtgcaccagacgaggagccccctaaatatagaaaattatcgctcgccccctgggccatttggcaatatctttgttggcggaaggggagccgggtggtgtggaaaatattgacttatggagcccctctttcttgcggccgcgagatgtgggaggacaactgctctgagctcgaaaacggggggcctagcaggcgaaaaaaccctgctcagtctcccctcgaggggggagaagttcacagccacctgtcttggccccccacgaaagcgcgaaacaaataagaatcctccaaccccctcgcagcgcagaacacctccggcggaggagataaaaacactatgtgttcccacttatgggggcgcgcgcgctctttccaatatcgtacgaagggaggcggggagggaacatctgcgtgcccgcagggagctgtagggctccgcagcacacacgcacaaccgtcctttttgtctcccacgacacaccccgcgagtgaggggggacgacggtgcggggatgggtcctttgccccaatacacacgg

SEQ ID NO: 440546 - DNA, 1079 bp, Homo Sapiens
  misc_feature (821)..(855): n is a, c, g, or t
ttaaatactccaaactcctcagggaggaaagcagaggttatctcctcactgcctgaactggataagcacactaagggctttgaagccatttgccttttgcctttgacccatgtggtcagaagtcaggtttgtgtttcaattcctaccacctgaagtgtcaccaggagttatttaactggcaaggtgaggaaagggaaacaagaattctttttcctgaatacccatttaagttccttgacaactggaacaaagtcatagagagcaaagggacaatgtaacaaatctacccattttcctagtagacactgaattcagctggtagtcgagggcttttaattaaaacattttattgtttctaagaatgttcacacaatccaagacttcaaaaatgagtctaaagccatggaaacacatttatcaccttcatgcttgttgaaggacaccagcaaaaatcaatgctaaacctatcagcttcatccattaaagcatttgcatagagaaactaacttccattttacaactctttaatgacagggagaatatccaacaaatcgcaagtaaaatagcatagaccacaaggaaagaaactaagacaagtcaaaaatacaccaagtaagaaattcaatacaactggaaaacatactcataggcaccaacattcctcctttggacacctgttccttactgccctcagatgccccaggacagggtaatggctgagcatggaaaaagtaggtaatgggtcacacaaacttggtggtcctgcaccaaactacaaagattagctcaattatagcattgtgctaacagtaaaagtagtnnnnnnnnnnnnnnnnnnnnnnnnnnnnnnnnnnnctaaattcctacacaaagtttctcgagtacagaggtgaatgtcttctcctcggctacagcctccaccccaaatacaacccaccagttaagagggataacactaaacaatgctgtttagtgtcatgtgcacccatctacatgaccagaaaaatactgttcatatgcaaaaaaatttactaattgttaatgcctggccagatgttcttgtgaagagcaatcccggg

SEQ ID NO: 440547 - DNA, 1781 bp, Homo Sapiens
  misc_feature (1135)..(1307): n is a, c, g, or t
  misc_feature (1549)..(1549): n is a, c, g, or t
  misc_feature (1603)..(1603): n is a, c, g, or t
  misc_feature (1685)..(1685): n is a, c, g, or t
  misc_feature (1704)..(1704): n is a, c, g, or t
  misc_feature (1707)..(1708): n is a, c, g, or t
gatggaaaaaagaaaaacatcccaggattgactttagagatgcaggcaaataggggtgacccgggtacagaatttaaggaagtactcaaaatcagaaaactgacataacattggaggaacatgaaaggaaggaaagagaaaggggaaaaaatagatggtccccagaccctgtcctgtcagacacttgtcctgggcacagagaggctgagcatgggacttcctttttaggggatcacttttccatagtagatgccgaatagtgtgcttgtgttagctgcagtgcttgtatacacatttcctcactggagatctgttcagcaccttgcattcatgacagtggaacttttgtcatcttcctgagaaattcctcagccttcctagccacttgggtgcttccttctgatagagccagcactcctggggagtgtgtgactggggtagattgatgaattcagggaatgaggcttatctcacctgcatttcaaataatacttcctgtatcatcaaacacagtttaaagttaggaattggctgcagagcttttttaggtttgatcagaagcatggtgatgagcaggaaccagcagtctgaaggtcagactgccttgtggaatcatcatgacctgctggtctaactggtccacagtgtttttgcttgttagacaggcagtagatgtagaccatctttgtcaatataattcttagatgttatgaagtaaacaccagactttgctttgtatatcttttttttgtatctaaatgcctcagtctagtgtagactttctaaactttctactcctaccccaagacagtggcattttactttccccatcatcaccatcactaattcctcccacctgcagatttttaaaaaatttattcggtcctgttcatctgtatttacctcctaaataatagatctgtgtcatgtggttctacctcaaagcaaggaagaccctgcctatttcaggacccctttcacctgtattatcattgaggttggaaaggtttctgctgctttgaaaattatatatatatttttaaatagataaggtctcgctctgtcacccaggctggagtgcattggcacgcttttatagttcagtgcagctttgaactcctggggttggtcaggnnnnnnnnnnnnnnnnnnnnnnnnnnnnnnnnnnnnnnnnnnnnnnnnnnnnnnnnnnnnnnnnnnnnnnnnnnnnnnnnnnnnnnnnnnnnnnnnnnnnnnnnnnnnnnnnnnnnnnnnnnnnnnnnnnnnnnnnnnnnnnnnnnnnnnnnnnnnnnnnnnnnnnnnnnnnnagattacaggcatgagccactgcacccagccaaaactagatttttggaaaccaaacctagagcagattctgtacatttctagcatgcaagggccctcatcacataaagcatcaggggctgcagagcctgcataggtgttcaacaagaaaaacagtaaaggtcaccaagcccactgactttccctggccccatgcacctctcacctgtgaggagccttccgaggaacccaaaccgccacactntggaccccagagtcctgaccgtaaacacagaatagaatgtgtttctcacagttntgtcccagccagagagcctatggagacaggtcaggcacagtcaccataacagcagctgagttaaagagccctttcttgctgncatttattatctgcattgnttnntcacttttgcattaaataatgtgcacttttggggggatggtgcttgaattttttagagcttggaatgatgccg

SEQ ID NO: 440548 - DNA, 2434 bp, Homo Sapiens
  misc_feature (11)..(11): n is a, c, g, or t
  misc_feature (49)..(49): n is a, c, g, or t
  misc_feature (75)..(75): n is a, c, g, or t
  misc_feature (424)..(424): n is a, c, g, or t
  misc_feature (443)..(444): n is a, c, g, or t
  misc_feature (446)..(446): n is a, c, g, or t
  misc_feature (454)..(454): n is a, c, g, or t
  misc_feature (463)..(464): n is a, c, g, or t
  misc_feature (469)..(470): n is a, c, g, or t
  misc_feature (477)..(477): n is a, c, g, or t
  misc_feature (482)..(482): n is a, c, g, or t
  misc_feature (484)..(485): n is a, c, g, or t
  misc_feature (497)..(497): n is a, c, g, or t
  misc_feature (502)..(502): n is a, c, g, or t
  misc_feature (504)..(504): n is a, c, g, or t
  misc_feature (508)..(509): n is a, c, g, or t
  misc_feature (511)..(511): n is a, c, g, or t
  misc_feature (514)..(514): n is a, c, g, or t
  misc_feature (518)..(518): n is a, c, g, or t
  misc_feature (556)..(556): n is a, c, g, or t
  misc_feature (578)..(579): n is a, c, g, or t
  misc_feature (586)..(586): n is a, c, g, or t
  misc_feature (589)..(589): n is a, c, g, or t
  misc_feature (595)..(595): n is a, c, g, or t
  misc_feature (599)..(599): n is a, c, g, or t
  misc_feature (918)..(918): n is a, c, g, or t
  misc_feature (1020)..(1020): n is a, c, g, or t
  misc_feature (1530)..(1530): n is a, c, g, or t
  misc_feature (1590)..(1590): n is a, c, g, or t
  misc_feature (1818)..(1828): n is a, c, g, or t
  misc_feature (1913)..(1926): n is a, c, g, or t
atccaacgaanaataccagggtacctataatccctagccacttgtagtnatatgtcctccaatggtccctaagtnatatgtacccttagaaacattgtttaaatgttttatggaatcccctgaagccatttcaggaaaatagcttgaaatcacggctctagacctattcatcttttaacgtaggtcaacatgcgacaatatttaggattaattatcctgagagctttcaattcaacattaatcatgcaaaaaaatcacatgcacaaagaatattgattactaaaattggcaatatatacatagtcatggttaattaagcaccacatttttattatacatttttcttatgttccctaagaggatattatctttggggaacattttagagaaaatttagatctactttcccatcataaagattttnaataattcagtatttgggnngnggttgggnacagggggnnttagnncagtagnggaangnngtggggatatgngtggntngggnntnggntacnatacagttttcgatctctatgatctcgtgatgtttggnatctagtctctctttcctaatnnggatagngtnctattngggntccaattgtcaataccagtcttcaggacctttcctaactttctacctagcccctcaatactctctaggaaactgcaatctgacaaagggtttagaacatgtatgcaatcctcatcttttttcctcctctctgtcattcattcgttcattaaaatttggttgggtcaaatacttgcccagacaggcaaaagatatgttaggaacaaagcttttctatcttatatttcttatcttaatctcctgcctcttaaatgaaggtcttaacttccttattaagatataaaatccaacttggggtttatatgaggtacgtatcttgnggatggctataaacagtaatataagtttccaggttcatacatactaaaacagacctggaaaggtaagtttgaaaaaacaaaatttgtggcgaagagactatnaacatataaacaggattattttgttgaagttgttagaaaaataaagagagccacaaggctaaattataatttgtccttgtgtggtaagattgttccatcaatggcccccaatgagtcataccatccgctgtcagcttgtgtagtcccctcattctgactctagacttggccatgtgatttgctttgtccaatggaacattagtatatatgatagatgtacaggatcgataagctcttgcatattggagcttgctctcttaagatgttttctctactatggaaagaagattcgtctagtctactggaggctgagaggccctgtacagcagagacagccaactcactgaatcgtgaaaaataataaaagtccttgttttaaaccactgagttttggtgtggtttgttatgcagtgatggataatgtgaaatcttatctctctttgtctatgtctgtggcagagcaactggctaaaagttacataaagctatacttaatttgaaaataataantaaaggtctctcagtaaacttaaaaaatattagacctgctgttctctagcatttcctccnccatgtagactcagttattcaatccacttaaatacatatgtacaatactcaacatttaactattaccctgtacatcttataggtacagcctgtagcaactaatcaacgaacagagtacacaataaatatttttatttttaaacactgaattgtacatctttcacataaaacatgagattctagcctgttttaaaaaataagtatacttgctagtactatcttcactcnnnnnnnnnnncagaagccaatgttctctaaatctgcagcttcattccacagctttacagaatcataatctcttgaatatatttccaatgttattnnnnnnnnnnnnnntcatacaagatatatttagcacattaaaacttaagaggttacagtataactgtccagacctccaggtaccactgaatacttttccagtacaaagaggccaatatgttagaataattaattctctgtatttacttttattaaaaagaggtttttggtagtaagaacaaataatctctcatttgttgcctgaaatcctaaaataggatcattggtttctaggcttgctacttgctgcttagcaacctgtcctacttgcctgccttcctttctgttgtaaagtacagtggacatgggagcaggctgacgatagatgaatactcgacgaaggcactcacaaagggctgcatacgagtaatttggagcacaggcgaaaaattttttgtctctctttgatgcttggacatagcctaaagcattgaaagttggatgtgcttccacatatcatcttgtttgcttgagtgtgttgccagagtagggcatcaacatcatggcgcaacagaagcaaggc

SEQ ID NO: 440549 - DNA, 1336 bp, Homo Sapiens
  misc_feature (73)..(87): n is a, c, g, or t
  misc_feature (108)..(210): n is a, c, g, or t
  misc_feature (216)..(246): n is a, c, g, or t
  misc_feature (351)..(403): n is a, c, g, or t
  misc_feature (1205)..(1205): n is a, c, g, or t
  misc_feature (1282)..(1290): n is a, c, g, or t
gaaggatagaactacggcaggtacgaggctggtggtgaatcggcacgaggattgatgcctcaggtcaggttgnnnnnnnnnnnnnnnggttcaaacagcaatttaagnnnnnnnnnnnnnnnnnnnnnnnnnnnnnnnnnnnnnnnnnnnnnnnnnnnnnnnnnnnnnnnnnnnnnnnnnnnnnnnnnnnnnnnnnnnnnnnnnnnnnnntggttnnnnnnnnnnnnnnnnnnnnnnnnnnnnnnntttagcttgggttgttggtgtggttgttgcacctgtgttagctcccttacaaaaattacaaaaaatttagcttgggttgttggtggttgttgcaccttgttagcnnnnnnnnnnnnnnnnnnnnnnnnnnnnnnnnnnnnnnnnnnnnnnnnnnnnnggttggaggcttgcagttgagcccaagaattcacgcccatttgcacttccagcccttgggttgacagagccaagacttccaatcttcaacaacaacaacaaaaaggaatttaaggaggaagccaccgtggctttcctaagaattagactttatggttaatgggatttattttagctggttaagtccaggacccctaccaggaagaactgaggtccatatttgaggttggtctcacccttttgcatgtggtcctactaataataattttgctgtaaagaagcctcaataaggagatggactgtgtgaaaagagatgagaaagcaggcctgtttgcaaggctggcccttggctggcatctgaaagcttggatttcaggagggttctcattactccctaaatgataagagtggctcactgtgcctaaactgtttgtacaaacaatgtgggttatgcccaacatctgctttccttctgggagtcagattttcatatgtgttaggcagaggatgaggtgagcagctcccaatgagaaccctgaacactgagtctgtaatgagcttcccttgtatacaacattgcacatgggttgtcacaactgattgctggaggaattgtgtcctatgtgactctgctgggagaggactgtgggaggcttacacctggtttccctggactttgtccatgcgcttttttcctttgctgattttgcttcctagcctttcgctgtagtaaaacatagccatgagtatgactacaggctgagtctgtgaatctcctagtacatcatcagactagagtgggntggtggtgttggcaccccccaagcacagggcacaagggagacttgcagggtgtttggcatgttccctttctaaattnnnnnnnnntttccggattgttcaagtttgggaaaatcactgggctttttaaaca

SEQ ID NO: 440550 - DNA, 927 bp, Homo Sapiens
ttttaagttattttgtacccctatagtgtgaattctttttattgaaatttaatacacttacagaaaaaaatgtacatattataattgttcatagagctcagtgaattttcacaaactgaacaaatctgtaaaccacacccagattgagaaagggaacatgacaaacaccctgcaagtctcccttgtgccctgtgctggggggtgccaacaccaccacctcctagtctgatgatgtactaggagattcacagactcagcctgtagtcatactcatgggctatgttttactacagcgaaaggctaggaagcaaaatcagcaaaggaaaaaagcgcatggacaaagtccagggaaaccaggtgtaagcctcccacagtcctctcccagcagagtcacataggacacaattcctccagcaatcagttgtgacaacccatgtgcaatgttgtatacaagggaagctcattacagactcagtgttcagggttctcattgggagctgctcacctcatcctctgcctaacacatatgaaaatctgactcccagaaggaaagcagatgttgggcataacccacattgtttgtacaaacagtttaggcacagtgagccactcttatcatttagggagtaatgagaaccctcctgaaatccaagctttcagatgccagccaagggccagccttgcaaacaggcctgctttctcatctctttttacacagtccatcttcttattgaggcttctttacagcaaatatattattagtaggaccacctgcaaaaggggtaagaccaacctcaaatatgtgacctcagttccttccctggagcgggtccgtggacttaacccggcttaaagttaatccccattaacccataaagtttatctttaggcaacccagcggggctctccttccttaatttccttttt

SEQ ID NO: 440551 - DNA, 1641 bp, Homo Sapiens
  misc_feature (180)..(189): n is a, c, g, or t
  misc_feature (500)..(512): n is a, c, g, or t
  misc_feature (830)..(857): n is a, c, g, or t
cctaatggtaaactgaatttatttcctcttggaaaacaattccagtaatctccaggttcagactgcagagtaaacattaataacagtaacatacaggttagttcaactgattcaagaatttggctgcgtgaaatcattaaggaaaaccttgaacactcaaagcttcaaatgtatccaggnnnnnnnnnnttctttgacagtctacataacaactattgcatatatagtgatgctacctgtcacattgcaaggcttacaaatatatatatacgggccttatccagctgtggggttctgttctgtgagaacatctcttcatggtttgcaagaatcttcagcaataaaaaatagtcttggatttaagcgctgatatacctaaagagaaattctaggcttaagtgtaaagaaaaggaagtccaaccatagtctcatgtataacagttgtttttaatctttcttccttaaaaatactttatcttaagccattttggtcatagtcnnnnnnnnnnnnnaatcttgcctgaatagggcccaagtccacttgtctttataagaccattttagtatcagacgacataatacatgtgcaacactttatatacaaggggtctatccggtgcgcaaaagttcaaacacatgaacatccaacagtttgataatacaagttttatggtacaatacaatgtttctgaataatatacattaacaatgaaagtttcgtgcaaagagtaaaacatgttccctttttgtgccacaaaatcaattctccttgagagactgtacttgcactaactgctgtgttgggtcattgtatgattctgtagctcacnnnnnnnnnnnnnnnnnnnnnnnnnnnngagaagagagggaaaacaaacttcagtgatttcattttcatcagaccaagcatatatacatgtaattaattcataatgacttgaacagaacaatgaagtttctgccctctgatgaatagtgctcatgggtgccctctaatgttaaaaaaaatctaatgtttcttccccagggggaaacagacccagagatcttctgaacctgctgtcacccatgagggcctggaaggagaggccagggcagaagcctccttaatgtgagatggctggctggcaccttgccttttctccacctctgccatgcctttctataataccctcccgccatccatcatctcttcttattaagatacgacccagtgttcaaggagcaggtagcactgttttaacagttttatggatctgtgcgtgatttccattggttacatatgcctctgttccaatccctctgagactgtaacatcttgacaacaggggctctatctgcccctgaatatgggtatgaaatgcaagagttagctggctgatgatggacagtgggagcagcccccctcctgagggtgggctttgggctgtggtcataccgtggctcaggggcagattacagtagcccgccaggtctccccttgtccccggatgctctttctcagctgacacagcctgtgctgtatattggtggtccctgctcatctatgctagcatgtcccctttctgagtgaacactctctttccaaattgtgagagggtaactgggattgctgggcaactcaggaccaccagccaggcc

SEQ ID NO: 440552 - DNA, 1671 bp, Homo Sapiens
  misc_feature (1242)..(1251): n is a, c, g, or t
  misc_feature (1574)..(1574): n is a, c, g, or t
  misc_feature (1617)..(1617): n is a, c, g, or t
ggcttaaagactaattcagtgctttattttgacacttgttcgcaacatgttgctttttttcccgtgtcctatgggacctagtcatctgtatgttagattcacagaggaattaaagagataaacatgcatgtgctaaattgatttctgtcttgctttgttatcctataataatgttataaaataacattattataaatttcccaagagttgaattaataccaacaactggtaactcgtttttatgtaaacagcatacttgagaccagaaatcttctggatcactttgtggatctctgcctgccattctcattggtcctctgttcatcccttttctagagcttctccttaccttggcttctcttctgccacattggcctgcctgacctgtcctcaggccctgtcactgccctagattacgtttcccacgtcttcacttccaaatctggacctctcgtttagaccttctctcctgactgccagatggcatgtcccactgtcctccggtgtacatctccaaattgtcccacaggcatttatctcagatgaagtttcaggttggactcattcttctgccccaacagcagaatgactcattgagccattgagccattcagcacattctctatatggcagattcggtgctgtctctggaaatacataaacatagagcgattcctttttctgttgaggcaaaatatggatttggataatttctattcacgtcatgaatgtggtatgtggaaggtcttctgagagcagaaagggatgtttcacagcacagcccggctgtgtggtgctcagggcaggccctctggaggaggtgagcctgggctcttggcctaatgtttcagctctcactttccagtcctgagctgttgttgccagtccatctttcatgagaccattggagtgatctttctggtcttgtcacttcatggtttaaagtttccctgggcctacacagtgaagtccaaattcagcatggtattacaagacccttatgatccagtcttaaccattggttaggtatcctacccatactgtttatctcttgaatacctctatgctctttgacaagtccagcccctacgtgttcatacctcacttctgtgacacagccttgcttcagggctcccaatctctgtagcctccctgaactgtgcatttgctctgctgcttgatttgtttctgtgactgttccattctcctcgggacacatagcagggaccttgtcttggtccnnnnnnnnnnggctttaacagaacatagcaaagaacctgacataggtgtagtctgagtttaccactggggttatcacagaggtctgctaagtgaatacaacacagtggggacccagaacctctagaaagggttgaggattacaatccccagatagctacaatcagggaataatgtaacctgtttgcctagggtgctacatggtaatcttgaattagaacaactgagacttccatgggaccttagggtgataaccattaaacctactctttcagtgtttactttgtaaaagcatcacactaaggaggttgtcatttaatcctcacacctacccntggttattaacactgttgatgaagaaagccttacttgcctaanattggagcaggtttagtagtggtaagattgatactccagtcctgtcttcaaatg

SEQ ID NO: 440553 - DNA, 1657 bp, Homo Sapiens
  misc_feature (36)..(37): n is a, c, g, or t
  misc_feature (544)..(570): n is a, c, g, or t
  misc_feature (763)..(763): n is a, c, g, or t
  misc_feature (1341)..(1371): n is a, c, g, or t
  misc_feature (1373)..(1373): n is a, c, g, or t
  misc_feature (1375)..(1375): n is a, c, g, or t
  misc_feature (1377)..(1377): n is a, c, g, or t
  misc_feature (1391)..(1391): n is a, c, g, or t
  misc_feature (1393)..(1393): n is a, c, g, or t
  misc_feature (1395)..(1397): n is a, c, g, or t
  misc_feature (1400)..(1401): n is a, c, g, or t
  misc_feature (1417)..(1417): n is a, c, g, or t
tcccgggatcgcctcctcctaaagctcgggccctcnnggactgctaggaggggaaaatcgtttcaggattggaaaggaaggtaccaaaatgattggagagggcctttccccgtttcactaggcacttggagaagctgtgacagagagctggacacccagcgcgtgcggaccccgtgcgtatttccccggagtccgcgttccgtgaaagggagaggggtgcggttagctccagggattctctagccctggagccaccgctgatttgcgcactagttgcctgggggtgataaacgggcgtcgtctctcttcaggagcgccaacactaccaagcttccccctgcaaaattcagaaaggatgcgctttggtgagaacttggctcagccttcccgtggcttgggagatgaggttggagtgagaatgtcaccagacctcggaaggggacataacggtacctcctagtcccaggacacgggtacgtgggcggaggtggggtgtgggaggttggtgggaagagcgcaggttactggactcaaacagttcctnnnnnnnnnnnnnnnnnnnnnnnnnnncgtggggtttttccccccctctgcttggtgcgttctgcgcaccccagagggagtctataatgggtactgttggcactctgaggtcttggggttggggggcaagggtgattaaaaataaaaatgattaccaagatgggctccggaaagcttttcacatccagcgggtggtggaggaggggatggagttgccgangccgtctcgggagcctcgtttgtgcgctaagccacttagaggcgctgacttgcccctttagtgcagcagctgatgctaatgacttgaggtctttaacagcttgcatgttgactccttcaacggggctgcaacaccacgtcgctggggaatctcgggcttctttttcacagttcaattctctactcctaaaggaagaaaggcctttgagtggtatagacagtttctcaactccttcagccccacacacaccaccactactttgaagtgggcaatctgtcagcattaggataaatcggattgtgtagctagctaaagtggaggaggcagaaccacaacgtaaggagacagcctcgttgttgtttttcctagtgttgaaataatgtatttggggagttggcaaagagcagcttaccatgttagtttgatcctctcccagctttgagacccttctctggaactcagtggggtattgaggctttgacagcctggtgactgcagtcccaggaggccaggggaggattttgctgaggagaaacaagtgcaaggactttcccatgaagttcatgttcttccttggnnnnnnnnnnnnnnnnnnnnnnnnnnnnnnngngngngtgtgtgtgtgtgngngnnnatnnccttctcttttctggntagtaccccaggcaaattccgaattgctgcctagattaacctgaattcacaggaggaagggctgcaaaatcccatatattcagagaaaagggggaaatcctttaatttcagggtagcctctgcctcttaaaaaaagctttttggaatgcccacttatgtactttggctttgggccaatttaacttcttcccctaaggttgggttcctacgaccaagtctcaacgccatgagggcctttct

SEQ ID NO: 440554 - DNA, 1465 bp, Homo Sapiens
  misc_feature (15)..(15): n is a, c, g, or t
  misc_feature (64)..(64): n is a, c, g, or t
  misc_feature (92)..(92): n is a, c, g, or t
  misc_feature (127)..(127): n is a, c, g, or t
  misc_feature (159)..(159): n is a, c, g, or t
  misc_feature (163)..(163): n is a, c, g, or t
  misc_feature (169)..(170): n is a, c, g, or t
  misc_feature (180)..(180): n is a, c, g, or t
  misc_feature (184)..(184): n is a, c, g, or t
  misc_feature (208)..(208): n is a, c, g, or t
  misc_feature (284)..(284): n is a, c, g, or t
  misc_feature (287)..(287): n is a, c, g, or t
  misc_feature (292)..(292): n is a, c, g, or t
  misc_feature (319)..(320): n is a, c, g, or t
  misc_feature (331)..(331): n is a, c, g, or t
  misc_feature (353)..(354): n is a, c, g, or t
  misc_feature (364)..(364): n is a, c, g, or t
  misc_feature (453)..(453): n is a, c, g, or t
  misc_feature (482)..(482): n is a, c, g, or t
  misc_feature (1411)..(1411): n is a, c, g, or t
ttatgtttagttagngctgagcttaagctgaaggatttcccacattcattacactggtagggtntctctcctgtatgcgtcctctgatgtcnaattagtgatgttctatagcaaaacagtttctganattcattacattgatagggtttcacacaagantgantttttnnttgttcagtnaggngtgtacttcgactgaaggtttttncacattctttacaaacatagggcttctctccagtatgagttctctggtgttcagtaagatgtgcactccgattganggnctttncacatgcattacactcatagggttttnntccagtatganttctttgatgttgaatgggggnnggggtatggntgggagctttcccacattcattacattcatatggtttctctcctgtgtgggttctctgatgtcggattagtgatgtactgtggcaaaanactttccgacattgcttacactggtaggntttttcctcagaatgaattccctgatgttcaattaggtgtgtgctgcggctgaaggtttttccacattcagtacattcatatggtttctttccagtatgaattctatgatgttgagtaagggcagagatatggctgaaagctttcccacattcattacaaggatagggtttttctccagtatggattctctcatgatttctaagggatgacctatgactaaaggttttttcacattcattacactcataaggtttctccccagtatggactctttgatgctgaataagattagtgctctgactaaaagctttcccacattcattacattcataaggtttctctccagtatgtattctttgatgttgaacaagattactgttccgggtaaaggacttaccacatattttacattcataaggtttttctccaatatgtgttttctgatgctgggtcagggatgcaagacaagtgtagcctttcccacattcagtacagagatatgggttcgcggtcatataaattttctcagattccatcagtactgaactatggctttacatttatttattttttcatttttgttggtatgtaataggtgttggcttttcatttatttccagaataagtaaagtttgagatacaaatgcatcctttcttatatctaataaattatttttcattcatgagtttcttttgaaaaaatccactacagcagaattatgcttcaggttcctaccattgatgtcatagttacagtagtcctgccttatccacagttccacttcccatggtttcagttatccatgggaaactgtggtcaaaaatattatatggaaaattccagaaataaacaattcataacttttaaatggtgtggttttctgagtactgtgatgaaatcttgtgtgatctgctctgtcctgcctgngctgtgaatcatttctttgtctgggtatctacactctatgtactacccacccat

SEQ ID NO: 440555 - DNA, 888 bp, Homo Sapiens
  misc_feature (877)..(877): n is a, c, g, or t
acttttttctaacctaacacgttgctgtttaatgttatattcatggtttccaggtaagatgccatctcagcaaccacaacagctgcactcaccccatctttatccaaaactgaagttccacagagaaaaccaatagactcttcaaatgcaaaaaggacttctttcccattttccaggaggtctattatcctacttccaatccatttaaaacctggtaatgtttcttcaaaatgaaatccttctttaagtgcaattgccttcagaattttagaagagactgtggtggctaacatataaacgttcttcacatcagcatttcttgatttatttttcttccagcaatcaaacatccaccatccaaacaaagctgccaactcattccctgtgaaaactttccaacaaccattctcctgaagttctgctgctgccagtctgtctgcatcaggatctgtggctagcactacccgggcattttctttctctgccagtctcaaggaaagttccagcacagattctccttcttcaggatttggacatttaacggtagaaaagtctggatcaggatctttttgttctggtactggaattggaggcttaaaaccaaacactttaaaagccaactgcacatagtcatgtccgaccccatgaaaagatgtgtgcacaaatttcaaggtggtcttcgagtttaactccctgtaaaaacagatctttttcagatcttccatgtatctcctgcaaatgtcctgcagagggtctcttttcagcggggctggtatccactaaattatcattccaggaaccattccagggttccacacattcttctatacatttagatttctttatcatgaggagatgtgatctgagcaccatttcnccagtaaacct

SEQ ID NO: 440556 - DNA, 1001 bp, Homo Sapiens
  misc_feature (932)..(932): n is a, c, g, or t
  misc_feature (949)..(949): n is a, c, g, or t
  misc_feature (967)..(967): n is a, c, g, or t
  misc_feature (996)..(996): n is a, c, g, or t
taccatgctatacacaattacgagatacagaactaggcttaatcacactataataagaaaactcacttttgaattgtgatgtttctgttaacggaaggacaatacgttactataatacttttagtgtaataacttttgtttgaattatgaaaaaatttgaatcatttccctctagaccatttcatttcaaacttatactttgtttagtctagccagttgaccaaaaagaaagaaaataaaaggaaaaagatactcggccagatgagatagagagagaatgctaacacaaggttcaatgtatgcagttctcggttgctctgttccatatgcccacacagtgtcatgacgtattggtgtacccctaaacagaacgccagatcagtccattcttactaggctgaagaaaattctctatcagagcatcattgagtttcttgggttcttcctccagtaaagcagtgtgactctggtcaggtgacgcacagatctctgcataatactttatctttggttctgttccgcttgtgcgaaggttagcaacacagtccattttgaaaagtaaatgtaatcatttggttgtttttactcacaggcagcactgatttcttattaggctggctactgtcatatccagtggtaatgtcccgtacatgcaatatagcaaatgttccaccaaattttggatattcttttggagaatcataattacgaagcctttcaaatatacttttgatggtgggtggttcataacacaagaaataggaagtttttgaaatatgataaccatatttttcataaaccttaaccagttgctgtttcaatgttatattcatggtttccaggtaagatgccatgctcagcaaccacaacagctgcactcaccccatctttatccaaaactgaagttccacagagaaaaccaatagactctncaatgcaaaaggactcnttccattttcaggaggtnattatctacttcaatcatttaaacctggnatgtt

SEQ ID NO: 440557 - DNA, 665 bp, Homo Sapiens
  misc_feature (133)..(133): n is a, c, g, or t
  misc_feature (419)..(445): n is a, c, g, or t
aacattgctatattgcatgtacgggacgttaccacggaatatgacagtgccagccctaataagaaatcagtgctgcctgtgagtaaaaacagccaaatgattacatttacttttcaaaatggctgtgttgctnaccttcggacaagtggaacagaaccaaagataaagtattatgcagagatgtgtgcgtcacctgaccagagtgacactgctttactggaggaagaactgaagaaactcattgatgctctgatagagaattttcttcagcctagtaagaatggactgatctggcgttctgtttaggggtacaccaatatgtcatgacactgtgtgggcatatggaacagagcaaccgagaactgcatacattgaaccttgtgttagcattctctctctatctcatctggccgagtatnnnnnnnnnnnnnnnnnnnnnnnnnnnggtcaactggctagactaaacaaagtataagtttgaaatgaaatggtctagagggaaatgattcaaattttttcataattcaaacaaaagttattacactaaaagtattatagtaacgtattgtccttccgttaacagaaacatcacaattcaaaagtgagttttcttattatagtgtgattaagcctagttctgtatctcgtaattgtgtatagcatgg

SEQ ID NO: 440558 - DNA, 1138 bp, Homo Sapiens
  misc_feature (31)..(31): n is a, c, g, or t
  misc_feature (35)..(35): n is a, c, g, or t
  misc_feature (74)..(85): n is a, c, g, or t
  misc_feature (113)..(113): n is a, c, g, or t
  misc_feature (157)..(157): n is a, c, g, or t
  misc_feature (165)..(165): n is a, c, g, or t
  misc_feature (169)..(169): n is a, c, g, or t
  misc_feature (1126)..(1126): n is a, c, g, or t
gggtgagctaccgctcctggccgcttctttntganaaaacacacatcttcttgccatcatctttaaataagttnnnnnnnnnnnnccttcttacatggcaaatgttcaggggngtactaaaataatgaccttatttgggcactttctaaagtttgtnttggtttntttntgctaactgcatttgtaaaggtaagaattaactgtcaagatagagccagtctgctgctaagataaattcccttaataaacatttccattttattttaagcagggagctttatctttaaatactgtaaaaaattacatctcagaagcccttgtctatgatagttcacaaagaccagatatactctaaaatgttaatactgtttatctctgggtggtggtattacacgccattttatattttacgtttctcaaaaagcatcattaccttgctaattgacggtaatactgtaattgaacagtattttaaaattaaattttagatagcttatattatgaaataccaacacagtccacttctatggaagatttgttaaatgattttcccctattgataaactgctgctttaacaggagaatgatctgatcaggtgtctattagcttggatgaagacaaaacaggtttactttccaggcccttcttttctttaggcttttgagaaaatcccaaaagtgagtttgaacttaattacagcgaatcttgcagtagtaaactttttgggtggccagagtaacacctttcattacaactatcagctgaatggcaaaagacttcccaggtttaccaatgttttcagagacttactagtattctcctctgtcattatttcggaacaattccattgagaaacgcaattgtaaaccgtttctatttcaggcctataaaaaccagaactgggatgaaaggcaaagccttgacctttctattttagactttcatctgtgtagctaagccatctgctttctccccacccatcccatctacttaatggactgaaaatactgcaccttattgcaatttaatcaaaacagcctgacttttccctttaatgaatattggctcttccaccgaagcttgctggcaaattttgcttaccttccctttcaataccttccactncctcaattatgg

SEQ ID NO: 440559 - DNA, 817 bp, Homo Sapiens
  misc_feature (33)..(33): n is a, c, g, or t
  misc_feature (671)..(671): n is a, c, g, or t
  misc_feature (698)..(698): n is a, c, g, or t
  misc_feature (796)..(796): n is a, c, g, or t
ggttatttgtggttcgctttgatcccgaggggngaacgctgaaactctcacattcctggcatagcagccgcctccggcgcgggccgaccctggggctgcgcgctggggcgcgaacagccagagcgtcggcgccacggccgagaacacatcttcgccgccgagctgagctgggccgagccggaggttgtggtctgactgcgctgggcaccctcgggccgcagcggtgctctggggccaggtgccaccggccattgtccaggcagctgtgtgcaagccaaagaagcatgaggacactggaagactcctcggggacagtcctgcaccgcctcatccaggagcagctgcgctacggcaacctgactgagacgcgcacgctgctagccatccagcagcaggccctgaggggtggggctggaactgggggtacagggagcccccaggcctccctggagatcctggccccagaggacagtcaggtgctgcagcaggccaccaggcaggagccccagggccaggagcaccagggcggtgagaaccacctggcagagaacaccctctaccggctatgcccacagcccagcacgggagaggagctggccacctatgagcgaggccaaagcccactcgcagtactatgcggcccagcaggcagggacccggccacatgcggnggaccgagatccccgtggggcccccgnaggcagtcggagggcagacgaggccctgcgggagctgaggcatgggcacgtgcgctcgttgagtgaacgctccttcagttgccctggagaggaacggngcccggcccccagcccatgag

SEQ ID NO: 440560 - DNA, 1162 bp, Homo Sapiens
  misc_feature (397)..(463): n is a, c, g, or t
  misc_feature (559)..(782): n is a, c, g, or t
  misc_feature (878)..(931): n is a, c, g, or t
tactttttcacagggacactctacaagtaactggtaaacccaccagaagatcagggtccagatgcagaaagcaggtgctgatgagtttttaaatatcttggggtctcctagtgggctgctatagcaaggttaccatagtactgggtggcttaaacaacatacatttctttcttactgttctgaaggctggcaagtccaagatcaaggtgcaggcacatctggtgtctgatgagggtccacccgctttctgattttctgaggacagtcttcttgtggtagtcttacatggcagagagagcaagcttttgtgtctctctttataatgccactgccatgatctgaatgtgtcccctgaaattcactcataaaacagtctcctccaaaaacatggtccttnnnnnnnnnnnnnnnnnnnnnnnnnnnnnnnnnnnnnnnnnnnnnnnnnnnnnnnnnnnnnnnnnnntcacagggacactctacaagtaactggtaaacccaccagaagatcagggtccagatgcagaaagcaggtgctgatgagtttttaaatatcttgggnnnnnnnnnnnnnnnnnnnnnnnnnnnnnnnnnnnnnnnnnnnnnnnnnnnnnnnnnnnnnnnnnnnnnnnnnnnnnnnnnnnnnnnnnnnnnnnnnnnnnnnnnnnnnnnnnnnnnnnnnnnnnnnnnnnnnnnnnnnnnnnnnnnnnnnnnnnnnnnnnnnnnnnnnnnnnnnnnnnnnnnnnnnnnnnnnnnnnnnnnnnnnnnnnnnnnnnnnnnnnnnngcgatggtctgaatgtgtctcccaacattcatgtgttagaaacttggtccccaccagctatatggaggctgaggtgggaggatcgcttgagcccannnnnnnnnnnnnnnnnnnnnnnnnnnnnnnnnnnnnnnnnnnnnnnnnnnnnncaggggtctgggaaagacagaggctttgttagagccggcagctgagggccgaggccgagcaggggttaggccagcacaggacgaaaaggaagaaagttccaggtggagtctggtggagaaagaccgacctggaaggcaccagcatgtgcacgtggcaactgaggtcgaggacgtgcctgagagagaggaggaaggtgcctgcggaccgggtagggtgcggatcccgggaat

SEQ ID NO: 440561 - DNA, 1361 bp, Homo Sapiens
agggacacagcccccagcctccctgcacttaccagcatgtaaggctatttgaaggtacctctcctgtacctacctactgactagcaaagccataccaggcccaggcaagccccttttccacacaggggactatgaatcgttccacctccccagaggccggaatggcagagtgacagccgctcagcgtgactagctccatcgctccccgagaaccgattgatgtcgtgtgttttacgttcgcttagcgcagacgtatttatttgtttcatgcttacttactggcacaaagatgtacggtttatagggatgaaaactggaaccacccattcttgcattattcagtatcaggacagaatagagttcaagagtatttaacaggacaagcatgggacccaccgcgtgaggtgccgaagcctttcggtcggaagggccgagatctagtgacaacatacgaaaacgtggacctgaagtgtttcccgaggctgtggacacgcatcactgacactgtttgcccaccacgccctaaggggagctgctgaggtttgcaggtgacagctgacaactgcagaacgcagcacagaacgactatgtcgaaaccttgcactgagagccttgaccaaccctagcgtggcttctggcagcccaaggtcgcgccctgggaccacccagccccctctgaggtccagcccaggaaagctcagggctgacaaaagagggcagtttgctcaggacgacacctgggaactcgccccggcctctacttctcagagggtttactaagaggggcttacaatggtgcgtccttctctgtcccttcgagacgtctgtgttctctgcaacccaggggtgcctctccaggaccggagtcctctgaaacgccaccgtcagggaggacggcgggctgccagcccacctgggcgccagcagcacggacacagcggctccacgtccaccgggtccgccgctccttccctcccgtcggaggccactgaatgctggccgaggcctgttcgttcccccagggtctggctgtgcccatcgcccttgcgctcggcgggtccggcttggaaggcccggcttggaaggccccgggacggcgcggcgggcgggcagctcaggggcgtcggcgcgggcgaaggggccaggagcagctacccggcgcggagacgcaaggtcaatggctccggcccggggcgagtccggggaatgcggcgctcgagaggagccgtgggaccggggcccgggcggaccgccctcactcacccggtgtagaaagctcaggcggtcccgtagcggcggcgcggcagccatgatccaggtcccctcccggtctgccccgttccgccaggcccgggccatcc

SEQ ID NO: 440562 - DNA, 1136 bp, Homo Sapiens
  misc_feature (91)..(144): n is a, c, g, or t
  misc_feature (248)..(258): n is a, c, g, or t
  misc_feature (260)..(261): n is a, c, g, or t
  misc_feature (263)..(264): n is a, c, g, or t
  misc_feature (268)..(268): n is a, c, g, or t
  misc_feature (270)..(273): n is a, c, g, or t
  misc_feature (275)..(275): n is a, c, g, or t
  misc_feature (279)..(279): n is a, c, g, or t
  misc_feature (337)..(349): n is a, c, g, or t
gcgggagggaaaacggtatatgcggtatgggagggggggtaatagaaggtaggaaacgtggcaggggaggagggtaagggagcggtgaatnnnnnnnnnnnnnnnnnnnnnnnnnnnnnnnnnnnnnnnnnnnnnnnnnnnnnnggcccggggaggacagagcgaaacagcacacgggcagtggcgggggaaaggtaggggaacgaaaaaagggaggggaggcggagaaggaggggcgaaagacccannnnnnnnnnncnngnnggcncnnnnanagcntgaggcggtaacaagcgagagaggggttttcggagggagaagtggagtaaaagtggannnnnnnnnnnnncgactggaaacgagccgggtgaaggctgcggggaaagaggcctcgtgtggcaatattcaaggggggtctccggcaggacgcctgaaaaggcggtcgcagccggaaggacttccccgagttcgagaccctgctcaggtacactgttctgggaggaattgtgagagctggggccgctgtccaggctcatcccagccccctcgcggcctgcccaggctgatgcctcacagccgtgcggccgtgttccttgctgtagccgaaaccctggagggtgctgtgcggcctggcctgggagcccatgcctgtggcaggcggggtccccagaggctgggagggagccagcggcaacacggtgtccgagaacagggtgctccccaagtcctgcgcggccgcgcgaaccttctggtacaagctgttcccgtgcagaggatctgggggccctgcaaaagctgcagcttcctggatgaaggcagagttgcgtttgaggatgagcaggaagaaggaggagccgtggctgcacagatagagcaggatcttcagcaccttgagcttcccgtggccggagctgctgtgcaggcggctcaggaggtactccagcaggcactggctgctgcccggagactcgtgggagattttagcaatctcttcaaacaggtagcccggacacgggacatcatcatcggacgtccccttcaggagaatcgggagccggtgtagaaagctcaggcggtcccgtagcggcggcgcggcagccatgatccagcctcgtgccgaattcgccacccaggcc

SEQ ID NO: 440563 - DNA, 1570 bp, Homo Sapiens
  misc_feature (222)..(222): n is a, c, g, or t
  misc_feature (246)..(246): n is a, c, g, or t
  misc_feature (278)..(278): n is a, c, g, or t
  misc_feature (312)..(312): n is a, c, g, or t
  misc_feature (340)..(340): n is a, c, g, or t
  misc_feature (389)..(389): n is a, c, g, or t
  misc_feature (410)..(410): n is a, c, g, or t
  misc_feature (420)..(420): n is a, c, g, or t
  misc_feature (442)..(442): n is a, c, g, or t
  misc_feature (446)..(446): n is a, c, g, or t
  misc_feature (561)..(561): n is a, c, g, or t
  misc_feature (605)..(605): n is a, c, g, or t
  misc_feature (1059)..(1094): n is a, c, g, or t
  misc_feature (1187)..(1244): n is a, c, g, or t
  misc_feature (1256)..(1500): n is a, c, g, or t
cgggatggcaccgcgaacggcagggaatcctggcctgcaccttagtgatctgaggcgtggtgtttctgctggatccggtttcatcgtgttgcgccgcccatcctgaatagttgtgatgttgttgcctggctgtgctgcaggttagcccacactaagcggtcccgggctgttgtgtgggcttgggcgtgtgaaaaaagggagcagatttacggtgcggttganaagtacggcgaccaaacggtaaanagggaggaacttgaagtctaaacaagcctgcntctcctggttttctcaagtggcgtttcatctaantagcggtctggcccagaccctgcttatnttcacgagatcagaggagaccggacgccttcggggtggtatggccttanacgccggtagtgcagcctgtntgccccaaangcgcggctcagccacgcccgtncgantccatgcgccacctctaatccagtgccatggggatcttatcgggacccgggagccgctcgccggaggtctggctgggttgctctccgtgtctacgcccaagcaccgttgcccgcngccttgcgccttctgttggcctcttagagccttccgtgattgcntgcgcctaggccactcgctggacctccgcggcgccaccctgtttcctcgcgggagtgccagaagccttttcccctgcccaagctctgggatctccgggcagcctccattccgccgactctccaggccttccccggctccggagctccagagcttccatgactttgggccgctccggacttggtgtgctctgaggtgtcaacgcccagggcccacagtcctgggatcttctctggtcttttgccttgcggcggggggattgttttggatcccttgctgcccctcttgcaagaccctctcttgcttcacccacccagagccgtttctttaaaatttcaaccatgttctgaactgcagctttacagttgaatattttctttcagaataatttgattctgaactcggtttttcttgacatacctgaattgtttcatgtgagccggcaatttcacatgnnnnnnnnnnnnnnnnnnnnnnnnnnnnnnnnnnnngagacagagtcacattataatctattacttctactagagatctgtttcttcctatttaatgaattattgcttttcatatagtctgaaatttgnnnnnnnnnnnnnnnnnnnnnnnnnnnnnnnnnnnnnnnnnnnnnnnnnnnnnnnnnngacggattctcnnnnnnnnnnnnnnnnnnnnnnnnnnnnnnnnnnnnnnnnnnnnnnnnnnnnnnnnnnnnnnnnnnnnnnnnnnnnnnnnnnnnnnnnnnnnnnnnnnnnnnnnnnnnnnnnnnnnnnnnnnnnnnnnnnnnnnnnnnnnnnnnnnnnnnnnnnnnnnnnnnnnnnnnnnnnnnnnnnnnnnnnnnnnnnnnnnnnnnnnnnnnnnnnnnnnnnnnnnnnnnnnnnnnnnnnnnnnnnnnnnnnnggtgggagcccttgtgcccaccggttgtactttttgtaaaaccctggttaccctttccaaggtcctaaag

SEQ ID NO: 440564 - DNA, 918 bp, Homo Sapiens
  misc_feature (768)..(768): n is a, c, g, or t
ccaacatgacggggctggtggacctgaccctgtccaggaacaccatcagccacatccagcccttttcctttctggacctcgagagcctccgctccctgcatcttgacagcaatcggctgccaagccttggggaggacaccctccggggcctggtcaacctgcagcaccttatcgtgaacaacaaccagctgggcggcatcgcagatgaggcttttgaggacttcctgctgacattggaggatctgggacctctcctacaacaacctccatggcctgccgtgggactccgtgcgacgcatggtcaacctccaccagctgagcctggaccacaacctgctggatcacatcgccgagggcacctttgcagacctgcagaaactggcccgcctggatctcacctccaatcggctgcagaagctgccccctgatcccatctttgcccgctcccaggcttcggctttgacagccacaccctttgccccacccttgtcctttagttttgggggtaacccacttcactgcaattgtgagcttctctggctgcggaggctcgagcgggacgatgacctggaaacctgtggctccccagggggcctcaagggtcgctacttctggcatgtgcgtgaggaggagtttgtgtgcgagccgcctctcatcacccagcacacacacaagttgctggttctggagggccaggcggccacactcaagtgcaaagccattggggaccccagcccccttatccactgggtagcccccgatgaccgnctggtagggaactcctcaggaccgctgtctatgacaatggcaccctggacatcttcatcaccacatctcaggacagtggtgccttcacctgcattgctgccaatgctgccggagaggccacgccatggggggagtcttcatcgtccagct

SEQ ID NO: 440565 - DNA, 995 bp, Homo Sapiens
  misc_feature (172)..(172): n is a, c, g, or t
ttttaatcagaaaaatactttattccactacattacttaattatttcaacaagagggaaagtacagtcgcactggctgtctaacgtacacatgctggtgggcacgaaggctggaggactggaagggggcagagcgggtggctgggtgctcttctttcaggtgtcactgcccncaaggtgagcaggtcccgcaggaggcatggaagtcgcggtaaaaacacaactttgtctttgaaatgacttcaaaacttcacactaaacactgcctctgcagcaggctggagatgctgatgggcggccgggggggcagcctggcctgggagcccccgaagcttggagagtcccctcttcctgctctccctggtaactgtggtgttggcgttagtgggggtcccttgtagggaatttgcagaggtggaatcctgagaggctttcccacgctcctctgactcgttgtcaggccgggatgctcggggccccgggaggagacgctgcccattcgtccatcttgaggtggactaatcatggagattctcgcagggccggctgctatctcagattttctaatcggagaaggagagagatcaacttccatcgactccagtttgaaactgaactttttattgtgctgaaagctgtttgttgtgatgatctcatactaaatagatggagaaaaggtattgaattaaatcataaaaactgacttccccccaggtcatcccaactgaaagtgtaagaaggctctgaatcagtgaaatgttcttactgggtttgcaaacggcatttcacatgaattcagcagttcccatagcgtcctgtgagtcgcacggccctgctcctccctagcgctgaagccaagtgaactcaacaccccactgccatttacatcactggctcttacaactgcaactgtcactcagcacatggccactgcgggtgttaaaggtgtgaaattaagacctgacaacaggagccactaacgcaccagctttgaaa

SEQ ID NO: 440566 - DNA, 1150 bp, Homo Sapiens
  misc_feature (565)..(573): n is a, c, g, or t
  misc_feature (611)..(624): n is a, c, g, or t
  misc_feature (991)..(991): n is a, c, g, or t
  misc_feature (1049)..(1049): n is a, c, g, or t
  misc_feature (1072)..(1072): n is a, c, g, or t
  misc_feature (1098)..(1098): n is a, c, g, or t
tctgtcattggatagatcctaagtgaattagatataaaagagaaatgaattgaatttactggacaacattcttcagatctgctgggacatattttcattttcttgagcatctcaacatcttttgtgaaaaaggagagcgtggatgtcactggctttcacttcatgttttaggtcagcgctgcttttggggtgaaagaagaccatcagcaaacctcagccttgcggccaggactcccccgtcttctgtcggagtccgccggtccgcagcctgcggcagggaggcccgggcacccgcaggtggcgccccacgtccgtgtttgcgccctcagccgagctccaggcgcagctgggaaacccagcgcgtctccccgggtcctttgagcgagcgcggacaccgcaatttaataaataagcgcaagcgccagccgctccaccagtccgaggtccagaggagcagacacacagacccgggccggaggcccctcttctagccctgcgggaaccggacagttccccaactggggactctggaaccacagctcctaaatcatcaaattctcaagcnnnnnnnnnccctctcttcgtcccagccatcccagtcttcttcttcnnnnnnnnnnnnnnaacttattgtttttttcgctcctgtcattatgaaagtggtcacgccattcaatattaagacttggagggaattggggaaagaaaagaaagaatctaaaagaagagaagcgaccggtgcttttaagggtgtctaattttcaaaagagacgtctgggagtattttgctctgggcgtttggagcaacttcgcggacagcggagctcgcccagcatggatgttccaggttcacaggcgcctttcttctgagaacgaccctggccttgaacgtcagagccggggacgaaggcccccggaggctgctgcgagctccgcgcgttcctttgcgcccttccgcgccgttcgcgccggggccggcctttcaccccgngcgccggcttccaccagtcccgatgcaggccgcccggccgggggccacttcggctgcngctgatgatgcccgggcgccggngggcgctgcgcgagcctggcgctgcngtcctccctggggtgggcgctggccttgctgttgctgttctgccgcctgctg

SEQ ID NO: 440567 - DNA, 1755 bp, Homo Sapiens
  misc_feature (259)..(317): n is a, c, g, or t
  misc_feature (1565)..(1565): n is a, c, g, or t
  misc_feature (1578)..(1578): n is a, c, g, or t
ctcctcccaggtgggcacagagcctggcccctccctggatgcggagggctggacccaggaggctgaggatctgtccgactccacacccaccttgcagcggcctcaggaacaggtgaccatgcgcaagttctccctgggtggtcgcgggggctacgcaggcgtggctggctatggcacctttgcctttggtggagatgcagggggcatgctggggcaggggcccatgtgggccaggatagcctgggctgtgtcccagtcnnnnnnnnnnnnnnnnnnnnnnnnnnnnnnnnnnnnnnnnnnnnnnnnnnnnnnnnnnnccagggctgagagcccactgccccaggtcagtgcaaggcctgtgcctgaggtcggcagggctcccaccaggagctctccagagcccaccccatgggaggacatcgggcaggtctccctggtgcagatccgggacctgtcaggtgatgcggaggcggccgacacaatatccctggacatttccgaggtggaccccgcctacctcaacctctcagacctgtacgatatcaagtacctcccattcgagtttatgatcttcaggaaagtccccaagtccgctcagccagagccgccctcccccatggctgaggaggagctggccgagttcccggagcccacgtggccctggccaggtgaactgggcccccacgcaggcctgggagatcacagaggagtcagaggatgtggacgcgctgctggcagaggctgccgtgggcaggaagcgcaagtggtcctcgccgtcacgcagcctcttccacttcccttgggaggcacctgccgctggccgagcctgcagagctggggctgcgtgagagagtgaaggcctccgtggagcacatctcccggatcctgaagggcaggccggaaggtctggagaaggaggggccccccaggaagaagccaggccttgcttccttccggctctcaggtctgaagagctgggaccgagcgccgacattcctaagggagctctcagatgagactgtggtcctgggccagtcagtgacactggcctgccaggtgtcagcccagccagctgcccaggccacctggagcaaagacggagcccccctggagagcagcagccgtgtcctcatctctgccaccctcaagaacttccagcttctgaccatcctggtggtggtggctgaggacctgggtgtgtacacctgcagcgtgagcaatgcgctggggacagtgaccaccacgggcgtcctccggaaggcagagcgcccctcatcttcgccatgcccggatatcggggaggtgtacgcggatggggtgctgctggtctggaagcccgtggaatcctacggccctgtgacctacattgtgcagtgcagcctagaaggcggcagctggaccacactggcctccgacatctttgactgctgctacctgaccagcaagctctcccggggtggcacctacaccttccgcacggcatgtgtcagcaaggcaggaatgggtccctacagcagccccctcggagcaagttctcctgggggggcccagccacctggcctctngaggaggagagcncaggggcggtcagcccaacccctgcccagcacaaagacctttgcattccagacacagatccagaggggccgcttcagcgtggtgcggcaatgctgggagaagccacgggcggccgctgtccgacagattatccttacacccaagacagacagaatgctggcgaatccagccctaagg

SEQ ID NO: 440568 - DNA, 1573 bp, Homo Sapiens
  misc_feature (359)..(359): n is a, c, g, or t
  misc_feature (388)..(388): n is a, c, g, or t
  misc_feature (459)..(459): n is a, c, g, or t
  misc_feature (583)..(583): n is a, c, g, or t
  misc_feature (595)..(595): n is a, c, g, or t
  misc_feature (616)..(616): n is a, c, g, or t
  misc_feature (777)..(777): n is a, c, g, or t
  misc_feature (822)..(822): n is a, c, g, or t
aaagcaggctggtaccggtccggaattcccgggatagccagtgccccggccaggaatggacagcctccaggacacagtggccctggaccatgggggctgctgccctgccctcagcaggctggttcccagaggctttgggactgagatgtggactctctttgccctttctggacccctgttcctgttccaggtgctgacttttatgatctacatcgtgagcactgtgttctgcgggcacctgggcaaggtggagctggcatcggtgaccctcgcggtggccgtgagtacccagcttggcccagagcagggacgttctctccccaggcttctccaccgggttcccgggtgggcccgtcttnggtggctggtcagggatgggaagacacancccacgtggctggacagctgccttcacaggtggaacctgagggccggagatggaggcggtctggccctggngcacacagcacatgaggctgctgagcagagcctctgccaccgctgcctgctgggcagcatttcctgaccctggctcagcccagatgcaggggcctctcttcaggcctcacctgacaagctcttntttcctcctgtntgtggcgccagtttgtcaatntctgcggagtttctgtaggagttggtttgtcttcggcatgtgacaccttgatgtctcaggtgggtggcctcctggagctgggcaggaagccaggcaagggcagagccaattccacaggtgccatggagatggcaggtgggaggggcgcacagagtgatctnggagcaatgggccctggggtcagctgcccctgccctacctccaangaccacaggctgtcagggaaacagaccctccccttttaaagagtctgggccaggagaaaggggtggagatggtggagacagttctctgatctctttcccccagaggaggtcaccaagtagagaaagacaaccggttccccagcctcaatcctaagttcggctgcctacatgcaggcatgtgtcgaaggccaaggggacacagaaggaacctccctgcttgcaggggcctgcagtccagcaggggctgcccaggtggccatggggtcacaaagcggcaaggcctcacctctccctgggggttttagcttcacggtggacctgggctttgtcctggctccacttaacctgccgctgacatgtgatgaagccccatgtgccttcgtcctccttggagctttggaagaacagtggagacagtggtaggcccaggctcaggaaggccgctgtgccattacaggctgcgggcgccaggctgtggtcaccagaggccgccgggtccgccacacaccgttggcgccgctgacagcccgctccccgcgcgggatttaggaatgtcccgggcagtggaaacggctgacgcggggcgggctgttttgcagagcttcggcagccccaacaagaagcacgtgggcgtgatcctgcagcggggcgcgctgaacctgcttctttgctgcctcccttgctgggcgctctttctcaacacccagcacattctgctgctcttctcgcaagacccggacgtgtccaggtg

SEQ ID NO: 440569 - DNA, 1693 bp, Homo Sapiens
tgggtggcgaattcggcacgaggagaaaatgtaggaatgcatttggcttctatcacaaaaatcctgggaatgttcctgagaagggattttggagatgctcggcctaggactggccctcgggaagatgacccgacctttgtcctgtgcagctgagtgctgaacactggtcagctctggataaagcctgatgtcaccgagctgatggcggggcgtctgcactgaacaccttccagcttggtgggggcacgggaaccagctgtcctcattaaaagtgacctggagtgagatggattcttctgcctatacctccacgtgtgggctccctgaacacccccatcgccatgggctcccaagaagtattgcttctggctgcagggctcactgcaatgctgcgacaggaggtgacaggccaaggccagcaggtgactgctctccccagaggccctgtcagctggaagcagctggtttcacataacagagaccccaggcccaggtcccctggatgcaggaggatttgcggctgcccttttggaagagttcctgttccaggtgctgacttttatgatctacatcgtgagcactgtgttctgcgggcacctgggcaaggtggagctggcatcggtgaccctcgcggtggcctttgtcaatgtctgcggagtttctgtaggagttggtttgtcttcggcatgtgacaccttgatgtctcagagcttcggcagccccaacaagaagcacgtgggcgtgatcctgcagcggggtgcgctggtcctgctcctctgctgcttcccttgctgggcgctctttctcaacacccagcacatcctgctgctcttccggcaggacccggatgtgtccaggcttacccagaccatatgtcacgatcttcattccagctcttcctgcaacctttctttatatgttacaagttaaatatttgctcaaccagggaattgtactgccccagatcgtaactggagttgcagccaaccttgtcaatgccctcgccaactatctgtttctccatcaacttgcatcttggggtgataggctctgcactggcaaacttgatttcccagtacaccctggctctactcctctttctctacatcctcgggaaaaaactgcatcaagctacatggggaggctggtccctcgagtgcctgcaggactgggcctccttcctccgcctggccatccccagcatgctcatgctgtgcatggagtggtgggcctatgaggtcgggagcttcctcagtggcatcctcggcatgttggagctgggcgctcagtccatcgtgtatgaactggccatcattgtgtacatggtcccctgcaggcttcagtgtggctgccagtgtccgggtaggaaacgctctgggtgctggaaacatggagcaggcacggaagtcctctaccgtttcctggtgattacagtgctctttgctgaaccctttagtgtcctgctgttaaactgcaaagaacacgtggggtaacttttactacccgacgagacatctttatcctgggggctcaggggtttccaatttatggtgtttcccacctccttgaaactcttgcttgaacaaaggggggcggttcctgagggggaatggaaaaccataaagggtggaagccaatggggaaataccccttggggtacttatagggggtcgggcctcccctctattggaaa

SEQ ID NO: 440570 - DNA, 1402 bp, Homo Sapiens
  misc_feature (90)..(90): n is a, c, g, or t
  misc_feature (338)..(338): n is a, c, g, or t
ttgcttttgccataactcttatgtcctcccaattaactgtgtatctatcataccatctcccttgctagatataagctccatgagggtggnaaatttggtttttgctcaataacaattgtcccatttatgtctttatcttttaagactattcatcttcaaataagacataaataaggttttattatagcaatatgctataatttttaagtgacaactcaagcacttgttttaaaagtatgcattttttctaaatgctttataaaagcaaagtcttttctaaggaccatataattatggtctctatatacacaacttatatacaatttatagagaagtcncagcccccagtgccctggaagaacatcgtagctgcaaaaaatgaagaatctgattctgaaatgccagtcctggagaaggtgttctcagggtggcaaactgcagtccaaacacacttcaggtccctgggtctggcccacacattctctaagaagtcagcacttgcctggactgggcacttttggctagaagggtatgcactacttgctaatttctaaaacctcaaaccttaattttcccccatcttaaaatgggaatcagcttctggaaaagctaataactgtttacaattgtcagacttctaaaaagtgctaatttgttcccttatcagagcaaatgatgagagacaccattttcctgcagattaaaaacaatatataaacatatgattcaacgatgtcaacagctttcagtctatgaatcttgtccaggtcactttgggtcacttggttctttcatcagaacatgttcaagatttctgacattccttttctgaactttctgattttggtgctatttggatttttttgtttgtagataggtctttaacatttccactgcttcctcagcccgatatccagggatacactgaaatggtctcccagtgtttggtaggtcagcagaggcaatatttagaacagagccacaaccaccaaatcgttcattctgacagctcttatacaaccagcgggattttcatcaggcggagagcagctgcacacataatgcacggctccacagtgacatacaacacagtgtgttcaaatacttcagagggactcttgccactttgacgacaccaatcgaggacctgatcgatggccaccatttctgcatgtcgagtagcatttttggtttggttaactttatttctccccttccctacaacttcattgttgtagaccataagacagccaacaggaacttcagtattttcgagggcttctttggccatgtgcatcgcctcctccatccacttttcggtctcctctgccgacaccgagcacgtcggccgcttgcagctggcttgggtgccgccttcgcctccatacccagccaccacccc

SEQ ID NO: 440571 - DNA, 1559 bp, Homo Sapiens
  misc_feature (161)..(178): n is a, c, g, or t
  misc_feature (737)..(760): n is a, c, g, or t
ttttcaacaaaagcaagtttggtttatttgaatggtttcattaaataagtctacaaaggtaacaaactgaagcacaaagcgcaatcttacaagaagcgcaacacccagagttagtgcaaaatgtacaattaacggctgctgagaaacccccaaagtttgannnnnnnnnnnnnnnnnnaacagtgtacattgttaaataatgtaaggaaaacatttataattcagaaagtttttaatgtggaaaaagatactcaaagtgtactattaacacaaaaataatttaaacagttcagtagcactagttcattcctctaggcttgttatttcatacacaggaggatgaaatcaacagtaaataacaccagttctgactttttttgtgtatgagtgaaaagatgtcaaaattattattaaacccaaataacaaatgataatgtgctgcatgaggctccactgctcctctggtataaagtatgtttcactcttgggtggcccctttctcagctactcagccccttgttggttctatccttactctctccacaagaaatacaagcagagaataaataaatcattttaaagcaggggtggaagcccttgcccttttcctttctaccttttaaaaaccttcagctctcatttgcatatttagggccgtagaccaacttacttacttattaagggaagcagggcccttaaggaatgaacagggtacaggagcctccagcctctttctnnnnnnnnnnnnnnnnnnnnnnnnattcccagaatatgccattgacgtgggtaaaaggttggaaatattttcagtttcccaactaagagtcaagaagcaccccaaaattaagagtcctagcttctttctttgtcttcagagataacaaagatcctaaacatagccagttaggacagtatttccggaaagctctgaaaataattaataactacccattacaaggaggcatagcactgaataacactgattggttgcagttattacttacggggagtattatttatttgaaaatgtgaacatattagttgtacttctagaaataaaggtggcacaatagattatgatcctgcaaccatttggacatcataaaggaaatgagtaggaataagtattctttcctagaatgattaattcagatgtggaaagatagatgatagattaactttccacaaaatgtagtaccccaagctgagaaatgcatggtacatgtgcaacaagaggaaagcaatccaaacagtttttctgagagcaattttctccatctgtgacttttcactatcaggttccccaacttgaaaactagccccccacccccttctctttatgttcagtttcttctaggtcacgtctgttcaagcctagctcaaataagaaaggtttatatgacagtcactggccaggcatcacgtttgtttcctcattctttagtctttgtctttcacccagcacacaccattcttttaagttgtccaattttgttacaacaccccctcctcactattcccgaaacagaactttctgtttttaaccactgatgccaaca

SEQ ID NO: 440572 - DNA, 294 bp, Homo Sapiens
caatggcatattctgggaatcaccaccaccaccgccactaccacagaaagaggctggaggctcctgtaccctgttcattccttaagggccctgcttcccttaataagtaagtaagttggtctacggccctaaatatgcaaatgagagctgaaggtttttaaaaggtagaaaggaaaagggcaagggcttccacccctgctttaaaatgatttatttattctctgcttgtatttcttgtggagagagtaaggatagaaccaacatgaggctagtgggctggggtgccgagctcga

SEQ ID NO: 440573 - DNA, 1632 bp, Homo Sapiens
  misc_feature (27)..(27): n is a, c, g, or t
  misc_feature (130)..(189): n is a, c, g, or t
  misc_feature (217)..(217): n is a, c, g, or t
  misc_feature (226)..(226): n is a, c, g, or t
  misc_feature (234)..(234): n is a, c, g, or t
  misc_feature (263)..(263): n is a, c, g, or t
  misc_feature (266)..(266): n is a, c, g, or t
  misc_feature (272)..(272): n is a, c, g, or t
  misc_feature (277)..(277): n is a, c, g, or t
  misc_feature (280)..(280): n is a, c, g, or t
  misc_feature (285)..(286): n is a, c, g, or t
  misc_feature (293)..(293): n is a, c, g, or t
  misc_feature (309)..(309): n is a, c, g, or t
  misc_feature (355)..(355): n is a, c, g, or t
  misc_feature (364)..(364): n is a, c, g, or t
  misc_feature (378)..(378): n is a, c, g, or t
  misc_feature (386)..(387): n is a, c, g, or t
  misc_feature (390)..(390): n is a, c, g, or t
  misc_feature (392)..(392): n is a, c, g, or t
  misc_feature (395)..(395): n is a, c, g, or t
  misc_feature (399)..(399): n is a, c, g, or t
  misc_feature (404)..(404): n is a, c, g, or t
  misc_feature (418)..(418): n is a, c, g, or t
  misc_feature (487)..(487): n is a, c, g, or t
  misc_feature (1373)..(1373): n is a, c, g, or t
  misc_feature (1453)..(1453): n is a, c, g, or t
  misc_feature (1460)..(1460): n is a, c, g, or t
  misc_feature (1507)..(1508): n is a, c, g, or t
  misc_feature (1533)..(1533): n is a, c, g, or t
  misc_feature (1579)..(1579): n is a, c, g, or t
  misc_feature (1583)..(1583): n is a, c, g, or t
  misc_feature (1613)..(1613): n is a, c, g, or t
gtcctcacagcacccattctctgcttnagctcccgcttcttctttgccgctgggcctcggcccagaagccacgacgggcgacacggagccgccagtgctggagggggagccgtgggtgcggggcagcgtnnnnnnnnnnnnnnnnnnnnnnnnnnnnnnnnnnnnnnnnnnnnnnnnnnnnnnnnnnnnacgggtgccccccccttcttggtccgancagtgtgantgtgccanggagcccggcggcggcggcggcggtggtngcngcggtngcggnggngtggnntccggcntgggctggggggtccnagccgcggggggcagtgccatgcacaagcaccagcactgctgtaantgccctgantgctatgaggtganccgcctgnnacncnctncgcncctcnaacctccgggctanggcgactggcaagtccccgacccttacgggccaggtgggggcaacggcgccaacgcgggttataggggntacagctcgcagaccttgccctcgcaggcgggggccacccccacccctcgcaccaaggccaagctcatccccaccggccgggatgtggggccggtgcctcctaagccagtcccgggcaagagcacccccaaactcaacggcagcggccccagctggtggccagagtgcacctgtaccaaccgggactggtatgagcaggtgaatggcagtgatggcatgttcaaatatgaggaaatcgtacttgagaggggcaactctggcctgggcttcagtatcgcaggtggcatcgacaatccccatgtccctgatgaccctggcatctttattaccaagattatccctgggtggagcagctgccatggatgggaggctgggggtgaatgactgtgtgctgcgggtgaatgaggtggacgtgttggaggtggtacacagccgggcggtggaggcgctgaaggaggcaggccctgtggtgcgattggtggtgcggaggcgacagcctccacccgagaccatcatggaggtcaacctgctcaaagggcccaaaggcctgggtttcagcattgctgggggtattggcaaccagcacatcccaggagacaacagcatctacatcaccaagatcattgaggggggtgctgctcagaaggatggacgcctacagattggggaccggctgctggcggtgaacaacaccaatctgcaggatgtgaggcacgaggaagctgtggcctcactgaagaacacatctgatatggtgtatttgaaggtggccaagccaggcagcctccacctcaacgacatgtacgctccccctgactacgccagcacttttactgccttggctgacaaccacataagccataattccagcctgggttatctcggngctgtggagagcaaggtcagctaccctgctcctcctcaggttccccccacccgctactcttctattccccagcacatgcntgctgangaggacttcaccagagagcctcgcaagatcatcctgcacaaaggctnncacagcctgggcttcaacatcgtangaggagaggatggagaaggcatttttgtctccttcatcctggcagnaggnccagctgacctgagtggggagctgcgcagnggagacccggatcttatcg

SEQ ID NO: 440574 - DNA, 1913 bp, Homo Sapiens
  misc_feature (1351)..(1351): n is a, c, g, or t
  misc_feature (1366)..(1366): n is a, c, g, or t
  misc_feature (1481)..(1481): n is a, c, g, or t
  misc_feature (1483)..(1483): n is a, c, g, or t
  misc_feature (1492)..(1492): n is a, c, g, or t
  misc_feature (1500)..(1500): n is a, c, g, or t
  misc_feature (1511)..(1511): n is a, c, g, or t
  misc_feature (1539)..(1539): n is a, c, g, or t
  misc_feature (1561)..(1561): n is a, c, g, or t
  misc_feature (1574)..(1574): n is a, c, g, or t
  misc_feature (1577)..(1577): n is a, c, g, or t
  misc_feature (1604)..(1604): n is a, c, g, or t
  misc_feature (1610)..(1610): n is a, c, g, or t
  misc_feature (1617)..(1617): n is a, c, g, or t
  misc_feature (1621)..(1621): n is a, c, g, or t
  misc_feature (1623)..(1623): n is a, c, g, or t
  misc_feature (1628)..(1628): n is a, c, g, or t
  misc_feature (1634)..(1634): n is a, c, g, or t
  misc_feature (1640)..(1640): n is a, c, g, or t
  misc_feature (1645)..(1645): n is a, c, g, or t
  misc_feature (1649)..(1649): n is a, c, g, or t
  misc_feature (1694)..(1694): n is a, c, g, or t
  misc_feature (1736)..(1737): n is a, c, g, or t
  misc_feature (1739)..(1739): n is a, c, g, or t
  misc_feature (1752)..(1752): n is a, c, g, or t
  misc_feature (1758)..(1758): n is a, c, g, or t
  misc_feature (1785)..(1785): n is a, c, g, or t
  misc_feature (1791)..(1791): n is a, c, g, or t
  misc_feature (1816)..(1816): n is a, c, g, or t
  misc_feature (1823)..(1823): n is a, c, g, or t
  misc_feature (1848)..(1848): n is a, c, g, or t
  misc_feature (1858)..(1858): n is a, c, g, or t
  misc_feature (1902)..(1902): n is a, c, g, or t
gggtgcaaacccaagtaaggctctccaatgaatgcttttgccatacttaagacaaatatacaatttttcaccagtatggcttctctgatgggtaagtcagagttttgttagaagcttttttcacacttgctggggcttctccccagggtgggttttctgaggtccaatgagatgttcatactgtctgcagcacaactgacactgaaggcatttaaaaagtcgttctccggtgtgaattctcttacaacgagaagggctgagcattagtagaaagctctctcacactcagtgcatttctaaggtttcccacttgtatgaatcctcttgtgagtgatcaaatttgagctcagacggtaagttttcaaaacctctgggcatctgtagatttctcgttggagtgaggatgaagtgttctgttggggcagctctctgggcaaagaatttctcatatttccaattgcaggctctctggtccccactgaattctgagctctgagcaaagtctgagatttgtcctcatcttaatgagttctctgatacataaataatttttaatattggtattacagcttctcgcctggtcaagacatctgtgaggcttctgacgcatggggagggctaagctcaagacctttttcactcacattacagacaaacggtttttcaccaatgtgtactgtctgatgttgaagaagggctgaactctggtggaagcttttatcacatacagtgtatttatagtgtagctcctctgtttgagttctcattttctgttgggcaacaaagtccattcctaggaggaagccactctcacacgcagaccactgatgtggtttctcttccatgtgaattctctgatgtacaataagatctgagctacagttaaagcttttttcatattcaaggcatttaaaagtgtgagtgtgagttgcctggtgcctaattaggttggcactccgagtaaaatttctcatacaattccaggcatttaatacggcttcctcacctgtgtggactctctggtgcacgataaggtctgatttctggccaaagcatttttcacaggcaccacacttatagggcttctccccagtatgaactcttttatgtacaatgaaggctgaacggtgtcggtaacttttctcacacttattacatttgtagggcctttccccagtgtgagttctctggtggctaataagatctgatttcccactaaaagctttttcacactcgagacacttaaatggtttctcacctgtgtgagttcttcgatgccttatgaggtttgtacttctactgaagcatttgtcacactcactacatagatatggtttctcgccagtattgnttcgctggtggacangcagatcagaactctgaccaaaattcttgccacaaatgtcacatgtatagaattttttacctgcatgtgttctctgatgtcctgaaagcgctaagtgatgccaaaggctcttctnanatttgctanatttatanggtttctggtnattgtggatcctttggtgtgaagtaagntgtgggctttggacaagggttntctcacacatatnagntttatagggtttctccccagtgtgggntgtctnacacatnatangngctangttttnagggangtttnggtngcattgagggcactggtatatatgaccatctatgtgaataatgtnatgcatatgaataaaaatgtttttacccttcggggggcatanntnatatattttcctnttttgngttctctgattacatttctcttctgangtgtanattttctatggctgtctcctggggngttttcnggtggtcttgttgacccatggttgncctgacagtnattttcttgataagaacttggaagatacatgtgtttcaggcgtntgaatgatgag

SEQ ID NO: 440575 - DNA, 1129 bp, Homo Sapiens
aaaaaaatgcagcagttaggaaaacaaaatagaaaattatgatagaaattagtctttaaaattactgtaacataggaagctgaatgataatatggtagttacaatcctttcagactatgattttggggagacgtgactaaagtttggagaagcaagtgtatttttatacatgacagtaatgaaaactttttactttattttatctctcctatatattctttaagttttatttcaggttaacctatgtcatcaaacattctgttaaatgtgttagccaagtccatgcaaggtctctgttgtagagccagattatgtcctagaaatgtgaccaccagcatgtatattgttccctcctcatcttccttccttctgctttgttttaatgtttccatctaacagcaaaaaggggcagggagtctgccaacagccctgcatgttagaacagttctttaaaggaaggaaatggaggaaatcttagaccaaaatcaggataatcatttgaaacatatgatatttttacactagctgttagatccaggatgcaactgttttacttttaatcacttgatttatttataattgccattttctgatcccaagattttattctttatatatctggttacttatattgatatttgtttatgttgcacagtgtgtgtgtttgtgtttataatcacatgtgctttttaagatggtgtttaaaagaagtaacccttccacagcatgtcctcctcacattcttccaccagagaagaggccccctgagccccccggacctccaccgccgccacctccaccccctctggttgaaggcgatctttccagcgccccccaggagttgaacccagccgtgacagccgccttgctgcaacttttatcccagcctggagcagagcctcctggccacctgccacatgagcaccaggccttgagaccaatggggttctccacccgaccccgtccaaacaggacttatggaaacactgatgggcctgaaacagggttcagtgccattgacactgatgaacgaaactctggtccagccttacagaatcctggtccagaccctgtgaagaacaggaccttctcaggctctttagccaccttgggagtccagcaagttcca

SEQ ID NO: 440576 - DNA, 862 bp, Homo Sapiens
taggtccctggtttttcacccagggttctgggcccaagggattctgtcaagggctggaccagagtttcgttcatcagtgtcaatggcactgaaccctgttttcaggcccatcagtgtttccataagtcctgtttggacggggtcgggtggagtactccattggtctcaaggcctggtgctcatgtggcaggtggccaggaggctctgcttcaggctgggataaaagttgcagcaaggcggctgtcacggctgggttcaactcctggggggcgctggaaagatcgccttcaaccagagggggtggaggtggcggcggtggaggtccggggggctcagggggcctcttctctggtggaagaatgtgaggaggacatgctgctgcctcctcctgtggcattgtgggagttcttcggggcccctgtggcccactgttcttgtcactgttgttttcctccagactgcctgctggctcttgggttttcatcagctgactcaagagaactgccaatatattctgcatgtcagctggtgtgcttgaagcttcaagggtcgtctgttctgctgaaggcaggatcactggggcagagggtgcttccttcaaagactcctctggggccatggtctctgagtcctgctgctgggaagtagcttccgtcagggcactgatggattggttcagggcttccagctgctgctgcatctctgggttggagtggatgttaagcagctgtgccatttgagggatgctcaggtcggtttggctctgcagcaggtttaataacactgccaattcactttgattcagctgttgtgtgatgtcagcaaggcctattgcatccccagccccagactccaccttgcc

SEQ ID NO: 440577 - DNA, 509 bp, Homo Sapiens
aatagcacaatggttttattgacggcagaagaaaaattcttcctttcacttgtaaaaggtatttgcttaatttaactcagtatttttttccattctttgtgtgagttgactgttttttccaccctaaaatctgttttttctttcttcaaataataatatccaccacagctacttattctgaagagaaagtggaaggtctgtcaacaggtttccaccagggtgtttcagtcactggctcgtttcttcacaaagagtcttttcctattagttccgagcccggggtggttggtaaaactgttgggttggccgagtggatcgtcttgggctggccatcacctcccctacggaactccagagtttgatcgtaggtgcctttcttcctcccatgcctctgtttgaatgggcttgatattgctcagtagcacctttttatagtttccgcagccaatgaattttaacaacttgctgccatacccctataaatggaaggcctttaattttttgccccg

SEQ ID NO: 440578 - DNA, 753 bp, Homo Sapiens
  misc_feature (99)..(127): n is a, c, g, or t
gagctgcactgtttattttgctgcttgaaacctaagtgacagtatgccactataattatggggtttcgtctaaacctttactacactgcaggtacagannnnnnnnnnnnnnnnnnnnnnnnnnnnncattttgcaaaatgcagcaaacattttaatttatacatgagaaaaggaagtgcccaaaagggtatgcatttcaagttattgcaggttatttgtgagagaatttctgcgggtaaaacatgtttaaatttaaccaacagtatcgcgtcagtgtatttaaaatcatgacaaaaatcttctctctggtcatgttgcccatgacaaattactatgatgttgtacgtttagggcaagatgtcaatacagcataaatcccatggtattttggttttcttctggagattaaagctgtgttttcttgtgataaatgcatctgcgtaacacaaactcatttgatcaaaaaagcacttctgtcataactccaataattttcaggacacatcaaccgacagttttttttgccattgcccagttcttttaaggattacatctttgcattggctactttaaggacggctgtaaaagttcggattcttgttacgccattcactgaccatcagtttggttgagagaatttatttcggcggttcattttacctattgcagtttacgtttcccctcctccttcttctgatgatccatcccaaggatctgggttcattggtccatttttcccctgcatagtggta

SEQ ID NO: 440579 - DNA, 410 bp, Homo Sapiens
  misc_feature (116)..(144): n is a, c, g, or t
ttttttttacaatttctgagctgcactgtttattttgctgcttgaaacctaagtgacagtatgccactataattatggggtttcgtctaaacctttactacactgcaggtacagannnnnnnnnnnnnnnnnnnnnnnnnnnnncattttgcaaaatgcagcaaacattttaatttatacatgagaaaaggaagtgttcaaaagggtatgcatttcaagttattgcaggttatttgtgagagaatttctgcaggtaaaacatgtttaaatttaaccaacagtagcgtgtcagtgtatttaaaatcattgacaaaaatcttctctctggtcatgttgcccatgacaaattactatgatgttgtacgtttagggcaagatgtcaatacagcataaatcccatggtattttgg

SEQ ID NO: 440580 - DNA, 1132 bp, Homo Sapiens
  misc_feature (72)..(84): n is a, c, g, or t
  misc_feature (621)..(674): n is a, c, g, or t
ttggccccttggggccggtggacccccctccaagagacgcaaaggtttcgggtcaaagcttggccccttttnnnnnnnnnnnnntccccccgtgttcgggcttattcttccttggacttgggccggggatggattcaccaaaggcgagctgggaggagagttccctccgggctcccgttaggtgcttgggccactttccttaattgaagaaaaaaaatttaggcgaagtcacctttttatactgagctggttcatatggatagagtaaacccaccgggaggggtgtattcaaagggttatttcttaatccatcccaccatttcctttacaaaggtccaacaattcttttctggctgggatataatgcacgttcatgttggcatgtggcataacgtgatggtgacgaggcctctcattggctgaaaaggctgcattgatagcaaaatgcttcacataggattccaaaatcgttatgatgttggtctggcatggaagtttcactaaccgtttcctcctgttaatgtagtaacaaatcatcctccagctgcttcttcagaacttcagggatttctatagttattgttctttcttccatttcccttcttgtttgaagctctggtnnnnnnnnnnnnnnnnnnnnnnnnnnnnnnnnnnnnnnnnnnnnnnnnnnnnnntccttgttttcactacagtcagaggaactgcttaatgagttttcatcattttcatctttttcttcagtggggaggccttttaagacagagtccacaccaggcaaccttgcagcgcttcttctttcttcttgtgctcctcaggcgagctacagcttttcttgccaatttacgctgtaatctacgattttcatcggtatcacgaagcacatgatcttctgctgcccatctatcccagcttctgttccaaccattaaaatggatcagatattctgggatctttctgcctttttcgtctttcccaacaataacatcaacaatcttggcatcgtacagcactcgcgccttggtggggtcaggctcgaagcacagcactttctcccctgagtggaatttaaatttcatgccctcgctcgcgctcatttgctcatcgtggtcccgggaattccggaccggtccag

SEQ ID NO: 440581 - DNA, 2343 bp, Homo Sapiens
ctttcaaacaagacaggctttatttagatcaccaaaaataacattttacagaaagggaaccataacattacacaacaaagtatagctgtaaaatctcaaataagaaaggcaatgctttctttagatcaccaaaaataatgtttcacagagagggaaccgttagaagcaaatgcatagctgcaaattttcttttgccatcaatatcgattccctctaaaatactttgagactactttgtggtttccgagtacaaactaaacctttttggacagagttgctcggcttcatcaaaaaaataaaacccatttgcacaaaaaaaatttgtttaatgctaacaaataaagagacaatgtggttcttgctaactaactgcaatgtctactgaaatggcctaacctattccacgaatatttcactgtgaacatagttgctttttccttgccatcacagatggcctgcaaagtaacaagtgtcgtgtcagagcactttcaggcacccagggaatcattcctaacagaataactgcagtatgtgggcaactcaaacaacagagccccaaggtgggcattgtgtttgcgctgtgggtaaagacccaccaccttgttagttattcacctggaacccagagcgccaaactagacagagcagttgctcttacagaaccaacaacattttaataaattgcccgggggttcttggtgctgtaatgtgcctcacaggcagcgacataagccgactctgggaagaagtcatcgtggtattctgctaaaaacctcaaaaagagatcaaagtgcttcaataaagccttcagattcttctcagaaaaggacatctttccaaggatttctggaagtttcacaaacaatcgcagcaaatgttgtgccccataaatgtaagagggtggaggcggctggtcacctggggggtaattgtcaggcacaagcttccaggagaggacctcgtttatttcattagttcttctcccttcaaagccagcaaacacagcactcccttccttgctaggagtcagaggaataggtgaagatgatctgctatgcacaggtgtcttcttttccaggtgcaggaagagcttgggcatgctggcggatgtgtcctgctgccggcgcttgggctgaggtgaagtgctgctcttagaaagcctgtcacagttggcggtgtggggcgtggaccgcctcagagactgcactgcttgtggctcggctttgcgccttttgggggtggctggttcaccggtggtcggctgactctctgtggactgtggcgtggatggattcaacaaaggtgggctgggagagagtttctcctggctcctgttagtgcttgtggcactttccttaattggaagaaaaaatttagacgaagtcacctttttatactgagcttgttcatatggatagagtaaaaccaacgggagagtgtaatcaaaggttattcttaatccatccaccatctccttacaaaggtcaacattcttttctgctgggatataatgcacgttcatgttggcatgtggcataacgtgatggtgacgaggcctctcattggctgaaaaggctgcattgatagcaaaatgcttcacataggattccaaaatcgttatgatgttggtctggcatggaagttcactaaccgtttcctcctgttaatgtagtaacaatcatcctccagctgcttcttcagaacttcagggatttctatagttactgttctttcttccatttccctttttgtttgaagctccggttcttctttcacttcagtcttttcttcaatatcacattcttcacttattttttcatccttgtcttcactactgtcggaggaactgcttaatgagttttcatcattttcatttttttcttcagtggggaggccttttaagacagagtccacaccaggcaacctgcagcgcttcttctttcttcctgtgctcctcaggcgagctacagcttttcttgccaatttacgctgtaatctacgattttcatcggtatcacgaagcacatgatcttctgctgcccatctatcccagcttctgttccaaccattaaaatggatcagatattctgggatctttctgctctttttcgtctttcccaacaataacatcaacaatttgaaacgaagaaatatttcccacgaatggcagaacatacagaaaattagaagttagatcaggaaaactaattcacagacccttttttaaagaaagcattctctccttttttagaccgacagccggtttgaaatatttttcctttcatttttttcccccaagtggacccgctctcgacgaattcgagctcggccgattggcctgat

SEQ ID NO: 440582 - DNA, 626 bp, Homo Sapiens
agcggggctgccccggagcctcgccctccgccacgatgagcaaatgagcgcgagcgagggcatgaaatttaaattccactcaggggagaaagtgctgtgcttcgagcctgaccccaccaaggcgcgagtgctgtacgatgccaagattgttgatgttattgttgggaaagacgaaaaaggcagaaagatcccagaatatctgatccattttaatggttggaacagaagctgggatagatgggcagcagaagatcatgtgcttcgtgataccgatgaaaatcgtagattacagcgtaaattggcaagaaaagctgtagctcgcctgaggagcacaggaagaaagaagaagcgctgcaggttgcctggtgtggactctgtcttaaaaggcctccccactgaagaaaaagatgaaaatgatgaaaactcattaagcagttcctctgactgtagtgaaaacaaggatgaagaaataagtgaagaaagtgatattgaagaaaagactgaagtgaaagaagaaccagagcttcaaacaagaagggaaatggaagaaagaacaataactatagaaatccctgaagttctgaagaagcagctggcaggatgattgttactacattaccaggagg

SEQ ID NO: 440583 - DNA, 1675 bp, Homo Sapiens
  misc_feature (323)..(373): n is a, c, g, or t
atatttttctccaaactgccaaagggaaagtagaattgtggagggaaatgaaatatccatgtaccaggccaggcagatggtcagttaggatgacaatagtaagttcatctacagcataaaatgtgaaatgctttcatcctcattgcccatttccaactaccattctgtttctcctctattgttcatggtttttcaaacatatctttgatttttcaacccccctttttcattaatctgttcttaaaacttctttttactggctttcatacttagcattccagtgaaatgttcttagactcaccagtggacaaataataaggccnnnnnnnnnnnnnnnnnnnnnnnnnnnnnnnnnnnnnnnnnnnnnnnnnnngttgaattctccctcctttggcttgtgggatcctttttctctaatatctgtctttctttttttagttgatctttccacccactcccctttctcctcttctccactgagaataatctccctgtcttttattcacttcattttctatactcctatttatccattttgattgtttatacctactatttgtattcgaatgacttcatttttcccaccctgtgggtcagtttgtgacttttggaattttccacaggtacctgtacagcttgatatttgaaaacaggattcatcaccatatatccccagcccccgttttctttttaaacaggcctcattgcgtaattcctttgccctgaaaagtgtcaccacctttatatttttaccccagccttggagttatctttttctgctctccattctccatgtccaaaaacttgctgtcagtccagtttttaatcagttttctccttgaggcttgatctcccatttctctcatcccattatagcttttcatgtagatctgaggcccaggttactgtaattcttttttttccaatttccttgctcccaggatccccatcttgtataaagtttctaaggtgctcctcctcaaactccatttttacaatatccgtattgtaaaattttcattttcagtaacacccagtagataatttttcaaagacgatcctcctcaaacacccatttttacaatatctctattgtaaaatttcattttcactaagtaacacccagtagataattcctatggagcagtggtgttccaaattctccattacctctatgcctaatattcatcagccttcattactctctagcatattcaccttgattcaacagattcaaacttcctacagccttctactgatgtcttataagcttttgcctctgtgcctttctcatgctattctttttgcttagattgctctttggtcccagctcatgttcatcactcccttcaaagcctttcttcctttatatcttctgactgagctctccctgattgacatcacctcatgcgatgacctccctcattctgtgctgcctcagcacttatcttttgagtttgtactgtggtccatgtacttactaatatgttgctttgtaattattttctagcactctgtgttacagtttcatatttgtatttatttccaaaattaaattgtaagctccttgagggcaggaataataacttttacatttgtatctctgcacccccgagtgcctagtatagtgctgagcacatagtaggcgtttaataaatgcttgttgaagtattgt

SEQ ID NO: 440584 - DNA, 584 bp, Homo Sapiens
atgcgtctattttaaaaggcaaatatagacagtgacagttcatacaggggaaaatcacagatctattcatatcacctcttatatgttcttcagatattgagtgggtcagctaaaccagatcactttgaatatcaacctctttgtattagttcacccacaaatgttttcattagtccatacacatatttttattgcaatttagtggccaacatataatagtttggatacacatttctagcctctaaaagaaattcagaaggtcgagcaactctagcccagcatttcctcatcaacagaaactgttaaacagtctcttagattaagcatgtattcttcagtctgccacaatccccatcactccatattatcctatactcaagtaacacactttacattatccagccttgaattggcatctctgcattatagcttttcatgtagatctgaggcccaggttactgtaattctatttttttcctatttccttgctcccaggatccccatcttgtataaagtttctaaggtaattctcctcagactccatttttactatatcgtattgttatattttcattttcatacgt

SEQ ID NO: 440585 - DNA, 1237 bp, Homo Sapiens
  misc_feature (18)..(18): n is a, c, g, or t
  misc_feature (26)..(26): n is a, c, g, or t
  misc_feature (37)..(37): n is a, c, g, or t
  misc_feature (42)..(42): n is a, c, g, or t
  misc_feature (58)..(58): n is a, c, g, or t
  misc_feature (83)..(83): n is a, c, g, or t
  misc_feature (106)..(106): n is a, c, g, or t
  misc_feature (196)..(196): n is a, c, g, or t
  misc_feature (294)..(333): n is a, c, g, or t
  misc_feature (356)..(356): n is a, c, g, or t
  misc_feature (816)..(816): n is a, c, g, or t
  misc_feature (982)..(992): n is a, c, g, or t
ttctgttttccactgcanaacctggnaaagtaacccnaatcncgagacattgtccctnaagtgtttcaaataatatgggccantctcagacaatgcacaactgtgnataggtaaaacctttaggaagggggataactgggataactcttgagtcctgtataatcaagacccaggagaactgacatgtttccagttncctggcaaaagaaaaagtgtaggaaggtagggtttggcattttaacattttatctaaaactacgaaaatagaaacaacagtgccaaacatatgactgnnnnnnnnnnnnnnnnnnnnnnnnnnnnnnnnnnnnnnnntatgtgatcaatgtttaatattnctgaggaataagtaacaaaatcaagacagattttttacttagctgggttaatttcctctgaattcttctaagagttaaaaatgaactatcacattgattgatttagaaccatcagattttacttctggaaaatctattacctttcaaaaagttataattttaatgttagcacgaaaattacttcctaacatttcattaaaattttgcagccaaagattcctattttagaattacagtactgtaaggcacatacagaactcacctccttcataaccacagaagatatactccctgaaatacaattttaaaatccttgaacaattagaactactataaagttacgcattttttaggtaaaaactgtgctcctacaggatcatgcaacttccttaaaatcagttcagcacatatgtataaagaatcctttctaaaaacatttgcacttgaaatacagacacantgatgctgaagacactaaacaaaatctgagacgtactatatcttgatcaattccgttattgccttctttaaagactttataatctctagtgccttttcaaggtccttgaatttataagtgccgtaatctcacaagcacgtttagcattcccttcacatccatcggnnnnnnnnnnnaccctctaccatcaatctctttttatttagaacgcttccttcatttaccattttttggttcaatttatattgacacatagcgccctgttaatttctctttacccatatttgaccatagcttatattaggtacccatctacttattttcttacgcacaattttcaggtcccctctgtcctaaacattaaagaccaaatgcattcttacggaggccagaatccctttttccacgcagcctcttgtta

SEQ ID NO: 440586 - DNA, 1696 bp, Homo Sapiens
  misc_feature (13)..(13): n is a, c, g, or t
  misc_feature (120)..(120): n is a, c, g, or t
  misc_feature (614)..(614): n is a, c, g, or t
  misc_feature (1147)..(1164): n is a, c, g, or t
  misc_feature (1419)..(1508): n is a, c, g, or t
cagaggactgaanaagaaagtgaatagatagaaaagaggaaaagtaggtagtatataatagacgggagaggggagatagagtgtagaagatgagagagttatagagaggcagtaagaagngagagttggagcgagtgaaaataagagtatataatataatgatgaagagtaagtagtagaagtagaacagaaaggagaaaaatagatttggtagtggttttggtcggaacagggcggcgaggcagataatagaaggtataagaagaagtcaagaaagatgacaagaaagtagacaggggtaggtgtaggatgtggtattgttaagatacaaatattagagtgagaggtatacgggatgtaagtagagtgtgtagagaacgaaatagtgtatgagggtagagaggtgaagtacgataaaacaggtaatgggagctgtgaagagaggaattaagaaggaataaagtgtatgttattgagcagttaaggtgtaataagagggaaggtatgtgagagattgattggagtagagaaaaagtaataaatagaaattaccgtataagggataggaagggggagagggggatatatgataacatagagaagagtattataanggtgatgaagagtgaagatataaatattaaagagggaatgaaaggggataaattgagagaagattagtggagggaaaaaattgtatggtagagaggcgtttgagaaaatgggtgaggaagggaggaaaaagagatattatgtgtttaagttttgtaaataaaaggtgggtagtagaaacatatgaatttaagatatactttttaataaataatatgaggtatgaaatagggattgtgatagaggttgcattatatctgcagatcattttgtgttatagaaatatttaactattaacaatgccagttcatgaatgagtaatattattccatttatgtgttacttaatttgtataatgttctttagagtagaatgtaaggtgtttcaactttttggttaaatttacttcaaactatagttaggtagatggaatttttttgaatttcattttgagatagttactaatgtatagaaatgctatgactttttgctgatgtttttgtattttgaaagtttaataaattttgtttgtttnnnnnnnnnnnnnnnnnnctcgagactagctcgtgccgaattcggcacgaggatctcgttcccatactcgctcaaaatccaggtctagctcaaaatcccattctagaaggaaaagatcacaatcaaaacacaggagtagatcccataatagatcacgttcaagacagaaagacagacgtagatctaagagcccacataaaaaacgctctaaatcaagggagagacggaagtcaaggagtcgttcgcattcacgggacaagagaaaagacactnnnnnnnnnnnnnnnnnnnnnnnnnnnnnnnnnnnnnnnnnnnnnnnnnnnnnnnnnnnnnnnnnnnnnnnnnnnnnnnnnnnnnnnnnncggtgtaaaaacaaagaccgggacaaggaacgggaaaaggaccgggaaaaagacaaggaaaaggacagagagagagaacgggaaaaagagcatgagaaggatcgagacacagagaaggaaagggaccggacaaggacaggaacgagaaatagacagatccaagagatagatgaaaaagaaagatgata

SEQ ID NO: 440587 - DNA, 769 bp, Homo Sapiens
tctgtctttttctgagtcacttgcatgcccattaaggaagttcctcattttgcagaggtcattaccaggtaatttcactggtctcttcactctcagagtcgctcccatgctgatgtgacaatcctcatgtttcagaatcgcttgcaggaggctctgcacgttcctcagattcagagtcgctgtccttttgcctgtgaagctcctcactttcagagtcactagcattaagattttaagggctcatcgttctcaaaatctgtcaacatgatgtccctttggggaggcccatcttctcgaatcaactaagttttcattcctctgaatgaacgttcctacacttccagtgtctgatccggagtgttgctcatttacatcatcctcaccgtctgaccctgaatcccgttcatcctgtactggggtagcaccaccatcatctgactggtcgccgctgtaatattccgagtccatggcaggcggactctcagcggggagtgctccgccccgcgccgcccccgtcacctccttccaggcggtgtgaccccggatggcgcggctaagtgttcagagactgccgcccgaccggagaacttaacgggtgcggagggtaagaaagcggtagcggcaaaggcgaattctttgacctggaagccccggcggaaaagaccgtacccggcaggctggcgggcgggcaggcatgcgagccggcgttctacttccgagcgcgtgggtcgacgatatcacacgagaaaaccctggtgcccaggaggcc

SEQ ID NO: 440588 - DNA, 1647 bp, Homo Sapiens
  misc_feature (161)..(215): n is a, c, g, or t
  misc_feature (381)..(434): n is a, c, g, or t
tcatctatctctttggatctgtctttttctcgttccttttctttgtcctgttccttttccttctctttgtctcgatccttctcatgctctttttcccgttctctctctctgtccttttccttgtctttttcccggtccttttcccgttccttgtcccggtnnnnnnnnnnnnnnnnnnnnnnnnnnnnnnnnnnnnnnnnnnnnnnnnnnnnnnngctcctgggggacggagatctagaagatttcctttttatggtttttgatgttcttggcgatctggaagaactcctgctcctcctcctacgcctttccctgctggaactacgagatcttcgcgatgcattgtaactcctgggtggtgttctggattttttatccttnnnnnnnnnnnnnnnnnnnnnnnnnnnnnnnnnnnnnnnnnnnnnnnnnnnnnngtcctgttccttcttctttctctttgtctcgatgcttctcctgctctttttgccgtatgtttttctctgttcttttcctgtgtctttttcactccctgtcagatgctatggtcttcattttttttgtctgacttttctgttcccagcttcttcctcactgtcagatgctatggtcttctctcttttgcctgacttgtctgatacagcatcactgtcagagtcatctgcatcagagacaacacgactcttctttgctgatgctttctcttcatcttcactatcagaaagcacagcagcttttctcttcgctactttctcctcctcaccctctttttcatcttcatcactgtccattttttgctttttgtgttcttcctcctcactatcagaactgtgaaacttttttctgtccatatggctgtctgaatggaaggagtcattctgcatttctgtatcctctcccttattctccctgtcgctgtcatcatctgactctggcttctgtttgtgtctggacgcatcctcagtttctgagtcactggcaggccccttctgaggcccctcactctcagagtcactgactcggggtttgggtagctcctcattttccgaatcactggcctggttccttgggggatcctcactttccgaatcactgattcggggtttgggaagctcttcattttctgagtcactggcctggtgcctcggagggtcctcactttctgagtcactgatacgaggtttgggaagctcctcattttcagagtcactggcctggtgccttgggggttcctcactttctgaatcactgacctgaggtttaggaagctcctcactttcagaatcactcattcgaggtttgggaggctcctcattttcggagtcactggcttggtgccttgggggttcctcactctcagagtcactgatttgaggttttagagcatcttctgtttcagagtcactagcaggactcttctggagctcctcaatctcagaatcactggcgggatgcttcccaacatcttcgttttctgagtcacttgcatgcccattaagaagttcctcattttcagagtcactaccaggtaatttcctggtctcttcactctcagagtcgctcccatgctgattgacatcctcattttcagaatcgcttgcaggaggctctgcacgttcctcagattcagagtcgctgtccttttgcccc

SEQ ID NO: 440589 - DNA, 1155 bp, Homo Sapiens
tctgtttttgaaaaatttattttatactcttagaagctaagaactttgccacacatgaaccaaatttagaattaaggttcttccctagtgtatctacttccttttgaaattttataaacaagattttatacacaagaggtagcagaggaaaattccagtctgcttgttccaagctcagaaggtaactgcacacacctcgatgttagcagggaaggtggggcaggacagggtaagtctgatgatacggcactctagttcctaaaactgactgtagttgtcagtgaccgtgtgaggactccagggagaagtcgtggtgagatgcccgctgggatgcttgttttctttcccagggatgccttcaacgggcagaatcggccatcttaagatcggcctcactaagggagcttcttgagaacacacagcattattgagttaattgtgcaattcctgctctgttttgcagaccattttgaaaggtttataaaaacatcttcatccaaaaaattggcagtaaaaatgacaactcttccaaggtaagcctgtcataactgtcactgttgtactacattaaaaaaaagtcatcagcaggttcattgactgtagctgtcagcaatcaagtggttaccagcaaagtgaaaacgatggtcattgcagcaacaatataagcaacatgatctgaagcgtataatatacacggtggacgatcctgatgaacctttacagtgaggacggcaggtgctaggggtgcggaaggcgttgtttccataggaaataaggggactagaagtggcaatttcactcctgattttgggctcctgagagtgcagtcgccagcgatgatatccccagtgtggatcatcgcccagcatttcaaggtcatgtccccacacaatctcttggtgaggatgtgggcggagagaaggtgagaatagggtaggggaaacagtaggacaggaagtattcacgtactcaaaaccaatggtagatcatcacatttcaaactgcaagaccattggaaccgtctgaagtttgccactcgcctctgtccgtttctctaagggtacagttctgctcttaagtgctggcccttccatcttctcagtgtgtttgacaaaggccactgccaacctccagcaagtctcagaataacctcgt

SEQ ID NO: 440590 - DNA, 903 bp, Homo Sapiens
  misc_feature (229)..(229): n is a, c, g, or t
  misc_feature (232)..(232): n is a, c, g, or t
  misc_feature (235)..(235): n is a, c, g, or t
  misc_feature (238)..(238): n is a, c, g, or t
  misc_feature (851)..(851): n is a, c, g, or t
tatagcaaccggaattggttccgtttatttaacaaagggagcaacctgctcgccaagtgtctcgccatagacaagctggtttcaaactatccatagacccataatttattttaagcccgtaaaatgagattgtgaaccattaaaaatatgttgtacgactatttaatgtcataaagagaactaactgctgtttttatggtccatctgccaatggtcttccgagcagttnctnctnctncctccaaaacctcctctcctctttactcaccctcactcagcctaaccttgcttccgattttattaaggaaatccaatcaatcagaagaggtttctacaatttactatcacatttacccaccagccatcacctctgccatatatgctcctctcctattccaatggctggaatgtctcagggaagaccaagcccttcacttgtacattagatcccagctctctgtcccatccattatggaagctgcacatcaccccagtcacacaagagggcactctgaatgaggaatcttgtaaactactccaaatcaccagtcttgaacagtcttgaacacgcatgggcgttaaagtactctttatctgtacattgctacctgatagacaagcccacacaaggaagcaggctgatgtagatccatataggtatgtaaatatatcaaatattttataattcttttttagtggcggaggaagaagaaaaatacttctatttgagaaccctattgaggttgcatgccaacttctggagatgttcagacaagaaaaaaagaaatgtggtaaattctaattttacctttttatgtctattttatttacatgacttcttttcaggtatnccaaaactttagccaacaattcttggtttcaggagtcagggagcatagaaaa

SEQ ID NO: 440591 - DNA, 1800 bp, Homo Sapiens
  misc_feature (963)..(963): n is a, c, g, or t
gcacacccgggaatgtacgtcggtctgtcatgcctaccagcatgtaggccaacgcgaaacatgccgaacacctgcaggtgcttcaccacccgggcacagccagtcgggtccgggaaagcggtaggtgatgttccagcacatttgcggcagcccctgtgagaatgcctcggcccaggtcggccaggctgaggtgtcggattaagaggtgcatgcgggacgtcttgggcggcgtccggtgcagagccagcagtacgctgctgttgcccagcacggccaccgcgaaaagtcaccgccagcccggcgatctccagtttggccagctcctcgttgcgcacgtccctcggtgggccgttgccctccccgagggcttcggcctcccggcttgtgttgccagcgccggtggccagaggccaccatgggctggagttgcccgagggccccgcgtcgggaccggcggagagacgcatgctgtccatgcagctcctactcggccctcttcggagctccagccctcgcgggccgctccctccccgtctcggaggacttgggctcctcgtccgaagcgcagggtctttggcgcgctcgcagcttgccgggctctgcgatccctccagtgggcgtctcccggagcagcgtcccgcctgcccactgagcagctctcagcagggtgagctggcccctctccctgctctgccttttttcaacttcggcgaggtcgggaaggtgagctccgagcttccggaagcactgggttcccaactcaagtatttatgcggtgcttgtttccttgggacgcgctccctcccgccctattgccggaagactgctggttgcctactccccgctccctggagttttattttttcctctccctacgtcggtgtttgtcctctgcatcactgtggagggggtggagctgggagactcgcagattcctcctcacagtaggtgggatcgtggcgnttcccgcttttcccttccaaaaacttggacaactggacgagtcatgccttttctgggctcgtagccgtttccacaagcttccctcactagccttcctcgctagcctccttaaccatgcatttgacttcaacaggcacgctaagcgcggtacctggaaacctccagtccacgcaccggcgtccacgcatctagctcctgcacctgaacctggctctcgacctcacctcctccagtccgggtttcttccttctcaccgagctcacccgtgcagcagtctggcaaattttattccccaggcaaattttcccggggcaaacatttctccccgctcgtgacttaaagagctatctcttcctagtaacgtctttgatgcatgctatttattaccctatgtttgcgacgggaagaacgcactcatcactttgcagccccagtggctgctgtgcctgtattcacagcggggtttggggggagtgtctcctggttttctctatggagactagggacttaaggagttttctctagattcctggggttttctgcgggaaaagcctgattcccacagcggggatggcggaaatttggccgcagtggtccgtggggaccgtctggttactactgagtcgtggggacatctttttgggtggacaaagagcagctgccggacagcggccatccaggcagtgctgtccagggcaagggacagaaaacccgcccggctcctgtgctcaggagtaagaaaggcaatctcaaagagaggaaagaggccctgggaaggaggggaaacaaccacctacctagtaatccgttactctgaacagctggagcccctctgca

SEQ ID NO: 440592 - DNA, 1806 bp, Homo Sapiens
  misc_feature (6)..(6): n is a, c, g, or t
  misc_feature (11)..(12): n is a, c, g, or t
  misc_feature (33)..(33): n is a, c, g, or t
  misc_feature (848)..(848): n is a, c, g, or t
tatttnttttnntcatccaaatctcaagctaanggttgatggggagaaatgaggcacaatgcaaataacacagaactctttaagatcacaactccatggacttgtacaaagaataaacaaatgtcttacttagaaattaaatccactcgatggcttattaaatcacccaagaactcacattgccacccggctctatgcctctttcatcataggatagtgtagatgctataaaataatcagcatccttctccagaaaaattcactttacatttgccgttaccctccttgttttccctgcatggacctcagctcacagcttattagagaaccaaaaggccaagcgggaaaagaaatgaatcttcatgagcctattccttcatgtgccaagagcttgctcccctgcttcttagtgagattgccatgaggtaaccacaaaaatccaagagagctattatcaaacttcagggttgtaaaaccacggatttatttatttgttcctgaaagggtctaagccgcctaaatagctgtttaattgcgtatttctcattagagctcctttttccttttagaatacagtggagccactgttgttctttatgaaagtaagcattagggataagggggtttatgacctgaaaccttttttccatgctgaacacacatgttgtcttgactacaccaatgagggaaaactctctattctgtcaaataggtttatgaaagggcatgagcctggtgctcccacggagcgagggaagcctcacacacaaacaggcatgggacaataggtgtataaactgaactatgcaacagcacttaagctctggctatttttctcctgcatgagnctctgtagaaatccagatggcagccctaaaggctgtgccttaagcagaagaagcatacatctgaccctcaaagggacaaaatgagatggctgctctgaccagctctgtaccagctgtgaggaggccttttaactctgtgggtctcagtgtcactacctataatgtgaagtggtaggaatagctgatgtctgaggtctgcttcagctctttaagtctaaattctgaaaaacaaacaaaactcaacattttcttcaaggttggcaggaaaacgcctcttccgtgaaagcttcagcaagaccaagatagagtatcttgtgagctaggacactgttagattattttagccaaaaaacagtccatggaaacctcaattaactataattttgttgcaccctatttttaaaagtgggaagaaatatgtttagagatgagcacatgttcagacctttactgtatttaatccacatacatatcctagccctaaacaatgacaaactgtcattgaacacaacagccctagaacactgagaatacctgaattatcaagggaaggtttcagctttcatagagttcacgctactctaccctatattcagattaagaagttccacgatcatgctaacttgaaggtccacgatcaggcaacaggactgggggttggacctaaattagtcaaaggtggactaaatactattttagaaagcgccctcttgtggcaaaaagtgaaatgccaaatggcgggtttgtcctgagactgagtactgccatttatgggaaatttatttcatctcaaggaccggccctggatgttttacatggtagtaaaataaagggctttagcaaggttgttttcaatggatatggaagaactgggagctcttttttgtacaaacctcagctccacctgaagattactttaccaagggggttcattccccctggttattctcaaaccagg

SEQ ID NO: 440593 - DNA, 1742 bp, Homo Sapiens
  misc_feature (12)..(12): n is a, c, g, or t
  misc_feature (20)..(20): n is a, c, g, or t
  misc_feature (33)..(34): n is a, c, g, or t
  misc_feature (38)..(38): n is a, c, g, or t
  misc_feature (44)..(44): n is a, c, g, or t
  misc_feature (49)..(50): n is a, c, g, or t
  misc_feature (53)..(53): n is a, c, g, or t
  misc_feature (77)..(77): n is a, c, g, or t
  misc_feature (79)..(79): n is a, c, g, or t
  misc_feature (81)..(81): n is a, c, g, or t
  misc_feature (84)..(84): n is a, c, g, or t
  misc_feature (94)..(94): n is a, c, g, or t
  misc_feature (107)..(107): n is a, c, g, or t
  misc_feature (111)..(111): n is a, c, g, or t
  misc_feature (113)..(113): n is a, c, g, or t
  misc_feature (122)..(122): n is a, c, g, or t
  misc_feature (124)..(124): n is a, c, g, or t
  misc_feature (129)..(129): n is a, c, g, or t
  misc_feature (136)..(136): n is a, c, g, or t
  misc_feature (143)..(143): n is a, c, g, or t
  misc_feature (174)..(174): n is a, c, g, or t
  misc_feature (176)..(176): n is a, c, g, or t
  misc_feature (178)..(178): n is a, c, g, or t
  misc_feature (183)..(183): n is a, c, g, or t
  misc_feature (187)..(187): n is a, c, g, or t
  misc_feature (191)..(191): n is a, c, g, or t
  misc_feature (195)..(196): n is a, c, g, or t
  misc_feature (198)..(198): n is a, c, g, or t
  misc_feature (200)..(201): n is a, c, g, or t
  misc_feature (206)..(206): n is a, c, g, or t
  misc_feature (208)..(209): n is a, c, g, or t
  misc_feature (223)..(233): n is a, c, g, or t
  misc_feature (235)..(236): n is a, c, g, or t
  misc_feature (240)..(240): n is a, c, g, or t
  misc_feature (248)..(251): n is a, c, g, or t
  misc_feature (254)..(254): n is a, c, g, or t
  misc_feature (257)..(257): n is a, c, g, or t
  misc_feature (267)..(267): n is a, c, g, or t
  misc_feature (269)..(269): n is a, c, g, or t
  misc_feature (275)..(275): n is a, c, g, or t
  misc_feature (279)..(279): n is a, c, g, or t
  misc_feature (290)..(290): n is a, c, g, or t
  misc_feature (293)..(294): n is a, c, g, or t
  misc_feature (300)..(302): n is a, c, g, or t
  misc_feature (315)..(315): n is a, c, g, or t
  misc_feature (320)..(320): n is a, c, g, or t
  misc_feature (322)..(322): n is a, c, g, or t
  misc_feature (326)..(326): n is a, c, g, or t
  misc_feature (332)..(332): n is a, c, g, or t
  misc_feature (335)..(337): n is a, c, g, or t
  misc_feature (339)..(419): n is a, c, g, or t
  misc_feature (421)..(421): n is a, c, g, or t
  misc_feature (424)..(424): n is a, c, g, or t
  misc_feature (431)..(431): n is a, c, g, or t
  misc_feature (440)..(440): n is a, c, g, or t
  misc_feature (1059)..(1111): n is a, c, g, or t
  misc_feature (1186)..(1299): n is a, c, g, or t
  misc_feature (1396)..(1469): n is a, c, g, or t
aaaatccgatcntgggcttngtaataatttttnntganccgganccatnngantaccgtgcagtgaggacttttgtntntnttnaaattaaatnaaattccttaagnaaanangtaattttntnttatnggtgtcncggtgtntggataaaattaattcatttaagggaatgtngngnttttngggntggnttgnntncnnaaaangnnggttggtgttgttnnnnnnnnnnngnntttnggggtttnnnnttnggngtgggaggtnanattgtntgtntttttttgggnttnngtttgnnntttggtttttgtnttgtngngagngtgtgnggnnngnnnnnnnnnnnnnnnnnnnnnnnnnnnnnnnnnnnnnnnnnnnnnnnnnnnnnnnnnnnnnnnnnnnnnnnnnnnnnnnnncngancccgtcnggggttgtnggtggagagccccgaggggtcagagggtccttagaggtcccagtgccctggacggtttcgtggagcgctctccagttttgatggttgctctcaggaggcggctggtttgaacaatttcagtttccattgttgtgttttgcaccacggtgtgggactggtggttttttactgtttttcttagttcttttacgctttgaggaattgtttttaaagcgagttatccatcattttagttgttttctctggggtcgttggactgagggtcttaccccgctgttcctggagacagttctgtacttgcatggtttctctcgcctttccctccctttcttactttttagtttcttaatgaatttttttgtattatgtttttcctccttgctaatttggaatatatacacactatttcacttttaaatggctaatcacttttaatgcaatttcaacataagaagacctaatgttaagcaatattttaacccctctccccaaaataaaaagacccagaacactgtaactctaattatccttctcccaacttagagaggattattgtccagtattttcgttttgttagtagactgttctttttttagagatggggtctcattttgtcaannnnnnnnnnnnnnnnnnnnnnnnnnnnnnnnnnnnnnnnnnnnnnnnnnnnnagctcaagcaatctcccacctcaatttcgtgggtagctgggcctcacaggcatataccatcgcatctggctaaannnnnnnnnnnnnnnnnnnnnnnnnnnnnnnnnnnnnnnnnnnnnnnnnnnnnnnnnnnnnnnnnnnnnnnnnnnnnnnnnnnnnnnnnnnnnnnnnnnnnnnnnnnnnnnnnngtgtgagccaccgcaccaagcctgttctttccattattatttttatacaatgtttgcttggattcacacatgcatacatggactacacatgtactannnnnnnnnnnnnnnnnnnnnnnnnnnnnnnnnnnnnnnnnnnnnnnnnnnnnnnnnnnnnnnnnnnnnnnnnnacttgatataaaatggcacagtatttgcacattacctacgcacatcctactgtgtagtttaaatcaagattacttatagtccctaaaacaatgtaaatgctctgtaaatagctgttatactggattgtttaaaatatgtattatttcgtattgctttggctttaaacatattttcagtctgcttggttgaatccatggatctgaagcccagtgtaggagggcccagtgtgctcttctggggtaattctccttcctgctaaagcgcacgcttac

SEQ ID NO: 440594 - DNA, 796 bp, Homo Sapiens
  misc_feature (356)..(431): n is a, c, g, or t
caaatttttatgaagtgcctagaacttatcttgccattgctggatatgatggcaaacaagagagacgcgtctctactttctgggagaatgctaggaaaaatatctttactttttaattcacatgttaatattttcatttattgtcatttatcttgccacctttgtataacacttttatttttattataacccttgttctctgagttgcagtcatgagtagtcaccttccatgcacttgtattagtttgctaggcctggtgaaacaaagtaccaccttctgagtggcttaaaccacagaaatgtatcatctcacagttctggaggtgtattagggttcctcagagacacagaatcannnnnnnnnnnnnnnnnnnnnnnnnnnnnnnnnnnnnnnnnnnnnnnnnnnnnnnnnnnnnnnnnnnnnnnnnnnnttattatgggaattggcttacataattatggaggccaagaagtcccacgatctgccgcctgcaagctggagaccctgaaaagctggtggtggaattcagtcagaggccaaagggcggagaacctaggggtggagtttggaggggcaacctccctttcatgttagttctctcaatcttgacgcccgagaaccagtgagcttttttttcatttgttgtcataacacgcttgtcccaccgggatataccaccatcctttgctcccttccttcccgctttttcacgctcttttcccatatgtttgttccccttcctttgtgggcggttcttttttctcccttatggatcccacgtgccgcaccctctcc

SEQ ID NO: 440595 - DNA, 1178 bp, Homo Sapiens
  misc_feature (131)..(252): n is a, c, g, or t
atcccaatagtgtctatatacatgtgacggtttttatggcagattagatattgttgacataactatttgtgaatttaataggcatagccataactgcttatccgatatgaagcacagaaaaggaaaaagcnnnnnnnnnnnnnnnnnnnnnnnnnnnnnnnnnnnnnnnnnnnnnnnnnnnnnnnnnnnnnnnnnnnnnnnnnnnnnnnnnnnnnnnnnnnnnnnnnnnnnnnnnnnnnnnnnnnnnnnnnntgctatacagcagtgaggtatgggtcttttcactttgggctagcccaaagtgaaaagaatgggcttataaactagggctgctggcactgttcaaagcgcaggagtatagttcacatgagcaataatgtgttcctatgtaaatgggtttcaggcaatttcagtgttaagataacatcattaagagtagaacagattgtgctcaaaccctgctgtttatatttaacacgttgcttccatatactccaggttccctggattactagtcttctgctcacatccacccagaccaatcagaatattttcatcagattccatgctgggtcagcacctgtttggacaaatccactagagccaaagaactcctctccttggccagctaagtagctggatgaacacagcttggcttagtcattgtcacagtgtccatatggctttgaagcttgttttcacaagaaatcatacaagtattttattatgtcaaaggttcaccgtccttgcaatagctctgatgaagtctagagacactgtgcatttgtattttggtccatcaagctgatcgtcatggccaaccggggttaacagctgaagggttactagagaggtaatctgggaaaaaatatttgctgttggagcaactctgctgtccacgatactatataatattgctaataatctgtctagtggaaatggttttggcccaaggagatgattgcttgtcttttcgtgtttttttagaaagttggttttcttgatttttccatgatgcttaagaaaaaacctcttgtcagttcttgctggattgtatgaagcaaggtatgcagcaattagaatgaacttagagtaatatggaagttccacatgagtatgcgctgagaggcctttcagttgccccggatctgtgtcatctttctgtagcttttcccacc

SEQ ID NO: 440596 - DNA, 423 bp, Homo Sapiens
cttctcagtttgttagtgagcattggggttgattctgtggcaagttttctgacaaggatctctgtcagctggcttccttgtaccatttgctcacagaatctctgtctctggtagtaggcaatgccagtgttcctgagaaggccctcaaaagacttgactgtgttcttcacatgctgggtgaaaaggtagcagacacctctcccttcctgtgtcttctgtcgtaagtgggtcagttcttcagcctgagcctgaattaagggatcatgtatccctttacacgcaaggtcacttgcgtcacgcgcatcccggagccatcctagccctaacacacagctgcgactctccggtccgaccagcggtcccagacttgctcccacggcacgggaagctctttcgtggcaaagcagcagcccctgcgctgcc

SEQ ID NO: 440597 - DNA, 499 bp, Homo Sapiens
tttttcccacagcagacgtcaaccatcgctttattaaggctgcgagtcggggggctgagtcatgcactccacagacacccccactgctcccaaggtccacttttggatgaccctgaaggcagagactcctgagatctgggccacaatctagggtgagccacccacagtgccctgctggacaggggggtatgcggactgcacgggggggccctcagcaggggtcttcctgcctagggtggggctggctccagtgggtcctgggctcaggcagggggggtggcagggaggcagggacatccccccgccctctggcctatggctttgttgccctattgccaccagcgcagaagcaatgtgctataccgcgaggcgatgaagaagagccccaggaaggcacgcatccagtccccgtttctcccggcctcgtacattaccttttgtttcactgcgccccctgctccttgttccccttctatccctaccctcgcaacgccggtct

SEQ ID NO: 440598 - DNA, 1305 bp, Homo Sapiens
  misc_feature (4)..(4): n is a, c, g, or t
  misc_feature (39)..(39): n is a, c, g, or t
  misc_feature (47)..(47): n is a, c, g, or t
  misc_feature (61)..(61): n is a, c, g, or t
  misc_feature (91)..(91): n is a, c, g, or t
  misc_feature (112)..(112): n is a, c, g, or t
  misc_feature (152)..(152): n is a, c, g, or t
  misc_feature (154)..(154): n is a, c, g, or t
  misc_feature (168)..(168): n is a, c, g, or t
  misc_feature (171)..(171): n is a, c, g, or t
  misc_feature (174)..(174): n is a, c, g, or t
  misc_feature (176)..(176): n is a, c, g, or t
  misc_feature (183)..(183): n is a, c, g, or t
  misc_feature (196)..(196): n is a, c, g, or t
  misc_feature (201)..(201): n is a, c, g, or t
  misc_feature (210)..(210): n is a, c, g, or t
  misc_feature (213)..(213): n is a, c, g, or t
  misc_feature (215)..(215): n is a, c, g, or t
  misc_feature (227)..(227): n is a, c, g, or t
  misc_feature (230)..(230): n is a, c, g, or t
  misc_feature (233)..(233): n is a, c, g, or t
aggngggggggaagaatatgggggtgagttaaaagtatnaaattgtnattggttttaatgngtattggaatataattaaaatgttggaggngaaatggaaaaaagggttgantgattaatgaagatgtagattatggaagtggaagtaaggntntttggaggtggaanatnttncntgatatngtgatgaacttcnttttnatatttttnttntntgagatttttanganagnaaaagatgataagaccaatgagcgctagagcaagcaaagttcctataatggctcctgcaattagtccagctttatttgaaggagggacaacgtttagacgcaacaggcactgatcagagcccactctgtttctgactgtacagctgtatgtcccagagtactcagaagaggcattttttacagatataacagatgaagtcatttctgctaaccatgaagtgggcattttctgtgagtcagacaatttttgccactcatactgtaatggaagtgaaccttcttttggttcacattttatcttaaagtcacttccaatttcttcagatccatcaacgtaacatctcgcacctgaaggcttaacaagaactaccagatgaatcttcttatttgcaacaccaggagcttttttcactttgcactgatatgtgccaatatctgacagttgtaaattcgttacatttattgatgcatcaccagatttgagatcattactcgtaaaatgtactcggcctttcagatctggatagtagtcatcataaattttgtctccagaatataaaataatcacttgatccaccttctgattatcagctggtgatatcagccactcgatgtccagcggtccctggtcttcgggactaagcgtaaatttgcatggcagataggcagtttcccctttggctttttcaatcatctcttcaggagtagtgatactcaaacttctggcgaaatccactactccgcacaggagcacgaagcacagcaggagcgccatggtggctgccgtgccgtgggcggcggctgcaggtaggcggctctcgctcctggtcccaggctccccgcgcctcgcgcgctcccgactggctcgcggcggcggcggcacctctgcaccctccgcccctcctcccagcccccgctcggcaggtgaactcgcgtcacttccggcagcggcccgggccgggctgcgagcgccggcttctccagccgcgtggggttgccttggcaaccgggcgaggcgctcttctgtccccgggaccctcccggcgccgaactctcagctcccggcgcgcgg

SEQ ID NO: 440599 - DNA, 2487 bp, Homo Sapiens
  misc_feature (480)..(514): n is a, c, g, or t
tcagggttcaacatctaaaggggaattagatttctgaggcacaacccgttctgggaacagtggcccagttcctgaccctgcaggcatgtttctttcagtctgcagtttattctcacagtatggatgcaatgagaaaacctttctgcacaaggcctatggagaaaacatgaagactggcaccaaagaatcagctgccatgggaagaatgaaaatgctcgctttctagggccagcattgtgctgcaggagtgaagccaacatccacctcaagctttagtgggtaacttggactctgtccaggacagtgtgactgaccagtgctttccagaaattgtcaaggatcaaatctcaggcttcttcctttcagtgcttgttaaaggttctagagtaaatgtgaattactctcttcatcttaatgatccattccaggtatccatccactggagaatcgtgctctatgataacatacgggtatacatgnnnnnnnnnnnnnnnnnnnnnnnnnnnnnnnnnnnactaggctgaaacacatgaatcttttagttccccaaatgctgtcacaaagtctatgattgaaaatctctagtttggcccttcctttaggagtattacaaatctcctcagtgcttcagcaaagaagttgttgaatagtcttgttctctacttaggaaaggcagtttcaaggtttaataaccctctacattgtcttagaagtagccacagcaagtacgatggtccagatgaccagtcatcagagggacaagcgggccacaacttttcaaaggtagaaaagggagatttgggcaatgtatatttttagtgcttgagtcttttatcattctatcgccagaattagctttttcttggctagagtccagaaatatcaacctaccatctgggcagagaggaattcttattattaccacagattggaagaatgtatctcaggaatttattgtttccgtatcacaagatagaacttccttgcctggaagccatctctgaatacaaagcgtccattcagttagtcagtgtgagattcccccaccagagggataaatgctgtctagattccatgggaaggagtgggctgctgctttcctgattgcagttttggttgagaaggttgttcttccctgctgagatggctggctgacttcaccagtcaaggtaagtgctttgtgtactgctggggtggcatgtgtctccttgcatcatccgaatccatgaaatgtcaatgtcatcaacagtctgaaataggtcctgactgaaagagtaagacaaaggcttgcaacttcaatttgccaggcatcgctgcaattgtaatactgagccacttattaaaaactaagtggtttctgtcctgtagtaaagggcagaatgtgatcatcaatgtcccattggaagagttgatcaatttcctggaacagtgagaaacatgaccttgatcagctccatcacatggcgtggggttaggacactcggatgatctgtgtcattgcttcttcatcggcttggtttggatcctgcatatggggactatcctgtgtgtccttttggagagaaaaatcgtccaccttcaccacgcttccgtgccatggcatgacggtgccgagactcatgcaggtatttccttctctcctttggaattttcccttctgcctctattttagctcgggcttgcctgctcttgagaatacggtggtattgtttggcattcacgttgagaggctcttcttcaagcatctctgctccaggtagagggattctttggatagcaggcacagagccagccccaggaaccatcatgaccatccctcctgaagttgaccacattgcctgccactggtagtgtcacagtgacagtcccttgcccactgctggttgtgttggtattggctcctgtttgaacaatctgtgctcctgccaaactggctgctgggatagtgatcatgcctgaaacagggagtgtaacttgctggagaatggtgccatctgcattaactggttgatagacgatggtctgcccttcagcagtctgtgccacttgctgtcctggacagcaatctgctgctgtgtctgagtctggccagcagtgacagccgtctggggctgctggatgatgatctgctgggtctggccctgctgggccctgcacctgcacagcctgtccacctggatctggatctgtccaggtgggaccaactgtatttgctgcaaaccctgtgttccagaaacaggtacttgcatgatggtttgaccttgtccaccagggacagcctggaccatgatgggttggccagttgatgtgattagctggcctccactgacctgcaccattaatggctgcccttggacctgctgctgaatctgtcctgcctggacaacatctgctctgtcgaactattgctgtttgctgtatactgctccatggtccctccaagtgagattcctgtccactctggagatcctagaaggctgtgatgta

SEQ ID NO: 440600 - DNA, 1857 bp, Homo Sapiens
  misc_feature (1433)..(1433): n is a, c, g, or t
gccgggcttaaatagggtccctaattgttcttcccttttcagtgggcatttttttatttctcccatttggggaccccccatggaaacctattacttcggaactggatttctgataatccagtatttacattagaaatgtttttcaatttttataccactgaaagcttcattatttattgtttgtgatttcctgtcataaaaataatcaggaatagatgtttggctttctctttttccacgtttttgattattataatctacagatccttgaggaagtggattttcttttgcctctgcaaaggagggaccttttcctgatctgctttgcatagagttatctctttttttaaaagcaccatcactatgctgagaacctaaaggatatgaagtatctttagttctgtcatatctaggaatacgggtctatccacatttggattctgtcttcagcccatactttcagatactgaaggagtacttggtctttcagaacctctatttctaggtaatccactgccttctaaaactgactttgaattttgggagtctctttgaaaacgaggcggtttttcatttcttggctgcctggtatcatttcgaggaggatgtctcagatgattatcttttactccattttgctcagtatttgatgatctgtattgtccctgatgaagctgctgtggctgtgatttaggttcttccacattcaaagttcccattttagattccaagaaatcaaataatgtgcttggtgctgatggccttgcatttcccaggtcctcttcatcttcagatcttattcgccccctgccttttcctctacctctcagaggaggaccccataacaggtttctgtttattgcttgtaagaagtacgttcagtgctgccttcctaagttgttgcccattatccataagagcttgcctcgatgcttccttactgaagcccatttccgttatgtgcttcagagctttctcatcaaccagttctctatagacaccttcatgttttccctctgatttggttgacttttctttctgtaaaacttccctatttcggttaccagcagcattcatattgagattacttctagcaccaccaccacctcctccaaatgtcttggtttccttgctctttgcaacttcagcaatagcagccgtcctttgcttttcaaattcatcattatcatttgtaggtttgacaggcattgtaacttgcaatgtttttcttcgatcaagttctctgctatccacttggacatgagatacacacttctgtccaaaaggcacaaaaggcggtggtccaccttcagttccaatattgcttctattgtgttttgataagcttctctgtaactcccatttctcaataaggtttccacttcaccaccaagaactgtggtgttagagtcattcaagagcaggaatccatnttttatgtcaacaatgcctgagagcttaactttagttccaggtggtgtgttcaggcttatttttgacatataactaaattctactgctgtgcaacttatatgaccatcagtcatctgtaatcgcagcatccttggtgccagcctgagattcttcattatcctttggtgccagcaacattgcgaattttttgaatttgcaaaacacatggaccttcgagctttttctacctttccactattgatgtcactggggaggaatttcttgccaattgttctcagatattgagagcaatcaggatgatgtcatttacattgactttgtctggagagcttgtgcaagcttcaatgccttcatctgaaagataccaacccgcctgggacaacgccgcgaccggccacctgggccatggtagctgcttaggcc

SEQ ID NO: 440601 - DNA, 467 bp, Homo Sapiens
ctttttggtaataaaaaatttcttggtttaggcgaaatactctgtgcaaccgcagtaccgagggggagccctgcccccccatccaccctccccttcctttgcctccagtaggggagaggagaagggggaatctctgggcaggggtgaatgtgggcggatggggaggcaacagggacacgctggggggctgtgctgggccgcggcacctcacagttactctccgtggggggcagcccagaggcctttttggggtgcacggaggccgacatggatttctgatgctggcggggccgggccgcagagactgcggcagaagcagaagccgtggaggcccgggaccctggcatggttaggctgtctttgccattctggatggaggcctggccgaggctggcccgctccaaaagtggggaattcctgcttcgatttgtgctggtggagaggacgctgttcgtggagggggttgg

SEQ ID NO: 440602 - DNA, 2116 bp, Homo Sapiens
  misc_feature (526)..(526): n is a, c, g, or t
  misc_feature (2094)..(2094): n is a, c, g, or t
  misc_feature (2099)..(2099): n is a, c, g, or t
tttttctctttggatgggtgatggtggcgtcgacagtggggtggaatctccctcccagtgggccctgacggagcggcctgtacggggagcttgcacccatcttgcctgagacgtgttccagccctggagccagccctcccgggtaaccccacagatgccagtctcgactgtccccatggggcagggaggaaaggctggccgctgggatttattttttcatgtttctttttggtaataaatttcttggtttagcgaaatactctggcaaccgcagtaccgagggggagccctgcccccccatccaccctccccttcctttgcctccagtaggggagaggagaagggggaatctctgggacaggggtgaatgtggggggctggagaacaatctcccaccccccacaaacatgtaagagaaaactgagaagggccagggaggggagaagtgccagcaggggagacacaccaatccatcgctgcagtctcgcccaggtggggcggcgcagcggccggcagcccgtccagntggcccgcccccgccgcccccgctcctggcagcctgttaaagcttcagctcgttggctattttggaggcaatgtttttgaaggccatggaggtgcccgatatccgcttaaatcgaaccccgttgagagagagccgcggcagtttgcacacctccatctcccactgcacgaagtcctcgtggcccgggcgtgcggtgcatgcacaagcagcatgtactttctcatgcagctcgtttttggcagcctgttcgcgtcccagcccctttgcggatctccccgcatcatctcgttgggctccatggagctcgtggtcttcatactccacgtgaagcggagggagcggggcttggcctcccgaaattcttccttttctttgtcgttgccgccactgcccaccacgtgaggtctgcgtacaaacttggaggtgaacttgctgaagatgctcccagaggccccccgccggccctggctgtggccagagggagaggctggggtcacaccgtagggcaaattctgctggtcccgcacctgtcggagctgcccagcatggaaggtgcttcggctggacacaccccgggggaagttagttcggtctggggctccaccactgctgctgatgttgtgggcggatggggaggcaacagggacacgctggggggctgtgctgggccgcggcacctcaccagttactctccgtggggggcagcccagaggccttgttggggtgcacggaggccgacatggatttctggtgctggcggggccgggccgcagagactgcggcagaagcagaagccgtggaggcccgggaccctggcatggttaggctgtctttgccattctggatggaggccctggccgaggctggcccgctccaaaagtggggaattcctgcttcgatttgtgctggtggagaggacgctgttcgtggagggggttggggtggtcttcttcctctccagaccgggcagggggctggcaggcaccttggctgtgctgctgctttccgccctgactcccggtcctcctcaggccgcttattttctgcgttgttactctgagtcttcttagagtaagaattagaggtgggaatggcaggaccagcctggtcgctgaagcgccgctgcttgggattggccgacacgctgcgctgtaccttgtgggatggggatggggcgctgctattggtcagatcagctgaaggccggggtttcagggtgatggtgtcgccttccagctcggagctcttgtagcccaggagcagataggtggccatcacctcgttgtatctctggcccaccagcgagtcctggatctcttcccgtgtataacccatggacaccatcagctctgtccgccgggggtccttgtagtcagggagtggctccacgtaaggctttagttcatcatcttcgtgacccacattcatccatcgatctttcatgatttgctctaaagtgcctctcttgctgggattaagaatgagaaatttcttaagcaggttttcacagtccgtggacatgtagaatggaatacggtattttcccctcagtacccgttcccgcagtnccttnaggttctgtccatcaaa

SEQ ID NO: 440603 - DNA, 1226 bp, Homo Sapiens
cctgggtggcgaatccaagacgaggagggtcccgggccttacggcttctgcttctgccgcagtctctgcggcccggccccgccagcaccagaaatccatgtcggcctccgtgcaccccaacaaggcctctgggctgccccccacggagagtaactgtgaggtgccgcggcccagcacagccccccagcgtgtccctgttgcctccccatccgcccacaacatcagcagcagtggtggagccccagaccgaactaacttcccccggggtgtgtccagccgaagcaccttccatgctgggcagctccgacaggtgcgggaccagcagaatttgccctacggtgtgaccccagcctctccctctggccacagccagggccggcggggggcctctgggagcatcttcagcaagttcacctccaagtttgtacgcaggaacctgaatgaacctgaaagcaaagaccgagtggagacgctcagacctcacgtggtgggcagtggcggcaacgacaaagaaaaggaagaatttcgggtaggccaagccccgctccctccgcttcacgtggagtatgaagaccacgagctccatggagcccaacgagatgatgcgggagatccgcaaggtgctggacgcgaacagctgccagagcgagctgcatgagaagtacatgctgctgtgcatgtactggcactgccgggccacgaggacttcgtgcagtgggagatggaggtgtgcaaactgccgcggctctctctcaacggggttcgatttaagcggatatcgggcacctccatggccttcaaaaacattgcctccaaaatagccaacgagctgaagctttaacaggctgccaggagcgggggcggcgggggcgggccagctggacgggctgccggccgctgcgccgccccacctgggcgagactgcagcgatggattggtgtgtctcccctgctggcacttctccccgtccctggcccttctcagtttgctcccacattcgaccctggccagagattcccccttctcctctcccctactggaggcaaaggaaggggagggtggatgcggtgcgggcaggctcccgcgtcgggtactgcaggttgccacagagtaatttcgccgtaaaccaaagaagtcattatgagcaaccaagaacaatagaacaaaagattccagcggccaccttcgctcctgaccccaatgggacatccagacggatctgaggc

SEQ ID NO: 440604 - DNA, 1290 bp, Homo Sapiens
  misc_feature (133)..(133): n is a, c, g, or t
  misc_feature (155)..(166): n is a, c, g, or t
  misc_feature (192)..(192): n is a, c, g, or t
  misc_feature (577)..(577): n is a, c, g, or t
  misc_feature (579)..(579): n is a, c, g, or t
  misc_feature (582)..(583): n is a, c, g, or t
  misc_feature (599)..(599): n is a, c, g, or t
  misc_feature (604)..(604): n is a, c, g, or t
  misc_feature (607)..(608): n is a, c, g, or t
  misc_feature (616)..(616): n is a, c, g, or t
  misc_feature (619)..(619): n is a, c, g, or t
  misc_feature (624)..(624): n is a, c, g, or t
  misc_feature (635)..(635): n is a, c, g, or t
  misc_feature (648)..(649): n is a, c, g, or t
  misc_feature (658)..(658): n is a, c, g, or t
  misc_feature (661)..(662): n is a, c, g, or t
  misc_feature (667)..(667): n is a, c, g, or t
  misc_feature (670)..(670): n is a, c, g, or t
  misc_feature (676)..(676): n is a, c, g, or t
  misc_feature (683)..(683): n is a, c, g, or t
  misc_feature (689)..(689): n is a, c, g, or t
  misc_feature (699)..(699): n is a, c, g, or t
  misc_feature (705)..(705): n is a, c, g, or t
  misc_feature (707)..(707): n is a, c, g, or t
  misc_feature (717)..(717): n is a, c, g, or t
  misc_feature (728)..(728): n is a, c, g, or t
  misc_feature (731)..(731): n is a, c, g, or t
  misc_feature (733)..(733): n is a, c, g, or t
  misc_feature (737)..(737): n is a, c, g, or t
  misc_feature (739)..(739): n is a, c, g, or t
  misc_feature (750)..(750): n is a, c, g, or t
  misc_feature (752)..(752): n is a, c, g, or t
  misc_feature (757)..(758): n is a, c, g, or t
  misc_feature (770)..(770): n is a, c, g, or t
  misc_feature (774)..(775): n is a, c, g, or t
  misc_feature (782)..(782): n is a, c, g, or t
  misc_feature (792)..(792): n is a, c, g, or t
  misc_feature (794)..(794): n is a, c, g, or t
  misc_feature (796)..(796): n is a, c, g, or t
  misc_feature (799)..(800): n is a, c, g, or t
  misc_feature (804)..(804): n is a, c, g, or t
  misc_feature (809)..(810): n is a, c, g, or t
  misc_feature (817)..(817): n is a, c, g, or t
  misc_feature (821)..(823): n is a, c, g, or t
  misc_feature (825)..(825): n is a, c, g, or t
  misc_feature (828)..(832): n is a, c, g, or t
  misc_feature (838)..(838): n is a, c, g, or t
  misc_feature (843)..(843): n is a, c, g, or t
  misc_feature (847)..(847): n is a, c, g, or t
  misc_feature (851)..(851): n is a, c, g, or t
  misc_feature (867)..(867): n is a, c, g, or t
  misc_feature (872)..(872): n is a, c, g, or t
  misc_feature (883)..(883): n is a, c, g, or t
  misc_feature (890)..(890): n is a, c, g, or t
  misc_feature (892)..(893): n is a, c, g, or t
  misc_feature (896)..(896): n is a, c, g, or t
  misc_feature (901)..(901): n is a, c, g, or t
  misc_feature (903)..(903): n is a, c, g, or t
  misc_feature (907)..(907): n is a, c, g, or t
  misc_feature (910)..(910): n is a, c, g, or t
  misc_feature (912)..(912): n is a, c, g, or t
  misc_feature (916)..(917): n is a, c, g, or t
  misc_feature (920)..(923): n is a, c, g, or t
  misc_feature (925)..(925): n is a, c, g, or t
  misc_feature (928)..(929): n is a, c, g, or t
  misc_feature (932)..(932): n is a, c, g, or t
  misc_feature (940)..(940): n is a, c, g, or t
  misc_feature (954)..(955): n is a, c, g, or t
  misc_feature (967)..(967): n is a, c, g, or t
  misc_feature (980)..(981): n is a, c, g, or t
  misc_feature (997)..(998): n is a, c, g, or t
  misc_feature (1000)..(1002): n is a, c, g, or t
  misc_feature (1004)..(1004): n is a, c, g, or t
  misc_feature (1006)..(1006): n is a, c, g, or t
  misc_feature (1008)..(1008): n is a, c, g, or t
  misc_feature (1015)..(1015): n is a, c, g, or t
  misc_feature (1018)..(1018): n is a, c, g, or t
  misc_feature (1031)..(1031): n is a, c, g, or t
  misc_feature (1034)..(1034): n is a, c, g, or t
  misc_feature (1038)..(1038): n is a, c, g, or t
  misc_feature (1049)..(1050): n is a, c, g, or t
  misc_feature (1053)..(1053): n is a, c, g, or t
  misc_feature (1056)..(1056): n is a, c, g, or t
  misc_feature (1061)..(1061): n is a, c, g, or t
  misc_feature (1079)..(1079): n is a, c, g, or t
  misc_feature (1104)..(1105): n is a, c, g, or t
  misc_feature (1118)..(1118): n is a, c, g, or t
  misc_feature (1120)..(1120): n is a, c, g, or t
  misc_feature (1124)..(1125): n is a, c, g, or t
  misc_feature (1128)..(1129): n is a, c, g, or t
  misc_feature (1135)..(1135): n is a, c, g, or t
  misc_feature (1138)..(1140): n is a, c, g, or t
  misc_feature (1145)..(1145): n is a, c, g, or t
  misc_feature (1148)..(1148): n is a, c, g, or t
  misc_feature (1156)..(1156): n is a, c, g, or t
  misc_feature (1160)..(1160): n is a, c, g, or t
  misc_feature (1167)..(1167): n is a, c, g, or t
  misc_feature (1169)..(1169): n is a, c, g, or t
  misc_feature (1175)..(1175): n is a, c, g, or t
  misc_feature (1191)..(1191): n is a, c, g, or t
  misc_feature (1193)..(1193): n is a, c, g, or t
  misc_feature (1195)..(1195): n is a, c, g, or t
  misc_feature (1200)..(1200): n is a, c, g, or t
  misc_feature (1209)..(1210): n is a, c, g, or t
  misc_feature (1216)..(1216): n is a, c, g, or t
  misc_feature (1218)..(1219): n is a, c, g, or t
  misc_feature (1222)..(1222): n is a, c, g, or t
  misc_feature (1225)..(1225): n is a, c, g, or t
  misc_feature (1229)..(1230): n is a, c, g, or t
  misc_feature (1237)..(1237): n is a, c, g, or t
  misc_feature (1239)..(1239): n is a, c, g, or t
  misc_feature (1245)..(1245): n is a, c, g, or t
  misc_feature (1252)..(1252): n is a, c, g, or t
  misc_feature (1255)..(1255): n is a, c, g, or t
  misc_feature (1258)..(1258): n is a, c, g, or t
  misc_feature (1264)..(1265): n is a, c, g, or t
  misc_feature (1269)..(1269): n is a, c, g, or t
  misc_feature (1283)..(1283): n is a, c, g, or t
  misc_feature (1286)..(1286): n is a, c, g, or t
atatttagtaaaactttcctctcttggctcttctgggatcaagatttgtaatatttagccaaaactgtcagcatgtgaggccaagttaccaaagtgctttgacataaaagcaatgttattttaaactattagnttagatagtatcttgtcagttnnnnnnnnnnnngtcccttttgcagttaattgcccttnccaaataactttaatgaaaatatctgtgccaagaaacatctctttgattcattaagctgggtttagattgtgcctgagtcacaaagcacagaggtaattacaggttgaaattgatttgcgcctctttataaataagaactgattatagaataacatgtctcattaaatataaaatattgacactgtatattaattatgttactactcatggttgtggctcccttacaattctcatgcaaaaataaatccaattttaatcggttgtgagaaaacagtccaccatgtgcttgtatccaggaataaagaattacatagattatctggcatattgtcatcacatcctccgtaactattcataaaaacaataattcacattttgggaaancnttnnccaaaatcaatcaggnaaaancannattaaaanccntttcncattgccagantacatcacattannccccccttntcnngcggnccnggtctnggtttgntttgtntatgtgtaangggttnanaggccaaggntttggggaaangcncngacncnggaccccatangnactgnnagtaatgcattnttcnnagcaacngaacaatggngnanccnnaaanaaaanngggaaancacnnntnccnnnnncaaaangccanaaancccncaaataattttcattntcatnttccctaaaanatgcctngnnaangcccnancccnccntncccnncannnntnatnnaantaaaattngatttaataaaaannattattacttantatgtcttagtanntttatgatatagcctnnannntngntnatctttntcnaaaattctccccnaangacnagccctataannatntancctanataatttatatgagaaanagtgcttctcccccttatatagggnngagtttgagatgngnaaannttnnctcccnctnnnaaagnaanatatgtantaantaagtangnaaggtnaaaaaaattttaaaanangnaatgnaaaccaatnnttaaantnntcntanaggnntgtatcnanaattgntacaatntgntcnattttnnttantgaaagtgtattanccnaggg

SEQ ID NO: 440605 - DNA, 1935 bp, Homo Sapiens
cttatctcatacaaacattatgtatctttatttaaatttgcaaatgaaaacaacacatatttcatgttagttttaataagagattccctatcctctgccccagtaaaacctaaccaagccagcctgacaggttatatcaatacagggagctggagtgggagccaagggtggtgttagataggggtggggtacagatcaagggggcctgggagactcagtgactggaagtctctgcccctcactcttggtgagtagctaatttcagcagctggcttcataaggaggagtcaggggtgggtggaggctcctcccaattccagatccacttcctcttctccttctgtctcctggacacttaggtcttactgagatggttttcccacagtaaagagaggtgggggcagagtactaagggtcaggagtgtgactctttcccatgactcaggcctctgtgctagaggtgacccctataggaaggagagaccccaaatcctttagccaatgagtggtggggtcatcataccagagagccagcttgactctgggcaggcaccatcacaggcacagcacccatgcggctcaagccagaggaagaaaccccaccagggatgggggatattggttgagggtgggccccatctgtcgtgggcagtcttggtgagggcagggcctggctggagagactgggcgtgggggtcaatgcaccaggcctgggagggcatggggtggccggagggctcgtgcggaggtgacagaggaaagggtcccattcttggagattgtgtctgagctcttgggccagggcagggtccggggagcaatggcatcctccttgatatcattggctggctcctccagggccttgccccggcggtggtacaagaggaccagcccagccagcaaccccagtccaaccagggtacccacaacagctccagcaaccactgcagctccaggccctgtgctcacttccagcgtcacattacattgggcagtgcccacctcattgtgggccttgcagacatagactccagccatggaagacgaaaggttggtgaggcttaaagaccccacggatgacatctaatgctggtgcaaagaaagtctggaaggatggaagctgccgatcccactggtattggacagcgggcttactccttggagactggcagctcagggtcacgtttgcccccacatggggcacaccctggagacggcaggatggaggagctggaggaaccagtacattgagttctaaggttttgatgctgtggcccctagatttgccttgtttgtcttgcacattcacggagcagctgtaggggccagagtctttctcctggagaccctccagccgcagggacaggttccgggagggcatggagtagaccaaggatactccaggtttgcttgttgtgaccccattgatgtaggacaacacctgatcctccttttctttctgtttgaagaaccacatcacaaagggcacctcccatggctgggatgaagacacctccccgtgcaaggtgtaccacgctggaagcaccacttcccctccctccaccgcctgcaaccggttggcgggcaagtgcagttgcagctgggcccgcgaggggggcgcgagggcactcagccccaggaacaaaaaccgcagcaagttggtcaccaggggccccgggagggaaatcatggccctccctggccgggacggagtcaggggcgccagccgcgggacgcacggacctgcaggtgccgaggctgcgcgacggccggagcgtgcgcgggagccgagccgctgacacccagggcggctcatcccgggaattccggaccggtaccagctgggttggggtatattgaggaggggggaagaagagcggggacacgtaggagtgaagatgtagtggtgtggtgtaccaggggtaggagtgtaga

SEQ ID NO: 440606 - DNA, 1160 bp, Homo Sapiens
  misc_feature (906)..(907): n is a, c, g, or t
  misc_feature (1082)..(1094): n is a, c, g, or t
ggggggttgcaaatcaatccccaggggacagttaagacagaggcaggcatcagagctgaagtatacaaactaacatggaacttttgggaattttactggttacattctcagaatgatggctctaggtacacactggcttttggctcacagtgttagctaatcacaatactgagttatgccctttaaaatcatgactatcctgaaatggaaccctggcattacccttttaagaccaacctgaagggcactgcacactgtgatttcaggtgttctcaaaacagggatttgctgatgtttattcactaaagtctaggactaaaattctgtaagtatgtgactaagttgcaaggagtattccttaaacctaagtgcagccgtactgcagaaatgaagacttctctgctaaatatcaaggctgagtgctctcttggcaaaaacttagcaacaactaatacaaaatctagaagttgtcaagaatacacatacattttctgtttctgttaatcaaatatcatccacaacctgaaaattcctttcattgccacacaaacttaattttgcatagaacttcttgggcataaaattattctgatcccatcctactaaatatcacatgaatatcccttttatttctgtctattaagtattcaagttgcggactctaaattagcaatttgattttaaattctactagctcctggattacttctaatgttaatgaagattagacaataggcttaaaaagtaggacttttctgggtgggttctgaccaattctttcccccttaatattccagaatgattaaatgcattcactgttattaaagcagtggtctattgagtcacatacggtaccttggggccatgtgggaagtcaaacaggtaagtcataattttctggaaaannaaatttaacataaggtccatatactacttttgcaaaaggtatataacctaaagaaattacaagcttttcacaaaacatgtctttttcaacataggactcaccacattcttgtttcctctaaattttatgaaatcatggcagtggaagccagaaattaatgctttaccatataccnnnnnnnnnnnnnggcttctgacattctcagggaggatacatacttcctctggaagatgtttttgaacacacatttgga

SEQ ID NO: 440607 - DNA, 521 bp, Homo Sapiens
ggttgttgatgacatcatacgaatcattgggacactgattttattgtacactgcatcatagacgtcttccttaatttaggaagggaaaagtcaatggttactccatcagtacagtttggcagataaaaatgcagggggcaacaggacatatgtacaacaaaaagtgccttgataacaaaaaggttgagaaccactgaccaaggtacgaaaaaaatgaagctgccttgattctctgggcaggaagaattcctgatgccttgggggctgagcacacaggtttcaagactgaatgaagtccccctttctctcaccctctggggtctgcaacgttagcatgagaggcttttcttctccagccggatggacccccacagggtcccacagaggcaaggaaaggcctgcaggaagactcagcacaggcgaatgggctggtcagcagtggagtggacgggagcccaggggattccttgcatcagcagctgcccggagcggactggaggggacgcggctacacgttctgc

SEQ ID NO: 440608 - DNA, 964 bp, Homo Sapiens
gccagtgaattcattccttcctcagtccacccgcaggcctacaaagctgtctccccttcctcagcgccacaaggaacagcagggacggatgggaagaaggggagggggccgaaagcaagctgggtgcgaggagccagccgaccctgccacactcaagatggcggcgcggccgcggcgaggtccctcagaggcggtaccagcgcatgcgcagcggggagtcccggcccgggacacaagatggcggcagcggcgctggggagggcgaggcggaggcggcaaaacgggcggtcgagcagaacgtgtagccgcgtcccctccagtccgctccgggcagctgctgatgcaaggaatcccctgggctcccgtccactccactgctgaccagcccattcgcctgtgctgagtcttcctgcaggcctttccttgcctctgtgggaccctgtgggggtccatccggctggagaagaaaagcctctcatgctaacgttgcagaccccagagggtcctgtgtgggtgtggagatggccaatgagaatcacggcagcccccgggaggaagcgtccctgctgagtcactccccaggtacctccaatcagagccagccctgttctccaaagccaatccgcctggttcaggacctcccagaggagctggtgcatgcaggctgggagaagtgctggagccggagggagaatcgtccctactacttcaaccgattcaccaaccagtccctgtgggagatgcccgtgctggggcagcacgatgtgatttcggaccctttggggctgaatgcgacccactgccccaagactcaagcttggtggaaactcccacggctgagaacaagcccagaaagcggcagctctcggagagagcaggcaagcggcaatgggtgtgaagaagcccaagattgaaatcccagtgaacaccaaaggccagtcggtgcccagtcccccagtatcca

SEQ ID NO: 440609 - DNA, 1091 bp, Homo Sapiens
  misc_feature (376)..(413): n is a, c, g, or t
tgttgggcaacaggggggttcagatcctttggttttaccccctttgggtttccagcatccagcggtttgaaagactcccgggggagggctcaatgcccttctcgttggtgggcacagtccccgatagttgctgccgaagcttcaggatgagctgagagcggagcagttccacttcgggatgcgggggcagcacttctgaagggcccccggtgcttgatgacagcattggtctggatgtccaggtcccagtagacctcagtgggtcgtaggagagctgcctgctgtttatcttcaggggacgtaccccacatcttcagcgttggggttcctgggatactgggggagctgggcaccgactggcctgtgggtgtcactnnnnnnnnnnnnnnnnnnnnnnnnnnnnnnnnnnnnnntggctgctcttccgagagctgccgctttctgggcttgttctcagccgggggagtttccaccaagcttgagtcttggggcagtggggtcgcattcagccccaaagggtccgaaatcacatcgtgctgccccagcacgggcatctcccacagggactggttggtgaatcggttgaagtagtagggacgattctccctccggctccagcacttctcccagcctgcatgcaccagctcctctgggaggtcctgaaccaggcggattggctttggagaacagggctggctctgattggaggtacctggggagtgactcagcagggacgcttcctcccgggggctgccgtgattctcattggccatctccacacccacacaggaccctctggggtctgcaacgttagcatgagaggcttttcttctccagccggatggacccccacagggtcccacagaggcaaggaaaggcctgcaggaagactcagcacaggcgaatgggctggtcagcagtggagtggacgggagcccaggggattccttgcatcagcagctgcccggagcggactggaggggacgcggctacacgttctgctcgaccgcccgttttgccgcctccgcctcgccctccccagcgccgctgccgccatctgtgtcccatcccgagaattccggaccggtcca

SEQ ID NO: 440610 - DNA, 1375 bp, Homo Sapiens
  misc_feature (10)..(10): n is a, c, g, or t
  misc_feature (18)..(18): n is a, c, g, or t
  misc_feature (25)..(25): n is a, c, g, or t
  misc_feature (32)..(32): n is a, c, g, or t
  misc_feature (39)..(39): n is a, c, g, or t
  misc_feature (47)..(47): n is a, c, g, or t
  misc_feature (50)..(51): n is a, c, g, or t
  misc_feature (58)..(58): n is a, c, g, or t
  misc_feature (66)..(66): n is a, c, g, or t
  misc_feature (72)..(72): n is a, c, g, or t
  misc_feature (90)..(99): n is a, c, g, or t
  misc_feature (108)..(109): n is a, c, g, or t
  misc_feature (114)..(114): n is a, c, g, or t
  misc_feature (123)..(124): n is a, c, g, or t
  misc_feature (126)..(126): n is a, c, g, or t
  misc_feature (136)..(136): n is a, c, g, or t
  misc_feature (138)..(138): n is a, c, g, or t
  misc_feature (145)..(146): n is a, c, g, or t
  misc_feature (150)..(209): n is a, c, g, or t
  misc_feature (228)..(269): n is a, c, g, or t
  misc_feature (650)..(658): n is a, c, g, or t
cccgggttcnggggtttngggaccnaccgtancctcatnggtaaacnctnnctctacntaaaatanaaaaantagacgggacagggacannnnnnnnnntacctgtanncccgnctactgggnngnctgggacggngnatcactnnaacnnnnnnnnnnnnnnnnnnnnnnnnnnnnnnnnnnnnnnnnnnnnnnnnnnnnnnnnnnnnagaatgaaactctgtctcnnnnnnnnnnnnnnnnnnnnnnnnnnnnnnnnnnnnnnnnnncaagcaagcaagctcaggctaattcccagctccctggttgtgagcacccctgggcttctacagtgacctcttttgggcagaggcctaccaggtgagccagaaggtacaatgttaaagaaaattgtttctgaccccctttccagagcagagaggaagggagggggtgagacgcccacaggtgactgatagcacaagtcagccctcgttcctgggctccacagaggcctgccctggtgctgtcccaccttcaggagaggtggctccctggctccccccaggaccatcttccaaccctcctgcccctcagggttgctctaggtggccaggtatcctgctagcaaaccctttcccccaatgatggcccagacggaactcttaatnnnnnnnnntaatttattgtcaacaaaggtgatatatacaacaggaaaacagatgtaaatgagaacgggagtgaatggggtgcccaggcccagcttcaggcctctgcagggttgggacaggaagaggtaatggaggcctcctggtttagaagcctgaacaagtggggaggagaggtgtcccccgaggtagtgggactcagttcaaacccccttatgaccactcttgtgtaaggcactgtgccaagggagaatggtggggagcagggggagggtgggaggaggtcatgggggaccaaacagaggtgggggtcagcgaaggactggggtaggtgttctccacaggcccagtgccctactgcacaacagcctcagccaccctcgccgacctcaggcctggccaggaacagacactttccagtgcgccgaaataacagtggatgctgccccagccccctcctgccctggcacctgtttctactctctccaccaggtgggtgagccaggcagcttctgagttataagccactgggggacgctgcctcattccttcctccctccccaggaaagcaagaatttacactgcattccctttttcggctttccttgcacagggtgcttgattttacagaactggggccaatctgaggtgcacctgctccacacctgggtgccctgggtgctgggacagcatgcaggaagtgactgttgggggtctcattccaacct

SEQ ID NO: 440611 - DNA, 949 bp, Homo Sapiens
atgttaagaattaagtggtttttcagggacacataaaagcttttaaaagtattttatatttattttaattactccgataaatttgtagagagtggcgtatatgcttgtttctttggggagagacagactttgagggagttttgaggaacaggaagtggtgacctcctgaacatgtgtatgtaaatactgaaatttctcttgcctcagctgtgttgttattgggaggttatgttttgttgaacatggagtcctcattaatatgcccctgtgttagaccaagtgcagttccacagaaaccatattatagttcagctcatatttacaaaataatccttctggtctttgcagtggtccttttccaacacacctgggatattctttcattgtacttctctgtatgcctttgtatatctatttgattttttgccttacttgcacggtaatcacagtatatcattacagaaatggtcaatttttcaacttttaactcaaactttaatacattatctattagaatgattatggattttctacaaatttgaaattgtataaaaacatttgtcaaatttatatcaactcaaatgatatatattatttattaatgaatccatgtttttctttcaaagccacttattgaagtcatattagtgattttttaagtcgtggtctttggagtcataggactgtggttcaagtcctgtcccctcctaagaacaatattaattttaatgaagttacgtactaaataaaatggagattataaaagtaaatccttcatttggatttgagaagatcaaataatgcaattttggtgaagtacttatttatacatatatcagtgttatatgtgtataatgtaatattttgtgtatcttattttgaaagccaaacatggaggcactcatataaaatgcagatatatatgtgtataaatatgtgtgtgtgtgtg

SEQ ID NO: 440612 - DNA, 2684 bp, Homo Sapiens
  misc_feature (19)..(19): n is a, c, g, or t
  misc_feature (24)..(24): n is a, c, g, or t
  misc_feature (2422)..(2524): n is a, c, g, or t
  misc_feature (2598)..(2628): n is a, c, g, or t
aaacttttaacaacggcanttacntaacaacacagcactgaacagttcccatcctcagttacagaactcccccaacctcatcttcccctccctggcagttccctgagccctggggtaaggacacaggtgtatagaacaaccccccttaaaatgctaaccctttctagtaggacccaccttgtgggagtggcttgaaagaatccataatttcccaagccaaacaaattcagagctaggtctgttctttttgataaagccaaatgaagcaagagagagggaggtgagcaaagcttaccaatgatcaccatccagtgctggttagaagccactttccaggagaggaaccaatgaacagcgaagagttgcagccacacagctgagatcagaaaagaccacatacacacttggagactgtgtccccatccccactcaattcattcaaaaggaattctacgaagcagcctcttgagcctcattttctttttcttagaaatttgaaaacatctgtgactagaaaagcggtcctaagaattaacaccatcgtttcagcctaccacattgtagtttggcaggccaggctctgcattccaagggggcaggtgctggttgctccagaggccttgaggagaaatctgggggcagcccaggtgtgtgcttcagctccaagtttctcttgctttagcagcaaaatgcggcctctcatctcctaccaaggcaacagtggactcgtacccctccccacctccccaagtagttccaggggatggggtgggatgtgcgaataaaaataaagatgagtcaagaccagcatcttcaaattaacaaactgtaattgttttcccaaagatacatttttttcatacacatccatcatacactgtaaccaaaaaaagcagtgtacatgaaataagagaaaataaattaaaaatccatagcataggtaaggaggctctagtctggagcacagctgagtttccagcaatataaggaggctcgaaagtttcttttataagaatgcctgctagcaagggttccagcaaggtggttggttggtctgtaagtcagtcttgagtacttgaaacagttctgtgtttgttttttttccttagcgtttagaatagccatcattgtcctgcaataggcagagctatcacgtccaggaaaaatgagggagggaaccacagaggcagcgtgagatccaaatacagcattcaaaggtaattggtccagtggtgcctggggagggaggaagggtgatactccagggttagccgtcttcttttgggggtgtgtaccagccgtttttttcgtggatctgcaccaaggacttgtaggactgctgtgctcttgtcagactgtattgagatttgttggctccaaactgcactcgtgctttccccttcaccagtgtggcactgatctgcatgatcactgactctatggagtaggcactgctccagccctgtttggtgagaagttccatgcagatggcccctccgcccagaacataccctccagagaggactggagacacaaccctgacaaatggtgggtcaaagggaaagttatctttaaaggaaaagttaagtagaatgaagtcggctccttctttctctttgaggatctggagatcgttgtgcaaagcgctgtcctggtcaactttgaggagtttgacattccaatcatacagactgtcattcacgagttcgactgcatagtttccgcctttgaaactctgtgatcggtatatatccctgagctccttcatcagccggtcagtggcctgcaccgagccagacactgcaccatttaagtaatcttgcctctggttctttttaattttctctaggatggccaagttttcttttccaatgccatcatcttcagatttcttgccctcagctggctcttcctctttcatttcatagtgatctaagtcttctgtgtcctcaggcatctcctcatcttcatcttctgaagacacgtcttcctgtgtgcactgctctgctggcaagggttgatccagcatctccacatctggatgctgagggaggttatagagtttacacaggtcggagatgatcctcttcagatgctgcaatagcagagtattccctttctttatgtccaccagcctctccaagacagcagccaagttagggtcatcagactccaccgaccagatggggggcacagcagggtatgactccgtgatgttgcagtggatgcggacaggatccccaggcaccgacccccgtggggggagatgcggtccgggcgcggcccccgcggcggcccgtccggccccagccagcaggaactcgcagctcagctcgtccaggcaggcgctggcaatgcggaagcgctcgtggccgcggtggaagatggactcgagcagcttcagctctcgcctcaggcaggnnnnnnnnnnnnnnnnnnnnnnnnnnnnnnnnnnnnnnnnnnnnnnnnnnnnnnnnnnnnnnnnnnnnnnnnnnnnnnnnnnnnnnnnnnnnnnnnnnnnnnncggctgctgcatcctccgctccgctccgctccggggccggcgggccgggagcctccggcctgcgctccgggctnnnnnnnnnnnnnnnnnnnnnnnnnnnnnnnggtccgcacttcctgatccccccttcgccaagatcccgggaattccggaccggtcc

SEQ ID NO: 440613 - DNA, 1113 bp, Homo Sapiens
  misc_feature (336)..(439): n is a, c, g, or t
ccgcccccttctatgtatgtgtaccccggtttttttgtatattttttctaaaaacactctctacaggccccatgcgttgtttgaaatatgtaacgattcctccgccccatgataatattatagagattttttgtatgtatagtggggattgttatgagcgctgttagaggggggaccccagagaaccattagaggcatggggggatgggaaactatttgtggtttgcgaggattttgttttttacccaattttcgccactccgttttaaaaacatgggcgacggggcaagaaaacgctcctttttttaaagaaaagtgttttctcctctttcgctnnnnnnnnnnnnnnnnnnnnnnnnnnnnnnnnnnnnnnnnnnnnnnnnnnnnnnnnnnnnnnnnnnnnnnnnnnnnnnnnnnnnnnnnnnnnnnnnnnnnnnnngttttgaaaaaagaaatttgggagtagagtgggtttgtttcgcagaaaagccccattttacccagggaaaacttatgttttctaaggccatttcccttagttttacccccagggccgggtttgtccccaaaggtttagggttttttattgaagaatttgggttcttcaacattggccaatcttttggccttatgtcattttcactgttaatgagagctgactggcatcttaggtcctaagaggctgagttcccggagcaagcttacagacaaagagatgcaggcagcacccgctagatgcaaagtcatgcccaaacttttacaacagcaagtacatacaacacagcactgacagttccatctcagtacagactccccacgtcatcttccctccctggcagttcttgagcctggggtaaggacacaggtgtatagaacaaccccccttaaaatgctaaccctttctagtaggacccaccttgtgggagtggcttgaaagaatccataatttcccaagccaaacaaattcagagctaggtctgttctttttgataaagccaaatgaagcaagagagagggaggtgagcaaagcttaccaatgatcaccatccagtgctggttagaagccactttccaggagaggaaccaatgaacagcgaagagttgcagccaccc

SEQ ID NO: 440614 - DNA, 670 bp, Homo Sapiens
  misc_feature (185)..(185): n is a, c, g, or t
  misc_feature (198)..(198): n is a, c, g, or t
  misc_feature (567)..(615): n is a, c, g, or t
ttttttaagaaaaaaactttattttacagttttataaagcggctttacattaagcacaaacaatccatttactttgtatagaaacaaaatacctttccatctgcaaaaaatcaagttttgctgtatataaaactaacatgtgcacattgtcttaaactgcaaagtctgtacagctttacaaaggnactacccttcagnaagggcatcctgtaaacactttattgcatatttaacatatgggtatataacccacatgtacaatggaagagaaacaagaaaagcaaccacaaggaggatgaaaatagcagctttcagtgagagtctgcactgagaaaggagaaggagccacgtctggagagttgtgcttgtgtcatttttgcacttgcttctgtgcgctggatggttcgtggatgaagcctttatgtacaataactcctaaaaggtcaaacttgaccttcatccagaaacttttggctggttttacaactgaagtagcaatagatttaacatcaaagtgaactcaagataagtggaaaaacaaaaacaaacctaatacctataatcttnnnnnnnnnnnnnnnnnnnnnnnnnnnnnnnnnnnnnnnnnnnnnnnnnccctccccattctctctaagctcagaataagtaaacattttacataatttaaaac

SEQ ID NO: 440615 - DNA, 957 bp, Homo Sapiens
  misc_feature (754)..(795): n is a, c, g, or t
  misc_feature (915)..(915): n is a, c, g, or t
acttcccaagggacgcctgtctgcagaaagggagcaaagcaggggcctgagggacaacagtcagggaattcgcaagctaccaccataaggaaggaagccctcccataccagctttgggcgccttaacccagcacccggtcagggtgggtgctactagccgaagagaaaaacactgtactaaccaagacgttcagaatcctcacacagaggagcagtgggagcctgaaaactccattcattcagacagaatgatgttgcctccattgacgtgcattcaacccaaatgtcccacccgtgacgggccatgcctagtggcaaggcacctcctggcagagggcacgggggcctggactgtcagaagggccagccagtgcagatcaggaaggagggctcctggaccaggctccacacaaacccccaaaccacaggcccggcaagcgagagaaagctcagatactctggccctagaaggcctggagcctggctggagggtgggaagggacagtgggggctctggcctctggcgggctcccctcacccccacataggtgacaaggttggcaggcgggccttgagcctctcccccaaccacaccagccaccatccttgacccacgacccacgaccacaaccctgggctcagctgcatgtggggagcctgtgggctcctcccggccactcagtagcgggggtccccacacctggggtggcatctgcctgcccagtgtccctcctggctctcacccagggcagcnnnnnnnnnnnnnnnnnnnnnnnnnnnnnnnnnnnnnnnnnncaggggcaggggaagtggtgtggggagcagcccctccgaagaccccacgtgcccgggtgctgcacagccctcgcctgtgcccgcccagagtggcagttagcaccgcggctcccctgaccntcacgtctgtcttcgtggggtggcaggagcgggacaaagatc

SEQ ID NO: 440616 - DNA, 1562 bp, Homo Sapiens
  misc_feature (193)..(193): n is a, c, g, or t
ccgttttaccaagtgttttgaaaagttcccgctccaaagaaataagcttcggtcttttcccacctcccgacaacagtgtggcctctcttaacatacaaagtgcaaaaatgccaccttcatgggccccctgaactgcatagcttattcgatttgtaccttttccccatactaagatgttgcccacttgaatctnccagtaatggtgtcaccgttttcagagaaagtcacacagaggacaaactttgggcttttcttgtttctcgaataatccttgctttcttattaagggagcttccttctagtgtccaaaagtagagatgtgattttccacaagtaactatgatgttggtgtccgtggggtggaaatccgcagcaaacacagcttcattagagcacttcacatctgctagtttttcttctttctgccagtcccatacagagagcacatggtcgttggagtcatccacagcacagagattggttcctccattagattttgagaatgcaatacaggtgactgctcggtcaaaaaaacctattccaatgacgtggagagtattcaatgtcacagaatcccagatgcgcacatgtgggggcaattgttttccatccttcgatgtgcccgcaacttgtcctgttgctatcgtgatccgatcaggatgaactgctaggcacttcacgtcatcgttgtggccagcgtaatgcctctgcagttgctcctccacgttgtataacaccaccacggatgcgatgaagtagacggtctctcccgtcggaagcaagtacaggttgttacggcagtctcgacccctgtacccatagacccattccagcttgagtctcttggttggaagttctacttttgcttccaagctgtaagaatccacttgatctttgggcatgtacatggtaacagggcgtccacgaagaaacatttttacatagccttcttctgcactgaatacaggctccttgggtttgctttcactgttctttttgccactggaagagctgctggtggagcctgtgcgattccggtttcctctggaatccccattgctttcccttcgcacccccaggagacactcgttcagaagagctggtcctcttgatgttacttggtgtcgatctattcagtttgcaagcattgagaagactcacagatctgtttaatcttttggttgctggcacagcagtttctttcctgaccccggagggggatggtagagagccagtaggtttctttggtaacacagtgccattgttgaccgtggttcttaaaggcagggtctgcatcagtggtcttgctttggtaggtcctttcctgttaagcacggcctgctgttcctcagtaatgttcagccgccgaaccacatcagctagagctgatttgagcagctggatgtcgtcttcttgcatctggactctctgctccagtgaagcaatgcggtctgtcacctccatgctacttgcagcagaagcgctgtcatcgttgcagaactggagcagcgaggacgtgtcgtacaggctgctgtagctggagaagccgtcctccatgctga

SEQ ID NO: 440617 - DNA, 1191 bp, Homo Sapiens
  misc_feature (599)..(599): n is a, c, g, or t
  misc_feature (611)..(611): n is a, c, g, or t
  misc_feature (614)..(614): n is a, c, g, or t
  misc_feature (617)..(617): n is a, c, g, or t
  misc_feature (638)..(638): n is a, c, g, or t
  misc_feature (646)..(646): n is a, c, g, or t
  misc_feature (657)..(657): n is a, c, g, or t
  misc_feature (674)..(674): n is a, c, g, or t
  misc_feature (683)..(683): n is a, c, g, or t
  misc_feature (749)..(749): n is a, c, g, or t
  misc_feature (761)..(761): n is a, c, g, or t
  misc_feature (771)..(771): n is a, c, g, or t
  misc_feature (781)..(781): n is a, c, g, or t
  misc_feature (783)..(783): n is a, c, g, or t
  misc_feature (803)..(803): n is a, c, g, or t
  misc_feature (811)..(811): n is a, c, g, or t
  misc_feature (829)..(829): n is a, c, g, or t
  misc_feature (832)..(832): n is a, c, g, or t
  misc_feature (859)..(859): n is a, c, g, or t
  misc_feature (869)..(869): n is a, c, g, or t
  misc_feature (871)..(871): n is a, c, g, or t
  misc_feature (878)..(878): n is a, c, g, or t
  misc_feature (885)..(885): n is a, c, g, or t
  misc_feature (891)..(891): n is a, c, g, or t
  misc_feature (895)..(897): n is a, c, g, or t
  misc_feature (903)..(904): n is a, c, g, or t
  misc_feature (908)..(908): n is a, c, g, or t
  misc_feature (912)..(912): n is a, c, g, or t
  misc_feature (919)..(919): n is a, c, g, or t
  misc_feature (928)..(928): n is a, c, g, or t
  misc_feature (934)..(934): n is a, c, g, or t
  misc_feature (950)..(950): n is a, c, g, or t
  misc_feature (956)..(956): n is a, c, g, or t
  misc_feature (986)..(987): n is a, c, g, or t
  misc_feature (990)..(990): n is a, c, g, or t
  misc_feature (992)..(993): n is a, c, g, or t
  misc_feature (1001)..(1001): n is a, c, g, or t
  misc_feature (1041)..(1042): n is a, c, g, or t
  misc_feature (1047)..(1047): n is a, c, g, or t
  misc_feature (1083)..(1083): n is a, c, g, or t
  misc_feature (1096)..(1096): n is a, c, g, or t
  misc_feature (1109)..(1110): n is a, c, g, or t
  misc_feature (1116)..(1116): n is a, c, g, or t
  misc_feature (1142)..(1142): n is a, c, g, or t
  misc_feature (1145)..(1145): n is a, c, g, or t
  misc_feature (1148)..(1148): n is a, c, g, or t
  misc_feature (1152)..(1152): n is a, c, g, or t
  misc_feature (1158)..(1159): n is a, c, g, or t
  misc_feature (1163)..(1163): n is a, c, g, or t
  misc_feature (1165)..(1165): n is a, c, g, or t
  misc_feature (1167)..(1167): n is a, c, g, or t
  misc_feature (1170)..(1170): n is a, c, g, or t
  misc_feature (1186)..(1187): n is a, c, g, or t
ccatcccctccccccctttcccaatagcctatatatttcctacgtagcgaggcctgggtggcgaattcgggacgaggctccccgcagccccctcatgcccggctgcgagctgcccgtgggcacctgcccggacatgtgcccggccgccgagcgcgcccagcgcgaaagggagcaccgcctgcaccgcttggaggtggtgccgggttgccgccaggacccgccccgcgcggatccgcagcgcgcggtgaaggagtacagccgacccgccgccggcaagccccggcccccgcccagccagttgcgtccgccctccgtgctgctggccaccgtgcgctacctggccggtgaggtggcggagagcgccgacatcgcccgcgccgaggtggccagcttcgtggcagaccgcttgcgagctgtgcgcctggacctggcgctgcagggagcgggcgacgccgaggcagcggtggtgctggaggcggcgctggccacgctgctggccgtagtggcgcggctcgggccccgacgcggcgcggggacccgcggacccggtgctgctgcaggcccaggtgcaggagggcttcggctcgctgcggcgctcnacgcgcggggcnccngcngcacccccaccaacccacctnccagggcntctttctgctntataacctgagctcganggaaacccnacataagaatctacagctacctgctaccctgcgcgcctgcccgcccctcaacaaaaccttggcaanagatgctacctnccaagagaanaatgctgccnanatgttccgtctgcaccaaancctacccnacctaccaaattacactntanaataccatatggaccatacccgccaanaaaacctagncnacttaantcgtacntttaanaccnnnaaaaannaaancttncctctgngcttcatgntcaacntcttggccctggatgnactcanggaagcacggaacctgtgccaagcccacgnnctntnnttggacgnagagtatatagttttgttcctgaggggtcgctacgtggannaagtntacttccttccagtacgtgcaaggttttagtggagngcaaacttcgagnacgtaccctgaannaggtgntcattgcagaggaggaagatgagggnacnganaaanctggtnnccancntnagnagggagcgtaatcctnnttta

SEQ ID NO: 440618 - DNA, 1547 bp, Homo Sapiens
tttttttaccaacaaaacaagttccttttattacctggaaaccatggaaaaagaaacctaagtgctctggcccagtcctggggctctgggaggctcacgctccctcctcaggctggggacccaggtctgtccgtgccctcatcttcctcctctgccatgaccacctcctccagggtacgtcctcgaagtttgctctccactaacaccttgcacgtactggcaggcggtagcccttcctccacgtagcgacccctcaggaacacaactctctcctctccgtccaagggcagcccgtgggcctggcacaggtcccgtgcttccctgagtccatccagggccaagaggttgaccatgaagcccagaggcaaggtctggcccttgggggtgctaaaggcacgagcgaagcgggccagggcttcccggcgggcatggcccacatggcactgcacagcgcaacttggcaggtagggcagggtctggagcagacggaacaggcgggcagcattgccctctcggaaggcagcatctaccgccaaggccttgcggaggggcgggcaggcgcgcaagggcagcaggcagctgtagaacctcatgcagggcttccaccgagcccaggttatagagcagaaagaggccctggaaggcgggtttgcgggggtgcggcccgggcgccccgcgcgtagcagcgccgcagcgagccgaagccttcctgcacctgggcctgcagcagcaccgggtccgcgggtccccgcgccgcgtcgggcccgagccgcgccactacggccagcagcgtggccagcgccgcctccagcaccaccgctgcctcggcgtcgcccgctccctgcagcgccaggtccaggcgcacagctcagcaagcggtctgccacgaagctggccacctcggcgcaggcgatgtcggcgctctccagccacctcaccggccaggtagcgcacggtggccagcagcacggagggcggacgcaactggctgggcgggggccggggcttgccggcggcgggtcggctgtactccttcaccgcgcgctgcggatccgcgcggggcgggtcctggcggcaacccggcaccacctccaagcggtgcaggcggtgctccctttcgcgctgggcgcgctcggcggccgggcacatgtccgggcaggtgcccacgggcagctcgcagccgggcatgagggggctgcggggagacggtgggcgctcagcatcccggggacggcagtgctgcgggaaggcacgcgaggccggccgggggtggggagcggcgggtcggggcggggctgaacctggctgggcccgccttcccgccatgatccccggccttcgggccgcccatcgagccacctctgtcctctcacccagtccagtcgagttggcctcccgagatgcactgcgttgtagtccagctacgcctctgcggctccgcgcgctctagggcggctaacggcccccatcgagcgccaagttcagcttcgcgcgctccccttagtgtttttaacgtgtagcccgggccgctcccatgatacaccggt

SEQ ID NO: 440619 - DNA, 1571 bp, Homo Sapiens
  misc_feature (63)..(63): n is a, c, g, or t
caaaataggggaagaggtggcagggaatacagacccaggccatcggcacccccatctcatctngtggcctgcacgtgacccaagctgtggccacgccgggcacttcggggcacttggaagtggaaagctggtgccagaaatacagggtcatactcatcctctccagtcactagcaccgacacagtgacagaggctgagagattcccagcatcagcagcacccaccagcagccggaagctttctgtgtgctcatagtcaaagggcactcgcgcacgcaactcccctgttgagctgttcagtgcaaatgcctcacggccctcaggtcctggcccagcctccaacaggctgtaacggagcctcccaaaagccccagcatccccgtcgattgcatgcagagtggtcacgagagtgcctggaggctgattctcggccacgctggtgctgagtaagttcagtgggaaggctgggccatgatcattcacatcctggacctcaattgtcactggtgccaaagcaaagtgtgcaccagcagggtcagcagcctgtactacaagctgatgtcgagcctgggtctcacagtccagggcatgggccagtcgcaaggtgcctgagctctcatccagctcaaagagccctgatgggtcgcctgagctgacagtgaaacgcacgaggccatggagggccagggtcagcgtcagaggcctctacatgcagcagctcagctccaacaggtgtgtcctcaggtactgtcacacggtaggatgctcgggtaaagacaggtgggttgtcattgacatctagtacagtgacagtgactggcacgactgagctttggggtggctgcccacggtcagctgcagccactgttagattgtactgtgtcaggctttcaaagtctagaggttcaagcaacaccaggcagcccagtgcccgggggcctggtccagcactctccccagcctcagccagcctgggttccagctggaagactcggccccagtgccactgatgatgctgtagtccacagcggcatggctgcggcttccatcagcatctgtagcctccagggtgagcagagtggagccagggggcaggtcttcagtcacagccacacggtagtgtgacaatgtgaagctcggggcgtggtcgttctggtcctgcagctgcacgtgcactgtggctcgtgctgcccggcctggagccccgtggtctcgtgcttccagcaccacatccactgctcctgacccgtcatggcccaaggccactgttcccactattgtgaacagggtcccattgttggggtcaacactgaagccatcggcaggggaagccaggtggtaggaaatgtgaccgttggcacctgagtcccgatcagtggcagagacggagagaatggcactgcctgggggtgtgtgctcaagcagcattacctggtagaggctctgtgagaaggcaggtgcattgtcattgacatcctccacaagcactgtgaggttggcacggccctcatgaggcccatcatgtgccagcagctgcagctggtagcggtcacactgctcaaagatcccggg

SEQ ID NO: 440620 - DNA, 1434 bp, Homo Sapiens
aagactctgttatgattttatttcttcaattgttccaatcacagtttctaatacagaaataaaactattcagcgtctccgttcttgcttcattttgtttcacagagatctgcatttctgagtttccaggctccaatagcagttctgttaagaacagacagccagtatcatcctgagcactgaggtatgctttccatggccgagacccagccctactcattgcgatggtctggatgttcactacttgaagagccatctggagggtgtcaggatggaattctccccgccaaggcaacacttgctgatgagcaactttaaggctaagccaagttttctcaaaataatcagcagtaagctggcgattggggactagcatgagggctccagaatcagggagttcttgtaccctctccttgttctcttcaggaatcaaggggtcctgatgcggcaaaggatgaagttttaggaagctttgggtcacaacgctctgccccctggcatttagagatagttgcccagtgggctttgccatacactggcaccagtgtgttgaagtctgaggcccagctattcacaggtctttctgccggatcctccaaaagtccaagagtagggtcagatttagggctacacagaatccgcttaacttcatcaatgccaactaagaggaggcgataatagaagagacctcggtcccgtacagccatatctttttcttcctctgaggtaagacaacagattgacttcattaaaaacaaaaccactttcctcctactcttgtgccaaccataataggagaaaaaaatgaaggagagaggaaaacctaggaagcattcacattttcttctcgggtcccagacgtgactcaccaaacaatgaaagctattaagaatttttactatgggtcatggcaaatactatttccttctgaaaaacccacctatgcagtaatacaacaaacgtcctagcatgtcctggcactcagcaggtcgggagaggaaaaggcgcagcaaagcagtgagcagctccatcttaacagctggaaatgtttccgacttcacattctcaacaaagtcctctaacacataaggagcattaggaattctttccccatggacaccaagtagccaaataagtgcttgcttcccctagagaataaaggaataagagcaagtgctcaacacttgactgtctaaaacacaggagataatagacagccactggttttgcttttcgcttagtaccagcagaaaaggtgtaatctttagtttacttcatttaatttactgattccccgtactatactctctacaacaaataggaatgaaattctaatacacaagaggaaactcaaaactttcatagcctatgttggattaagcaataaataaggtttcctcaggtttgggcctttggccctatgggttttagtttt

SEQ ID NO: 440621 - DNA, 935 bp, Homo Sapiens
cccctcctatttgacagcctattttctcatatccagcttttctctctaagcctaaccaaatgctttggtgaatgatgcttggaaaagctggagttttaaaaggcattcatccatttatgaactttcttccagcccaggatccctgcagagaaccagaggttacaaatctgccctcctttctcccctaaaaggtggctgaggggaggagaggtgcatgtagctccagctatagcaaatcagtgccctgactcactggggagacccagggggttgggatgttgctgacacctcatgggccacctcatcagcccatctttgtagcttcaggttcagctctgggtgctgcaggcagggacccctctgctccctgcctgaatgcagggccagtctccaaggaactctgtctgcagagtagaaagagctgtgggctgggaatcaggggcctgagggagcccctgccactgcctgcccagaaccagtgctcctcattctcctgctgacagcatgcatgtgccttttggctaacacacactcttgtctaattcccagccaccttcaccccagggatgagttccagttggtttaagccagactggtgcatttaattctggctgcaacaactggattctgttaagtgcccattgctaagccaatgagctatctgctgggctgtgggaaagagaaatgcagtctcctgcacgggagggtgtgagaaggccacccaggcagcctgcagctagagctcggcgctgagagagcacaggagagtcagacacctccattctggttacactttttccagatgctgaatgagagactcgctgggaaagcccgcctccagacaatttcaacatagcgccggtagcaccctagttttgctcaaactctgacttgtgctatctgtcccagacagttcacgactgcccgtcacttcc

SEQ ID NO: 440622 - DNA, 1065 bp, Homo Sapiens
acaagggcccttcgctccctgttcccagcccggcccctttaagccgacccctcagttcccggccaagacacggtctggccccccaaatctccgcccaaagagcgccggccgcagcggcggtgagaagaccgggccggggaaaggcaaacatggcggggctgtgggtatcgggggagggtggtcccgtcgcccctgcggccacgtcgaaggctcgcttgcgggcggcgcaccggggacaggggagggttaggggttggaaccaggttgcatgggctccggctcggcgccagagcgggggcttcggccgcgagggcggcccgcgaggctttccgcgggaccctcggcgggcgcctgaggaaaaagacgccgcctcagggctcctgccacgtttcccacagcgcgttacattccgcctccgggtgggcgacaaccccgcggcttccccaccctctgtccacccccttcgcgtcggtgttttttctggggctccgcttgtttgctggagagtcgcgcctccgggaagccgggtcctcgaacccagggccgcccgccggggacagcggacccgcggggcaggcgcaccctggcgaggatgttgtcggggaggctgggcattgggcgccagggcccttccccttgaacttggggaaaaccgggattgcagaagttgggcgcagctcaaggcggttctttcaagagcgggtggagatgtttgatccctcctcacctacctctctcaaaaccccagcgggagagcctagcagcaggtttcgatggcttcagaaagtccaactcttagccccttggaaaattatttcccctcttcatggctttgtggcgccgctgaggtcgggccggggctcctcaccccacgggccagtcttctcgcgccctccaccttgggaacgtctatcaggagaaaaatgtgttcctagaaacgtttgcgattagcttttcgttacaagggagggaaaagtacaaaagcttataaactcctgcgaggccgagcttgattctggattccctttgggttttatccacgcagccgtgagcagaggagccttg

SEQ ID NO: 440623 - DNA, 1796 bp, Homo Sapiens
  misc_feature (12)..(12): n is a, c, g, or t
  misc_feature (81)..(81): n is a, c, g, or t
  misc_feature (94)..(94): n is a, c, g, or t
  misc_feature (96)..(96): n is a, c, g, or t
  misc_feature (98)..(98): n is a, c, g, or t
  misc_feature (100)..(100): n is a, c, g, or t
  misc_feature (115)..(115): n is a, c, g, or t
  misc_feature (140)..(140): n is a, c, g, or t
  misc_feature (145)..(145): n is a, c, g, or t
  misc_feature (155)..(155): n is a, c, g, or t
  misc_feature (157)..(157): n is a, c, g, or t
  misc_feature (162)..(170): n is a, c, g, or t
  misc_feature (191)..(191): n is a, c, g, or t
  misc_feature (212)..(212): n is a, c, g, or t
  misc_feature (214)..(214): n is a, c, g, or t
  misc_feature (216)..(216): n is a, c, g, or t
  misc_feature (221)..(221): n is a, c, g, or t
  misc_feature (223)..(256): n is a, c, g, or t
  misc_feature (271)..(271): n is a, c, g, or t
  misc_feature (276)..(276): n is a, c, g, or t
  misc_feature (281)..(281): n is a, c, g, or t
  misc_feature (285)..(285): n is a, c, g, or t
  misc_feature (301)..(301): n is a, c, g, or t
  misc_feature (306)..(306): n is a, c, g, or t
  misc_feature (310)..(311): n is a, c, g, or t
  misc_feature (313)..(313): n is a, c, g, or t
  misc_feature (333)..(334): n is a, c, g, or t
  misc_feature (336)..(336): n is a, c, g, or t
  misc_feature (352)..(352): n is a, c, g, or t
  misc_feature (354)..(354): n is a, c, g, or t
  misc_feature (359)..(359): n is a, c, g, or t
  misc_feature (366)..(368): n is a, c, g, or t
  misc_feature (370)..(370): n is a, c, g, or t
  misc_feature (394)..(394): n is a, c, g, or t
  misc_feature (410)..(410): n is a, c, g, or t
  misc_feature (428)..(428): n is a, c, g, or t
  misc_feature (431)..(431): n is a, c, g, or t
  misc_feature (438)..(438): n is a, c, g, or t
  misc_feature (451)..(451): n is a, c, g, or t
  misc_feature (456)..(457): n is a, c, g, or t
  misc_feature (461)..(461): n is a, c, g, or t
  misc_feature (464)..(464): n is a, c, g, or t
  misc_feature (644)..(644): n is a, c, g, or t
  misc_feature (725)..(725): n is a, c, g, or t
  misc_feature (1274)..(1274): n is a, c, g, or t
  misc_feature (1288)..(1288): n is a, c, g, or t
  misc_feature (1300)..(1300): n is a, c, g, or t
  misc_feature (1307)..(1307): n is a, c, g, or t
  misc_feature (1333)..(1333): n is a, c, g, or t
  misc_feature (1344)..(1344): n is a, c, g, or t
  misc_feature (1413)..(1427): n is a, c, g, or t
  misc_feature (1435)..(1554): n is a, c, g, or t
  misc_feature (1578)..(1614): n is a, c, g, or t
  misc_feature (1629)..(1629): n is a, c, g, or t
  misc_feature (1701)..(1701): n is a, c, g, or t
  misc_feature (1732)..(1732): n is a, c, g, or t
ccaaagccaaanacaataaatacacacaacaaagggtgatgggcaaaaacgtcatggggatattgtgatataaaaatccanatgctcagaaacncnanangtcacgtgaccagcntccacaaaaattaaactgcaagaanatganttaaacccananatttnnnnnnnnngatttaagaaacacatcagcnaattatatatggacctatggnantnctgancnnnnnnnnnnnnnnnnnnnnnnnnnnnnnnnnnntatttataagactgnaaganataanaaanactcattgaataacgnatganttanngnatgattatcaattattttanngnctgataatggtattangnttatntttttgnnngngtccttctctttccaggataatanaatatttatgggtganatgatatgatgtccagantcngcttcanaataatagggggnggggnngggngtnacagagttacaactggctgtgagctgataatggtgatgagcgtgatgagcgtattgggctgaaatatcaatccatctacttttgtatgtctacaatttcctataatgagatggtacactgtaaacagcgcaatgcatcgctgcctattcaaacaaaaaagcagttgaagtctcagcctgnatgtcacccatacctgtgctaatcttggatttgttctccacagtggtcatggcaggggcagatgccgaagtgctgcagatnggcaggagctttccttccctttaacaccattagtcaccgttacccctctggccattccagctaaaaggtcatcactgctcttggtcttcatatttactcttccactgttctttattccttcttgaaattttgtttccctttggtattattttctttctgcgacgagaacttcctttttctttcagaatgggcctgctggtgacaaatcctctttttgttatctattgagaaatcggctgccaatcttattattcctcttaacctagtatcttttttctctagcaattaaagattttttttgctgtccttgacttttagcacttatgacactcctagccctctcttttctcttagtataacccaattgtatgtgtcttaacccctctattatgtcctgtgtctccactacactgtatttttttcatgctttcatttgtcggtgcttgactgtagatatttcttactgatcagtcctctaattcacaaatcttttccgtgttgagtggttgtgaaacacatgcttgggagtttgtaactcaagctaatgtntttttagtcctaanattttcatttgnccaggcnccatgctcacgcctataatcccagcnctttgggaggntctcctgaggtcaggagttcgagaccagcctggccaacatgacgaaaccccgtctctactaaaagtacnnnnnnnnnnnnnnnttagctgnnnnnnnnnnnnnnnnnnnnnnnnnnnnnnnnnnnnnnnnnnnnnnnnnnnnnnnnnnnnnnnnnnnnnnnnnnnnnnnnnnnnnnnnnnnnnnnnnnnnnnnnnnnnnnnnnnnnnnnntgacaagagtgaaactccatctcnnnnnnnnnnnnnnnnnnnnnnnnnnnnnnnnnnnnngttcatttgattctnttttatagattccagttctctggtaaaactctctatctcttcatctgtttccttaaactcataaatcggttnttttaaaagcctatctaagagttccaatatntggatcacctcaagttctttctgttactcattctttctcttgattttcattcacttgatcgtgc

SEQ ID NO: 440624 - DNA, 1695 bp, Homo Sapiens
  misc_feature (20)..(20): n is a, c, g, or t
  misc_feature (41)..(41): n is a, c, g, or t
  misc_feature (50)..(50): n is a, c, g, or t
tcatctaagttctatctctncaaaaattaaaattataggtnacctaaccncaaaaaagggcttaggtttttctcaaccactggaggaacatgtaaagaaatattgcttactggtcaggaaaatacttctaaagtgtcactacagacttcctagacttgctgtccattcaattggctgtccctctaagtcttccaaatatcatatgcaaagatcttaccagtctcttgagaatggacagtttgttctacatgtatagatggcagttggcactggggtggtgtttgtgtacttgctgtggtaaaactttgattgtagccaggtgaataaggggattcttttatttcttgttcttttcgtggaggcagaggtgcattaacgttaaatactgtctgcatggcttgaaagggtgctgtgttaatggttactgaactactacttgctggaggtgactggaagccctgttcagagccctttgccatgggaggatttggagaagctagtgaagacggttgcttgcctgggggaattgctgcctgtaacggctcttgaaagaaaatcactttgactggacagattttgttctttagatgctacggggctacctggagtagctgaaggcggttgtgacgttggaattgcacttgaaggtttgtcaaagtcaagaacagactcttgcataaagttacaagttccttgaatctgagtcatcagatcctgcagtttttctttcctcaatactggatcttcggaagggtagaggaagaacctacaggctgatgcacaggcttaggcacatctttgggttctgtgttcaacttcctgggcagcagctggtcatttggtatgaggcttgctgtagctactccccaggacttggagaaatctgtgactgtgatgttaaagagtgtttttgactctcaacattgttttcccaggattttggagtctctggctgttttgaatcctgttcttcacacatgggagtggtccatgacttggtggtgttctgttcgctctgcatggaaggtgtccaagactttggagtttgcttctttggatcttgttctttctgcagctgaactggccacagctttggtgtctcctgtttcttttgttcctcttgaacataccctgctttggatttaggtgtatcttgcttccactggctaggagatggcttggatttggagatctcctgcttcttctgctcttccggcagagtagacctgagttttgaggtgtcttgtttcctctgttctaaggaaactgcaggcttggatacctcctggtgcttaccagaagcctcccaggacttaaaggactcctgtttcttctcttgaccatctggttcagtaagcatatcccaacgttttgggagatttggttttctagcataatctgcttcccaaggttgctcttcgccttgtttgtttgaataatctacttctgtcatatagcgtctgttaagaaactcttgtggttgtatctctggctgggcaaattccattagagactctcagactttcatttctttcagggcaggtcagttttgaaaacttaatgaggtagtcaagttcttttgaaggcaaatacactgcaccattcaaaccccctttgaagtctttttgtacgtgctcctgtgtcaagttctgcaatacatactgaacttgaagtatagttcgaagctttttcatc

SEQ ID NO: 440625 - DNA, 497 bp, Homo Sapiens
  misc_feature (17)..(17): n is a, c, g, or t
  misc_feature (26)..(26): n is a, c, g, or t
  misc_feature (37)..(37): n is a, c, g, or t
  misc_feature (43)..(43): n is a, c, g, or t
  misc_feature (72)..(72): n is a, c, g, or t
  misc_feature (157)..(157): n is a, c, g, or t
aaagggaaacccccccnaaaaagtanccaaaaacccntttaanaaaccccacccccggggacccgaataggnaaatgggttaataaatcctcccccacccacgaagtaccacccctcctaaacagatcccccggcctattgaacaaaatggcctgantaaggtcctgggaaaatacattccgtcctgtgcctgggtaaaaggcaaggcctacccattgccttacttgaatagttcccatcaggatgataatttgcagtctcttgagaatggacagtttgttcctacatgtatagatggcagttggcactggggtggtgtttgtgtacttgctgtggtaaaactttgattgtagccaggtgaataaggggattcttttatttcttgttcttttcgtggaggcagaggtgcattaacgttaaatactgtctgcatggcttgaaagggtgctgtgttaatggttactgaactactacttgctggaggtgactggaagccc

SEQ ID NO: 440626 - DNA, 877 bp, Homo Sapiens
  misc_feature (812)..(812): n is a, c, g, or t
tttcatggataaaatgtgcatatttatttcagggcaacaagcgtatacacagcaaagcagtgtggggtagagcccacctcgtggcctgcaagccagccagcccctgccggtcgagaaggaagcctgtgtgagagcacacaactggaggccgggcggggaagagaaacacgtgccaacaggccacgcaggccaggaccccagacccggaggctgcgcccctttgagttcctctctctggtctccgatgttcttctgttgggatcatttcaccttgaacaaggtgacggtggtactgtagaagaggctcaggaggaagaggacgatgaaggtggaggcggtggcccacaggttctcaaagccctcctcgtcggcgctcacctccccctcggtggacttgtccacggtcctctcggtgaccctgttgggcagggcctcatgggccaccacgcaggtgtaggtctcccccgtgttccattcctcttcggacacggtcaggatgctgtgggcgaagtaccggccttgggcctggggctcaggcattggggcgctggtcacatacttctccggggacaagggctgccccctctgcatccactgcacgaagacgtccgcgggagagaagcccgtcaccaggcacgtgatggtggccgactcccgcaggttcagctgctcccgggctggtggcagcaagtagacatcgggcctgtgcagggccacccccttgggccgggagatggtctgcttcagtggcgagggcaggtctgtgtgggtcacggtgcacgtgaacctctccccggaattccagtcatccntcgcagatgctggcctcgtgccgattcaccacccagcctcgtacctagcctaagtttggcccccc

SEQ ID NO: 440627 - DNA, 443 bp, Homo Sapiens
  misc_feature (328)..(328): n is a, c, g, or t
cttttgaatggatctttttatttctaattttataagatgcaacatctcaccccgttgacacggttagtttgcatgcacacacagagcggccagccgccccgagcctgtgggcaggccagcagggtcagtagcaggtgccagctgtgtcggacatgaccagggacacgttgtacagggtgggtttaccggtggacttgtccacggtcctctcggtgaccctgttgggcagggcctcatgggccaccacgcaggtgtaggtctcccccgtgttccattcctctttcgggacacggtcaggatgctgtggggcgaagtaccggcctggggncttgggggctcaggcattggggcgctggtcacatacttctccggggacaagggcttgccccctctgcatccacttgcacgaagacgtccgcgggagagaagcccgtcaccaggca

SEQ ID NO: 440628 - DNA, 1754 bp, Homo Sapiens
  misc_feature (101)..(101): n is a, c, g, or t
  misc_feature (133)..(133): n is a, c, g, or t
  misc_feature (141)..(141): n is a, c, g, or t
  misc_feature (187)..(187): n is a, c, g, or t
  misc_feature (189)..(189): n is a, c, g, or t
  misc_feature (196)..(196): n is a, c, g, or t
  misc_feature (221)..(221): n is a, c, g, or t
  misc_feature (231)..(231): n is a, c, g, or t
  misc_feature (234)..(234): n is a, c, g, or t
  misc_feature (236)..(237): n is a, c, g, or t
  misc_feature (247)..(247): n is a, c, g, or t
  misc_feature (273)..(273): n is a, c, g, or t
  misc_feature (277)..(277): n is a, c, g, or t
  misc_feature (282)..(282): n is a, c, g, or t
  misc_feature (299)..(299): n is a, c, g, or t
  misc_feature (336)..(336): n is a, c, g, or t
  misc_feature (385)..(385): n is a, c, g, or t
  misc_feature (421)..(421): n is a, c, g, or t
  misc_feature (429)..(429): n is a, c, g, or t
  misc_feature (434)..(434): n is a, c, g, or t
  misc_feature (442)..(442): n is a, c, g, or t
  misc_feature (446)..(446): n is a, c, g, or t
  misc_feature (450)..(450): n is a, c, g, or t
  misc_feature (476)..(476): n is a, c, g, or t
  misc_feature (532)..(532): n is a, c, g, or t
  misc_feature (541)..(541): n is a, c, g, or t
  misc_feature (1659)..(1659): n is a, c, g, or t
  misc_feature (1676)..(1676): n is a, c, g, or t
  misc_feature (1687)..(1687): n is a, c, g, or t
  misc_feature (1719)..(1720): n is a, c, g, or t
tgtttttttcaatacatattgatgattgtcatgaaattacactggcaacagatgctcaggagacaaacataccaagtagacatggatcccatccacaattncttcacagttacttctgaatatctgtagagtnggggaganagaaggcactcttaaccaacgcaatattagaagtcaaaagtgaganangccagtnactcagttctgggaggttcaatagnatataagttnaangnnattatttccnccaacctgtgctgctatatgaatatntgcnctttnccagacacatgtgtganctcgcataacactcacatacacacactctcatatgcnctcacaaactcattcagacacaatcaagaattgcctagttattactgancactggctactcatcaaatctctactaataattttntgtttatnttttnctaatgtntgcnatanccttaaaaggtaggaatatcattatncctttttttctcaagggaactgacaaactccaatcattgtctagctagcaaaaggncggtatgancccagatttgtctgatttttaatccatgttctcatcctataagtgaagtgggctttctgacttcatggaagaagaattcagcagggcgagctcttcagaacaagccagtgttctgtctgtgtgaagatgagaaagggcatctatccaggtggaaggaagagagagtaaggccctgggggatgagaggatggggaaggggagtgaacctgttaagccctatgctgcagaactggaatttcagctcaaatctgcagacacaaaagccactgtgcttaactccctcaatgcctcccataagtagcagaaactatatacacttcacatttattgcaagggtttatagcattcggggcacatgaaaggcttccaaagccaagcaaaaccctagcaggggcacaaacagaacatccctgtggtaaccatgagcttatcttcttgtttaatgaacacaatccaggccttgccctgtccagcccacactccaggcccaggaaccatagggaggaagtacagaagaaccgtgggctccatcggagagccaggtatgaggcttctgaggaggcctccaggacgggcagtcactcatcctgccgagaacaagctgaaggaaagtgtaatgagtcttcaagaaaagaaagctcatgtgctcagaagattacggttggatcaactaatttctgaagacttagtagatcgcagcactttaaaacaactcaacctccagaggcagcagtgaatgactttcaacccgtgtccttaggcctggatgattaagagcaggaacgctggacccagaagacctgggtttaaatcccatctgcagaaagtggagaatacgactagagctgtgaggatcaggaacatggatccatgggagatgaggagagcagggcgcggcacacatggagcctggccactatctgtttttctcttcctgggaccgtggctcagttcttctcttcccgggacttcccagaccaccgagcttagaacctgaagcctgtgctccccatgggctggctcagacaatgggggttctcagaataggatgtgactcttcaaagggcatgtgaaagcttatcttctcagtgatattttacagcccctttagataattngtagtatgctaatatgnccatgagcgcncagaattttcaagtctgtgtcaacaggagccnncagtgtttgggaaggaggcagccccagctcctgc

SEQ ID NO: 440629 - DNA, 712 bp, Homo Sapiens
ggatcattatattttcttgaatattcattcaagtttcaatttaatacttaaacattcattttcgaataaaaatactatgtcttgtactagggatacaaagacttggttattcttgttggagtaatgattctcctctatctggggaggtcatcctctgcagttggggactgaaggactgggagatgggagattgaaacttaaagagggtaaaggtatgtcttgggaataaaactagttatcagtcaccacccagaccatcatggcggctagaattccagaaacggtgaatagaagttcatcttctattttgtcttcatggaatatatcactctggtaaacagctggttctaaatatgatggttagactttcaaggtcttcattttttagatgtaattcttcaaggagggtgtctagaaaccgtgtaaacaccataccttcctgagaatgtttctgaatgccaagaattggggtcagtaatgacagcaacaccatagcaattaaagtccattccgcaggtttgtgtataatatttctatttgttaacctgaaagttcgaacaagatttttaagtcgtgtgtaaatatctcccaatgctatttgaagaggaaccataagcccaggcaacactttactcacctttttaagtacgatgcgttttctaatctggttttgggaacttgagtctattagtggaaaggtcggaaccatgct

SEQ ID NO: 440630 - DNA, 520 bp, Homo Sapiens
  misc_feature (370)..(370): n is a, c, g, or t
  misc_feature (389)..(389): n is a, c, g, or t
  misc_feature (438)..(438): n is a, c, g, or t
  misc_feature (445)..(445): n is a, c, g, or t
  misc_feature (488)..(488): n is a, c, g, or t
  misc_feature (493)..(493): n is a, c, g, or t
caagatggcagctttaatcacattggccaagggccctaggttccctctgttcaggcccacttagccacacacccaccctggccatatccagaacacttctaccaggtgggccctgccctgtggccactgatgtgggaacctgaggtcacatcagtctgtggactcctgggttaggtgacccttctgccttgaggtctgctggacacctgggcatgggatccagtagtcctgagctcactcttttggccatctccagctgctcctaggggacgtggctcaggcccgctcctggggcagggggttggcggtggcatgaggtgggttggggaggaggacgtgtctccacattgcagctggcttcctcctgggntgaacctccttgtgctttnagacttacaggaagagcagagttgcttcaggtagaggctcggcccaggnccttggnaggataacagcagagaactaaggtccttctggaaagacaagangacanatgcacaggtaacatcacacattcatt

SEQ ID NO: 440631 - DNA, 1554 bp, Homo Sapiens
ggcaaatcaaagaaatttattggcgttgacaaaaatacataatacagaaaccaaaacaaaacacaacagaaacaaaaccagaaaccccagcctagtgggcccatgtgcctgatgtactgacagtgtgccgacccagactcccacaaagcatggcacttaattcatgaggacctccatctgcaccagcctcgcattggtgtccccagacgttcggtatggtatcattccagcaaaggtaatcagagtgcgggcttgacttcggagttgagagtcgcggtcctcgatgactcgctggggcctggatgacgaggatggacttgtccccttgagcctcttaaactgtgtgaacaagatgttcatggtggcaagaagcacttctgagaggttgtgcctgatttcatcactgaaatttctgaaggcagccactctctcttccacactttcctgattcaggggcaccagcttcaagcgctcaatgatatcaaaagctctatcaatatgaccactatgatactcgtcaaaaaaggtgatcaagtccaaaagaagatagaacgtggagtccacaaatttatttgcgcttattccttgagccctataccgttcggcaatggagagtgccatgttcttcagcctctccttgttggattgcggggcactgatctgggggacgacagggctcagcagtttgttcatcagctccagtaccttgtcagcattcttggcaaggtcatacagctttgctgcctcttcaaacagtcctttattttctgccacagaagcaactttgttgataataggctttgtgtcactagtaaacttatctatgactccaggctttctacttccgtcattctctagtttcccaagaatcatatcgaactctcggctttcaatcacaagctcactcacacagcgcagaaacatgttttctccttgactatctttctcatccctgaggaaatagaagtactggagggcctcccttgggtccgtggactcaaacttccgggtgtacagcatgaggagccgcacgaagttcagccgccgcaagcaaggagggtcaccaggctcgtggctgaggagctgagcactctgtccagaggactttaaaagcagcttcagctcaaacagcaccagtgctacatggacagcatggcagcgcagccgctccatgcggaaaagaaaggcaactgctgcttcaaactgcgctgtcaggaacaggacttggaagtagaggaagggttgctggttcaccgtaaagtgggactcgccatagtcttccaacaactgcttctggaactgtgagagagtgagcctgtcttgtggggagctggtgccatcgtcgtcaaaacacacttggttcaacttcagccacaggtaatcctcagttttgtccgccacttcactctggttgtcggtgacgtcacatctgccaatgatacagtacacggcccgcttgtagggatctgtattgttcctgagggccctacggtaatgcagccggagcttgttttccgtagctggggacaatcttctgtccttgcttgtcctgtt

SEQ ID NO: 440632 - DNA, 2374 bp, Homo Sapiens
  misc_feature (416)..(436): n is a, c, g, or t
ttcaatcgtgaacttaaaagtttattagaataaaaatacacatacggtatcaacactaaaattatttcacatcgcatttaggttttacctccattagttttttttaatgcttataaagtctatgctctaaataatttgcacatttgtaaacaaatcttagatgaccaaagatgcagtgtatctatcagatattgaatatcaaaacttaaggatgggaactgatagcgaaatccaattacactaaacattcctaaatttttggaaagagaggaaaagattaaaataattcacttgaaatgaggtaagatgtatatgaaaaggtttttagtagcatatatcacaatgttgagatgagaatattaaaaacattcatggaaaattcactttgatgttttgcatagtctaggttatttttnnnnnnnnnnnnnnnnnnnnnttacccaaattccttattagaaaaagagacaattacctggttctacttaggatctgtgtatgttctaagtctttctctcctttagaaaaaaagagataatctgattctattttggatctgtgtacattctaagtctttctctcatttagagaaaaacattctcaagtctatagaagaggaaaaaaaattaagattaggaccaacatttcaagctgccttttggaaagaaaattaaaaacagaggtagatggttaattattagtggccaagttactcaggtgactaattttttcttggtacacattcaccaaaattttatacttgaagccaaatagtaaataactttaggagtagagagtaatacctagcagaagttattttctttatgtcaaagaaaagtaatagaagcaaaccaggcttacgacccctgttaaggagatgattgtttaaagcactacagttcatgcactttttaaagcaggagaatgaaccttgcccctaagcttcttaggtgtatctgaggccagccacaagctccatcaggcctgttcagtccaagtaggactgtagggtgcctcggcgccggacatcgcaggtccagcaatggaagcctcctcccagggaattggcattacgaatgttaactttaatggtagtgatacccagcttttcaaacatcttttgaattggaacttcattggcatccaccataacacgtttttcatctagcattaagacattcatggaaagccatttggatgacatccagagtggatgatcgtctgggatgattggtgttggaggagtaatgatagtccatcctgctttcttgaaaagatcaatctggtgacatggtcggtcagggttggaaagcacaataccaggtccaatgatgttgaaggtagcatcaatatgcatgggattgggatctttaaaggagatgatatgcactctgtagtctggagcaagatgcctacgcatccattcaatgcctaggtagtttgtaacctggcttctctgtgcaaaaatatctcttccagctcgaatgaagtcagcagcatcaaagcatggctcaaactcagttgtcacaaattttccctgagcagccaatttgtgtctgtcttctacagagtggatgggataatcctggttataaagctcatcagccattgtgggcttaggagctgttgtccacttggcgccacggtggaagtagtctttgataattgacctgtacgctcggtactcaaagaagcgtgaacgccatgccatgggagcctcgataatctcattgcccacaactatcaggatgtctcgaggcattgcactgtataaacccgtagactcaaaatcaggagttttatacttcaatgaccagtcaatggggtcaggcctccttactgtcactccttccgtttttaaaatattgcacatttcttcaatttcagcaacagcctttttcaaatgatctttgggaaaataatgccctccttgcttctggtaaaatggccagtacttttcatatgtgttggccttcacctcgatggtgaacggtggaacacaggcgttttctgctctgcccactatcacttcctctaaggggtcccattcgttgtaagaagagacagggcagtccttgggcagaggctcagtggctttgtcgtcagctgcacaggagttccgggaggaagccgtagctgcctgggtgctctggaaagttcgctgcacccatcctgtcaaggttcgtccaagccgagatccgatgtagtgcaccgcctcggcgccgcggctcccgccgcgcagacaccgcacccgcagcatcgcctggcccggctggtccacgcgcggaatgttcctggcctctgggccgcgtcggtccaagccttcccgagagcgcgcccggagcggggtgggcgggcgcgcggggcccaagccgct

SEQ ID NO: 440633 - DNA, 514 bp, Homo Sapiens
caggagtcttatacttgagtgaccagtcgatggggtcaggccgcttcacggtcactccttccattgataaaatattgcacatctcttcgacctcagcaacagccttcttcagatgatctttgggaaaataaagacctccatttttttggtaaaatggccagtacttttcatatgtattggccttcacctccactgtgaatggtggcacacaggcattttcagctctgcccactatcacttcctctaaagggtcccattcgttgtaagaggagacagggcagtccttgggcagaggatgggtggccttgtcttcagctgcacaggaatttcgggaggaagctgtagctgcctgggtgctctggaaagttcgctgcacccatcctgttaaggatcctccaagccgagagccgatgtagtgcaccgcctcggcacctcggctgcctccgcgcagacaccgcacccgtagcatcgccccgtctctgctgcttccgcgtgcactcgtgccggtcggtgc

SEQ ID NO: 440634 - DNA, 913 bp, Homo Sapiens
  misc_feature (221)..(221): n is a, c, g, or t
gttccctaagggccccaaaggggccttttgtgtgaggcggcccacatacccgggggttgaggtgccccaaagggtggaagggcaaggtctgccccccctgtcccccaagggggctgtgttcttgtcagggccttcctccaagtcaatggttgaaagggggggcctctgactccctgtgttcaccctcaaaagcccattgtccaggctaaaggtgaaggctntggcaacaacttcttctaaatacttagcttttgggcaaagccagtctaaaggaggagaagcgctctcagccagcagggggagtgatgattatcatttcaggtagcaaggatatgtatttactatgtgggggaaataatttgcaactttaatttgtttccaaagcattttgattggcttccttttcctttaaccaaaaaaattgtttaaatgtttaagggtcatgtggaacagctgagcttctggcaggaccacagaactgtcctctgaagtctgagggctgggcaagtgccacaggacagtccctgggctgcaggactgtcagtgcttgttgtgtgaggaaatgaggcccttcaaaaacccagtcatcttgacagagggcacactcccaaggaaggcctgactggggaatcatacagcctctcctccaggcctctgggctcactgaggtgcccccagaaccctgattgccctcccctctttcccttttctcattcatcacacagtagaagcactcactagctaacagctcagctggggcagcagcctccatggaggcctgcaagtgatgctcccagtcctggttcccgctcaggagggaggccccaccacgtgcatcactgcctcagctctgcaaagtcaccagaggcttcttcctgatttttgtgaaagatttatataggcaataatcgaa

SEQ ID NO: 440635 - DNA, 609 bp, Homo Sapiens
  misc_feature (358)..(358): n is a, c, g, or t
aggcattccttctttataaaattaagtgaatattattctggaagcaaatatctcctaattcttcatcagcaaaatcatcctcatcgatccttttcttggctgcagtttttggtcgttctatttgagggccaagtgggtccacataggaggcatctatttctttgttactgctactttcataaggttcattcgccccaggtaaagctctgagtctggcacttagtcgttcacctttactactggcactatagttctggccactatcaccgctagcactcgcttctcttttgccacgggagcccccactgccatctctgcctgactttatgcgactgttcccttatttcctttcattttnttccaacctcttcagttttctggcatattcttgagccattttttaatccaagatctgtgcatagacgaactaagaaacgcagacattgcgacatttgtctggaaattttctgtgagtatctttgtaagtatctaatgctttttggtagttaccactttttctgaaacaactaggtaccatcagctgttatttcacttgtgtaggctgtataagagaagctctttcaaagtactgaatagctttttcccaaa

SEQ ID NO: 440636 - DNA, 1190 bp, Homo Sapiens
  misc_feature (61)..(70): n is a, c, g, or t
tatatatttggtggcttatcttaaacctttttggagacaggtaggatatacattattcagnnnnnnnnnngtaaaagaaatatccctagagcaatgtttttcaaactttattgacttgagctcactcaggcagtttaaaagacacccgtatacatttctgcatggaaaaaattaacttttgttttaacaaaaagagagggacaaaataatgtaaaatatactaaagtgtgtagacatattcagtacactaaagagctttattttcccgtaacatcagtggtaggggaaatggtaacggttttggataagaaccttagagaagacttactattttgggtcagttggccaatcttaaaatgtggggattttaaagaccatcttgttctgatttattcccagagacattatcagtaaactaaaagacaaactatattcaaaaacgaaatggtcagtgtgtttatcagtggactactctcattaaaagtgaggcttacataatagaaaaaatatcactctaggaattctaaggggaagaaaggaaaactgtggggctagaggagtacttttagaaaatatcacagaaatttctggttaaaaagtactactaacatttcctacttaatgttagtgttcagttttatctgaaaatcctcagtgatacatatttacatttctttcctaaggcagccattgcctatttgggcaattatacgagtcagggtgatctcttactttctcttaagttcttccataaccttgaaacctataagtaagcacacatttgaaagaatacatatacagactactcttaagtgatgttttatctatattatagattcccacaagatatttcttttaaatttcagaaaacaagaattatatccctaagaagctggcttccaaattaaacaacctgcttgtttcttggcaaataagtatgctttaagatgcataatgtagttttatgtttttctcacatattaacaaatgcatttttattttcgtgttttcagatagtgggcagaactatagtgccagtagtaaaggtgaacgactaagtgccagactcagaagctttacttgggacaaatggaaccttatgaaagtagcagtaacaaagaaataaggcaagtactctccaacccagttcctccaggcatagcaaggtctggagaaagaatggtgggaag

SEQ ID NO: 440637 - DNA, 1025 bp, Homo Sapiens
  misc_feature (11)..(11): n is a, c, g, or t
  misc_feature (24)..(24): n is a, c, g, or t
  misc_feature (26)..(26): n is a, c, g, or t
  misc_feature (28)..(28): n is a, c, g, or t
  misc_feature (39)..(40): n is a, c, g, or t
  misc_feature (43)..(43): n is a, c, g, or t
  misc_feature (47)..(47): n is a, c, g, or t
  misc_feature (49)..(50): n is a, c, g, or t
  misc_feature (62)..(62): n is a, c, g, or t
  misc_feature (65)..(65): n is a, c, g, or t
  misc_feature (486)..(540): n is a, c, g, or t
tttcttatatnaatctattactanancncgccttcattnnttnacananntgccagacactntanagtgaaaatggattaataaaaagctagtgtactgatgatatactcattgcttactaattgtcaaactagaatattctttaactgtcacattttgaatttgacaactagtactgatgagagggagagtccaacttgggaagactgtggagggtgtcaagagtgaatttcagttatatacaaacttggcgtggattaaagctgtggaaagttatgatgaacacccagctaggtgtccagcctgggaaaggcataacagcacatgcagtggttagcgggtttgcggcatcagctcacctgcacactgctaagttccttcccctgagggcttcttcaggcgggcaatggtgaatcttttctttggcgagttggggtcctctccatcccagagagactcaagcatggttcttcagaaaggcattannnnnnnnnnnnnnnnnnnnnnnnnnnnnnnnnnnnnnnnnnnnnnnnnnnnnnngccttttctgtgctgcctcctgttatcgccaaggcacgttttttacccagaggagttttggcataccagttcttaaagctctcttcttcctctttgtacactggattcatgctggttatcgccgtaataaactcaactgcagtgagaggtttatgaatttgccgccggattctctgatctgtgagcacgcctttaaccacttcgactatatgtccttgggtgaagccgtcagtgaccttcgccaggcagctgacattcaaggcactggtgaggactcctccattgcgttcaatgatttgcttccacagaacgtatctggaagcatagtctggtctgggcaccaaaataattttctggtaaactttgcagaaagattggagttcagcatcgaagggacgccgtgtggtcccacaatcagaatccggtcatctgggttcaggagtttcaggatttggggaggtgtttttcaggcgtttaggtcattc

SEQ ID NO: 440638 - DNA, 1697 bp, Homo Sapiens
  misc_feature (1602)..(1638): n is a, c, g, or t
gggttcaaatccactttatttaaattatttggtaattttagcagtacaaaatctttgactatgaccatgggacacagacatgagtttatgttttggtttgttgtggtctggggatcatgtacttttctaaatcctctgcacttcctttcattaacaaatggcagagtgccgtaagttcctctattattcatagaaaagaaatttgtaaggtaagactgaaaaaataaaatctacagattcacaaaattatcttccaatattaagaacatacaaagtatactaaagacatctacatttagtcctccaggtaacaaagcaaacatttgacgtttgacgtttctgtttttacttcttgctaattacagttcagagaccaaagtatttccaaaagctatgaaaaccctcactgacgctcctagtatggatttaatggaattagaggatagaactatgagagcacttgaaaacttgcctttaaaaatcacaagactttcttttcctcagtgggacttttcttctgcagtagctgagggcactatttgcttacttaatgccttataattagcatctgccttacagtagatctaagtattggcttatttaagtatattactggatagcacgtggtaggtagcctttttgtccaaggcaaacatacagcgaaccttaaagtaaaacctcagagggtttggtgccccttagttgttctccagcgagcccgaagttgcatttggagttctgattccaaatttactatggaatgtcattgtgactttgtttttatgtcctgttctttgatcaaaggcatggcatgtatcaaaaggtggactgtacaagtgaaggctcacagcaggttccgtatggctgatgttctctactcgatgtaagccaatggaatcattgatgtaggcacactggttttccctcaagactctttcagacttcttgaccatctcattggattttttgtcaggccaggcaaataatgtctcctttagatttccctgtagcatcttcagaaagcagtgggagttggtatgatcatgaatactgctgccatgtccttcaccccaacagagaatcatcagattaaattttccatttccttgatccacaagatttcgggtatacctgtactggtcgaacttggcgtacattgcccactcggtggggtcgctctcgtaggcttccatgatggcctgcacctcctctacattgacctcatcgccggcaaagagctggtgcaggatgcggatcagatcagccagggtccgtggcttcagcacttcggtctgttccatctcgtggggagctggctgcgcgcgcgtctcactgctgggctgcggtggaggagctgagcgagccaaggagctgggggcgagggagcctaacagcccgctagaccgctaagcagacacacacgcacaaacccagcattagagtgccgaaacgtaaggatgtcgtcgcagagacagcaagagacccacccccaggcccctggcagcgcagtggatccgggatcgctggagacgcggtgcacacacaaatcaggttcagatctccgctctcgacgaattcgagctcggccgatttggcctgatnnnnnnnnnnnnnnnnnnnnnnnnnnnnnnnnnnnnncggccgccacccggataacgctccatctcgcccaaagtagcgggttccgagttattcac

SEQ ID NO: 440639 - DNA, 1103 bp, Homo Sapiens
  misc_feature (5)..(5): n is a, c, g, or t
  misc_feature (10)..(10): n is a, c, g, or t
  misc_feature (16)..(16): n is a, c, g, or t
  misc_feature (19)..(19): n is a, c, g, or t
  misc_feature (21)..(21): n is a, c, g, or t
  misc_feature (40)..(40): n is a, c, g, or t
  misc_feature (46)..(46): n is a, c, g, or t
  misc_feature (50)..(50): n is a, c, g, or t
  misc_feature (52)..(52): n is a, c, g, or t
  misc_feature (59)..(59): n is a, c, g, or t
  misc_feature (70)..(70): n is a, c, g, or t
  misc_feature (81)..(82): n is a, c, g, or t
  misc_feature (86)..(86): n is a, c, g, or t
  misc_feature (91)..(91): n is a, c, g, or t
  misc_feature (109)..(109): n is a, c, g, or t
  misc_feature (116)..(116): n is a, c, g, or t
  misc_feature (127)..(127): n is a, c, g, or t
  misc_feature (137)..(137): n is a, c, g, or t
  misc_feature (139)..(139): n is a, c, g, or t
  misc_feature (144)..(144): n is a, c, g, or t
  misc_feature (146)..(146): n is a, c, g, or t
  misc_feature (150)..(150): n is a, c, g, or t
  misc_feature (152)..(152): n is a, c, g, or t
  misc_feature (154)..(154): n is a, c, g, or t
  misc_feature (176)..(176): n is a, c, g, or t
  misc_feature (260)..(260): n is a, c, g, or t
  misc_feature (1062)..(1062): n is a, c, g, or t
accanagctnagcctntgnanaccgagacactcgtggtgncccacncacncnaagccgntctcctccccntaagtcccctnnaggnagcangttccacatctcctcccncgggggnccaagtcggtntgtcagccangngcccngntcancnanaaacaccatttctcgagcagcntgtgcatgtttacgccccgcttgtaccgcaagcgctgccttctgtgtctcctgctgagcttccttagccagccgccgagcctcnatagtagggccgggctttctcgatgcagctccccaagtggggaaccctgtgtattcagtttcctcgccgactcctgtaggatcctccgataggtggtcctggcctcatccagctgtagttccacctggttgatctcctcgctggcctggttcaggtgctccaactcctcctgtattctaggatccagttcttcctcctctcttggggacaatttggcctcactgctgctgcttccacctcctccaggctcttctgcgactgggctcctagggacttcatcctctacaacttcaggccgcagctccccctgtggggtctcccgccctcctggaacctgtctgagctcagccatgctgacagggggagggcagagccctatgcacaagagaggactgacatgctgggaccagggccccagcttggggcttcctgggctctagatggccaggagaagagtttctcttctcaaaaggcagaaaaggtgggcacaggaagaacctcacactaggttagaggttgagattcaagttgtcagtggggttcctagagctgaagccttgtctgtgcaaaagttcttcccttcccgccacagggagtccactgtgacaaacccggagcaacagctccaaggcagggggcaaagggggcttggatcctggaccgaggcctgctaggaggagcaccattcgggagggtggaggcaggcgcctccaggctgtggtggcagctggagagagaaggctgggcccgagctgaggctgtaggatgagcgtctctggggagctcagtttaccttcccgtnccgcggagcttctatgctgcaaacaatctcccccccatccc

SEQ ID NO: 440640 - DNA, 1264 bp, Homo Sapiens
  misc_feature (265)..(281): n is a, c, g, or t
  misc_feature (321)..(334): n is a, c, g, or t
  misc_feature (357)..(468): n is a, c, g, or t
  misc_feature (485)..(609): n is a, c, g, or t
tgcttactggttcaaatataagatgcagcccaggaaaagccagtggaagaaatgcatagaacaaagaaaagagatgaggaaagatgaaacacatagataattatgaaaaatatttgtgattaataaaattctccttcctttgtgtgcttcaggaacagtttatggaaagaaacactcttcccgttatgattaagatgatgctcccttttcttgcctatcacacagccagacatacactctgcacattttctcctttttctcattnnnnnnnnnnnnnnnnnccagctgaatttgccttcagcagtcaaaatcaattatgannnnnnnnnnnnnngagatggagtgtcactctgtcannnnnnnnnnnnnnnnnnnnnnnnnnnnnnnnnnnnnnnnnnnnnnnnnnnnnnnnnnnnnnnnnnnnnnnnnnnnnnnnnnnnnnnnnnnnnnnnnnnnnnnnnnnnnnnnacaacgcccagctaatnnnnnnnnnnnnnnnnnnnnnnnnnnnnnnnnnnnnnnnnnnnnnnnnnnnnnnnnnnnnnnnnnnnnnnnnnnnnnnnnnnnnnnnnnnnnnnnnnnnnnnnnnnnnnnnnnnnnnnnnnnnnncagcctaaaataaaatatttcttaatcaaattttacttaagtttatcttctctcaggctcctgaaattcaagctaccctcagtctgagtcaacatacaaccccattttatgtccctcctaagaacatgctgatttcagggtaagccattctctgatctaaaatctgactttttcaccctccatttgctgttcctctcccacctcctttctaatcttgtttgctcttccctagaaaagaaagcccttttctgcctaattttgcaagccataaagatattatagttatttggtgcttccttttgttgcaatacttttttggaattggttttttacctgcctcttgagaatatgcctttaagggtgtcagtaccacatgtttacctgcaagcatgacatcaactggcagaaaagacagaaaaagtccatccatttctgtcccttaaagcagaaggtatttgggaacaatgtgctgctccataaagataaaaatatgtttcttcttccctgtcctcaggtgccctcccctgccacagacaccagcaatttctgctacagaacctggttctgcatcctttggtgttacagcaagtggagtacaatcagagaagagatcccctaatagaggctgctctagcactttctaagtattaagcct

SEQ ID NO: 440641 - DNA, 861 bp, Homo Sapiens
  misc_feature (809)..(809): n is a, c, g, or t
agttcgacggagactctcgctctggagattttatttttaattttgggcagaagcaggttgactctagggatctccagagcgagaggattaacttcatgtgctcccgtgtttgaaggaggacaataaaagtcccaccgggcaaaattttcgtaacctctgcggtagaaaacgtcaggtatcttttaaatcgcgatagttttcgctgtgtcaggctttcttcggtggagctccgagggtagctaggttctaggtttgaaacagatgcagaatccaaaggcagcgcacaaaacagccaccgattttgctatgtctctgagctgcgagataatcagacagctaaatggagtctgagcagctgttccatagaggctactatagaaacagctacaacagtataacaagtgcaagtagtgatgaggaacttttagatggagcaggtgttattatggactttcaaacatctgaagatgacaatttattagatggtgacactgcagttggaactcattatacaatgacaaatggaggcagcattaacagttctacacatttactggatcttttggatgaaccaattccaggtgttggtacatatgatgatttccatactattgattgggtgcgagaaaaatgtaaagacagagaaaggcatagacggatcaacagcaaaaagaaagaatcagcatgggaaatgacaaaaagtttgtatgatgcgtggtcaggatggctagtagtaacactaacaggattggcatcaggggcactggccggattaatagacattgctgccgattggatgactgacctanaggagggcatttgccttagtgcgttgtggtacaaccacgaacagtgctgttg

SEQ ID NO: 440642 - DNA, 399 bp, Homo Sapiens
gcttaagctcagaaaatgtgtttgattttagaaatcaattaattattagaatgcagttaaagtgacaatcctaaaattaactaaagtcatttagagaagcactatgttagtggccaaccattgaactttgcattaatgattggttcttgttcttttaaccgaaatatcttcaactattttttccctccttttagattactcgagtggatggaaggaagttgcttctttatagggagcagcttgtaaagattctccaaagaaccctacatttaacctgtaagcagggttacactctgtcttgtaaccttttgcatcatcttctccgttctaccacacttatctaccctacagaatactgcagtgtgccaggtggctttgacaagcctccttctgaatact

SEQ ID NO: 440643 - DNA, 2346 bp, Homo Sapiens
  misc_feature (181)..(181): n is a, c, g, or t
  misc_feature (471)..(501): n is a, c, g, or t
  misc_feature (1353)..(1353): n is a, c, g, or t
  misc_feature (2276)..(2276): n is a, c, g, or t
atacctacaaaaaaactttattgttttaacaaagtccactgaacaatgcttttcatcaaatcttactatttggagaacaatatatttctttatatattacactgcagcctaactgtgcttatgtcatcacattaaaactatattttaaaagtaaacacataacaaaaagaagcaaaatgtntaaaggaaaatgggatttaaaaatcttgatttattctgctgtagttgattgtttatccaaaattgattgtcttaaacaattattgttgcagtttataaaactgacagatgctcatttgttactaaagaatgaaagtaaagctcttcatcgccttcttggtcagctttgctataaccacagtgccttctcccaatgatgaagccaaagaccatgaacaccaaaatgatggtcccagctacagcaaccacagcaatgataataacaggattctgttcactggagacagctgnnnnnnnnnnnnnnnnnnnnnnnnnnnnnnntagtgtagcaacatcaagtctgggactgtaatttccataaccagcagcagtaaaagcccgaatctggaaaacatacactgttcctggtttccgattattaatggaggctgaagtagacttggtttttactgttgagtaggtccgttccctttgatctttctcgtaatacttgatttcatattctgtgatgactccattgggatgctctggttcctgccaggaaagctcgacactccgctgcagtactctctccttcattactccgctcacttgcgagggagctgcttgaccagtggtgatactgacagcagcaaagagcctctgggatcggcttaagtcagaaactccatttacagcttcaacttcaaaagtataattagcgtgggctagcaggtccatgacagtgacatagttatcctctaatccagtctgctggggcatgtatccaatgttactcccacagggaacacattcgccctgctcccaactgcaccgcttacacaatattctgtaggtcacatcgtttcttcccccattgtctgcaggaggactccattccaaacttactgtggtttggttgatgttgaaaatgaggttctgtggtgcagatggaggccttgtgcatgcaacgtatggtgggtcagatggagccctgtaatacccatcttcacattcacatctggaggagccttctttatcagaaaaactgtgagttggacaacgagagcactgaagatcttgagaggaagacttgtagaacccacggccacagggttcacaagtgtctcctttttgctggtaagcctgctttgccagatacattttcccaatgggcactaaccattctccttnctgcactgcagtgcatccctgggggcgttttccgcttcttcctctgcactgctgacacatgtccctcgaacctcgactaaagaggaaaattctgaaccagtcactgtatctggaaagatagctaagttctcaataatggaccagcacttcttgtagtacactttgacagaaaccaaagctatgcaagcccctacatcctgaaaggcaagatagaatcccttttttgacaaaggtccaatctctctcacctcagtgttaagcttcatctttctttcaccaaggtcaccttgggtaaaactttcatctgcagcaatggtgtctatttttacatagaggttttctcttatattcctgccagtgtcatagtctgtttcataatagtacaaattaaatgtttccttgcaagttcccagtactccaggaagactgttacaatccctcagggtgaatttcaattctacaaaaatcctttgtgcattgcctttggaaatccagttagtccgcagccagttgttttggttgggctccatgacttggcacacctggtatgttcgtatcggggtatagttctcatccaaaccactaatttcttcccacccattgggtggagaggaaatccactccaactctgtttgttgtgctttagaatccagcagtagtacttccttcgcagcctgcgcctcccctgtgtgtgcaaagcggagcagccagatgtagcataaaataatccatgaagggtaccgagtttgaaaaaccatggtgcatgagcaggttttattttaggtttcagttatcttgagtcgtggatttttaaatgctgtttgttccgaagtagcttttgttttattgtgctccttgcatcgattccccttctcggtccccgatcggctgctccacgtttagctttttttaatttccccccnactcctgttcgctcgcaccgtgtttgctgcctgcaagatcccgggaattccggaccggtaccagcctgct

SEQ ID NO: 440644 - DNA, 837 bp, Homo Sapiens
agattttcttcttcgccacttcatccactccatccacctcatcgccttttctctttccttcactcttgactcctgggagctgcttcttcagggcttctttatcctctgtagcaaggaggctgaagcccttgagctgactcgcactgtactcgggccggaaacccagctcctccctgttcttgacaaagcagcctggatggtaccagcggtcaatcatgcctagctgtggcttctccgggtccaccatcttcttggacaggcgcacctggcccttttctatcttctccatacaccccttgcacgtacttctgttggacttggcatactctgctgcaaagtcacccagagtcttctctgccttgctaccaattccatcctggcctttgcctgtcactcctccagcttccgctgtcttcttgactttctgctggtcatcccaccgaagctcagagaacccatccacctcaacgtcagggtgccggatggagtggcccaccttccagaagcaggagaagtggtaccagtgtgggacttttccatcaaacatgggcgactgcaccatgatggccatccggagcgagtccttggggatgctctcgctgcatttcttgcaagaggcgcgcccgctcttggcgtactcgactcgatagagcttatccgaagactccgccatcctcccctagctgccgccaaagctccggaagcccgacgccacgacctagaaacacgctgccgcctcgccgcctcgcgtgcgctcacccagccgcaggcgcctgagcggccagagccgccaccgaacacgccgcaccggccaccgccgttccgtgatagattgct

SEQ ID NO: 440645 - DNA, 1165 bp, Homo Sapiens
  misc_feature (170)..(317): n is a, c, g, or t
  misc_feature (365)..(448): n is a, c, g, or t
  misc_feature (528)..(573): n is a, c, g, or t
  misc_feature (598)..(606): n is a, c, g, or t
  misc_feature (670)..(839): n is a, c, g, or t
ttaaaaattttgcggatcctcattccccctaaatttataacaccaagtatcccccaacgccctgggcaaattcgtcaggactcctgagttttttcacggggctgtcctcacccttggaaaataaacttcctggttaactgagacctttctcaaattttcgggctccacannnnnnnnnnnnnnnnnnnnnnnnnnnnnnnnnnnnnnnnnnnnnnnnnnnnnnnnnnnnnnnnnnnnnnnnnnnnnnnnnnnnnnnnnnnnnnnnnnnnnnnnnnnnnnnnnnnnnnnnnnnnnnnnnnnnnnnnnnnnnnnnnnnnagctagagtgcagtggcttactgtacttacaatcatggcttactgcannnnnnnnnnnnnnnnnnnnnnnnnnnnnnnnnnnnnnnnnnnnnnnnnnnnnnnnnnnnnnnnnnnnnnnnnnnnnnnnnnnntaatttttaagaatgttttgaagagatgaggtctccctatgttgcccaggctggtctggaactcccgggctcaagccatnnnnnnnnnnnnnnnnnnnnnnnnnnnnnnnnnnnnnnnnnnnnnntacttttagtttttttaaggtcagnnnnnnnnncaattgtacaaacacaaaacaattttacaatctattattcctttcaacattcccccaccccggnnnnnnnnnnnnnnnnnnnnnnnnnnnnnnnnnnnnnnnnnnnnnnnnnnnnnnnnnnnnnnnnnnnnnnnnnnnnnnnnnnnnnnnnnnnnnnnnnnnnnnnnnnnnnnnnnnnnnnnnnnnnnnnnnnnnnnnnnnnnnnnnnnnnnnnnnnnnnnnnnnnnnnnnnnggccttgagtgattaaaaagaaaatcttttcctgtgtaggcacgatcgcaatatggatgaaccacagcctttgttcccgtttgcacaaggcttctcccccgtctttgtgtctccggagccttgcacgtggtaggtgctcggcattcgttgactggatcaagtagggcgagggagcgcggccggttccggtttgaaactgctctggacgccgaattagtgtttggcagcgcctggtggtcttcaatcccagcccctccggcccgccgcgccccccgggaccaatacaagcggaggcgagcgcgggcgcgcggggcatgccggatccc

SEQ ID NO: 440646 - DNA, 763 bp, Homo Sapiens
tgggaatccatgatggcgttgaaacacgttgaacttgacctggtcagagacctggtcctgccccttcatggggtctgtcctggtgtgccttcacaaatctgctcatagttcaactttcaatgatctttagggcggtgacatctttgcgtaacgtggacacctcctcctcctgctttttcttctccttgtgcaaaaactgaatgtagtcaatggtcttttgtagaacgatggctttgctgagcttttgggagccaatggagaagtcctgctgctggcaagtggggacgatggtctgaaggtcatcatagcctctcttgatggcgtccctcctcttctgctcagcctgagtgtgtgcgcgccgccgccggtctttgtaggactccttgtaggcctcctggtggtaatcactgtcctcatcatctgtgttggggacagaagaggcactggtggaaccgatgctattagctctggacactacactccccttgcgggtgctttctacaaaaagcccggggtccaggctgttgtcgctgtaggcatactccaccttggcacacgcggggtgagagctgtcttctctgcagccccggggcacggagagcgtgggggactttggggacaggagggaagcccctcgtcttccggcccccctacgtgcacgagcccgacccgccctcccctcgccggcgtgcgcgcccacggggcttgccttgacccaagggtcctcgggagaggcgcccggctccgtcatcttgtacccacc

SEQ ID NO: 440647 - DNA, 1494 bp, Homo Sapiens
  misc_feature (13)..(13): n is a, c, g, or t
  misc_feature (172)..(172): n is a, c, g, or t
ctctgccatgcancatcatagcctagtgggaaccgggagggcttcccttaccacccagagcagaggaggaaggtgatggaatatggggtgaggggaggaacctggtggcccctccctgagatggccagaaagcccttggcctcacctgggactgaccaggcagccctagtcntaggcacaaggtgccctttcacccttcatggctgtgggaatatttcctcttactctttttctcccatacagctacggccaaaatgcccaaacttgggccaaatgttgcccaaacttgggccaaaaatgttgccccaagaggccaaaatcagagggaaaacagtttccaaatctatgtagatcatgagcagaaattctgaggcttgaataaagggctgagagggcaggagctctttggggtgtccagagcagacgcccattcccaaggacttccatggagtggggggaaggctgggtaggtttgagttttatcgtcaatataataaattaatcagaagctttcacaaaacaaacaccgcggctccgctgaagataaaatggggctgggaaaaaccaaacaccaagtagaaaccagctgaccagtgtgaggtgttgtagtccagtctcccgggcccagcagttcagtggccacgtagagattcaagggcctcttgttggctgttctccaggtttccaagaaccggtcagtaaagctggtttttcaattggtgcaggacgccaatcacaatctcccgcagggtctgaggcttacagtgctcctcgatccagctgaagacacacgctgacagctcctggaagctggccactgagatggaggcattgaaggactggaacagggaatccatgatgccttgaaacacgttgaacttgacctggtcagagacctggtcctccccttcatgggggttgtcctggtgtgccttcacaatctgctcatagttcactttcatgatctttagggcggtgacatccttgcgtaacgtggacacctcctcctcctgctttttcttctccttgtgcaaaaactgaatgtagtcaatggtcttttgtagaacgatggctttgctgagcttttgggagccaatggagaagtcctgctgctggcaagtggggacgatggtctgaaggtcatcatagcctctcttgatggcgtccctcctcttctgctcagcctgagtgtgtgcgcgccgccgccggtctttgtaggactccttgtaggcctcctggtggtaatcactgtcctcatcatctgtgttggggacagaagaggcactggtggaaccgatgctattagctctggacactacactccccttgcgggtgctttctacaaaaagcccggggtccaggctgttgtcgctgtaggcatactccaccttgacccaagggtcctcgggagaggcgcccggctccgtcatcttgtacccaccggaccggaaacgggccagcgggcgggcccctgcggcgaggaagcgggtggcg

SEQ ID NO: 440648 - DNA, 1665 bp, Homo Sapiens
  misc_feature (18)..(18): n is a, c, g, or t
  misc_feature (49)..(49): n is a, c, g, or t
  misc_feature (62)..(62): n is a, c, g, or t
  misc_feature (71)..(71): n is a, c, g, or t
  misc_feature (95)..(95): n is a, c, g, or t
  misc_feature (128)..(128): n is a, c, g, or t
  misc_feature (133)..(133): n is a, c, g, or t
  misc_feature (153)..(153): n is a, c, g, or t
ccctcactcctgggactnccacactgcagcccacgccgctcaccctgcngccccatccttgngtgagagantggggcaccggggggtgtgcaagngtcagcctgctcattcccttctccagctcaggncaganaaacacaattcattcataangtttccattctgttataggcagagatttataaatcagcattatttttcaaagagtacaaagttaaaccattctgcttagaaaagaataaacacatccaatcatttttcctctagtttagtcaaaacagagatcaaacttctttgatagcattataatgtctacgtccagacttagtcttccgaatcaaaattttgaaatatttatttataaggtcaataactatctttgaagttaagcagtttactgagcaattaaatatttttgtccatacacattcagatttaactactactataaataaaatagtcataatttctccagtttcagtctgaacacatagcttataggaataagacacaggttctagcacagattttctaattagtggtatggccctaaacaagccaggttagatctctgccttcacccacatcaaacaggaataataatatatttccttaacctatcttctaggtaaacagatgagattatatgaaaacattttgctaaagtcgctaaacaaacataagaaaaaaatatgtaaggtttttctatcacattaactattttttaatatttgattgacatttttgtaatataaccaaaataaaaattgcatactttcaagaatgacaaaattcagtagttatgcaaggtgaattaaaatagtaaagctagtcataatatgaagtccactcatccatgttctcatttaatcactttaagaaataataattataaaaataggtaaaattccatgaaaatattcctatttgttctagttcaggaggtcttgcccacatcaatggattgtctggcatcagccactgtttcaggcactcgaacagtcatattgtccatagattttgtcaaacagatttggcagcccaaccgtgatctgtctgttagtccatatgccagatcgagcatgtcattctcctcatcagtgattgcatctaacttctcatatatgtgatcttcaaagatgaggtgacaggttgaacaagccagggttccctcacatgcaccaaagccatcaatatctagattattttcaaccacaacatctagcagagaatcaccaacttttcctttggttgttaatgtttcaccatcacggtttataaagtggactgttattttatcttctgagctgctccgggcccgcgccgacacgctcagcgaccggctcgcctccgcgctcccgcccggcccccggttcctcagcaggccgctggatccagcgcgggacccagcgtggtgcagccaccggccggccgggccgccgaggacagcagaagcggcgcgcagcagccgggcgcccccagcggcagccatcgcccgcggtcgggaactgccggaagcgacgcaggccgcgctttgaggccgcgagagactccaaagaggcgggggcggcagctgcggcgcagacgcccgagggccgcggcgaggggcgcggggctggagtggcggagagaccctgctggaagcaccgcgccgaggttccgcgt

SEQ ID NO: 440649 - DNA, 1087 bp, Homo Sapiens
  misc_feature (5)..(5): n is a, c, g, or t
  misc_feature (8)..(8): n is a, c, g, or t
  misc_feature (18)..(18): n is a, c, g, or t
  misc_feature (20)..(20): n is a, c, g, or t
  misc_feature (22)..(22): n is a, c, g, or t
  misc_feature (25)..(25): n is a, c, g, or t
  misc_feature (27)..(28): n is a, c, g, or t
  misc_feature (30)..(30): n is a, c, g, or t
  misc_feature (39)..(39): n is a, c, g, or t
  misc_feature (41)..(42): n is a, c, g, or t
  misc_feature (45)..(45): n is a, c, g, or t
  misc_feature (49)..(51): n is a, c, g, or t
  misc_feature (53)..(53): n is a, c, g, or t
  misc_feature (55)..(56): n is a, c, g, or t
  misc_feature (60)..(60): n is a, c, g, or t
  misc_feature (62)..(63): n is a, c, g, or t
  misc_feature (65)..(77): n is a, c, g, or t
  misc_feature (80)..(80): n is a, c, g, or t
  misc_feature (85)..(85): n is a, c, g, or t
  misc_feature (87)..(88): n is a, c, g, or t
  misc_feature (94)..(95): n is a, c, g, or t
  misc_feature (97)..(98): n is a, c, g, or t
  misc_feature (102)..(102): n is a, c, g, or t
  misc_feature (105)..(106): n is a, c, g, or t
  misc_feature (111)..(112): n is a, c, g, or t
  misc_feature (121)..(121): n is a, c, g, or t
  misc_feature (131)..(131): n is a, c, g, or t
  misc_feature (135)..(135): n is a, c, g, or t
  misc_feature (146)..(146): n is a, c, g, or t
  misc_feature (154)..(154): n is a, c, g, or t
  misc_feature (173)..(173): n is a, c, g, or t
  misc_feature (184)..(184): n is a, c, g, or t
  misc_feature (207)..(207): n is a, c, g, or t
  misc_feature (212)..(212): n is a, c, g, or t
  misc_feature (442)..(442): n is a, c, g, or t
ccccntanaaaatcccgntnanggngnntnaaaaaaaancnnaancctnnntntnnaaananncnnnnnnnnnnnnnggnaaaantnnggatgnngnngganaanngtggnnggcaggtgntcccaaaagnacangcaacaaacgnaaaaatanaaaaacaggatgtcaaacnaagagaccctngcacagccagagaaacaatcagnggagngaagagatgacccacagagtaggagaaaagattcatggaggcatacctctgacaagggttcacatccaggatacgtaagaaacccagctccataggcagaaaaccaggtgactcggttaaaaaacgggcaaaggagcccaagtagacatttctcaaagggagacacacaaatggccaccaggtatgtggaaaacatgctcaccatctcgaatcatcagggaaatgctcanttaagccacagtgagacatggcctcacacctgttagaatggctattgtcaaaataacagagctgaccagtgctgtgaaaggtggctggtctctgagcccacccagccctgggtgatgactgatgcttggacctgggaagtagtgagaggggccgggagggagtgagaggggtgaggaggaagccctcctctgcgccgggcacctcacgcatttgtcacgtcacgcagaccctggaggaggatgcccgtggcccacaaggctggctgccttttggcccctgccctctccagctataggtgcccccgaccctgcatccctcaccctacaacccagcaccacctcctgggatatccctccctcaggtagggggtctgattctcctgtcctgccctgtctcattctcttcttggtcttccgcctccaggaggccttccctgaccaccactgggggatggagcctcctggagcacccctgcatttccccaacttggcacactccgtagcctgtgtcttttacattcccgactaaaacaagagctcatgaaggccagagccatgtctcggtcacctttgtgtcccttccatggttcttggtgaaagttcccttgtgggtgattattcccgtggtacaaaggaggacaccga

SEQ ID NO: 440650 - DNA, 1110 bp, Homo Sapiens
  misc_feature (161)..(256): n is a, c, g, or t
tcttgggccacaatgcattatacgcgcagaacaggtattgaacatttgatcaagccacagacctcgcaaagataaattgaataacaaggcccgggcaataagcaatcaggtgaattttagtataataatagaaccgggttttcaacatttaaacaaagctnnnnnnnnnnnnnnnnnnnnnnnnnnnnnnnnnnnnnnnnnnnnnnnnnnnnnnnnnnnnnnnnnnnnnnnnnnnnnnnnnnnnnnnnnnnnnnnncttaaaccagtactttaacgttttactgtcctagaaatgccctgtgttttctcatgctatttcataagagaatatgctgcttttcattgatgtcaagaaggcaacagaaatgctcctggggaagatctccttacaaataggtttcatctcatcagtaacaaaaattagaaaagcctttggtcagcccatggaggtgagttactctgaacctatgaaaatgtctctttataagagcaaattgcatcagatgacaaaacaggaatcaatttctcttagaaaaagttagtaatgtgttaagactactcttttaggttttattcaggcaaatgctcactgaacctaaaatactttaggggactctgatgggaggttcctttgaacgctggttggttttgtccttgtttttaaagagaactcaacacagcaactgtgtgcttatgaaagttctacaaacgtgttcacttttctttccatctatttgtataatacgtacaatccttggggaagagcatgtacaaaaatgtcttctaagtaatccctttacaaggtaaacagactgctacgggttcaacttatgttgaaaagtaaaattacagcatcacataggtattattacattactctgaagaatgcataaactgccagatcacattttctaacctgaaaattaaacttctttcactgatagtcacgatcagtgccagctttcaggatgctgtgaaactgccggtggccacagctacttagctgtgatgccacgggggattactgacttgctgcttttctaatatagaaacaaactcaacatagaatcaaagtgctgtcttgtgaatctctgctcatttcctggacag

SEQ ID NO: 440651 - DNA, 1348 bp, Homo Sapiens
  misc_feature (405)..(460): n is a, c, g, or t
  misc_feature (958)..(979): n is a, c, g, or t
  misc_feature (1046)..(1055): n is a, c, g, or t
ctttggggaatttattgagaatgtgggaaaacatttgttctctaaaagaaagttgcagatcatactgcaaagtgacagctgagcaaaggctcccccttgagaagggcatgtgctactcagctcatggcatctgggctctcattgataatggggggtaggttggaagattcttggaagccacagcaagacacaccacacctgggctctcataatcattttgccaccctagagagctccagacacacgattggccctctaacagaggaacattttaatacaagtgtgtactgctcaaggactcatttgctaagttaggggcagactccttggtaccaccaaatcctatttttcctaaatcggtcaatgtattgtcatatcccctgtgtgcagttttaactctgtgannnnnnnnnnnnnnnnnnnnnnnnnnnnnnnnnnnnnnnnnnnnnnnnnnnnnnnnccatcttctccaaagttagcttcctcagggtattgcaagaattaaatagcaaaatgcacataagtgtctggcgtagagtaagtgatagcttcctttcttttcctcattttaatcaattacccagttggtggatgtgataccaaatgaacttcctgaagatcagagctgtgtgttagtgtagggctcagatcctctttttgtattcggtgaacactatgttctgtctaacaggcacctgctctaggttattagggccattaaaggcatgttatattttcaaagagtatacaatttagtaagagacacagaaaaaactgatgttcgattgttaggttggtttaagttgttgatacatacttggaatgactaagatcattgtttaacattggtgagtgcacactgcaatgggaactttgtaatgctggagaaaccctcaactgttaaacatatacttaaaaaaatcagggtgtaaggatccctggctgaatagtgttgaannnnnnnnnnnnnnnnnnnnnngacgaagaagtttaacacaaaattattaagcaaagccattcaagaagtacagcaagttttctaaagnnnnnnnnnnaataaaagcgaatatcttctcctataaactagcttgctgacccagaaattgaactgtgattaaaaaatagggcagtgccccctcaaaatgagagttgtcttatgttatgggacgcttttttggtgaatactttatatttagtaatctcgtttttaaggttgtaggctctgtatggtaaaattaatacagtgaaaaattacagtctgaatatagagaagatgtgagtgccaaagtggtaaataaaaccctgattggtttttagtgaagggtctttgtattctcagtggacgtgg

SEQ ID NO: 440652 - DNA, 1297 bp, Homo Sapiens
  misc_feature (57)..(87): n is a, c, g, or t
  misc_feature (1237)..(1237): n is a, c, g, or t
tgtcttgaaggtggtctgagctttctcactccaagccagtcgtgtgggaagggacannnnnnnnnnnnnnnnnnnnnnnnnnnnnnncctctcagggcttgttctagtggctccgaaagccagtgggagcaagcgcgctttgcaaagccttgggcgccgggccttggcgcgcctttgccggatccttccggccacgggcggggcgagcccagaggagaagagccgaggggcggtgcccgggccagggggcggaggcaggcggctctggctccctctcgggacgctctttccttcttcctcttgttcctcctcctgcctctcttcgcttcgcctgcaaacgcggtgggggctgctcggcggtcaggagcagcaagagacagagcgacatgagagattggaccgcgggctgcactggagaatttactggtaggataattcatccctaaagagattgaagtgagcttcagaatggcaaaagaggagccccagagtatctcaagggacttgcaggaactgcagaagaagctgtctctgctgatagactccttccagaataactcaaaggtggtggcctttatgaagtctccagtgggtcagtacttggacagccatccgtttctggccttcaccttgctggtgttcattgtcatgtcggccgttcctgttggattcttcctgctcatcgtggtgcttaccaccctggctgctctgctgggggtcataatattggacaggattggtcatctctgtgggtggcttctcactgctctgcatcctctgtggtttgggcttcgtatcactcgccatgtcggggatgatgatagcatcttatgtagtggtctccagcctcatcagctgctggttttctcccaggccactgacacagcaaaacaccagttgtgactttctgccaagccatgaagtctgcaagacttcgaggggctttaccaggaatgagtgactgctcagaggccgggccttcttttcaaagtactgctggatcatactcacccccttgggattatgggcttagaagaagggggctgggtaggccaagcactccttggctgtgtcctcctccctttttcacttacttggtaggatcccgcagccacccaatttagggattggggttggttcctggggttggttccccatggaaaggagccagccaaagaaatgccgagggttccaacggctcgccctggccccaagtatggcaaacttgaaccctggnggggggtcctgggcctccataaatcctacccccgttgaccccccaaggcctccgggctta

SEQ ID NO: 440653 - DNA, 1182 bp, Homo Sapiens
ttttttttcattttgtttcacatgagtgaaaaaattaacagctgccctcatttctgaaaacaaaaaactataaacaatcactgttgctcccaatgggaccgttggacataagccctgaggctttggggtcaacgggctagactctagaagcccaggaccccgccaaggtcaagtctgcatacttggggcagggcgagctgttgaaccatcgcatttctctgctgcttctttacatgggaaccaacacaagaacaacacaatccctaaattggctgctgcgggatcctacaagtaagtgaaaaagcgagaggacacagccaaggagtgcttgcctacccagcccccttcttctaagccataatcccaaggggtgagtatgatccagcagtacttgaaaagaagcccggcctctgagcagtcactcattcctggtaaagcccctcgaagtctgcagacttcatggctggcagaaagtcacaactggtgttttgctgtgtcagtggcctgggagaaaaccagcagctgatgaggctggagaccactacataagatgctatcatcatccccgacatggcgagtgatacgaagcccaaaccacagaggatgcagagcagtgagaagccacccacagagatgaccaatccttccaatattatgacccccagcagagcagccagggtggtaagcaccacgatgagcaggaagaatccaacaggaacggccgacatgacaatgaacaccagcaaggtgaaggccagaaacggatggctgtccaagtactgacccactggagacttcataaaggccaccacctttgagttattctggaaggagtctatcagcagagacagcttcttctgcagttcctgcaagtcccttgagatactctggggctcctcttttgccattctgaagctcacttcaatctctttagggatgaattatcctaccagtaaattctccagtgcagcccgcggtccaatctctcatgtcgctctgtctcttgctgttaccagaggaaacaaaagccgttagtggtcttcatccatctggttcgacgagggcttctaccatcctcataccttgatggtgggcatgcagacggagggtaacctgctcctgaccgccgagcagcccccaccgcgtttgcaggcgaagcgaagagaggcaggaggaggaacc

SEQ ID NO: 440654 - DNA, 1380 bp, Homo Sapiens
  misc_feature (31)..(31): n is a, c, g, or t
  misc_feature (137)..(137): n is a, c, g, or t
  misc_feature (1074)..(1135): n is a, c, g, or t
  misc_feature (1190)..(1321): n is a, c, g, or t
tagtagtatcttagaaagaaagagaggtatncaatagaaagtaaatccagaaagcatcaatgaacaggcaatatttatttaaatctgagtagcccattcataaatgtttgtttcacttttgaactgttaatatatantatgtatatttcttataatgctttttttgtgtaaaacctgtaattcatgcctcagttgctatgttggtaatgtcttagatggaaatcttggcactcactataatattctagacattccgcttgataattattatcacacatttgagatctatttgttcctggcttccatcatgactaaccaaacaacttccttggtgcccggatttagaaatactgtgaattgttcactagttgtattggtttctgatcacagaagtttcttccagtatctggtgttatcactgctgcttagccagctccttagtagcccaacttcaggctaattattgcccaggcaataggtttgtggcttgcatttttttagatcataacattatatttttcctataaactgtcatatctgcctggatgacatatctgtttacctgtaaccaattatactttgtccagaagttacttttccttcatcaaaaggttttgtttgtttcctgcatgcctgacactgttgtcaattgtagaaatcacagtattcctttcatttcatccagccttgttaaagttttgggaggagtttgaatttacactgtgtttccagtccctaaaagatctttcacatatatcatgcagtttcctaccataagcgctaataactttaattaatctgccagtgttctttctccaactaaggccagtttagtgacaatgtaatgcatttcctcattgaacctgactatagttcaatacatactttttttaaaaattgatgaatgttgtttgcttgtttgtttgtttgtttcctcagtgcaaaacctccttatctctttcagctaaaggtggggagatttctatctaatagtaatatttgaaggcaatcaggattttgcatcagaagagaaagccattaagaatggatttttgggccgggcgctgtgctcannnnnnnnnnnnnnnnnnnnnnnnnnnnnnnnnnnnnnnnnnnnnnnnnnnnnnnnnnnnnngatggtgaaaccctgtctctacctaaaaatagcatgaaattagccgggcgtggtnnnnnnnnnnnnnnnnnnnnnnnnnnnnnnnnnnnnnnnnnnnnnnnnnnnnnnnnnnnnnnnnnnnnnnnnnnnnnnnnnnnnnnnnnnnnnnnnnnnnnnnnnnnnnnnnnnnnnnnnnnnnnnnnnnnnaatgatggcagaaggggaagcaaacatgtccttcttcacatggcagcagcaaggggaac

SEQ ID NO: 440655 - DNA, 932 bp, Homo Sapiens
  misc_feature (6)..(6): n is a, c, g, or t
  misc_feature (8)..(8): n is a, c, g, or t
  misc_feature (13)..(13): n is a, c, g, or t
  misc_feature (39)..(39): n is a, c, g, or t
  misc_feature (43)..(43): n is a, c, g, or t
  misc_feature (48)..(48): n is a, c, g, or t
  misc_feature (66)..(67): n is a, c, g, or t
  misc_feature (69)..(69): n is a, c, g, or t
  misc_feature (74)..(74): n is a, c, g, or t
  misc_feature (199)..(199): n is a, c, g, or t
  misc_feature (211)..(211): n is a, c, g, or t
  misc_feature (227)..(227): n is a, c, g, or t
  misc_feature (272)..(272): n is a, c, g, or t
  misc_feature (280)..(280): n is a, c, g, or t
  misc_feature (284)..(284): n is a, c, g, or t
  misc_feature (294)..(294): n is a, c, g, or t
  misc_feature (296)..(296): n is a, c, g, or t
  misc_feature (300)..(300): n is a, c, g, or t
  misc_feature (303)..(303): n is a, c, g, or t
  misc_feature (306)..(315): n is a, c, g, or t
  misc_feature (322)..(322): n is a, c, g, or t
  misc_feature (328)..(328): n is a, c, g, or t
  misc_feature (333)..(334): n is a, c, g, or t
  misc_feature (336)..(336): n is a, c, g, or t
  misc_feature (338)..(338): n is a, c, g, or t
  misc_feature (340)..(340): n is a, c, g, or t
  misc_feature (344)..(344): n is a, c, g, or t
  misc_feature (346)..(347): n is a, c, g, or t
  misc_feature (351)..(351): n is a, c, g, or t
  misc_feature (354)..(354): n is a, c, g, or t
  misc_feature (356)..(356): n is a, c, g, or t
ttatantnccttngcgcgagaagtcactcatatatgtancganttccnctgacataccttggctcnncncgcantcacaccatcgattctcaaacaatgcggtacgtcagatcagtgccccagagcggtgacttcccgcggtcgcgctggctgagtgcactctcagcagctaacacgcgagtaccaagctggccagacntccccagaagtnagagatgtcatgagcnacctcaccgaactgggcagagagaaggcggattgcaaggacgatnggtagagnaacnaaagagaggnantgtnaanagnnnnnnnnnnaaggcgngaaggnaaaanngnangngggnannagtncgngntaaagagacaaaaaggccagagccacgcccgagatggaagattggcagcagcgctcaaactccttgctctattctcttatcccgtacttggcagaggatcccaaaaccgctcgaacacggatgcactggtttcctgcaaagctttgtcctgggttcggtcattctccatcaattatttacttgagcttcttttccaaggaggcggactagaacagccttccgggcgtgactaacatctcctgatgcagctggctggcggctgctgggagttctctttgttcactcactttaattctcagtcgagctctacacgcggtgctccctccccacccccagcccgggcggagtcatcagatgtcgtttccacgaatagataatggttgccatgatgggacccaccgtcccacagacaaagggttcttgcgaagccacgactaatttagtgcaaaccgaaataaatatcggcccacagagatcctttacagaacggtttgccttcagtacgttttcctgttttctactgagtgccggtttctaccgtgaaaatgagtaattgctgggatccataatctttat

SEQ ID NO: 440656 - DNA, 1405 bp, Homo Sapiens
  misc_feature (48)..(134): n is a, c, g, or t
agcaacacaatgttctttaaagcactttattaatgaaagttggaaacnnnnnnnnnnnnnnnnnnnnnnnnnnnnnnnnnnnnnnnnnnnnnnnnnnnnnnnnnnnnnnnnnnnnnnnnnnnnnnnnnnnnnnncagcaagacagtcatggtattgttgagtgaaaaaaagttacaaaacagtatgtacactttgatcccattaaaaatatctataaatgcacagaaaagtctggaaggccatatacttaaataacagtggttctccctggatgatggaattatcagtgatttttctttctcactgaatcttttttctttttgccaacagggctatgacttgtattataaaaaagcattaacaattctttaaaaagtgtcctttgaagtaagaatgagagcagaacttagcaatctaagaggcacagggatgtacacatggtttctgatactgttttaacggtttgtcaaggtgttttgatgttagtcaccaattaaaaggcactgtgttgagtgaaaacgtggatggtggtagtgcttactttagactaagcaatccattcctagaaaccttccacagcaaacaagtactggcattctaagcaatacttcccactatgatatccttataccttcctacccacttgtaatacagcccagaagtttcccctacatggacagggcactgttgttggttaagggttacagaaggcagagaggatttttcaagtgatgtcagagaataggcctgaaggtgaaatgaatgttctcttagttctattgcagtggttctcaagcttagagtgcaacagtattactcaaacagcttttacaacagattgctgggctccactctcagagtttgattcagtaggtctctgaaaaggcttataaatttgcatttttctttcattcaacaaaaatttattgagttcatactatgtcctagatcttgtgctaagagttgggaatgtaactgccatcaaaagaattatagtttttatctcagggagcctacattctagagtgacagatatacactaaacaaataaattataaaaataactataattacaatgactactgctagaacacaattaagattagaagactcagtttttgtcttaaaatatttaaaaagctgtcacatggaagactgattccatgagcccttgaaaacaaaaaataagtaaaaatgaaggtagaaagttcttgaaaatagtaatcagcattttaaacaagtctccaggagatgccaatattgccggtctggggtctcacactttgccaatcactgctctactgagtagacattttttctttccttgagaccagagtcttataatatcacccaggttggagcccagtctggaagattccggaccgtaccagcggcagtggcgtga

SEQ ID NO: 440657 - DNA, 2003 bp, Homo Sapiens
tgaccaagaccatatatcactttaataacagaactccttggaccagttcacagaactgtcatttaaaaccaatgtcctagaccaactccaaccttcttgttttccagtgtacccaccccacacagggccagccacagccaggtgagaacaggaaggggagtggagagggagagtggagagggtcctgactcccataggcttcatctgggctggcccagccttgaccccatctgcccaggagcctctcagccatggagtcctctagggaggcacttagcccacctagagcacaggaaaaaggtgggacggggggcacctcccagcaccctcccaaaagactcacacaggggcagggaggggagagggcagaagggcaggcttcctgctgcttctagcagcctcttcatctccagctcctacctctctcctccccctcatccctcagcaaccacagcatgcccaaccaagtcccagcctctcttctgtcattgagtctctagtgagaaagaggactctgaaatcagggcccaagaggagagacctgttggctgggtggctggccagtgggtagtgactgttcctcacacacagtagtaggaggtccatgcgttctgtgtcggaggctactgcctctcctccattagtggagctgctggaggccccaggaagcatgaggcagtggtgtgcagtgagactggaggaaacagcaggactcagaggagggagtcctgagcagtgtcatggatccagtccagaaactcagctaccttggcgtagacacctgggtgattgggctctgcgcagccacgcccccagctgaccaccccactaggcgccatgtgtccccatctgggcacactagggggcccccgctatctccctggcatgcatcagcccttccgtccaggtagccagcgcaaagcatgcggggggtgagggctccgctgtacacgcaagagctgttgcagagctgagtgctgaacaagggcaccaccgtgtcctggagcatatccgagctgtaagtatggctagggtgggtgtggccccagccagacacccagcaccgcgagccctttggaaaatgctgttccttggccggcaggcacacagcgcccacagtgtctgagaagttgagagcggtctggagcctcaggagggcgacgtcgtagtcatgattctgggcactgtagagggggtgtgggataatcctctccaccagagccccttggtggggcctgacggcactgtggctgaccagccccgcatgaacccgccagctggacaggcgggccagcctgaaactgtgcatacaatgtgcagcagtcaccacccagcgtggcgctagcacagagcccccacacgtgtgccggaagcccagggccacgctggcctgccacggccagcgcccaggagccacagactgcccaccaactatccgggaagccaggggcctcgctccacactcagagcatctgagggaaacaacttgaccagaagtgcagttgttcctgggctgccacgcctcctccaggaagcctcccagtctaggagagagctgagcaaactcctgggaactgttgagtttgatgtcagtgaggtttactcccttgtggtgagtgagtctgagatgcccaaggctccagcagatctgcagccccagggcggggctccagccctcatggcagaccaggagccagcgtggctgatccctcacttgcgcttccagcaagaagtcttcgctgtttattctgaaagatactgttttgggaagtgcagggagcagagcttcctcagcgctggcctctgagcagctcaaagttatctcctcatcctgcaaggtcccggaaatgggctgagaggcagcaggacacagatacagcacataggggtcagtggcactgttgtaaagcctcagggtctactaggcaatgttccgctcctgttctcaggccagcattgattaaagctagcccagcaagcttggttggaagatgaggtctccc

SEQ ID NO: 440658 - DNA, 1128 bp, Homo Sapiens
ggcggggcctgaagtacccaagtccccgagggcgcgccttccccgggaatttaattcaggacaataatgttttattgagcgcctattgtgaatcagacactgagcagtaagcgtcggagaaacagtctatgcatttctgaagaccccacggtgaagggctgcaaggatgaagctgtcccagagtatctccagagtgcagatcccttggctgccaggtcatgttctctcttcctctcaactgctctcccgaccatataaggagaggcagctgctgggggcgtccccaggatctaaagatagcggcccctgcctggaactctaaatgccaccctggagcgggagccgcaatggcacggcagcacgcccggaccttgtggtacgacaggcccaggtatgtgttcatggagttttgtgttgaggacagcaccgatgtccacgtgcttattgaggatcaccgcattgtgttcagctgcaagaatgccgatggagtggagttggtacaatgagattgagttctatgccaaagtgaactccaaaggactcccaggataagcgctcttcccgctctattacttgttttgtgagaaaaatggaaggaaaaggtgggctggccgcggcttaccaaggaggatatcaagccagtgtggctgtctgtggactttgataactggagagactgggaaggggatgaagagatggagctggctcatgtggaacattatgcagagcttttgaagaaggtcagcaccaagagacctccacctgccatggatgatttggatttcaccaccaccgtggtctcttgctgtcccgcggagctgcagactgaagggagcaacggcaagaaagaagtgctgagcggtttccaagtggtgctggaagacacagtgcttttccctgagggcgggggacagcctgatgaccgtggtacaatcaatgacatctctgtgctgagagtgactcgccgtggggaacaggctgatcatttcacccagacacccctggatccaggaagccaggttctggtccgggtagattgggagcggaggtttgaccacatgcagcagcattcagggcagcatctcatcacggcagttgctaccatcttttagctaagacaacatcatg

SEQ ID NO: 440659 - DNA, 1329 bp, Homo Sapiens
ttttttctgagtcaatctattttattgaccaaaagattcctgtggaaacaggaggtgagtgccctaagccctcactccttagcactctgcgtgctgatgtagtcctggagaagcgcctgcgcctccatccgccggctcatcttggtggccttgccctgaaaacggcctttcttccctgctcctttgccttccaggacctcagccaccctgggccccagggtctccacagacgcaggtggccctgccagtaagaagagtccaccacctttctcatcgcccacagttaagaacaggagggtctcctctgacccaatctcattggcaatgatattcatgaactctgaatcaccctccttcctgtgtaatatgaccacacctccccagtctggactgttcctgaggctatgggcaatgtgcacagccaggtctctgagcagattcaggttattcttctgcaggatctttgtggagttctggagctttttcactgtttccacaggatcctctgctccacacttaagcagagcagtcagtgctttttcagttccatgacttctctccatccacttcagcacccggttcccagacagaaatatcaggttggttctgttctttttccccttctcagtgcccagaatcttaatgacctgaaggtcactgagattgctcacatgggtcccacagcacatgttggaatcaacgccctcgatgttaacaacccgaatgggcccagcatgatcatcaggcaaaccccggccactcacctgctccacctcaggatcatccaggctcagttctcggacattcacaggcagccgatctctgattttttcattgacgctctgctcaatggcagctacttgctctgcagtcatagagggggtgtccagctcaatcgcactccgaaatctccctaactcccatgatgttgtcttcagcttaaatagatggtcagcaactgccgtgatgagatgctgccctgaatgctgctgcatgtggtcaaacctccgctcccaatctacccggaccagaacctggcttcctggatccaggggtgtctgggtgaaatgatcagcctgttccccacggcgagtcactctcagcacagagatgtcattgattgtaccacggtcatcaggctgtcccccgccctcagggaaaagcactgtgtcttccagcaccacttggaaaccgctcagcacttctttcttgccgttgctcccttcagtctgcagctccgcgggacagcaagagaccacggtggtggtgaactctcgggcataactgtcacgctgacaccagaacgccatacctgcaggcgtgtccgct

SEQ ID NO: 440660 - DNA, 582 bp, Homo Sapiens
agcgggagccgcaatggcacggcagcacgcccggaccttgtggtacggcaggcccagaatgccgatggagtggagttgtacaatgagattgagttctatgccaaagtgaactccaaggactcccaggataagcgctcttcccgctctattacttgttttgtgagaaaatggaaggaaaaggtggcctggccgcggcttaccaaggaggatatcaagccagtgtggctgtctgtggactttgataactggagagactgggaaggggatgaagagatggagctggctcatgtggaacattatgcagagcttttgaagaaggtcagcaccaagagacctccacctgccatggatgatttggatttcaccaccaccgtggtctcttgctgtcccgcggagctgcagactgaagggagcaacggcaagaaagaagtgctgagcggtttccaagtggtgctggaagacacagtgcttttccctgagggcgggggacagcctgatgaccgtggtacaatcaatgacatctctgtgctgagagtgactcgccgtggggaacaggctgatcatttcacccagacacccctg

SEQ ID NO: 440661 - DNA, 907 bp, Homo Sapiens
  misc_feature (21)..(21): n is a, c, g, or t
  misc_feature (24)..(24): n is a, c, g, or t
  misc_feature (726)..(829): n is a, c, g, or t
ttttattaccacactaagcgntancctacaccttgagtaggaagaacgttctgtgttgacaccaattctacctcaaaatggacactgaatatttcatttttaatgctttgcttattgcaaattcatcataaatgactcattccattgatacagtataaaccttttataaaaacaacagaataacccactgatgtctaacaatccaagtcaatgtaaagctcacttttgatgtggattgttacccacacacaccacaccaagctgttagctacctgcacttccttaggagttttcaagttgctcatattgccataggcctctccataaattctgtcatacatcggtgcagccaagaatctgctcataaagtttcatagcagctacccaaaatgacttttatttccacatctaatacactgttaagagtgggaccagaaataagcttttgactttcaactttacagtcatgacaaaatctcttgctagcctcaggtcaatggtataatgaaggactggtgaatgtaataggttgtgtatcatttagcacgttgttgcacacaattcatttactacttgttaaaaaaaggctcccgcccccttcctattatttctcgtactccatgatatctagttgactgaactaaaatcagaccacgagatactttcccttttattagatcacaagtcagaaagagggcacctgcgcttataacaaaactacttttnnnnnnnnnnnnnnnnnnnnnnnnnnnnnnnnnnnnnnnnnnnnnnnnnnnnnnnnnnnnnnnnnnnnnnnnnnnnnnnnnnnnnnnnnnnnnnnnnnnnnnnncgatatatcaacccccacttatcattttcccctctcttttatcaccgaaggtttcattttcccaaatattccaccttg

SEQ ID NO: 440662 - DNA, 674 bp, Homo Sapiens
aaaccatatttctgttcctaacacaaatgtgaatttattggttgatttgatatttaaaatagtacttttacaaaatcatctcagaaaatatactacatttattaaaattcctacaaaccattgcagaaaatattaaaccctctaaccaacctaacactcgctttcagaggcacttgtgatgattttcacagcttccatagttgcaaagaacaaagaaatcatcttccaacaggggtggaattagataagaataatccaaaaaatatttatttctttacagactcacagattgcttgatgtttaggggctcttacctaggatacctaattattcaaggttttcctaatttagtagactttttcattgcctacaatctacaatattcagcaaagtattaaggaaaatgaacccaagaaccttaaccacctcaaatagttttatggatatactaaactgtcaagtacaatctttatcttaagacttgagaactggaatgcaggaaaacaaactttggtggaatactggaataaaagacataaagctgggcagaactaggtgtggcaaccttgtatgttaattctgaaagccagaccagtgacgctaagaataacaaatagattcagatttgtttttcagaaacttgagctatttcggccaggtgcactgtctcacac

SEQ ID NO: 440663 - DNA, 377 bp, Homo Sapiens
caaaaagcatttttgtttaatgctaagatcccttcagtttgccaggtcatataaagaaacatccaatttagagaaaaaattctgtaataagttcaaataccaaagcgtaaagatgatgtaacacagtgcctatgctgcatggttacacaaatgaaacgagaaaggtagtgattgcttctaaattctcactgaaaatccaatttaaaggtttattgcagtctaggtatttttaatttttcccttggtgattatcaagatggttgatgctaataagtactattaaaaaactaaaatgctgtcgaatatggaacttcttttagttaagaattattaatatagaaaatgtgagttggtggactggtacttcttgtgctctg

SEQ ID NO: 440664 - DNA, 981 bp, Homo Sapiens
catacccaggaagatcatctcctcttctctcagtttttcagtttccttacgttgatggaaacgtcgccacaccttctgaatgcggagtgcagcagcccaggtatctgtcactttcttgccaagcatcttggattgctttgctctatattcttgcagatagatttgcttcatgaataaagcccttaggcgaccttgccgtgccctctcagcaatctggattaatttaacagcctcatcgaaagggatactctttacagggtatttcatgtcagatgtatctattccgctgtccgctaatatttgagcaagaattttctctcttccttttattacttccaacttctccttcaaaaaatacttgggtatgggaatatctaattgttggggggccagcttgagatcctgcaggatatcatcgaaataatggaactccgtgagttccagctccaccatctcgttcttcagctccaggatgcggcccatcaccccgtccaggactttcctgatcagtattcgtttctgggggtggacgaactggtcgtagacattctctaggtttctaaagatctgcacatactttacgtagaaggtggctaatgtttgaaagatgaaaacctgatttctttgtggttcaatcatcttctgaggctctttatcgagtaaagcaccgagggcttcttgggtctgatgccacatcttattatacattgcgttcgacattgctggctactttccctcttttcctcgccctccgggaagctcttccgttgctctctgaaggacggtggcagcaggggtcagggcactaccaggagctacagaggatttgggtggggggtcttctggagggagaaaccaggactgcgagaatcttctgcttcgggcaggaaaaggtgaggccgggttttgttcgcaggcacggagcgcgcaggcgcagagaggtgtttcactccttcccgtcgatcccgggaattccggacc

SEQ ID NO: 440665 - DNA, 915 bp, Homo Sapiens
  misc_feature (785)..(785): n is a, c, g, or t
  misc_feature (873)..(873): n is a, c, g, or t
gaggactatcttcctattctttggcactgtcttgatttaagttagtatcttctggatcaacctgtactccttctccaggtccatttacattgaaatggtcatcataattctgtctgttttcaagcaacattttggcacatttgtgctcgctctctccatctcttctctctccctacacacacttttttccccaagccatctgaaagtgagctgcaggcagatatgaatctttgccaggtacatcctgtgctggtttactgtttcttgtgtcttctgttttttagaaagcttttgttttggtgcatcttccatttcttcctcagaattgtcatctaatggattttcatcaatttgaggtcttgaaaaattttcttcttcctcctccagctgttgttttagcaaggccaccatttcccgatgcttctttgacttctcgtgattcttcatggccttttctgtcttgaacgatttgtcacatgctgggcagtaaaggtcatcatagagctcagcgtcctcggcctcatcactgtctttaccatcctcctcatctttgagttcatgttcttccatttcattttcatccgatccatctccaaactccttctcgtaccgtgcctccatctcctggagctctttctccaaattggccatagtcatccagctctgttctctgtactgctccaccagtttggcctgctttagcttctgctgccgcctcatctcttcggctttcctcgccttctctgcattctgttcttccacaagttttcgatgcgcctgcactnttttatctcttttacgaatgaaagctaccagctgacggacaagctcattcttctctttccttgctttgtcccgaatctttttgttttntttttccatggctcgtttttcccagcggtttgaagcctgtcg

SEQ ID NO: 440666 - DNA, 680 bp, Homo Sapiens
tttaattagaaacactttaattcctagccacttggcagcacttaaatatcagagccatccaagcatgccagcctttgaacttgctcagcaagagtagatgatcacacaactcttaaggtaaatcaaaattagatgaaggttatttattggtgtgacttttttcctttagtgagcttcctttacacagcatggtgtaaatagcatcagattgaatgaaaagtttgttaaatgcaaccataaataattataataaatatacatcaagtaactttacagcacacattttttagggccaaggtttggatctgtctggacctcaatgtgctctcggagaagcagccacgttagcagcagataccttacagcttgtcatctactcaagtgatggccaacagaagcttctgaactcctcctggggaggtagctgacaagtccattcaagggatgaggactaaagagaaccaagaatttaaagatgtagggaggaaaaaccacttctaataaatcgaaaggctctttcattatgcagaaatgaaaataaaaggatccttattgtcaggaatacatcctggctgtgaccccccacactcaaaggagctgtggccgctggggaggcagcgggctgaccatcttctttcaaagcaggggaactgcttgcgggcactcacctccagagttcc

SEQ ID NO: 440667 - DNA, 470 bp, Homo Sapiens
  misc_feature (28)..(28): n is a, c, g, or t
  misc_feature (35)..(35): n is a, c, g, or t
gaccctttaatttcaattccgccataangaaaagnccctttcgaatttaattaagaaagtggtttttccctcccccaacatcctttaaaaattccttggttcccctttaagtccctcatccccttgaaatggacttgtcagcctaccctcccccaggaggagttccagaagccttcctgttggcccatcacttgaagtagatgacaagcctgtaaggtatctgcctgcctaacgtggctgccttctccgagagcacattgaggtcccagacagatcccaaaccttggccctaaaaaatgtgtgctgtaaagttacttgatgtatatttattataattatttatggttgcatttaacaaacttttcattcaatctgatgctatttacaccatgctgtgtaaaggaagctcactaaaggaaaaaagtcacaccaataaataaccttcatctaattttgatttacaaaaaaaa

SEQ ID NO: 440668 - DNA, 975 bp, Homo Sapiens
  misc_feature (7)..(7): n is a, c, g, or t
  misc_feature (18)..(20): n is a, c, g, or t
  misc_feature (27)..(27): n is a, c, g, or t
  misc_feature (30)..(30): n is a, c, g, or t
  misc_feature (38)..(38): n is a, c, g, or t
  misc_feature (42)..(42): n is a, c, g, or t
  misc_feature (44)..(45): n is a, c, g, or t
  misc_feature (48)..(48): n is a, c, g, or t
  misc_feature (50)..(50): n is a, c, g, or t
  misc_feature (59)..(59): n is a, c, g, or t
  misc_feature (67)..(67): n is a, c, g, or t
  misc_feature (73)..(73): n is a, c, g, or t
  misc_feature (75)..(75): n is a, c, g, or t
  misc_feature (77)..(78): n is a, c, g, or t
  misc_feature (85)..(85): n is a, c, g, or t
  misc_feature (87)..(87): n is a, c, g, or t
  misc_feature (90)..(90): n is a, c, g, or t
  misc_feature (106)..(106): n is a, c, g, or t
  misc_feature (108)..(109): n is a, c, g, or t
  misc_feature (112)..(112): n is a, c, g, or t
  misc_feature (114)..(114): n is a, c, g, or t
  misc_feature (122)..(123): n is a, c, g, or t
  misc_feature (134)..(135): n is a, c, g, or t
  misc_feature (137)..(138): n is a, c, g, or t
  misc_feature (146)..(146): n is a, c, g, or t
  misc_feature (149)..(149): n is a, c, g, or t
  misc_feature (151)..(151): n is a, c, g, or t
  misc_feature (154)..(154): n is a, c, g, or t
  misc_feature (156)..(157): n is a, c, g, or t
  misc_feature (159)..(160): n is a, c, g, or t
  misc_feature (167)..(167): n is a, c, g, or t
  misc_feature (179)..(179): n is a, c, g, or t
  misc_feature (183)..(184): n is a, c, g, or t
  misc_feature (186)..(187): n is a, c, g, or t
  misc_feature (189)..(189): n is a, c, g, or t
  misc_feature (196)..(197): n is a, c, g, or t
  misc_feature (202)..(202): n is a, c, g, or t
  misc_feature (221)..(221): n is a, c, g, or t
  misc_feature (236)..(236): n is a, c, g, or t
  misc_feature (256)..(257): n is a, c, g, or t
  misc_feature (262)..(262): n is a, c, g, or t
  misc_feature (269)..(269): n is a, c, g, or t
  misc_feature (281)..(281): n is a, c, g, or t
  misc_feature (289)..(289): n is a, c, g, or t
  misc_feature (291)..(291): n is a, c, g, or t
  misc_feature (293)..(293): n is a, c, g, or t
  misc_feature (295)..(295): n is a, c, g, or t
  misc_feature (297)..(297): n is a, c, g, or t
  misc_feature (301)..(301): n is a, c, g, or t
  misc_feature (311)..(311): n is a, c, g, or t
  misc_feature (317)..(317): n is a, c, g, or t
  misc_feature (320)..(320): n is a, c, g, or t
  misc_feature (323)..(323): n is a, c, g, or t
  misc_feature (331)..(331): n is a, c, g, or t
  misc_feature (335)..(335): n is a, c, g, or t
  misc_feature (337)..(337): n is a, c, g, or t
  misc_feature (352)..(352): n is a, c, g, or t
  misc_feature (356)..(356): n is a, c, g, or t
  misc_feature (359)..(359): n is a, c, g, or t
  misc_feature (361)..(363): n is a, c, g, or t
  misc_feature (370)..(370): n is a, c, g, or t
  misc_feature (372)..(372): n is a, c, g, or t
  misc_feature (388)..(389): n is a, c, g, or t
  misc_feature (395)..(395): n is a, c, g, or t
  misc_feature (408)..(408): n is a, c, g, or t
  misc_feature (413)..(413): n is a, c, g, or t
  misc_feature (419)..(420): n is a, c, g, or t
  misc_feature (422)..(422): n is a, c, g, or t
  misc_feature (428)..(440): n is a, c, g, or t
  misc_feature (442)..(444): n is a, c, g, or t
  misc_feature (788)..(788): n is a, c, g, or t
  misc_feature (797)..(797): n is a, c, g, or t
  misc_feature (801)..(801): n is a, c, g, or t
  misc_feature (826)..(826): n is a, c, g, or t
  misc_feature (835)..(835): n is a, c, g, or t
  misc_feature (873)..(873): n is a, c, g, or t
  misc_feature (880)..(880): n is a, c, g, or t
  misc_feature (912)..(912): n is a, c, g, or t
  misc_feature (945)..(945): n is a, c, g, or t
  misc_feature (948)..(948): n is a, c, g, or t
  misc_feature (972)..(972): n is a, c, g, or t
tgggganttatagttttnnnacaggtnttnacatgatngcangnntgntnagtttgttngcacacgngtgggngntnnggtcacnanggnaggtttttttgggggntnngtncnggtggggnngtctgcgggtnntnnggttcttnttnanggntnngnngtttttngggggagtgggngggnnanngnggttcanntgggntatgggaaattgagtgtgnggagtgggtggggtnagtgtttatgaaggagggannggatnaaaaaantgtggatatgtnaaataganantnananaggnaagagaggantttgtngcnagncatggtgnagcnangtttccagtgctaanatgngtntnnnggttggngngtgggggtggtggggnncccccncctgggtgctggnctgantggggnngnctcccnnnnnnnnnnnnncnnngtagacctctgtcttggattactatgtacctggacaggtgaactcttgtatgtttctgttttggggatttttaggggttttccatgtacattcatagagcctggtcagcagcggggagtccttgttgcgtatggacggaaggctccctggcacccagatgtctcccttcgtcctggctgacacagagcatggtggtcatctgctcttcatgtccagcaggctcagaaagaactcggagttcccctcgcacccttgggccaggcttttcaagtccgagtgccaggactggatgagctggggtttgtgtgtctgctggcggcacagtgggtgtgcacaagaccacnatttgggtntctnacaaacacaggctcacaaaagggantttggcatntctgacaaagctttttgtctgagagttggattgagctncctttcnacttcatctgcaagaagaaaccaagactgagnatgctgtcatgtgttaagtatatttaaagtggntangttctagttttgcagagttgacangca

SEQ ID NO: 440669 - DNA, 1141 bp, Homo Sapiens
  misc_feature (52)..(52): n is a, c, g, or t
cagcgctcctctttcctgtgctcaaaaaactctggattgcgaagatatggcnacacggcggccctcatacatcagagcaaatgctgtacagccgtccagcctctctttatcttcatgagtcgcagtcagaactataggtactgacaagttaatgacacctccatccagaagacaatcaaaatgaaggcactgcaagtactccctctctctcataaagccattcaatggggttgcccaaccttctgccaaaacctgcacccactgcatatccactttattaattttcagtgctggtaatgtttccgcatctgtttttgccaaatgaagtttattttctggcacatatagttcttttacttcataagatgcatccacaggtacaatatcccgttcctgtagaagttccacaacttgctggacacagtcatttacatcacaggagtctgttttcagcaccaactcaggggcctctggcttttcatattcagaatcgatcccagtgaaacctttaatttctcctgcccgggcttttttgtagagtcctttgacatccctctgttcacaaacatgcagaggagcatcaacaaatacttcaaaaaacggtaaacttgcaccttcatgaatttgccttgcattgttgcgatcctgagtgtaaggtgatatgaaacttgtgatgcacactaagccagcatctgcaaacagtttagcaacttctgcgatgcgtcgaacattctcttctctgtcttcaggactaaagccaagatttttattgagaccttgacgaatattgtcaccatccagagtgtagcatggaataccatgacaaaccaggtactcctccaaggccatgctcacagtagtctttcccgctccagacaagcctgttagccaaactgtgcaaccacgaaagccacctctggtccccaccacctgacctctcttgttcctgctgacatgatgggcttggtaggtgacattggttgctctctgcattccccagttctgcgcgttattgctcagcttgactttcttgcacaagctcccggggatctccatgaccgcggagcgcgctgagcagccggggttctctgcgccgggagggtagcaagaggagggcaggccagcgagcggggcggggctg

SEQ ID NO: 440670 - DNA, 1692 bp, Homo Sapiens
  misc_feature (1607)..(1644): n is a, c, g, or t
ccttttgtctgctgccccattccttcttctcgattgtggtccctactcgccttcctatccagggcctgggacgtggtctccttggggttgtcttagccctgtcccctgggttctactcctgttgattacgtctgccttctggctggtgctttccaccctcatcactacccttgcagcactaccagtcagggtgcttctatctgatcctgcaaggatcaattgaccttcggaagatccaggcctttggcggggaggggttaaggtgggtgtcagggggcagcatatctgcctggagacatttcagtggccaggttgggggcagcccaatttcctgagtggaagtgggggacacaggcaggctcaggcgtttctctgctctggaggaaggtactcaaggcccaggtgtctgaagatgtcttcctctgaagccgcttggaaaaatgtcttctgctccgggtcaaacagcccatggctgttcagccacaggcccttctccttccggctgaagcggctgcagctcccgctggaaaagcttggagccagtccaaccgagcagggcgaaagggaactggctgacgggtgcaactaccaagtccactctcacggccttccaggatgggcagggcctcgttgatccccccacagcagcccctggaggttgtggtaggcggaaaatgcagaaacttctcctcaaaagcgtccatgtggctctgttgggccaggcgggataggggacgtcacagcagctgtgctggtgctggtggtacaggatgaggcccttcatggtctggtacctctctgagcgccgaactctttccacctcctcacacactccatgctccagcagctcctggacaaccctagaggagtgttctccaaagtggggaagcccctgcagctggctcagggttgtgacagggctgggaagggccttgagcaccgaggctgctctgcagtaaggtgaggaggcggccctcactgccttcaaagcctgctgcctcggccagtatctccagagcctcggagaggccagtgttgtggtgtgtgaggggcgtagggcgctggcaggcataggcaggcatccatgctgggctcagaggccccttccttggcccagccacctccaggcggtgccggcactccacaggtacaggctgcccagctcccaggctctctgttaaccagcttatgtccagcagagctgggggggtgcaacccgggggagcagctgccatcctgcgctcctgccagctgacggcctcctctgctgaggtctcttccatcacaacatgtgtcgcttcggagctgcaggcgtcaaggacgcggaagcctttggagcgcgccaggcctgtgaggaaggcccggcggctgcgacccatgcgaggctcgaccaggtagatggcgactcccgggaagcgcgtcgagggcggcgtggaggaagcggcatcgccgctaggggacccgacccgcgctcgccgccgtttggggagcattgggacgacagcctccagcagcgcggagcgaacgcagagggaaactccgagcgagacggaaggaagccccagtccgctctcgacgaattcgagctcggccgatttggcctgatnnnnnnnnnnnnnnnnnnnnnnnnnnnnnnnnnnnnnnccgccacccgtaaaccggttccccatatatcgtcacatggggtggggc

SEQ ID NO: 440671 - DNA, 1694 bp, Homo Sapiens
  misc_feature (170)..(170): n is a, c, g, or t
  misc_feature (369)..(369): n is a, c, g, or t
  misc_feature (964)..(964): n is a, c, g, or t
  misc_feature (998)..(998): n is a, c, g, or t
  misc_feature (1002)..(1002): n is a, c, g, or t
  misc_feature (1006)..(1006): n is a, c, g, or t
  misc_feature (1010)..(1010): n is a, c, g, or t
  misc_feature (1018)..(1018): n is a, c, g, or t
  misc_feature (1026)..(1026): n is a, c, g, or t
  misc_feature (1061)..(1119): n is a, c, g, or t
  misc_feature (1121)..(1121): n is a, c, g, or t
  misc_feature (1300)..(1300): n is a, c, g, or t
  misc_feature (1388)..(1388): n is a, c, g, or t
gagtctttcggtgcttcccaagggaagaacctcgggctgaaggctttcccaacactgcttacattcataggggttctcggccgtgtgagttcgctcgtgctgttgagagagaaacggtcactagaggcctttcccacattcactgcattcgtagggcttctttccggtgntgtgtcctcttgtgcaagatcaggtaagagctctggcagaaggatttcccacagtcttcacatttatagggcttttccccggtgatgaatcctctgatgctgagtcagcgatgagatcctgttgaaggctttcccgcactcaccgcacccgtagggcttctctccagtatgagttctcagatggcgcgtgagggtgganctgtgcgtaaaggctcgcccacactcctgacactcgtagggtttctcccccgtgtgaattctttgatgttcgctcaaagaatgcctccggttgaacaccttcccacactggtggcactcaaagggtttctctgccgtgttgattttgttgtggatagtcagggccataccgtggttcaatgactgcccattttccaaatacacaaacatcttccccccgtgttgaataaagtgactgttctggcggatggcatttccacattcattactttcacaaggtctccgatctgcatatcccagctgatggtggtttaagactgaatcggatgccaagcttgtaatatctaactcgctgccacacaagtggttccctttagagcttccctgtgataaaacaagggctgggctcagattaccattttccccaaatccatgccatgcagtagccttctcctgaggaatgtgccactacgtgaagggatgccttttggctcaaaagcccctgggggtcttcatggctgtcccctaactgcttccatcccccatcttctctgataagctttatcatatttataccactggctggttcctcctgnaaagccaccttctgtaagttgaagtcttggtttnttangtanagtnatccaatntgtaattnaaagaggctgaggcagaagaatccgccttgaaccnnnnnnnnnnnnnnnnnnnnnnnnnnnnnnnnnnnnnnnnnnnnnnnnnnnnnnnnnnnanaagagcgagactgaacaggaggcttgaggagttcctttttcctctatccacagggcttctctttgctccaagtgggaagaagccactggttgaaaaagtaaataccccgtccatgaggaaagactagtgacttgtgaggtttgtgctggggaaagtggaccctctttaatccccacatnagtacattggttcttcaaggcttccagggagaccacgttcctgtagttctccagcatcacctctctgtacaggttcttctgagcaggntccagcaactcccactcctcctgggagaagtccatggacacgtcctcaaaggttactaattcctgggaccagcggggcaggtacccagcagccattctctcctcttgggaaaagcaggttcctgggcaggcagagggctgagctgccgggagccgcgcgcgccggcccaggtgggcgcaggtgaccatcggggcgcgcgctgaggcgccagacagggcccccgaggcgggagcgccccgtgcaggccggccggcctcccctgcgtgtccctgggacgcctcctccgctcggctcctcggcgctcgg

SEQ ID NO: 440672 - DNA, 2064 bp, Homo Sapiens
  misc_feature (403)..(481): n is a, c, g, or t
gggggcgccccacagggttttgttatttcccgcccttggcagatttcacgggttctatcacagccccttttggggaagggctttccacgttcggggcggaaagtgtttaatggaattcccaccaccttcttccaataaatggcaggggcgggggggtgaatttgaatttgaagctcccctgggccccccgttgttgaacccagtaaaggcccccggaatcccctttggattttttcaaaaccttgggttccccccggggtttttttatgggggggattccaagcccttattcatgccccgggtttcctttggaaccagtttgggccctggttcctttccttttggggccccgcggccaaaggatggttttggaaactttttgggggccggggcgggccgccannnnnnnnnnnnnnnnnnnnnnnnnnnnnnnnnnnnnnnnnnnnnnnnnnnnnnnnnnnnnnnnnnnnnnnnnnnnnnncaaaaggtaaactcgtttactggttcagcacacaattctcatgatcattaatactctgacttgggcctagacttcgtcctaggctgaaaggttgattcaggtacaattaaattttctggttaaaaattgtcactgggttcaaatgatctatcatccctctagaaggcagcaccagcagagaagctataaatacactcacttcaaaactgagctttaggggtggttgtaccttaaccacacaccctacagccaagagaaattagcagttgagcaaagatacagaccaaatgcctctgggagatggactgaagcagctccaaagaaagctgtaaaaaagtgacaagaatttgttcttccactttgagactgttcgattcaaacatgagtccaaggcacgtatccttaagaggagatgctctgctgctgtctcatttgccagattatccttcagttccaggctttcaacaggatatgactggttcatgctccatgataggaaaggaattaaagtttgaagccagaatgaatggccacaatgcctgatgttagactttcgtaagtcaccttgtgaaagcctgcatcttctatcatgtccttgaactcttcctgagacggaaaccttcggatactctctacaaggtactgataggacttccagtctccagcgatgacctctcccaggacagggatgacctggaagctatatagatcataaagcctggatatgaggggattgttcacttggctaaattccagacagagaaaccgtcctcctggtttcagcacccgatgagcttcctggagtgcctgatcaatgtgtgtgacattccggatcccaaaggcaatggtgtaaatatcaaacttgtcatcatcaaagggcagttcttcagcatctcctaatacccatgcaagtccagctctgtatccttgagccaaggctttctgctttccaacctttagcatctccttgttgatgtcacacaccacgacacgagacccgcccaaggaatcttcttcattctggtactctttggcaatttcttcccaggataaattttgttgggcccttaactgcctcttctgttttctctgatgctgggactgaacataattaaggaaccggaatgcaatgtcacctgtgcctccagcaacatcaagcagctgggtcccaggaagcgggtgcatcttccagagcagcaaatccttccaaacacgatggataccaagactcatcatatcattcatcacatcatacttcttagccacactttcaaacacctgatagacaacatgaacaagaaatggagctgtgacaaaaaggttgaagatgtcccagaagaagtgatgccagcaaaaactttcacattaaaggagttctttgccccccttctcctcttccgacacagtctcaaacccaaagtgcgtttccgctgcccgcttctcttgggacaagagccgagcacttagtaggtccccgggccaagagctacgaagcccgaggagctggcagccccgcatcgcccgcgaccacccacggccgcaatagctccatagggcacagctcccgggggccgccatcttgg

SEQ ID NO: 440673 - DNA, 830 bp, Homo Sapiens
ggcctgggtggcgatcagagcacgaggtgtcactcgactacctgatggcggcccccgggagctgtgccctatggagctattgcggccgtgggtggtcgcgggcgatgcggggctgccagctcctcgggcttcgtagctcttggcccggggacctactaagtgctcggctcttgtcccaagagaagcgggcagcggaaacgcactttgggtttgagactgtgtcggaagaggagaaggggggcaaagtctatcaggtgtttgaaagtgtggctaagaagtatgatgtgatgaatgatatgatgagtcttggtatccatcgtgtttggaaggatttgctgctctggaagatgcacccgcttcctgggacccagctgcttgatgttgctggaggcacaggtgacattgcattccggttccttaattatgttcagtcccagcatcagagaaaacagaagaggcagttaagggcccaacaaaatttatcctgggaagaaattgccaaagagtaccagaatgaagaagattccttgggcgggtctcgtgtcgtggtgtgtgacatcaacaaggagatgctaaaggttggaaagcagaaagccttggctcaaggatacagagctggacttgcatgggtattaggagatgctgaagaactgccctttgatgatgaccagtttgatatttacacattgcccttggggatcgggatgccaccacattgatcaggcactccaggaaactcatcgggtgctgaaacccagaaggacggtttctctggctgggattttagcccagtggaacaatcccctcatatcccgggctttatgatctaa

SEQ ID NO: 440674 - DNA, 924 bp, Homo Sapiens
  misc_feature (50)..(86): n is a, c, g, or t
aagatgtaagatcactatagggcgaactggagcttacgcggtggcggcgnnnnnnnnnnnnnnnnnnnnnnnnnnnnnnnnnnnnnatcaggccaaatcggccgagctcgaattcgtcgagagcggactggactaccaagatggcggcccccgggagctgtgccctatggagctattgcggccgtgggtggtcgcgggcgatgcggggctgccagctcctcgggcttcgtagctcttggcccggggacctactaagtgctcggctcttgtcccaagagaagcgggcagcggaaacgcactttgggtttgagactgtgtcggaagaggagaaggggggcaaagtctatcaggtgtttgaaagtgtggctaagaagtatgatgtgatgaatgatatgatgagtcttggtatccatcgtgtttggaaggatttgctgctctggaagatgcacccgcttcctgggacccagctgcttgatgttgctggaggcacaggtgacattgcattccggttccttaattatgttcagtcccagcatcagagaaaacagaagaggcagttaagggcccaacaaaatttatcctgggaagaaattgccaaagagtaccagaatgaagaagattccttgggcgggtctcgtgtcgtggtgtgtgacatcaacaaggagatgctaaaggttggaaagcagaaagccttggctcaaggatacagagctggacttgcatgggtattaggagatgctgaagaactgccctttgatgatgacaagtttgatatttacaccattgcctttgggatccggaatgtcacacacattgatcaggcactccaggaagctcatcggggtgctgaaccaagcaggacggtttctctgtctggaatttagccaagtgaacaattcccctccatatccaggtttatgatca

SEQ ID NO: 440675 - DNA, 1008 bp, Homo Sapiens
  misc_feature (11)..(11): n is a, c, g, or t
  misc_feature (46)..(46): n is a, c, g, or t
  misc_feature (52)..(52): n is a, c, g, or t
  misc_feature (60)..(60): n is a, c, g, or t
  misc_feature (69)..(69): n is a, c, g, or t
  misc_feature (108)..(108): n is a, c, g, or t
atgtcatccgncctcttggaattgaccgcggatatctggctgtcancaaagntcttgtangtattatanttttcagagcagatcagtactccacttggaccatctganccctcctggaactgtaataaggaagttgccgtgttcctccaaaggttcactgtattttcggaccacatgatttaaaccaaggtctagctcatagaaagtaagtgtctgctgggtattagctgctgcttcccctgttggatcattgtctgcttcctcataatccatttccagacaagcaaacattggattttcaaatccgacatctactccaactacatgatacactaaagtgtttgctttgtgggcttccaggggagatgaaatggtaagtcgggctgcagcatctctgttcaaaatatacaccaatttctgtttctcaatggcactaatcataacggctcgccctttgggatccacagctaagaactggccaggaacgatgcgacggcatccactcttgccaaaggtttcttggtgaatcttctcaaacatattcttagatggctggtattccaaaataacaattcgaccagagtcactgccaactacaatgtagtctttggtgccacctgtcagcctaaaggccatgagtgaccggataacaccgaatacttccacagtgagtagggtatgtactttgccagtgttggggtctgggcgaagcagctccaagatcttcccacgggaaacaacaatttcttgttgtttggttccagaaaagtttccatgaatggcaaagctgatgccagtggctctctgcaaggttaagttgtacagaaacatggctgcaggaaacctgagccacccagacctccaggccttggttacaccaacagtacggagtccaagaaagcctgcagcgagaaggatggtgtggatatccaacggatgctacctcccttcaaaacttaagccaccaccaactccaacatactggcgtccgccattagacctcaagac

SEQ ID NO: 440676 - DNA, 1111 bp, Homo Sapiens
  misc_feature (3)..(3): n is a, c, g, or t
  misc_feature (9)..(9): n is a, c, g, or t
  misc_feature (23)..(23): n is a, c, g, or t
  misc_feature (26)..(26): n is a, c, g, or t
  misc_feature (34)..(35): n is a, c, g, or t
  misc_feature (44)..(45): n is a, c, g, or t
  misc_feature (49)..(49): n is a, c, g, or t
  misc_feature (51)..(51): n is a, c, g, or t
  misc_feature (61)..(61): n is a, c, g, or t
  misc_feature (66)..(66): n is a, c, g, or t
  misc_feature (75)..(75): n is a, c, g, or t
  misc_feature (80)..(80): n is a, c, g, or t
  misc_feature (82)..(82): n is a, c, g, or t
  misc_feature (93)..(93): n is a, c, g, or t
  misc_feature (112)..(112): n is a, c, g, or t
  misc_feature (114)..(114): n is a, c, g, or t
  misc_feature (128)..(128): n is a, c, g, or t
  misc_feature (153)..(153): n is a, c, g, or t
canaagatntcttatgaagcccnccntgccatgnntgaatggtnngaananagcccccttncaaangtgattatntatananacaccccaccntcgataggaagccctgggngnagatgtagtggtantcaattgcatggaacaccaaggaangagacttgtgaaaaggaagggccgccatcagccagtggattttaaatacatcattccgtcgttttcgaaggatatgaatccagatggtcccagaaagaaagaagaaaaaggccattgagatgtataatttggggagaggaatttctcctgctgagaggtagctgtcaggattcttctctgtgatctcaatatcaaggctgaatgtaaacttgtcacttggcaattcttttccaaggcatttatgaaaataaagactgtaaaggccttcttggtcatcagtgctgatgttaaagaaaaactgaaatgacactgccccaccattattatgaacagaaaaggatttctctcccatggcctttgtatccactgtacttcttttagacttgtccaccatctgtgtgtctttctgggttttggttgcctgtgctgtagtcaggggttaacaattaggctcctggtctctgaccaaggactttctcatccctgctgaagatgatctttggtaactgggtaccagcttctggtggagactttactcttacctcacttctggagatgtctaggattaaaagggtgacagagacagactgtttctttaaaatacagtaattcacatcttcatccaggtaagaagaaaagccatcattctttgtacggtctaggctaaatccaatagtcacatccttgtcttcaggctcattcagtgagaggctactgacattcaccaccatgtacccatccttgaagaagccaaaggtgttcagatgaactttatgcctcacatcatccttgagtgccaggtgatggacgcggcccaggccaggctcggccagcaactgcagcaaacccagcattgggagcagccggaggcccgcggccagcctaggaccgcgggaggcgggggagccgacgggcgccagagcggccatgtttgttccagcatcaccagccgcttacc

SEQ ID NO: 440677 - DNA, 515 bp, Homo Sapiens
catctagtgtattactgggtctaggttgcctgctgaagcaggattaacattaggctcctggctctgaccaaggactttctcatccctgctgaagatgatcttatggtaactgggtaccagctatctggtggagactttactcttaccctacattcaaataaaacagaaggaaaaaaggtcaaagcagtgctcctggccactgagcacgctgcgtgtaaggccctgtgccaagctcatgcagtccttatgatgttctacaatgtagattctattatccacattctacagataccaaaactgaggctcagaaacgttaaataacttgcccaagggcaccaagctaggaagtagttggatgaggatccaggtagtctctcttaagcctaagatcttagtaaccacacaattctgaggtacatctttctccttaagtatcgttaaaatgctcagcacattggtgcacaggagaaacggacaaaatgtaaaacatcagtaagactttaaagtgaaatcca

SEQ ID NO: 440678 - DNA, 1275 bp, Homo Sapiens
  misc_feature (161)..(161): n is a, c, g, or t
  misc_feature (228)..(228): n is a, c, g, or t
  misc_feature (281)..(281): n is a, c, g, or t
  misc_feature (1055)..(1055): n is a, c, g, or t
ggggaatgcaatattgagctttaacaacttttttatcatctcgtcatcattgtcaatcagttcataaaatatttccttccttatccgtatcaactcatttcccaggctcatcaggatcaagggtcgtgtgtcgcattcaccctctggaaggaaggactggngaagacccaaaatttctccctgctccacagtgtgcaccttcacgtaggcccccactgcagcctcctnggggagctcaccaggcttgatattgatcatggcacatttgatcgactgagcangcctggattggatcttcgggcccagcatcttggagagagtgtctcctgaggttctgatcttcctgctgaagcttgtcccctgtagcccccaggcttttttgagatgtggaagtttcaaggagctaaagtcttgcagaggatatgatttgatctggaattcctttaatctttccataggagagtattcactcaggtgggtcttcagaggtctgccatctatcaagctccaggtgctgccagatccatctacggtaggaaggggaggcccccaaggtccaacagccgcaggacttcacagctgcccttgctgataaacatgatgaagggtgactctccgaaatcttttgagatcagctgcccatacgagaacctctctatcttcgccatggctaccagctgccagagcttctcatcagaccatgatgcaaacagctccatcttcctaaaaaattcaaaccgatactgagcatccttctgaacttcctggtccagcttattagcaaagaagtcctcccggtaacaaccaggaactccgtttcttccatacagacgatggtggacctcctcactgaagcatgcagaacgtccatttccccaaaacagctacccttgtgcagcaatttcgggtggggatctaggaaggcactgctgccatcctcgtccttggttattgcaactgtgcccaggtagatgaaataaaagctgttgcccttctgccccttcttgatgatcacacgcctgcgaccaaaccgttcaaagcgcatgactttggcnaggagcagctgcaggggctctgcgtagttccgatagctatccagaacctgcaagtgttacagacggcctggatctcatcctctgttctccaggaaggcttcttctgcatgatctgaatggcctttggaggaaagtgaccctcctctgcaatgaagtccatggtatcaaatgtgactcggctttgcatctttttatcccagaaggagaagatagggtgctt

SEQ ID NO: 440679 - DNA, 1885 bp, Homo Sapiens
  misc_feature (52)..(84): n is a, c, g, or t
  misc_feature (1203)..(1256): n is a, c, g, or t
  misc_feature (1277)..(1521): n is a, c, g, or t
aatgtatcgatcatatagggcgactgggaggctcacgcggtggcggcgcatnnnnnnnnnnnnnnnnnnnnnnnnnnnnnnnnnatcaggccaaatcggccgagctcgaattcgtcgggagcgatggctggtggaggtggcggagagcaaggtggcagccgggagcccatcagaggaaaagtccgaggcgctggaaccctgcgtccaggcgtgacggtcatcccgaaaggccggccccagtttcatccttttatcctgtaatctgtcaccatgaccctgacaaaaggttccttcacctactccagtggggaggaatatcgtggcgagtggaaggagggccgcaggcatggttttggtcaactgatgtttgcagatggtggcacctacctgggtcattttgagaatgggctctttaatggctttggggtattgaccttctcagatggttcaaggtatgagggggagtttgcccagggcaagtttaatggcgtcggagtcttcattcgatatgacaacatgacctttgagggggaatttaaaaatggcagagtagatggttttggcctgctgactttccctgatggttctcatggaatcccccgcaatgaaggtctctttgagaacaacaagctgctgcgacgtgagaagtgttctgccattgttcagcgggcccagagcgcctccaagtcagccagaaatctcactgcctgacagcgcagtgggcaccagctgataagtattgggtaaagccagtgcccctgttgttgattcgaggtgaacaaatgaatcagagctgagatgagttgacaatgacagtggagcagaggccttgtatgtgccctgtcacctgccattccagaactggaccacagaaaagtgctgaggatgctggccagcagaccctgcagcagtcattgggtggttctgtctttccctaacccttatgtgctggaggacagaggagccacctcttctcactggttgatactctgttcctaagacctcaggttacccagtgtagcctgctgtgacccttctgcttcattttctgccaagtgatacagaaccttcgttctgctgctttggggacaggtgatcctagccccagcttagggccagtgctctgtgccactctggagaaatacgggaccacagatacggggtggctcagtacagcagccctgtgaaagtcaaggccagagnnnnnnnnnnnnnnnnnnnnnnnnnnnnnnnnnnnnnnnnnnnnnnnnnnnnnngagatggacgttttactctcnnnnnnnnnnnnnnnnnnnnnnnnnnnnnnnnnnnnnnnnnnnnnnnnnnnnnnnnnnnnnnnnnnnnnnnnnnnnnnnnnnnnnnnnnnnnnnnnnnnnnnnnnnnnnnnnnnnnnnnnnnnnnnnnnnnnnnnnnnnnnnnnnnnnnnnnnnnnnnnnnnnnnnnnnnnnnnnnnnnnnnnnnnnnnnnnnnnnnnnnnnnnnnnnnnnnnnnnnnnnnnnnnnnnnnnnnnnnnnnnnnnnntgagcccaccacgctcagccttaactttcatcattcatcaccaaattgacgccaggtcatatgccaatgttggcctcaggctcatcctcaaaaatccctgggcctccaggtgaacctcctgcctgggcttgccaaaagtgcgtaagattgcacgttgtgagccactgtgcctgcctgacagcagcttttccactaatgtaatccctcatcgctggttggaactcaccgcttgcaggctcccacttggcacggatcagaccggaatcacatccgccaatgtccccggaacggctccggcaacacgggcaattccatcctccctttacagaaagctgctactttacacactaaggagattatcccc

SEQ ID NO: 440680 - DNA, 943 bp, Homo Sapiens
tggtaacctgggtcttaggacgaagtatcacccgtgagagaggggttcctcgttctcagcacataagggttagggttaagacaggacccaccatgactccgcagggtttgctgggccagcatcttcagcacttttctgtggtccagtttctggaatggcagttgacagggcacaataccaggcctttgctcccactgtcattgtcaacgtcatctcagcttctgatttcattttgttcaccctcgaatcaacaaacaggggcactggcttttaccccatacttatcagctggtgcccactgcgctgtcaggcagtgagatttctggctgacttggaggcgctctggggcccgctgaacaatggcagaacacttctcacgtcgcagcagcttgttgttctcaaagagaccttcattgcgggggattccatgagaaccatcagggaaagtcagcaggccaaaaccatctactctgccatttttaaattccccctcaaaaggtcatgttgtcatatcgaatgaagactccgacgccattaaacttgccctgggcaaactccccctcataccttgaaccatctgagaaggtcaataccccaaagccattaaagagcccattctcgaaatgacccaggtaggtgccaccatctgcaaacatcagttgaccaaaaccatgcctgcggccctccttccactcgccacgatattcctccccactggagtaggtgaaggaaccttttgtcagggtcatggtgacagattacaggataaaatgatgaaactggggccggcctttcgggatgaccgtcacgcctggacgcagggttccagcgcctcggacttttcctctgatgggctcccggctgccaccttgctctccgccacctccaccagcgattgccccacttgacgccgccatcctgggcgaccgcactgggtaccgct

SEQ ID NO: 440681 - DNA, 817 bp, Homo Sapiens
ttttttcaagtttctttcattttattttaagaaggacaaaaattgttattaaaacatctacattattatcaagatactagaccttatgaatatttaatattaaagtgtggtattcttaaatttttaatacacagacattttaaaggaccattaaattgattactgcccagctgagaaatgcagcatccctccccacccaccccgcccccatgcttgccatgccatcttgtccctgcctgccggggggaacacaggtcccagattcagtcctctgagcctcccagcctggggccctagaaggctcacaactgaaatagttaccctcatcattaaaagggtcttcctgtccctcctccccatcacactctgcctcccactctctcttccttaccctgtgggggctccagctctggccaggccaggaagccccagatcccaagggtccctggacagatcacaggctgaagatgaaaactctggacttgaatcctgttcttttcagcggggagacaaatacaaatcaccttctttccctgagcactcccactctctccgcactcgatgggggtggtctgggaagctagcagagttgggcctggggagggtggctcctgtccctggctgcccgaatcacctctgagccatggctccagtccctgtcaccttgcaaatagtccagtggcccctgaaaccctcctaatcacacaaggatggctgcattttctggccaaattctttatctttagccctcataaaagtgattccttggataccacacacatatataatattatatgtgtgtggcatcgataaaccc

SEQ ID NO: 440682 - DNA, 931 bp, Homo Sapiens
  misc_feature (345)..(345): n is a, c, g, or t
ctgcgaataaaagaccattgaattttacttaattaggatccatacaatgatccccagtctatcttatacatggcacagtcaaagtctcaagtttcagtataaaaaaataatgataacatttgctggcaaaagtctgcgaaggcactttcattgattaatgatctgagtatggcccttcctccaaatcgcatctgagaggggagagcatacatctgtattctctagttatcatgcggttttagttttgttcagggtaggaaagatcgtgaggatggagttactgggacaagtgtaaagggagcaagggatatatttcttttattttccttttcttttgaaaaaaanaaagcactaatatattttcttctctctgttagaacctgtatgttgtcttctccaggacttcgaggtaatccggcttggtttgaagtttggcccttaactcgaggtaatcacttttttgggtttggtggtctgtgaagccctttccagccgagaagagaagggtttctttgagcctggcatcctgctgtaagtctgggtattgcatgccagggagggtgcacgtgcagttcctttaatttgggcactgttccatagagacagtccacaaatcccactgtgcagggggcaggctgtggcctcttctcgatctagtagcatactgccactaccacagcctcccccaggggggaaacagcaccaccccaccatttttctcatggtggcggaaccctgccaagtctcccccagttcccccaactacttcttgaaccccaccaacttgctggtggtgagggtgatggtgattcaccgtcactatggtgttaaagctgggagctggacactgctagggcccactccttctctttttcagcagggccccggagtactatgggtctcctggggggttcaacaactgttcattcct

SEQ ID NO: 440683 - DNA, 2091 bp, Homo Sapiens
  misc_feature (97)..(97): n is a, c, g, or t
  misc_feature (100)..(404): n is a, c, g, or t
  misc_feature (408)..(463): n is a, c, g, or t
  misc_feature (467)..(468): n is a, c, g, or t
  misc_feature (477)..(477): n is a, c, g, or t
  misc_feature (480)..(480): n is a, c, g, or t
  misc_feature (495)..(495): n is a, c, g, or t
  misc_feature (500)..(500): n is a, c, g, or t
  misc_feature (508)..(510): n is a, c, g, or t
  misc_feature (513)..(513): n is a, c, g, or t
  misc_feature (520)..(520): n is a, c, g, or t
  misc_feature (523)..(523): n is a, c, g, or t
  misc_feature (525)..(525): n is a, c, g, or t
  misc_feature (531)..(532): n is a, c, g, or t
tatataactctatagttgggttgttgtaaaatcctttaacataattgacaaaaattccatatgattaaataccgaaaataaagtactgtgttaaacnatnnnnnnnnnnnnnnnnnnnnnnnnnnnnnnnnnnnnnnnnnnnnnnnnnnnnnnnnnnnnnnnnnnnnnnnnnnnnnnnnnnnnnnnnnnnnnnnnnnnnnnnnnnnnnnnnnnnnnnnnnnnnnnnnnnnnnnnnnnnnnnnnnnnnnnnnnnnnnnnnnnnnnnnnnnnnnnnnnnnnnnnnnnnnnnnnnnnnnnnnnnnnnnnnnnnnnnnnnnnnnnnnnnnnnnnnnnnnnnnnnnnnnnnnnnnnnnnnnnnnnnnnnnnnnnnnnnnnnnnnnnnnnnnnnnnnnnnnnnnnnnnnnctgnnnnnnnnnnnnnnnnnnnnnnnnnnnnnnnnnnnnnnnnnnnnnnnnnnnnnnnngggnngccttctgnggntctgtttcacaccantgtgnctgggctnnntcncattggnctntncacatnnaacgggttaagatagtaaaatttatatgtgtttttaaaaatcacaatttaaaagatgcaaaaaaagagagtactttgcccatccccccaaagactataatctcaagtcttcaggtagggtaggaaatgtactaccctaatatataacacacaattaatcaaaaagtaaaaatgaaaatacctctgaaagaatattctcaaatgatattttttaaaaatcacagtttaacactcaactaagtgtctggattgaatgtagacttcaaaaacttactacgtaaacaagctataactttttaactcttcacaaattcctattttcagtgttcataatgaacaaggtttaaaaaagtggaaaggctcccaaaatactgagaacatatatgtatataaatcaaggatgggttcactcatttcaagctatgtcaagaagtctatgggatgaagcatgtctgttgtgatggatatagtacagaactaactccacggctgagttcttcagagtgagcctctgtaggctcatagtcctattttaaaggaataacctattgacccaatttgctggtgttataagcttggaggaatagcacaatttcaagttcctttcacaggtggagtttctgattagtctgtggttatttgaaacatggtctacacctactgcagaagccagcattattaaaagcatacattttcattgtgcaccataacttttggatttggggtcgtttcatactttttcagaaatactgtcttctaaattaaacagaaaaacatctatgtgaatatagcgatgcaacagttgtgatatgagaccatgtgatggatcaactaggtcagaatatttgtaaaatccagagtggcaaggaataaaaatagagaaacttactaaaaatcttctaccaaatagtgatgtaaaatgtgacgtattaacccatttctactgtgtcattctagcttgttttcattaaccatagcagaacttctaaaagtgagctctaaaatgtggcaaatttgataataaattgaaggcaaaagtcattagtctccgagaacaagaattgaagaatcactttggcactgaagccagatggcaaagactaaatgctcttcagaaattatgaacaattattcagttacatgagactgacataacagtgtcaagtagaaaaacatttgagacagcagtgaccattaaactcttgggggagagtcttaatttggaggaagaagttgattttggcggttttttaagggctaacgttgcttcacgctaaaaatatagaactgataataaacaagaatagctctcttcacctggccataatatctcgtataggaatttctattgcgaagaaattactatcaatgccaacaggctgggaagactttgttacccaatgtcatccctctaattcttagaaggattaaccaaccaactttttgctaacaatgtaggcacacataccaataaatgtgcatcttggtgaatataggactgtctggtaggcctcaggttatcttcagtcttcacactcttgatgttccaggaatgatgcg

SEQ ID NO: 440684 - DNA, 847 bp, Homo Sapiens
  misc_feature (614)..(626): n is a, c, g, or t
  misc_feature (692)..(692): n is a, c, g, or t
  misc_feature (708)..(708): n is a, c, g, or t
  misc_feature (730)..(730): n is a, c, g, or t
  misc_feature (754)..(754): n is a, c, g, or t
  misc_feature (767)..(767): n is a, c, g, or t
  misc_feature (823)..(824): n is a, c, g, or t
  misc_feature (828)..(828): n is a, c, g, or t
aactacggctaggtacgaggctcggtgttaaattcggcacgaggcctacacacccaggtcccacaggccccctccccactggaatttcaccaaccaacaaggggaaagtacgctgttacagcatagcggtcaggcccagcaggagcttggcacatgatggggaggtggccagctccaggccctgcccgaccccatcatgtgtatttggtgtatggggtgtggggggtcacaccagaagctggcctggggtctcttctttgctggacacagctccctggcccctgcccccagcccctgcagcccctgccggactgtggaagccacatatgggaaaagtcctggcagacaatgtggcgggatgactgggggcttctccctctgaacctgggtccagtgtagcctggctctgagagaaggtggtgagcatgtggagaaggttccatagtccactcttaggggaaccagcaaagcctcatggcagttggctccatctggacctcccatggtcactacaggatgttggagcagggggcatcttttagcctccccccgccaccacatccaggccctctcaggcacctcctgcctcagcccacacctgcctcacccattgnnnnnnnnnnnnnacctactgccatcccaatcatctgccagccacttcccagccgccccaccccactccatccaccaantcacctcctgacttantcctttctggaaggagctgccncccaggaaccggtattgcctagancctccaggagggnccctcctcaggcctccagtggccccatgcccacctgcctgaccctccactgccccnngaancaaagtccctatctgcagc

SEQ ID NO: 440685 - DNA, 2732 bp, Homo Sapiens
  misc_feature (316)..(316): n is a, c, g, or t
  misc_feature (361)..(361): n is a, c, g, or t
  misc_feature (366)..(366): n is a, c, g, or t
  misc_feature (369)..(369): n is a, c, g, or t
  misc_feature (399)..(399): n is a, c, g, or t
  misc_feature (404)..(431): n is a, c, g, or t
  misc_feature (448)..(448): n is a, c, g, or t
  misc_feature (456)..(457): n is a, c, g, or t
  misc_feature (471)..(471): n is a, c, g, or t
  misc_feature (475)..(475): n is a, c, g, or t
  misc_feature (529)..(529): n is a, c, g, or t
  misc_feature (531)..(531): n is a, c, g, or t
  misc_feature (534)..(534): n is a, c, g, or t
  misc_feature (588)..(588): n is a, c, g, or t
  misc_feature (2074)..(2122): n is a, c, g, or t
aaattttattttaattcacatttatttaaatataacattttttatagacacatgaaggtacttatgaacatttataacatggtaggcacaaatatagatgaaatgtttaggtattttcgacaaaatttcacacaaaattagacaaactgactatgtgcttgcatttaatttcaagggtacattaacatagatatttgaaaaggatgttcttttacaaaactactacaaaatgttcacatttgcatcagtaataagtcatatttcctagactgatgctttgtaagaactatgtaaagatctaatttaatcattaacnccatatggtaacattatatgtaaatgaagcatatttaaatcaatngacangtncctctcccttttccctcacatcgcctttgncttannnnnnnnnnnnnnnnnnnnnnnnnnnntgcctaatactttcccnctggggtnnttcctgtccctttntgcncggtgtttggtttcgctgtggcgctctgtctttgtgggggggtgtgcttggggntnggngcggggttgacgggtcgtgttgctggtgttcgggatggatgtgatttcggtttnccgtggcgtggaaaattctctatcacaatttacctcttccctttacagtttattgaccaatggcagttctgttttcattaaagtaagtaatggatattcaagaactaaaagtcatatctaggtgttctgcctatactctaattggaaatgagttgatttcagtttttccagcagtaaaacatttccatctgtattgtggcccacaaatttctaaataagggtgttatcagcaataatatgtttcatcctgagatgtttttcttcaggaggcagaggggttgaaaggaaatgtggatctcttcataaactgggaacatatgtggtaaggagagcaaatggcaaccgaggcagaagcagggaaagttctttggaaagctggtcagagagcacactgaagtagcaaaaaggcagagaacaaaggtgggaacacaacgattattcacgatggaaagggctgccatgggtttcagaaaaccgaaatgggccactccagaaagagcacgcagagcaggtctagcatccttgtatcagcaaactagcactgctgtttaggacaagttttaaatttccacatcaatgcatctgaagaaattaagctaactggcaacttttttctgaattcattcataaacactgtggaagaaaaaaatgcaggaataacaccaattcaacttcctacaaaccagagaggagacttcacacccacttcttgctcagacttcggagctgtagtgactgaaaaatgccacaattctttttcacagttcttctaagataaatttgaggtgttatattttgagagaccatctgaaggaatcgagtcctttcctaaaaccttcatagcctaatttgtatatttattatatgggagaaaggaagtagaacttaagttcaatttgtatacaaatgtacctttttcttaaaaatagagtagtgaacataatgctattttctttgctttatgatccttgctgaggaccttaaacagtgaaacggcaaagaacatcaaacaggttagataaaataggcgaacatattttaaagctgttaaggtgcaaacagacataaaggttatgaatcacagagcactgaattttcaagagtgaaatcataccaaaaccgtgataagttttcgctgccatcataggagagtaagtggtcgggaaggtcagtgatggtgccctgtactgccagcacatgcggggccagggtgaacggcacatcgctcaggagctcggccattaatgagctgttctccagagtctggcctgccttattttccatctcagggtctgatacagtcacactggatgaattttctttgttggtctccaaaggttggttggcctctatgtccgaagttttgcctcttgctgtcattctttgctcatctgttgtatctcctaaaaggacgaatccatctgcttctgtctctggtactgagggctttttagattccggaggctttctgaagaagtgaaacatnnnnnnnnnnnnnnnnnnnnnnnnnnnnnnnnnnnnnnnnnnnnnnnnnaccgtttgaaggtatttttatgtgcactcattctagaatactcctggcaaggccgccggcttcgggtcacaagatgagccaggggcagattggagactacccccaaatctcccaggaatcggttatcttccagacctccagatcgccctccagagtctcgcagtgtggagggcaacgacagaaagactgctgagggggtttaaactgttgggtcaaacatatggccaaaagtcagagtcaactgggaccttgcaaatcattccgcctaacccttcgttttgcagatggggaaaacacgcctcagaagggagaaccctaactcggggaaccctagctcggggtctaacaacgatttaagcttgtctcccctagtactggccagtggttctttcccgttacccatccttaagtgcttctattggctgccacacggaggggttagcggggtgaaagaaccggcgcctccgcagtgtggccaggttgggctaaaaaacgtcttagaagtaatcggatcaatctctcttcttacaggtggagaaagtggagaaagtagagtgacgcagctaagggagtaaatcgaccctcagccaacaagtggcaaaagcccgct

SEQ ID NO: 440686 - DNA, 716 bp, Homo Sapiens
ctggatctgaaaataatcaaaaattttattttaattcacatttatttaaatataacattttttatagacacatgaaggtacttatgaacatttataacatggtaggcacaaatatagatgaaatgtttaggtattttcgacaaaatttcacacaaaattagacaaactgactatgtgcttgcatttaatttcaagggtacattaacatagatgtttgaaaaggatgttcttttacaaaactactacaaaatgttcacgtttgcatcagtaataagtcatatttcctagactgatgctttgtaagaactatgtaaagatctaatttaatcattatcaccatatggtaacattatatgtaaatgaagcatatttttgtcaatagaaatgttcctctaacttttaaataacatagcatttgtattaaaaccatgccacatttattaaacaaacatgcgtaatactttaaaactggaataattcatgtacctttatgcacagtgtttagtttcactatggcactctatctttgtgaaaaaatatacttaaaacttggcacagagttaacaaatcatattgctggtaatcaaaataaatgtgatttcaatttcccatgacatagaaaattctctatcacaatttacctcttccctttacagtttattgaccaatggcagttctgttttcattaaagtaagtaatggatattcaagaactcc

SEQ ID NO: 440687 - DNA, 837 bp, Homo Sapiens
aataacgcaaaatgacttatggagacaaccactgatggggcaccaggagtgtagataccagacctctggttatcagatatgatgtcacaacattatatattggcctttgttctggcaggctcctagcaatagaaaaagttttctttgaatttcatcatttacaaatcttacaaatgctacagcatgacaaatattagtgaaacctgttgactcatcatcctggatagagaagctgctacttttcagttaatgacacaaaaccttttttgcatcatatgacatatcatcagtaaatcaacttattgagaataaagtctcttcaactttgtactgcatcttgccccagcattttaatgttattagattctcaccaaccatgcatattttcctttcctgagataagttctgctactaaataatttgcttcttaaaccttttgactaaaggtgatttctgaacaaaagccttactgtttttgatagtccaaaagccatttgaaaataatgaatatcctttcttgtcaagtggctgtgatttattgttacaattgctagttttgtaagttgcatgtcacagacaatgcacaatgggacaggagagcttggactgagtccacataatacccttgagaagtagctttctttattaagacagaatttctttgtgtcccttgttgcactagtatactgaagtatactcagaagactgaagttcttcatcaccaaccttttcagaaatgtctgtagttctatgcctaaaatggttctcgtctctctcacatcttggcttccaaaattgcgacactggactgtcagctatattacacgacaaatgtta

SEQ ID NO: 440688 - DNA, 2395 bp, Homo Sapiens
  misc_feature (749)..(749): n is a, c, g, or t
tcaccaggaaccgtttatggccccacccgccccactcagagctgctgagcaatctgctctatcctcttcagcgtctcctctgattctagctgctccaggctgagcagggacaggcccagctgatcctcccggtggaagggctgtgccatctgccgcaggaagtacttggccacctggacaccctcgtccacggtcaggttgaggttggcatctgtgaggtgctcctggatccagcggggcagcttcccccgcttgtccccacgggcaaaccgcttgtcggcaaagaccatgaggccgtagtccgtcttgcccctgatggcccgacccacacactgggccgcgtggcgcatggcatcgaaggtaagaaagtcattctcacgaatctggaactggtcccgcaggtattccagccgcgccttgagaatgcggctctgtgtgtagacgtaggggacgccaaacatgatgacggcccgcccgtagtggtgcacaaagtcgattccctcggacactttgccccgggccactgacagcaggatggccccgcggccattctcgcaggcctcctggtacttctccagggcgacactggtttcggcaccatcctgggtctcaataaagagcagcttgttcctctggatgttctcaagggatcccctgctccttccaggaggcccacggtgctttccctgtactggtagctggtgaagaaggccacgatgccatcagggaccacagcggacatctccagncaggagggttcccatagttcgggatcacagcaatatcctcccgggtctcaaatttggagctgatggccacctggtcattgccacggccgatgatcatagggcagaggcagacccgtgccagcgtcatggtgaaggttgccatggtgacggggtggaagtccaggatcttggggtagatgtccagcggggacagtgtcccagatgtgatgatgacagactggaaacgctcaaatacgggtttgatggccagcgaggcgtccatgcagctgaagtgcaggatggggttggcaatggtcggggttctgtcgtcaaagggctcgatgatgatggtgaagcctttggcgtaggtgctgacaagggtggcaaagttagcaaggagggtgagcggggagaagtcagcaaggtcggtgatctccagagtatgcagcagggaccggaggcgttcagcacagaatctgaggggcttgcgctggatgcacacgcgctgggccaggccgctcaggaaggcgggcgggctctcctgcaccacatgctgcacacgcagccgccacttcacgtactccagcagccgcctcaggaagcccaggaaatgctcggccgtgcggatggagccaggcactgcctcctgcagcacttcgtcgggcagcacggggttggccaggtgggcgtccgtctcccgggcggcgctggcctcccgcagcccctccaccagacgccggtactcgtcccgcaggcgctgctcgtctgtctctttgatcctgagcaccgtcttctgcagggtctccaggttgccctggcaccggtcaagggtccggcgggtgaggttgacgctcatggagtcgatgcagacgttgtcaatgttgtgggcctcgtcgaagaccacgacggccttgcgggccagttccttggacaccaggtctgcaatcttggggtccaggaggtagtggtagctataaaccaccacattggcatgcaggattgagtatcgagcaaggaagtatgggcaccagccctggcgccgccccagggccttcaggtcatccaggttgtagatgccagcggggaggggcacctcacgcccatgggcatcaaattcctcatagaagcggcagtggggcaggctggtgtcatgctggtactgcgcccgcacataggaggctgtgaggctgtggcatttcccatcgacgtccttcccaaagcgcaggggtgtcacctcagggtgaatacacaagtttttgcgggagctcagagccagtcccagaaacggcagcttctcgccctcctgcttctcatagaagttgagcaactttcgaagctcttcaatcaccttctcaatctctggcacagttcttgagcagtagatgagtttggtcacctccagcggatatgctctctggtatgccatgatcagggccaacagggatactgtcttcccggtgcctgagggcatctccaggactccatgacccttggcgtccagcgtgcgtttgagctcccgcatgtaggagaactgctcggggtagatgtagtcgtacgggaagtagaccaggagcccgtccacgttgagccgatgaccccatcttcaagaccccccgcgcccgctagcgagcgcgacccccagcccccttctcacttcatgatcccgg

SEQ ID NO: 440689 - DNA, 944 bp, Homo Sapiens
ccccatactttttatttgttaatttcatcacccccctcttcttctgatgtggtccccaccacctctgacatgcacgcattggctagggcctctcacactgaggctccacgcgaagggaagatgcaaagtccagtccctccaggagctagtgatggaagtcttgggaaaggagagtcccaagttcaagaagacagctagggtagaagggagggaggtcctcaaggggtagaggacaggagtccaaggaggtggctcaggtgcggggtggcgcctcaggagagcccagaaatcttccaggcagcactgtctggaacagggctgtgcactgacggtaccggcattttcatccccaacctcagtggcccccatgcccacctggggtgggatctcaggcagaggttttgtcccctctgaggctcccccacaacacgcctctgttgttccagctttgctgtgtgaccctggtccccggtgaggtaacaccaccactgagctttatccctgcagcctgggggtcctattcacctctgggctgtctcagggtgccatctgtctctttccagctgcttccctcgccagcgctatcaatccccccattcaatttctgctgttgaaatattcagtgtttctgtatccctagttggacctgagtgaagagatgtctgaagggcatctcatgtcaagaaccagactctgatcttcctcacaagcctcagtctgccccattcaattaacgatcccctcagccacccacagttcaggccacaaagctaggggtcatcgtggttttgtctcctccctcatcctgacatccacaccatcatttatattcttccatacacatcccacatctgagccagactccctcattgccagcaccctactccagcccaccatcctgctgcccctcgtgtccctccgtccattctccatctacatcgctc

SEQ ID NO: 440690 - DNA, 1416 bp, Homo Sapiens
  misc_feature (1037)..(1055): n is a, c, g, or t
  misc_feature (1074)..(1327): n is a, c, g, or t
  misc_feature (1403)..(1403): n is a, c, g, or t
aaccccacgttaaaaaagcagtttttaaagggtaagtgttttattcagggaatttgccaagaaatcagaaaatccagccttaaattgagaaaagaaaaaggaaatgtctcaggtccattaaaggccaattcataaagcaggcttgtcaaggcggggtgggatccaggaagctcaaagtgatatcttcatgacttgctttctctccatctctaagctctgctttcttctctggtgactcttttctcaggaggtatctttaaaatagcttcctgggcagatctagtaaatgctcacgtggtgccaggctcaggagttgtgaaaggcctgcaagaagtgggcctgcctttgcatcgggggtgcctccttattgcggaaatgagctccaccggctccctggccactggggactacactagagcagcggttagaatggctgaggagcactctgaatttgttgttggttttatttctggctcccgagtaagcatgaaaccagaatttcttcacttgactccaggagttcagttggaagcaggaggagataatcttggccaacagtacaatagcccacaagaagttattggcaaacgaggttccgatatcatcattgtaggtcgtggcataatctcagcagctgatcgtctggaagcagcagagatgtacagaaaagctgcttgggaagcgtatttgagtagacttggtgtttgagtgcttcagatacatttttcagatacaatgtgaagacattgaagatatgtggtcctcctgaaagtcactggctggaaataatccaattattcctgcttggattcttccacagggcctgtgtaagaatgggttctggagttctcatggtctttaggaaatattgagtaatttgtaatcaccgcattgatactataataagttcattcttaagcttgctttttttgagactggtgtttgttagacagccacagtcctgtctgggttagggtcttccacatttgaggatccttcctatctctccatgggactagactgctttgttattctannnnnnnnnnnnnnnnnnncgagacaggatctcactcnnnnnnnnnnnnnnnnnnnnnnnnnnnnnnnnnnnnnnnnnnnnnnnnnnnnnnnnnnnnnnnnnnnnnnnnnnnnnnnnnnnnnnnnnnnnnnnnnnnnnnnnnnnnnnnnnnnnnnnnnnnnnnnnnnnnnnnnnnnnnnnnnnnnnnnnnnnnnnnnnnnnnnnnnnnnnnnnnnnnnnnnnnnnnnnnnnnnnnnnnnnnnnnnnnnnnnnnnnnnnnnnnnnnnnnnnnnnnnnnnnnnnnnnnnnnnncagcctaattgcagtaagacaaaattctagggcaccaagagggctaagtcagcacagctttttcttggggcctggnattctctggctaa

SEQ ID NO: 440691 - DNA, 1941 bp, Homo Sapiens
  misc_feature (1743)..(1751): n is a, c, g, or t
tttcagagatcttccaaaaatttattaagtgtttacttttaaagtggaaacaatgtttttaagaggtgatataaagaaatgcccccactgtaatccctaccatatgttgattctatgtggtgggagggaggggagaatgattcctttttctagaatcagagaatttggaaagtatcaagaaagataataacagaaagcatgaaatagagttgtgctttgaagatgaattggatgaaattgttatgtgaagaggagttttccaaagttgcagacccaggattcctggccagaagcatgaaaacgtttctttcttactgtttctaggacctaggcagcatttcttccatgtctgcaacaacataagaaacaacagcccaaacagcagcagcaacattcatctgctttggatccatgacagtcatggtgtcttccgtgggagtgatggaagaagaaatacttgtataagtcatcaagtagactggctccaggcactccagcttggatccaaaagttgatgtctgtcccttctccatggctcaggacctgagtgatattgaggggctgcagcaggctcataacctcctccatgatggccctggccttttcactgccagtgaattgcagcccagtgggtaagaaggttcctgcgtcagactccatcaccagactgtagttggaaatatttaccttgtgtaactgataatactggaaggcaccaactccaccttgttcttctgcagtccagagcaccagccgcagagtcctctttggacgcagcccaagatctttaataagtgagagtgcttcccatgatataaaggctccaccgccatcatccatggcaccctgcccaacatcccagctgtccagatgtccactgaccagtacaacctgttctggatatttgctcccagtgatctctgctacagtgttgaaggaaatcagtattctgggtaggtctttgccccccatctttagctgaatgacaattttgatcccatgagaagccattcttgacatcatttctgcatcttccaccgtaatacaggctgttggaatcttgggcacgccatcctggtattcctgaatacctgtgtgaggactgtagatggagaaggaggccacggatcgaatgagagatgccaaagccccaaccttggcagcttccaccgccccctgcgttcggtattgcaccgtccttgagtagttgatgtaaggttggttataaacaacaatcttccctcttgcttctgaggcccttctctgcagttcatcgaaagaggtcaccaccagaacttctgctgtaatgccttctggaggagtcccaatgctgctgccaagacccaggatggctatcttatgaattcttggctccagcatcacagctgattcttctcccctctcccagtggggtattctcactggctccaggtgaactttctccagcccatcttgctgcaggttttggtacataatttggatggctttttctaggttcttggagccactcagtctgggtccaacagtatcaaccagaagtgccaatcgctcataggatctgttctgggctttaccataaacagctaggttgatgattgctttagcaacatctccacagctggctatttcttcttttatttcttcaaaagtcctcttagagatgccattcttgcatatagctttcccagagcacagggataaaaggtgaacaccaccgaaaaatgcgaagataaggaatttcannnnnnnnnccagttggttttcttgttaagataatctgatagggcggctctgacggcggcgacggaggcggctcccaggactaagctcgcggcctagccttacggtggcggcggccacacacctcgcctgggctggggccctccgcgccgccccgtgactgcagccctgcttgccggccaggccgcgggccgagaggcg

SEQ ID NO: 440692 - DNA, 1293 bp, Homo Sapiens
tttacaaaaggctttttattgtggtcatcatggtttctcagtgccacagaaaattgctatgtagggacaaaaaatttttggatggctctgtaaagaaacatggtaggttttcagaaatgagttgtgcaggaatgtggttaatgaaaagcagaaagggttaagggaagagaaaggaagccaaggagtgtggtatgtacatcaaatgattactttttaagcccctctaggctctgataaccctttccccaagtcagatcccaacaaaattcatcagtaactgaagtgattgtgctaacagatacataaagactaccggagaaaagtgggttgagatgggctcagacttattgttaggacaactctgggagtcttgtgtctgtgccaaccacgtatccgttggctacctggagatgagttctaacaaccagcacagaacccaaagctgctctccaacacctttgtttagtagggaaaacctgtagtggggacaagagaggaagctgtgcccttcccccaaccaccgtttcatcttctgctcgctgaccttgatgtgacttgagagctctccttgcttcggctgtgcagtccagaagccagaacttcctctaggaaacttttcgtgttgtgcactgtggtgcctcccaggacaatcctcactccaggagtggtgcggttcaaggttataaactgttagagcctcttcataggtgggctcctccaattacaaacacaatgatatcctgaggtctgtctctgagtgtgctggggcctaaataaggatataggttttccttaagccttcctttgatgagatgttccagggtttcatgtaggaaaggttgatgctgtgtatatacattttctactcccttcagtcctttgaggaattgtttggtgatagccacagcatctttggggctgaagaggtcacttcctctgactcgtttaccaccatattcaacaactgcagacacgagctttatacttctcagaaacacctttattcctgaggtccatcattagtccctggcaggctattgctgctgtgtcgctcataatgtaaagcataaagcatcaccaggcgggcagcatcaaactctgtcactttggggttctgcagaagcctttttatattctggagagcactagaatggtcattttgacaggccagttcttgctcaacctctgaaacctccagcagattccgttcactgaccaatcgagacagttctccaaccactgtcacatgctttgaaacagtcccagacattttcttgaactgtggataattct

SEQ ID NO: 440693 - DNA, 1217 bp, Homo Sapiens
  misc_feature (126)..(135): n is a, c, g, or t
  misc_feature (138)..(224): n is a, c, g, or t
ctcgtcttgctcttgttctgtcgtattattatgctctctctctttttgtgtgcccctctgcttcagcacaaatgctgggttgtctgtgtacgggggcgccccccggggggtgaattcttttggcgnnnnnnnnnnttnnnnnnnnnnnnnnnnnnnnnnnnnnnnnnnnnnnnnnnnnnnnnnnnnnnnnnnnnnnnnnnnnnnnnnnnnnnnnnnnnnnnnnncctttcaccaaaatggatttttattgtggtcatacatggtttctcagtgccacagaaaattgctatgtagggacaaaaaatttttggatggctctgtaaagaaacatggtaggttttcagaaatgagttgtgcaggaatgtggttaatgaaaagcagaaagggttaagggaagagaaaggaagccaaggagtgtggtatgtacatcaaatgattactttttaagcccctctaggctctgataaccctttccccaagtcagatcccaacaaaattcatcagtaactgaagtgattgtgctaacagatacataaagactaccggagaaaagtgggttgagatgggctcagacttattgttaggacaactctgggagtcttgtgtctgtgccaaccacgtatccgtgggctacctggagatgagttctaacaaccagcacagaacccaaagctgctctccaacacctttgtttagtagggaaaacctgtagtggggacaagagaggaagctgtgcccttcccccaaccaccgtttcatcttctgctcgctgaccttgatgtgacttgagagctctccttgcttcggctgtgcagtccagaagccagaacttcctctaggaaacttttcgtgttgtgcactgtggtgcctcccaggacaatcctcactccaggagtggtgcggttcaggttataaactgttagagcctcttcataggtggctcctccaattacaaacacaatgatatcctgaggtaaatggtacagttcttatgagcatttactgcaggaaaaaaggcccatggaaaaggactgctgccttcagcggaaaccagaagaataagcctgtagcaagcgaggattctactacaatttgtataacccatgcaaaagtactttcctttttgaattgactgattctggaattgctgatactataggcccatttgctgcacctaatgagaaagttgcttgcctgtatcagagacaagaaatccg

SEQ ID NO: 440694 - DNA, 922 bp, Homo Sapiens
  misc_feature (685)..(875): n is a, c, g, or t
ataaaacgctaaaagtgaattcactttatttgaaaagaagttgatattcctattaaaaccccaccatggaactgggttaaggtttaatggcaatgccaaggccatccctagagaggaaatccaaaaataattaagagggtaagggcattgtttgcttttagaaaaccttaaagggtaaccctataatatggtatctggaagaaaaagcatgttaaattgggaacaaaagtttatgaagaatgtcttcaagtacttgaaggactttttgggaaattacaagatagcaattgtaggttccatatgtctagaaaacttttcaaaactgtaagcaacttttgcaaatggtatgggaacataaaactcttccagcatagaggaaaatgggtgctattgacattcagatggttatgggaccatcataacggtttgatgtgatgtgcagggtgctgcatccccaactatgaccctcagtatgacttttaagggaattataagctccaaatactttttggagtataaacagtacttgactttttcacacatttgctaatacccttctcataagttttatttctttctgatgtttcagctaacactgagttaacagaagctgaataataataaaatgaagaacagatagtaaatatattgaaattgtcattcctggccgggtgtggtggcttannnnnnnnnnnnnnnnnnnnnnnnnnnnnnnnnnnnnnnnnnnnnnnnnnnnnnnnnnnnnnnnnnnnnnnnnnnnnnnnnnnnnnnnnnnnnnnnnnnnnnnnnnnnnnnnnnnnnnnnnnnnnnnnnnnnnnnnnnnnnnnnnnnnnnnnnnnnnnnnnnnnnnnnnnnnnnnnnnnnnnnnnnnnnnngtcgcgccgctgcactccagccccggtgaacaggagcaatgacctcc

SEQ ID NO: 440695 - DNA, 465 bp, Homo Sapiens
  misc_feature (407)..(407): n is a, c, g, or t
  misc_feature (437)..(437): n is a, c, g, or t
tagtaagtatacatttaggtgtgaattttttattgaaataaacaacagcataaagaatacaagtagccaaaatggttttgaaaacccaaattaggtcaaagttctaaattaaaaatagcagttgtgtatcaatttaccttattctagcaatttaagttggtaacatacaaagttattctgatacaagatattaaagacacacttggttttaatcaactacctttgaagacaccaaatctaaacactactggaaacatcgttgacactacagccaaatggacttgagccaaattttctcaagcacaaatgcaaactcattaactatttctttcagtatctaagaatatctttattgaaaaagattaaaaataaaatcagttcgccagaagcagttaggaagtgtgggnttgttcgtgtcccaggcgggttgttaaatntatacctaaagggggatcttgccagttt

SEQ ID NO: 440696 - DNA, 406 bp, Homo Sapiens
  misc_feature (227)..(245): n is a, c, g, or t
ttaccttattcctagcaattttaagttggtaacatacaaagttattcctggatacaagatattaaagacacacttggttttaatcaactacctttgaagacaccaaatctaaacactactggaaacatcgttgacactacagccaaatggacttgagccaaattttctcaagcacaaatgcaaactcattaactatttctttcagtatctaagaatatctttattgnnnnnnnnnnnnnnnnnnntcagttcgccagaagcagttagaagtgtggctttgttcgtgtccaagcggattgttaaaatatatacataaagggaaatcttgccagatgtcacaaattatagcggcacccgttcagatttagggtgagtttctgatcaacctatcagtctccaattttac

SEQ ID NO: 440697 - DNA, 1190 bp, Homo Sapiens
  misc_feature (41)..(57): n is a, c, g, or t
gacatgtctacttgtgtttattctcatttttgctttttttnnnnnnnnnnnnnnnnntgagggatggagagggaaataacccataaacaccgcgaacaggaaccaagactccaagacttgggcatactccctctaccctcagcctcagttctccaagagattcccacccacctgattttcttttaaacaagacacccaaatcagcagcaaaggtacctggggtagtcactgagattttgaacactgggaatgggagggggaaagtccaaaaagtagaagttgggaagaaaagggaaggattgagggagacgctaggctctggaggacagagctgggccgcaggaggtggaagccagtatggggggtacccctcctgactgctgttgcccgtattcccccagaccccagagagccccacggtttgttctgcagtccattccctattccccaaaggcctcagaggcctaactccaagtcctctaactcctcttctagcgccctcctccttgctagcttttctagctgctctttgctgggctggctgacttccccagcctggatccgctgctgcagctcttccacctgccggagtttcttctttaggttctttatcttcttggctttctcagtggtggcagctgagtcaggctggtcagatgcagctgtgggggctgcccgagagccctgtggagcactggggagttgggctgtctcttccagggacaccttatcaagagtcctgctcaaggcctctgcctctcctttctcttgctgctgccgcctcttctcctttcgcttcaggttacgtttggctgtcttggagaggcctggttcaccaccttcaggcctggatggggtgacaggagcagtggcctcagggcttagccctgggggcaactctggtttactcttgaaaaacttcacatacttgttttcatatactgggacctcctcctggggcacatatccttctttcaccctccgctgcttgcgccaggtcccgtcaggtcgctgtgttgacgcgatatacttgcctgtctccgtagccgcagggctgccggcagcttccatggccgaagaggcatgcggaccaggttgggcgggcggcctggcctggctctgccccgctgggcggcgcacggggattcggcggcgaagtgatgagggccctagttgcttctcgcccagac

SEQ ID NO: 440698 - DNA, 770 bp, Homo Sapiens
  misc_feature (253)..(253): n is a, c, g, or t
ctggatccgctcttgcagctcttccacctgccggagtttcttctttaggttcttttatcttctggctttctcagtgtgccactgagttcaggctgtcagatgcagctgtggggctgcccgagagccctgtggagcactggggagttggctgtctcttccagggacaccttatcaagagtcctgctcaaggcctctgcctctcctttctcttgctgctgccgcctcttctcctttcgcttcaggttacgtttgnctgtcttggagaggcctggttcaccaccttcaggcctggatggggtgacaggagcagtggcctcagggcttagccctgggggcaactctggtttactcttgaaaaacttcacatacttgttttcatatactgggacctcctcctggggcacatatccttctttcaccctccgctgcttgcgccaggtcccgtcaggtcgctgtgttgacgcgatatacttgccattactgagcgcttgctgcctgtaaaacagtcctcagggagccaagagaagttccgaggcacagtccctctcatccccaggaactcctcgtacgtccaggacctgcgagggaaaagggcgcaaggcccacctgcacccaaaaagggggccttataaatgaagaaaggaagaatatccaggctctggcctgcacccagatctcagagcggcttggtgacgtggagcagacaaactccaggaacgcactggggcgcacaagtgtttctagggacggttggagaccctacctccgct

SEQ ID NO: 440699 - DNA, 1586 bp, Homo Sapiens
  misc_feature (113)..(154): n is a, c, g, or t
  misc_feature (279)..(312): n is a, c, g, or t
  misc_feature (387)..(395): n is a, c, g, or t
ggggaatgcgtaggggggaataggagggggaacccgaagaagaggggcggaatcgcaaaaggagcaggcgcaacaggtttgggagccgcgatgcccgcgggaggaatcacaannnnnnnnnnnnnnnnnnnnnnnnnnnnnnnnnnnnnnnnnnacgcgccggtccgcctgtagaagggagaaggcggaaaatgagaagggccccggggcccatttattggggaagaaggagggtattgggcccccgccccccgggaaaggtgggagcccagcttggtnnnnnnnnnnnnnnnnnnnnnnnnnnnnnnnnnnactaagggagagggtaggccaaacccgttagcgggattggagccatccaagaaaggagggggtcccagggaatannnnnnnnnagcgcaatgccgtacggagcagatcccttgtcggtaggggggaaaccaagggagtggccccatgtggagcgtagaactcagcgagccaatcccttaatggagggaatgtgtcgctaggcggagagagacggcatacccaatcgggaaacgggacagatcgcgctcctcggcgcggcaggtcgtgggctggaaggacggcggggattggcaggaggcgggacaatcttgggaatgggagacgcaaggaggccggtcccggatcggcctcagattagcaggccccgggagtggggcgggggcgtagtgtgggacggggcggacgcggcccggggcgctccctccctggacttcaatatttccgcttcagcttctggaagtcgctggtgttaagccgcggccgtggcaggtccccgaagacctgggtgtcctcggcctctcgcagcaccagcgcgcgcatgctcgccgcgatgcggtccaggtcgggcgaagagggcggcccattctcctcatctgatgaccgcgcctctgtcctcttctccttgaagccccatgacgggcacagacacaggcagggacttggcgtactgctgtgtgggtagggctgaggctgggggcactgagcaggtgggggggccggcgggggtctcctcgctcaggctgccatcatctgtactctcggggtctgactcacagaaggggggaaggtcctggagggtggcgtcctcatccatcacaaagagccctccattatcactaatgcccagctgctccccggaggtctctgtctctgtgggctcatcctcgtcctcctcgttgtcctctctggccagggtaggaccggggtgggctgggtgtgggactgggtggctgtggtgctggtgggggcgcaggaggccgagcagcagtggcagccctgtgggccagtgcgatgtcgtggaggcaacggcgcgctgcctccgccagggctcctcgaccatgggcagcataggcacaggggcccgggcggggtggtggcggcggggccgcggtcagcagcaccagctccgtgccagtccgggcccggaagcgctcagcggcccccaccacggcctcccacagctcctcggggcgccccgacgccatccgcgccgtgcccgtagccagcatggccggcccggcgccgtccctcgtgccgaattcgccacccaggcc

SEQ ID NO: 440700 - DNA, 1042 bp, Homo Sapiens
  misc_feature (3)..(3): n is a, c, g, or t
  misc_feature (8)..(8): n is a, c, g, or t
  misc_feature (18)..(19): n is a, c, g, or t
  misc_feature (24)..(24): n is a, c, g, or t
  misc_feature (32)..(34): n is a, c, g, or t
  misc_feature (38)..(39): n is a, c, g, or t
  misc_feature (42)..(42): n is a, c, g, or t
  misc_feature (45)..(45): n is a, c, g, or t
  misc_feature (63)..(63): n is a, c, g, or t
  misc_feature (66)..(67): n is a, c, g, or t
  misc_feature (77)..(77): n is a, c, g, or t
  misc_feature (82)..(83): n is a, c, g, or t
  misc_feature (97)..(97): n is a, c, g, or t
  misc_feature (99)..(99): n is a, c, g, or t
  misc_feature (104)..(104): n is a, c, g, or t
  misc_feature (116)..(116): n is a, c, g, or t
  misc_feature (141)..(142): n is a, c, g, or t
  misc_feature (164)..(164): n is a, c, g, or t
  misc_feature (166)..(166): n is a, c, g, or t
  misc_feature (755)..(777): n is a, c, g, or t
ttnaagcnccctttatannaggcnttcatcannngatnngcnttntgacagaaattatttcanttnnatcagaccantccanntctggaaatcttgnancgacnacatccttgtcntccttaacagagtatgggtaacttnntatcttctccacttgatctggntnacacccagctcacagcaacacactctgagcaactcttggtaggtgagctcctgtcggtccagttcaatttcaatgaaatcattttctcgaagagatgggttctgaattctcaccttgagtaccagctcttgcatattaaatggaaatgctccagtgaagaaaaatggctggagatgtggcgctggtcctgcatacgtcccattttgaggctccagagacattggtggcttggacgggacagaagaaaacagggagcggctctgactcactggtggctgacaaacaggacccggttttgtgctttctggtgttctgagtatggcagagggggccgacacatcaccattctgaactagtgccaaagaggtgtggtcccggggaaaggtccctaacaggggaggttccccagggggaagcaatggaggtgagccatctgcagggggtgatgcagggggtgtggaggggcccccattctgcatctgggctgaatcctctgctgtgggtgtatagataaaagggaaggctgggttggccaaatagttgggaacaaagggcagttctgactccttcttcagctgggggaggttgnnnnnnnnnnnnnnnnnnnnnnnttcttcttccactcccataatcttcctgatttctctccttgatgttaactggactggcatttctccttttgtggtaagaatttctttgtcagctcctgattttaacaggtaagagaccacctgaccatggtttcgtttacatgcccagtgtaaacaagtccagccgttgacctcattttgggagttcacatccaccccgctctccaccagtttctgcacctcccgaatgtcccctaaggccgcggcctcccgcagcctctcctgc

SEQ ID NO: 440701 - DNA, 1045 bp, Homo Sapiens
  misc_feature (7)..(7): n is a, c, g, or t
  misc_feature (10)..(10): n is a, c, g, or t
  misc_feature (13)..(13): n is a, c, g, or t
  misc_feature (17)..(17): n is a, c, g, or t
  misc_feature (35)..(35): n is a, c, g, or t
  misc_feature (74)..(74): n is a, c, g, or t
  misc_feature (76)..(76): n is a, c, g, or t
  misc_feature (85)..(85): n is a, c, g, or t
tcagctnccnccncccncggttcatatgcaggagnactcgcacccagagccccgccgtcacagcactaagaagngntgagcacanccaacagactgcaaagaggatggctatggcacaccattggcgccgatcactggtcatatgagatacttttgcaagtttcttcatcacattgtccagccgggactgagtgctctccaattcgtgagagaaatcttccaacataactgcctgttcctccagctcccctccgatgcgctgggacatgttcttcagcaccccgatgctgccagagaccagctccaactgctcatcctgctgttccacgatcaactgctgctgtgcctgctgctcctcaatgaaatgagaattggctctctggagctctcggtccagacgcccatatttatctgttgttccagtgctccagttctggctgccactgtctcccagcagtgcctgtctattttttctttcagctaatgcctgcacagatgaagttgacatctgatctttcatgtccctgacaacttgccgagtacttgtaatgaaggcttttcttatactcaattcagttgcatcaaggttaaattttctaggatttgcttcaactatgctgatggtttcatcaaggtcctctagatcccactctatgctccggaggttatttctcagctcgttggtggtccagtcgatttcttcccttgttgctgtggaggggtcctggaggagctctgtccatctctgaaacaatccctgggcagtgttgactgctttctgtacctctcctttcaccacaaagaaggggtcctccatggacatggcgtcccggccccggccgccttcacctcctccgcgcacagggcgcccgtgcctcccggtctccctccgcccaccccgcctgttcccgcagctgcccgcgccttagtctgggtgaagccgagcagcgggcacgcgcacaggccaggtgcacaggacggccgctggtccagcactcgctcagcaccactggccgaatcccggactcgggcgccggccccctcg

SEQ ID NO: 440702 - DNA, 1319 bp, Homo Sapiens
  misc_feature (25)..(25): n is a, c, g, or t
  misc_feature (85)..(86): n is a, c, g, or t
  misc_feature (1037)..(1037): n is a, c, g, or t
  misc_feature (1058)..(1058): n is a, c, g, or t
  misc_feature (1271)..(1271): n is a, c, g, or t
aatcagcattcacttcacaaaaganccaaggaggtggagggaaatcattcccgcccagccaattttttccttacacacagcagcnnttgcataattgcatcaaatcccactttcggggtgtgtcaatattagcagaaattttctgattcttcacaatttcattgaatctttcagcatcatttgtcaatggcaaaatgtgcttgaatccaaatgtaggtaaacagaagtatggaatactgcaagggttggcaatttcttctggtgttgttttcacaaaaggggatacaggtttttccacaaaagatccgaggcccagtctaaagttgctggttaatttagccatctttttggaaagccgggaagcccggctcctttattgtgttgaggtggtcatccctggaggcggagaggtcccattaggtaatacaaatcccccgggtagtcctcagtctggcggacaatgcacctgcagagtttgcgcaccacctggtctcaacttaaggatcaagctttgaggcgcaatctgaacaatgtcagaactatttttctgtctgcctacactgagaggcttatttttaagtatttctacttgggagacagggttttcgatgaagtttaattgacatcctttagctaaaaggtttgctggggtatcacacctttcgccaactccagatggatgagtaaaattctcctgagcacaccaggcacactgaggtccaataagcaggcagtcttcacaggtttctgcacctcccagggcacagccaccttgtacgtgatcattccttcctagaaatagaaagaacaggcaaagcagttcaatccccattcgtttcagttcttgctgtgcagaccgattaaaaaatgaattaccttcagcgttacaagaccaacgctgaatatcgttaaagtctttctttcttgaagtttaactttttaaatactacttacactgctttgaaaagaaacttgagatataagttagaaagttttcattaagactgaaatgaaaacagaggctacctggacaggtnaagcagaaaagctgtgttttnatgctacttctacatgatttacttccttgttctccttataaggaaggcaggtgtacaatcaccaagaaggtggggaaattcattcagtagaaattttggtgtaagttctatgagtctctctgcatccttagagagacttttttgtggccaggcttttgtctgaggagattattttttcaaggagcattcctgggtaagcatgtgaaacctctncagggtagaacctttaatttcagaaagtgctggcatgcattactgcac

SEQ ID NO: 440703 - DNA, 490 bp, Homo Sapiens
ccaaatggtgctatttttctaaggaaattaaataattttaaactcactcgttaaagttatacaatgcaaacaaagacaaaaaatatattgaaactcatgcatttctgtagcgttaatatttacttttcaagactcaactaagagcatcaacacaacctgtcaagttctttgacacccccccagcccatgtaatcaattacagtatacaataacagtaattcacatttttaaacacacagttcaacactgctgaagctgcaatatcctttttcatcccaagcaaaccttcataagacagtgtcccagtgatcccagtgtactttcagcatttctctcactgggaactgtcagaaaaccagaagttgccacagaaagttttaagtcaactgcttgtttaaaaatagatatatccagcatttcagaaattttccatttgggtctaaaagcattcaggtttccaacagccagaaaaaattcatgcaatttgaga

SEQ ID NO: 440704 - DNA, 1552 bp, Homo Sapiens
tgggattttttcatgtttattggcccctctacatttttttctttaaaaaaattcacaaagcatgtttatatttgttagctcttttgattctccctatgatagtgtgaagacagggacaaaacgctaccatttcacactcccagatctaacaatagctaccaagtaattatgccatgcgtttcttctaaccttcgcaatatcactacgaggtagttcttactatcctcattttacagataaggaaactgaggctaagtgacgctggcagacttgcccaaggccacacagctggtaacagggactggtagtcacttgagtcctacatcagcacccttgctactacagcagctcctcccctttctagaggcctagatggaaagatgctggtgtcagcggggggcacaaaggtccacccagtcccacacatgcagagaggcatcatttgttgctgataacaaagtccttggtctgcagggatgccaggtgtgggtggtgaccaaaggagcagggtccatcccatttccatctaggaagatgtgacctctgtgagtgaaagagaggttctacttggctccgtgttccatcttggctccgtgttccatcccaagatgtggcatcatagacctggactgtaccatcaaaacctgagatgccaagcaattcttcaggcctggggcccaagtcactcgcagcagctctgggtcagggctaggtacggatactgggcactggactgagctcacaggatggcagagatcccgggggtcaagaagacaaagacgcccatctgagccaaggctggcaatgcttggcccagggccctggccccagctcccaacttcagcacaccatctctctccaccagacccagggccagggctgcgattctccaacggtgcccacttctgccgggtgtcaacaagccccagccggcccgaagcacagcagaaggcaaaggtgtctgcatctaggacctgcaggctactcagctcctcactgtcactgacatctgaggtgtacgtggtcttccgggactccagatcaacgacctgcagacttcggagcctcgccccatggaggactccgggtgccaatgtggagaagacggccaccctaggccagagactctcctctttctcatgcacagcaatggtgctgacagctttaatgacatcactgtcctctgcaacctgccacacctgcagataacaacctggaaggccactggtaaccagcaatctggtatgtggcacatgctttagatcaaagatagacctgtctgaaaatcctccatggcgcactttgaaatctctttctgggaataagcccttgttttcctttacagaaagtctgagaggtaatttcagatgaagaatttcattctttttcaggctttcatagccagcaacaaagactcctttgtcatcaatccattcaaggactcgagtggctcctgacaggtcgaatgcatagaaatcctggtacaagcgcaaggattccaccagccagtcgtccccagcctccgtgccgaattcgccacccaggcctcgct

SEQ ID NO: 440705 - DNA, 1136 bp, Homo Sapiens
ccacaaagggagccaggggtgccattccccctttttccatttaaaggaagaatgtggccttttgggaaggggagggggaggttgtttctttggctccgggtttcccattttgggttccctggttccattccccaggatggggccatcatagacctgggactgtaccatcaaaacctggagatggccaagcaatttttcaaggcctgggggcccaaagtcacttggcagcagctttgggttcagggctaggtacggatactggggcactggactgagctcacaggatggcagagatcccgggggtcaagaagacaaagacgcccatctgagccaaggctggcaatgctgggcccagggccctggccccagctcccaacttcagcacaccatctctctccaccagacccagggccagggctgcgattctccaacggtgcccacttctgccgggtgtcaacaagccccagccggcccgaagcacagcagaaggcaaaggtgtctgcatctaggacctgcaggctactcagctcctcactgtcactgacatctgaggtgtacgtggtcttccgggactccagatcaacgacctgcagacttcggagcctcgccccatggaggactccgggtgccaatgtggagaagacggccaccctaggccagagactctcctctttctcatgcacagcaatggtgctgacagctttaatgacatcactgtcctctgcaacctgccacacctgcagataacaacctggaaggccactggtaaccagcaatctggtatgtggcacatgctttagatcaaagatagacctgtctgaaaatcctccatggcgcactttgaaatctctttctgggaataagcccttgttttcctttacagaaagtctgagaggtaatttcagatgaagaatttcattctttttcaggctttcatagccagcaacaaagactcctttgtcatcaatccattcaaggactcgagtggctcctgacaggtcgaatgcatagaaatcctggtacaagcgcaaggattccaccagccagtcgtccccaggatccatggcaacgaccgcttccggcgtctcacttccgcctgcgagccttcgggggccgcgcggctctcgcgagatccc

SEQ ID NO: 440706 - DNA, 1040 bp, Homo Sapiens
  misc_feature (52)..(52): n is a, c, g, or t
  misc_feature (174)..(174): n is a, c, g, or t
tcgcgcctcccgggccgtcactttttttatcgcggggtccgccgccggcccncagccccggccccggtgtccggcccgtggctcggccagcccggcccgcgcggtctctgcaggaggaggcggctccggacgccccctggggggcgggaggcgctcggcccgtcgccccaggancccgctttgtgaccttgggggccttatccgggctttccctcatctgcagaaggagccccggtgggctgctcggctgtcttctgctgccggcaggagctggtcctccaccttctctggtcatccgtgggtggacttcttgggagaaagaactcagtgtcgtctttggaggcagagactctccactgcttctggggaagaagcctgacctgccggcttcctggcacctgtctctcctcctagccccgttgtgccttgcaagtgcctgcatcctgtctgtgctgagacctcttggcgttccctgctggcctggttcatgtgtgttgaggaccaggtaagcgtctctttgtcctgtgtattaggtgggcttttccttctggctaaacatgggccaccctcgggctgtgtgatgcttccttgtggataaagactgggataaatgcctgatttactccaggaaagagcagcagttcacaccaggcacgtagttcttggtgaaaaggagctgagactggcatcccaggggtcacgcggaggggccattggggcagcctttctgggtacagaatgtcttgatggtgcagggtaagatcgtgggaaggcccggtcctccctcatctccattgccttcaactacataacaggaggagtaaatcctgctccctgcgcccccgccaggctgcgggagaccctgtgaggggaccgtgtggtgtgctgagagcagcccgtcactggcgtccatctgcatttcaggccacgtggaggctcgctcccagggaggatggcggcgctccacacgactcccgactccccagctgcccagctggagcgggcagaggacgggtcagagtgcgaccctgaccaggaag

SEQ ID NO: 440707 - DNA, 1759 bp, Homo Sapiens
  misc_feature (1418)..(1418): n is a, c, g, or t
  misc_feature (1506)..(1506): n is a, c, g, or t
gggttaagatacaaaaaggaccacctttaggtccaaccactggaaaaagaccctccccacactactgtggtgcccagtcaggaagaggctggtcagagacagctgacaccaggcccgcggtacttgtggagcagagaggtggctcccaatgaagggcccacactgcctctcatcaggatgccctgcagtacccctgacctgggcatccccagtaggcattctctctgttgatgacccacactctttgacaaaccagacctttatggattagactgttttgactcatctgcaggtggaacacacagctggtacaataaaaagagtatgtgcatgagtccccaggaaatccagagcagggaggagagcctgggtgaacacaaaagtgggtgactcatcacaggcttgcatgtctgtggtgcaggctacatgctgctcctgtcttgaggccaactcagggaatggtgaactgcctggagggatcctgggccattccttgggagcgggtgactcatagcactccctcagtaggcacagtggctgactgcctcaaagctggatgagactagtaataaggactctgagatgaagtccgccctcctcgcccatcttctcaccgctaacccaccaggctccagaagtcgcctagaatcccagggttcggccgctgagcaaaagctagcgatgtgcacttggacatgtttcctctccctggtaattcacaaatccctttctgacatactttgcctcattagtgggaacctggtaaggacatctaggctatagccctgactccaggaccgtttatggacatcccaggaggagcacatcccacttccacatttccagaaagtaactggcagcctctgcagcctacaggacatggtgtcttcactcagatccttcttaaaagccctacctggccctcctcagccactgtcggtaactgggtaggagacgggaactaaatgacccaaattgggcaaggattcatcttaagatctggagagattccccacgagagtccatatttcccacaacagcctccacaattgttttcattctccttttctgaggttccatcccattaagaattgtgacatgcccattttttccatctaacacaagacatatccttttcactctctgatgacataggctttgaattttgtctgaggcatgtctgtaaacaagaggcccaatggccacttcaagaagctttgtctggaagcctcaggcaggtctcttttacataccacagcattatggacatgatggtgaccatccggatattccaggttcgaagcagatccagaatgttgtgggactgctgcttcttggaacttaggtcttgtaactgcaggaacaacatcataagtgtatgggaagaagaggtggtcagagactcagagcacacaatnacatacttgaatccctggcatcttagctgtctgcatctcagcgtcggggagtgttacgtttctaagaacagtaagtatactgactgtnttttaggctgtgaaaacttccctaggccttgtcagtaacaaatcagagtgaatgaaaatgaggaaaagtaagtgaccagtccctcaagggtacaggaagacagaggcccaggctgacagcttcctcactgcacccccacatattcctgtcggtggccacattccaaggaggcctctaagtattcctcccgaagcctggctccctgccctctgggtcagagagagtacctggctgtgtggtttattggtctgat

SEQ ID NO: 440708 - DNA, 1271 bp, Homo Sapiens
ttttttttataatttagaaatttattacaaaacttttaataaaaaatacaatgatattacaaatttggttttccaaagctttcaaatttttcttaacattatctttcgttttaagaacacttttgaagtcggcagttatttaaaatccttactagaaaaaaaccaaagcccaaggattttgcatttagtcatcatctaggtatacagcgtgttttccgaaagcatcctttaagagtttggagatttgatgaaattgctcatgtaataagcagttagtgaatactattgaatcctaaacccagataagtcatcttgggctggctgtgtttttcatgtgaagaaactcatttatagcacaggcaccccaggccaatagagatgattacagatctctggtttcagaagttctgaccccttattcagctaccaaatacttaattgctaaaggaattactcccagcaggcacaaaacggtttctgaatatgacagaaaaggtacacaaagaatcatttaagacatcctggttacaacatactttatctttaaaagggtgtgagagtagttggggaacttagaaattctgtgacttaggtgtgggtggatcttatttaggaagactaaagctatggacacaacacgtgaaagaaccactcagaagcagccctaggaagcccaggtgcccacatcgaaagcactcccaggtgaaagcagccaggcaggcgtgggcattgtacaaccagcctcaggcctcagttcttgattgtggttgacggggcgtcaccatgaaggagcccatttagtataaagcttccaaccttttctcttaatcgtttctttaatcttttaaaccatcttcaagtgcataggggagtttccgatgccagaggatgaaagcaagtgctttctccaccctctcctcccagagtgaaaacaaatccttttgctgatacttgtttcaaaagcatccattgtaaagcttctcagtgacacaaaatactgagaggtaactttttatcaatcaaaccacataccccaatttaacacctttcagtgctctgaattcaactgacagactaaagggtgtttcctgtcacagtctgaaatattaagtgtcttttctgttttgttcttaaatcttattcacaaaattcctcttgatccccggaaattcggtaccggtaccagcttttcctgttctttgtccttttgtctcgctttcttccccgttttgctctcgcgtgcctcttcctctccggggttcgtgtttctg

SEQ ID NO: 440709 - DNA, 458 bp, Homo Sapiens
  misc_feature (23)..(23): n is a, c, g, or t
tcttatttggggaaagactaaanccttagggaaaacaaacacgtgaaaagacccaactcaagaagcagcccctaggaaagccccaggtgccccacatcgaaaagcactccccaggtgaaaagcagcccaggcaggcgtgggcattgtacaaccagcctcaggcctcagttccttgattgtggttgacggggcgtcaccatgaaggagcccatttagtataaagcttccaaccttttctcttaatcgtttctttaatcttttaaaccatcttcaagtgcataggggagtttccgatgccagaggatgaaagcaagtgctttctccaccctctcctcccagagtgaaaacaaatccttttgctgatacttgtttcaaaagcatccattgtaaagcttctcagtgacacaaaatactgagaggtaactttttatcaatcaaaccacataccccaatttaac

SEQ ID NO: 440710 - DNA, 1438 bp, Homo Sapiens
  misc_feature (34)..(35): n is a, c, g, or t
  misc_feature (41)..(41): n is a, c, g, or t
  misc_feature (43)..(43): n is a, c, g, or t
  misc_feature (46)..(46): n is a, c, g, or t
  misc_feature (48)..(48): n is a, c, g, or t
  misc_feature (70)..(70): n is a, c, g, or t
  misc_feature (118)..(118): n is a, c, g, or t
  misc_feature (127)..(127): n is a, c, g, or t
  misc_feature (163)..(184): n is a, c, g, or t
  misc_feature (207)..(258): n is a, c, g, or t
  misc_feature (366)..(438): n is a, c, g, or t
  misc_feature (1188)..(1188): n is a, c, g, or t
ctgcagctgtgtcactgaggcaaacaggaaaagnnattttngntangngtggttctcatctgtgaaattncacagcgcaatgacagcaacctctctcccacccactcaagacactgtnaggaatgtnttaagacctcaggagaccacttctttagcaagcaannnnnnnnnnnnnnnnnnnnnngagatggattctcactctgtcannnnnnnnnnnnnnnnnnnnnnnnnnnnnnnnnnnnnnnnnnnnnnnnnnnntgggttcaagcgataatctcacctcagcctcttgagtagctgatactacaggcatgcgccaccacgcccggctaattcttgtatttttagtagagacagggtttcatnnnnnnnnnnnnnnnnnnnnnnnnnnnnnnnnnnnnnnnnnnnnnnnnnnnnnnnnnnnnnnnnnnnnnnnnntgagcaccttgcctgccctggcaaggaatacatttttaaaaattagtaagaaacatacacatttcaagttttcaattaagaataatatttgctgatggcaccatcttcctgtctttcagccttcagcatggtagaggaaaagagaaagagtgtagacaaaaacagttgaagaacatctgtgcttgttccaccttcattttctgttttgtgcgttgcctgaatgaaccgtgtcttcaggttggtatttcacaggcggtgctcccaagtagtctggttttcccatttgtggagggcgaggtcatagaggggacagggggaggctgtctggtcagcactgtgtatttccaaagaacaaggactacccaaaactacaagcctttgaaggaccaaaggaaaagagaaaaaaccagcctctaaccaggccatgcgctagaaatgattgagtataaaaaagaaaattggtttctgtgtatgagggtgcatggaaaaggtctttatctctgcacaaaacaaaatattcaagtttcagaatatcccaatggccttgccctggatctcctcttgtgctcttccaatttccaaggatgttccaacttggtggaaggagggtatgtgggaaattcaacagcccctctgtatctctttctacccaacattaacttagcaggatggatttaagaaccggcagcttagcctgaggaattgctgtgttctgtgggagcagggcaggttcataaataagtgcacagnaggtcttgaaatacagggattatctgttcttctcggaacatggatgtccttccagggatgtgcatctggccttgctgtctaagttccatcaagggagccttccgttctagagtatctgctttccacggcatcagggacagctttccggacttcactgtacactgtctctgtgtccttctttcctagatctttgtgagactcagctgaggacacttgaacttcgtgtactgacgtctgattcagaggctct

SEQ ID NO: 440711 - DNA, 1979 bp, Homo Sapiens
  misc_feature (814)..(814): n is a, c, g, or t
  misc_feature (1826)..(1826): n is a, c, g, or t
  misc_feature (1830)..(1830): n is a, c, g, or t
  misc_feature (1847)..(1847): n is a, c, g, or t
  misc_feature (1852)..(1852): n is a, c, g, or t
  misc_feature (1873)..(1873): n is a, c, g, or t
  misc_feature (1883)..(1884): n is a, c, g, or t
  misc_feature (1889)..(1889): n is a, c, g, or t
  misc_feature (1897)..(1897): n is a, c, g, or t
  misc_feature (1899)..(1899): n is a, c, g, or t
  misc_feature (1909)..(1909): n is a, c, g, or t
  misc_feature (1911)..(1911): n is a, c, g, or t
  misc_feature (1921)..(1921): n is a, c, g, or t
  misc_feature (1928)..(1928): n is a, c, g, or t
  misc_feature (1931)..(1932): n is a, c, g, or t
  misc_feature (1940)..(1941): n is a, c, g, or t
  misc_feature (1946)..(1946): n is a, c, g, or t
  misc_feature (1950)..(1950): n is a, c, g, or t
  misc_feature (1953)..(1953): n is a, c, g, or t
  misc_feature (1958)..(1958): n is a, c, g, or t
  misc_feature (1963)..(1963): n is a, c, g, or t
  misc_feature (1965)..(1966): n is a, c, g, or t
  misc_feature (1972)..(1972): n is a, c, g, or t
  misc_feature (1975)..(1975): n is a, c, g, or t
ggaattcccgggatccaggccccattgttcccggtttccagccatggctgccattacctgaccagcgccacagccggtctctctgcaggcgccgggagaagtgaccagagcaatttctgcttttcacagggcgggtttctcaacggtgacttgtgggcagtgccttctgctgagcgagtcatggcccgaaggcagaactaactgtgcctgcagtcttcactctcaggatgcagccgaggtgggcccaaggggccacgatgtggcttggagtcctgctgacccttctgctctgttcaagccttgagggtcaagaaaactctttcacaatcaacagtgttgacatgaagagcctgccggactggacggtgcaaaatgggaagaacctgaccctgcagtgcttcgcggatgtcagcaccacctctcacgtcaagcctcagcaccagatgctgttctataaggatgacgtgctgttttacaacatctcctccatgaagagcacagagagttattttattcctgaagtccggatctatgactcagggacatataaatgtactgtgattgtgaacaacaaagagaaaacccctgcagagtaccagctgttggtggaaggagtgcccagtcccagggtgacactggacaagaaagaggccatccaaggtgggatcgtgagggtcaactgttctgtcccagaggaaaaggccccaataacacttcacaaattgaaaaacttgaactaaatgaaaaaattggtcaagctgaaaagagagaagaattctcgagaccagaattttgtgatactggaattccccgnttgaggaacaggaccgcgttttatccttccgatgtcaagctaggatcattttctggggatccatatgcagacctcagaatctaccaagagtgaactggtcaccgtgacggaatccttctctacacccaagttccacatcagccccacctgaatgatcatggaaggagctcagctccacattaagtgcactattcaagtgactcacctggcccaggagtttccagaaatcataattcagaaggacaaggcgattgtggcccacaacagacatggcaacaaggctgtgtactcagtcatggccatggtggagcacagtggcaactacacgtgcaaagtggagtccagccgcatatccaaggtcagcagcatcgtggtcaacataacagaactattttccaagcccgaactggaatcttccttcacacatctggaccaaggtgaaagactgaacctgtcctgctccatcccaggagcacctccagccaacttcaccatccagaaggaagatacgattgtgtcacagactcaagatttcaccaagatagcctcaaagtcggacagtgggacgtatatctgcactgcaggtattgacaaagtggtcaagaaaagcaacacagtccagatagtcgtatgtgaaatgctctcccagcccaggatttcttatgatgcccagtttgaggtcataaaaggacagaccatcgaagtccgttgcgaatcgatcagtggaactttgcctatttcttaccaacttttaaaaacaagtaaagttttggagaatagtaccaagaactcaaatgatcctgcggtattcaaagacaaccccactgaagacgtcgaataccagtgtgttgcagataattgccattcccacgccaaaatgttaagtgaggttctgagggtgaaggtgatagccccggtggatgaggtccagatttctatcctgtcaagtaaggtggtggagtctggagaggacattgtgctgcaatgtgctgtgaatgaaggatctggtccntcanctataagttttacaganaaaanagggcaacccttctatcaatngactcaaatnncaccnggcatttngnaccagcagangntaacaagganagggggngannttatgccnnccttnacanacnaccancctcngnntcccanagnaaaa

SEQ ID NO: 440712 - DNA, 880 bp, Homo Sapiens
  misc_feature (484)..(519): n is a, c, g, or t
ggatctgtagtgcagtgatggctacttactctagatgccacggggtacagtgccatctgtgggcaattttggaaaattctaaagcaacccaagtctccagcagtcatgactgtttgcctttgccctcatgggagctcagtgcattttatatttggcaagacttttaactaagcaagctcattgggagcctgtttgacagctgatatcaatggaccctcttgccagttcaggtccgtcaacataggccagagtcaggctcctttgtaaaccccaggcttctgttagccagtgagggacaggctggtgcaaacagcccttccatttgcagtcacagaatagtgacacaaatggcccaaaatttaaatgttacttttagaagataacactcagagtttataacatttccaaccagataatgaaattgatatggagaaaccaaacctcagaggcactaaaatgctgtccagattccccatcccatatnnnnnnnnnnnnnnnnnnnnnnnnnnnnnnnnnnnnttactgacagtctgagccccactccttcctcttcctcacccacctcccaccttaccaacttctgacagctgtacagtgcttgcttgcacagaagagcccccttcctgagctggctctgtggccaggaaaggatgtaaccaccatccaaacagcagtgtgtaaccagctatgagcatcacagtgtcaggcactgagaggcacctcaactcgctttggtttccaaggcttctcccatttagcttgttcagaaccacaggctgtgagagggactgagggccaacagggatggtgaggtctcaggcctgcaggggagggtgctgtggataagcttagtgaattgctgagaagcttcattcgccac

SEQ ID NO: 440713 - DNA, 2845 bp, Homo Sapiens
  misc_feature (24)..(24): n is a, c, g, or t
  misc_feature (38)..(38): n is a, c, g, or t
  misc_feature (66)..(66): n is a, c, g, or t
  misc_feature (653)..(653): n is a, c, g, or t
taccctgaaaccctgtaaactgcntgttgcaacccaantgcccaaatgccaaagttgttcccccangaacgaaggtttaaagaagagggtgaactaacaagcaggtaaaaggttaaaaagggctgaacccaggatggggcccagatattcccctgtaaatgactcaagtcccatcccaggaggaagcacaccagtttggagcaaacttggaagatgctgtggatgtactccctgggccagcatcctctgtaccaaccctgggtgaagctggtgagcaggcctaaccatagggacatgggggacaaggggaacttggtggacagggcggagaaaaggtgttgtaggaactggggatgccaaggtgggtgtttttcttccagttgctttaggtcgataatcttgttctttggtgtaacggttggcctgggacagtggggtggaacacgaagacctctgtaatgctgacagtttggaatttgtagtgggagaagagtctcgatcggcactgggtacagagctggatgacaggaggttttcttcactggccttctgagtatcctctttactgtcaccaagagctgctgttccagatgctggctcctccttgcgtttctctttgctctcgtacatcctacggatcactgaggtagggnttaaggaaggagaaagcatgcttgtgatggaggcagcaggggcaggggaagaggaattccctcgatgcacgggtgctggtgacttggtcactcgctgttgcctgtttctgaatccatctctggttctgtccacctgtggtttgccaaaaccaggctggtagaagtttgctgcctgtacagcaaggtcatgtggcaaggccagcccttctaaagctgcctgttgcaactccagctggctcatctgggctgtgatggggctcatgggtttgcgcatgccttggaatggatctccgagtagctgctgtggtcctggtgtgaaaccaattggtgatggtattcttgggcgaaggtagtcagctgaggctgctcgagtttgaaacacctgtgacaagggaggagagggtgctctttggcccagtaaggatgttgtaggctccaagctccccataaggccactcagaagattggaagaagcaggtctctgaactggttgacccagaagttcctgcaggatgttcttagggacaggctggcctggaatctcagcaggggacatcaaatggctctcaaggtttcggctgactttgggctgagaaggcaaagtcccacttgccttcattgtgctcactagcttgttgaacgcagtcatgtctccgtctttcttcagttgtcgattgttggttacggcactcaaggtctcttctaggtgttctgccatgaagggagttgaatttttcacttgctggtcaaccttcaagcccttcagacctgcttctacctcctccactgaaagcacaacccctgaatgtgagctttctttaagtttttctttatttgcagaaaggctggaaagaagaggtttcaaatccactttggctttctgtagcatttctaaaatatccactttattttcagcatggtcttccaatggtataggagcaaagtaattccccgagttctgtccaggagagaggatggcttgctccagacctgcaagtctctctagctcttcatgtggtgttgacccaagactgctggatcggcttcctgatctgctcgggttagagaaccacctactgaaccgactggcagagactgacccttctcccaaaacatcttctatcatcgaagccaagcatggcaccttatcaaggttaaagaactcattaaagtcaaagtctcctggggactgctcaggcaagacagcatcccttggcacttcctgatcagccgcaggctcctgtgcaaggatgacctccacttcatcctcttcggccactcctccattgcactctactataccttccttcacagaggctgtccgtcgccttgttctttttctccctttgtgatcttcttctagtatcttatcatcaaagccagtcagttcgatggtttcagactgacttgtgggtccagcagagaaccactctggttcttcttctgtgtaagaatcatttcttctacgctcaccaaagacacgcttactatctccaaactctctcctgaaacgcttgtccttgaagtccctctctcggtctctgtctctcaagtcccgcaggtccttatcgctaagacggtgatccttctcaaaggtccgggcagagattatcctcccactgccaatcctacgtccaccaagcagacgaagcccatcactatctttctctaatggacttcctgagcgccgggagctaacagcggctgtcacgtggcagccccctccaaagctccgtctctgagggctgagaacaacatctaagtcatcttctttcacacgctctcgtggatctactatcctgcgcaccagggaaggccggtctgtatccaactctttcttcagactttccactggtgagctccgccctgaagctgggtagagagaggcatgccacttctcagggtcccagacaccatcactgtcatatttttcagaaaggcatgaaggcctctgtttggaatgggggagttcttttatatccaagagttcttcttttgtatagcgatgggggcatttggaggcaggaggcttcttcaggtcaaggaaagcatctccactttctgtttcacccatacttctcctatccatggctccttggtctacaatgctctgcactcggtgcctccgccgctcggcggccctttgcctcggccgccgcatcccgggaattccggaccggtaccagcctgct

SEQ ID NO: 440714 - DNA, 458 bp, Homo Sapiens
  misc_feature (46)..(46): n is a, c, g, or t
  misc_feature (89)..(89): n is a, c, g, or t
  misc_feature (99)..(99): n is a, c, g, or t
tgcttttcccctttgcctcctccgtaacaccttaacgaaaccactnaggtaagggtaaaaaggaaggaaaaaaacaagcttgtgaatgnaggcaagcangggcaaggggaaagaaggaattcccctcgaatgcacgggtgcctggtgaacttggtcaactcgctgttgccctgtttctgaatcccatctctggttctgtcccacctgtggtttgccaaaacccaggctggtagaagtttgctgcctgtacagcaaggtcatgtggcaaggccagcccttctaaagctgcctgttgcaactccagctggctcatctgggctgtgatggggctcatgggtttgcgcatgccttggaatggatctccgagtagctgctgtggtcctggtgtgaaaccaattggtgatggtattcttgggcgaaggtagtcagctgaggctgctcgagtttgaaacacctgt

SEQ ID NO: 440715 - DNA, 1382 bp, Homo Sapiens
  misc_feature (1134)..(1185): n is a, c, g, or t
  misc_feature (1207)..(1249): n is a, c, g, or t
tcgggattataaaaaaagctttattagtgcatatatacaaatttacaaggtcagaaactggagaaatacaaagagctttaaaacacaatttgccgtttcctcagtttaaagtgacttttacctgattgtgatacaacagaaagtacagaacagtaaactgctttttaaatactggaattttatggagaatacattcacataaagaaaggaggtgaattttgttttggaacagggttaagacaatggagacattaatacatagagtgtcttgttgtatttactgccacatacttgaggggaaattctcaaaatcaaggatatgaacacctgctgctgcctgtatgccacctagtgtgcgaaacgaccgagctaccagttctagaacttatgagagttactctaaagagtgtggccatctatcagcacgaggtaaaccacttagacctcagcacttcaggggtggccgactagagaaaagaggccagaaaaagcttcagacaattccagtcaagcaaggtagaatgcagagctgccttctgaattgcacttgttctggaggagaagttaatatcttcacttttgtcagggagtcctctacagaagtgttatactcatgagccacatgttcttcaagactgatgaggttaatacacctaacatgctaagtttgccagtttgagaataaaggcagcatggtcaaagcaattccaatcacctcatccctttgcaaaaacagaaaaattacatttcacaaaagtgaaaactttgtatgcatacactcttgcccaggaaatttataagatctcccccataacatttatagtttatttgacaataaaactggttaagactttgaactgaacacaaaacaaacaataatacaaaaaagttttaaaaacttaaaaactatgtgtttggagccattttccttctcttcagccttgctctccaatcctcaggaagggcttcaaaattagcatttctctctgccatgccactaaccagctgctgctgtttccactcttcaattcgcttctgtgcagttgattcccgatcctcttcactggaactagaattgtcctcttcatctaactcacgctggatactctgccacttttttaccaaagatggcannnnnnnnnnnnnnnnnnnnnnnnnnnnnnnnnnnnnnnnnnnnnnnnnnnnaggtggtggcattttgggagcnnnnnnnnnnnnnnnnnnnnnnnnnnnnnnnnnnnnnnnnnnntctataatggtagcggtaggcacagcacctcgggcctgaactggctgcaatgagggagcagtcactccaattgggacagaacattctgcataactcataattgcaggtgctgccgctagtccaaggtatttga

SEQ ID NO: 440716 - DNA, 1324 bp, Homo Sapiens
  misc_feature (95)..(95): n is a, c, g, or t
  misc_feature (105)..(106): n is a, c, g, or t
  misc_feature (132)..(132): n is a, c, g, or t
  misc_feature (153)..(153): n is a, c, g, or t
  misc_feature (175)..(175): n is a, c, g, or t
  misc_feature (222)..(222): n is a, c, g, or t
  misc_feature (252)..(252): n is a, c, g, or t
  misc_feature (331)..(331): n is a, c, g, or t
  misc_feature (570)..(570): n is a, c, g, or t
  misc_feature (579)..(583): n is a, c, g, or t
  misc_feature (585)..(586): n is a, c, g, or t
  misc_feature (593)..(593): n is a, c, g, or t
  misc_feature (645)..(645): n is a, c, g, or t
  misc_feature (672)..(672): n is a, c, g, or t
  misc_feature (718)..(718): n is a, c, g, or t
  misc_feature (853)..(853): n is a, c, g, or t
  misc_feature (874)..(874): n is a, c, g, or t
  misc_feature (978)..(978): n is a, c, g, or t
  misc_feature (983)..(983): n is a, c, g, or t
  misc_feature (1058)..(1058): n is a, c, g, or t
  misc_feature (1073)..(1073): n is a, c, g, or t
  misc_feature (1110)..(1110): n is a, c, g, or t
  misc_feature (1155)..(1155): n is a, c, g, or t
  misc_feature (1176)..(1176): n is a, c, g, or t
  misc_feature (1182)..(1182): n is a, c, g, or t
  misc_feature (1257)..(1257): n is a, c, g, or t
aagtaattctcactttgtcaggagtctctcagagtgtatctcatgagcacatgtctcaagctgatgagttatacactacgatgctagttgcagtntgagataagnncagcatgtcaaagcagtccaatcacntcatcctttgcaaaaacaganaagtacatttcacaagagtganaactttgtatgcatacactcttgcccaggaagtttataagatctccnccataacatttatagtttatttgacaatanaaagaacttaaaaactatgtgtttggagccattttccttctcttcagccttgctctccaatcctcaggaagggcttcanaattagcatttctctctgccatgccactaaccagctgctgctgtttccactcttcaattcgcttctgtgcagttgattcccgatcctcttcactggaactagaattgtcctcttcatctaactcacgctggatactctgccacttttttaccaaagatggcattttggtcttactcttctttgccttgtctttccttcctttttttgtcttttcaggtggtggcattttgggagctggnggtgttggnnnnngnngaggagnaggtggtgtttgtggttttataatggtagcggtaggcacagcacctcgggcntgtactggctgcaatgagggagcagtnactccaattgggacagaacattctgcataactcataattgcaggtntgccgctagtccaaggtaatttgactgcaggctcattcctctggcctgatgacccattcctgctgctggaaggctaactggtattgtctgatgtccaattcctgttgcctggtttccaatccctgctgcctggtnacctgtagctatagctaactngctatagagaactggagaactcccaatggtagctgacctctgaaccactgcagtgctaatttctttagctttcctctttattcctttagtggaagaagaactanagatngtggaatcaactgaactctggctagttacaactgtggtttgtgctgaaggtttctaataggggtatcttcctctnttcctggggcagggngctcctcacttccctcatcctccatctctacctcctngatctcaccatcttccgcaggaggaggtggtggaggagggggtgnaggtgattctggaggtggagntggggntggttgcatttccaagggtaatggaggttgaagcacaggaacatttgactgaaggaggttccagaatggagtaantggcatgagtgatgaagaagaaacttgaccagaaaaggattctttacaaagagaacctatgaaaaca

SEQ ID NO: 440717 - DNA, 1061 bp, Homo Sapiens
  misc_feature (10)..(11): n is a, c, g, or t
  misc_feature (18)..(18): n is a, c, g, or t
  misc_feature (27)..(27): n is a, c, g, or t
  misc_feature (40)..(40): n is a, c, g, or t
  misc_feature (47)..(48): n is a, c, g, or t
  misc_feature (52)..(52): n is a, c, g, or t
  misc_feature (62)..(62): n is a, c, g, or t
  misc_feature (76)..(76): n is a, c, g, or t
  misc_feature (78)..(78): n is a, c, g, or t
  misc_feature (90)..(90): n is a, c, g, or t
  misc_feature (101)..(101): n is a, c, g, or t
  misc_feature (104)..(104): n is a, c, g, or t
  misc_feature (115)..(115): n is a, c, g, or t
  misc_feature (124)..(124): n is a, c, g, or t
  misc_feature (135)..(135): n is a, c, g, or t
  misc_feature (160)..(160): n is a, c, g, or t
  misc_feature (165)..(165): n is a, c, g, or t
  misc_feature (183)..(183): n is a, c, g, or t
ttttctcgtnngggcgcngtctgatanatttgccagtttntttgcanncccnaaatagcganccacctggagttgntnaagtacttgtcnattttgaaaanttnatcttttcttngcatccaanttatagatgtnactgacactcccatccatcaggtanagacnaaatcccatgactttganaagcatgtgtttctcactgggcgtcaaatacatcctgttctcgtagtaatccacacacagattcacaatatctgccaggagctcttcgtagccagaaatcacttcgagctgctgctgcagagactgtgtgatcttgttatgattggccaggaacatggacagattctgcgattcctggatggactgtggatctgccattttacgtaaaaactgagcggccctcttgtacgctgagtggtcgttcttcacactgcacttcatgttcttcagctcgtccagcacagcgaacatgttgatgaaatttgcccagtgtgatcaggtaggcttctgacacgaagtccttcctcctctcggcatggcacaggcgcctcacttccccgcagaaacgctcaatggcatttctctggaagtacatgaaattcatcagttttgtgacctcaggctccagaacctccacggttttctcgtagatttccactctgttaggctgctcgttacatttcacctgtgggatggcccgggagcagctcctccaggtgtacagcatgacagcatattcttggccctcctccagcatctcgttcatgctagagtggacggtggcttgttcaatgtatcttgcgatgccagtaacaaatgcatttctgtcttcaaagttagtgttgaaatttggctggtagagcagcgaggatggcgggggctcgatgcagggctgctggtcgggcaggggcagctcctccaggaggtccacgttggacagcgcgtcctccagagtcacctgggccgccatcctgggctgcgtccgcggcggcttgggggtcctgggcgggccctgggagtttccttggccgagtgagtcactcgggcatcccgggaat

SEQ ID NO: 440718 - DNA, 1050 bp, Homo Sapiens
  misc_feature (7)..(7): n is a, c, g, or t
  misc_feature (19)..(19): n is a, c, g, or t
  misc_feature (26)..(26): n is a, c, g, or t
  misc_feature (36)..(36): n is a, c, g, or t
  misc_feature (42)..(42): n is a, c, g, or t
  misc_feature (44)..(44): n is a, c, g, or t
  misc_feature (54)..(54): n is a, c, g, or t
  misc_feature (76)..(76): n is a, c, g, or t
cctcatntgtgtcatgcantcgctanaggacaccanatgtcngnccccgagtcnacgactcctggagactcttgcnatggccagggggacagggtccacagggtcgctcagatgccaggttatccagaacgctttgtgcttcgatgagcaccttcaagcctttgttctcctgcacaatcatcttggcatggttgtgggcatggccaaagggcacacggatgtcgtcatcgaaggtcatgacacgcagggcccagcaggcttccctgaccacgtcagtgtggtggccatgatgggtgatggcaccagtcagcagaggcagcacgccagctttcaccaggtcttgccgattctgttcatgtttcaggcaagcgtgacgcacacagcggatcccagagcaggtcaggtcagcctcatcagcattctgggtcagcgtggccactaggagctgcaggccctgggcatccaggaggtctggctgtccatcagtcagcaccgacagggcattgagggactggagcagaaggccctggtcacctgcagtggccagcttccaggcagtgaagatgatggggtaggcccccttctgggccgcgaggaagcggcaggccttgtcctgtttgcactggtcgcagaagcgggtgaggtatgctgacacctcctgggggcgagagctggccacagactcctggaggtcactgagcatctgcaggatgtcatgtgtgggctcctgggatccgtctgcagagactttaggtgccgtctttacaatgttgctcagatcaaccccttgcgattcaaactgctccacggcctctttcactgcctcctctggccccatcgcaaactcctcgatgttctcgcgcacagctgcatcaaaggtctcctgggcaatgcgcttggagaccatcttcgcctgtgttgatgttggcgtgcagccgatagatgctcctgagccgagggtcgcgccagcccgaccctgcggcacccccactccccactccgcgcgggacaggcctcggcagccgcagcgtctcacccggtcttcgcggc

SEQ ID NO: 440719 - DNA, 1084 bp, Homo Sapiens
  misc_feature (788)..(788): n is a, c, g, or t
  misc_feature (930)..(932): n is a, c, g, or t
  misc_feature (1002)..(1002): n is a, c, g, or t
  misc_feature (1013)..(1013): n is a, c, g, or t
  misc_feature (1024)..(1025): n is a, c, g, or t
  misc_feature (1034)..(1034): n is a, c, g, or t
  misc_feature (1037)..(1037): n is a, c, g, or t
  misc_feature (1045)..(1045): n is a, c, g, or t
  misc_feature (1047)..(1047): n is a, c, g, or t
  misc_feature (1057)..(1057): n is a, c, g, or t
  misc_feature (1061)..(1061): n is a, c, g, or t
  misc_feature (1065)..(1067): n is a, c, g, or t
  misc_feature (1074)..(1074): n is a, c, g, or t
  misc_feature (1078)..(1078): n is a, c, g, or t
  misc_feature (1081)..(1081): n is a, c, g, or t
ttttttttcacccaatgatcttttattatcaggtatcctggctggcccaggacccagagacagacaagctggggccaagcagggcggacatctgagacccattttacaggtaagaaagacaaggagcagaggcctgcatgaaactgcagtaagcagcaggcgccagggggcccaaccccactggaatcgcctgccctgccctgagcctggcccacagtggctgccacatttcagacagggcagtgagtgatgggacgtgccctttgccccctctggtagggcgtggggctgggggaaggagcaggacagtaacatccgtgctgctggctgggacccagaagtggctgggacatgggggctgctttcttctgtgtagaggcctccctacaaggctcccccctcccccgaccctttacctagggcctgccagaaaacacttctcattgtgaaggggacagaactaatgggggacagtggaggacatggatctacccccattcctgagtcacacgactcacccagagtcacggcccagactgggcctggggtcatggcgccaggttgcccctctggcctgtccacagctctcggagctcgacatgacaacccaggtcccgcagggcggccttggccacgtccttacagtcacggtgggcagatcgggcctgcatgatgagtgcctcagcccccaggtccaggatgggcttcgagaaggcctggccgtgggccaccaggtttcggatcagcatgcaagcctgtttctgcacatccaaaccagcctgcctgcncccatcccctgccctgcccacctgcacgccggccttctgcgggtgtgccttcatggcctgcagtgctgccacagccccgccaccctccacgatgatgcggctgttgtcgggcttacgcagggccaggaagcacagggccgcnnntcttgctcacacacctgggggctggtagatgctgggtatagagcacgatggactcgtccaccagcacganaatagatcttnacgtcgtcgtnnctgcgatgntcnagggtgtnanacttgcttangacnctcnnnagggaangccnccnctc

SEQ ID NO: 440720 - DNA, 2447 bp, Homo Sapiens
  misc_feature (1920)..(1920): n is a, c, g, or t
  misc_feature (1924)..(1924): n is a, c, g, or t
  misc_feature (1949)..(1949): n is a, c, g, or t
  misc_feature (1962)..(1962): n is a, c, g, or t
  misc_feature (2108)..(2108): n is a, c, g, or t
  misc_feature (2133)..(2133): n is a, c, g, or t
  misc_feature (2153)..(2154): n is a, c, g, or t
  misc_feature (2194)..(2195): n is a, c, g, or t
  misc_feature (2220)..(2220): n is a, c, g, or t
  misc_feature (2281)..(2281): n is a, c, g, or t
  misc_feature (2316)..(2316): n is a, c, g, or t
  misc_feature (2318)..(2318): n is a, c, g, or t
  misc_feature (2361)..(2361): n is a, c, g, or t
  misc_feature (2390)..(2390): n is a, c, g, or t
  misc_feature (2397)..(2397): n is a, c, g, or t
  misc_feature (2404)..(2404): n is a, c, g, or t
  misc_feature (2407)..(2407): n is a, c, g, or t
  misc_feature (2412)..(2412): n is a, c, g, or t
  misc_feature (2414)..(2415): n is a, c, g, or t
  misc_feature (2423)..(2423): n is a, c, g, or t
  misc_feature (2427)..(2427): n is a, c, g, or t
  misc_feature (2433)..(2434): n is a, c, g, or t
ggtccggattcttcgatcgccgcggcccggctctcttgcgcaagcgcgctgtccgcttcttctgggcggacgctctggaggcaaaacatttccctgctgggggcggcgaccaccgtgagcgtcccggaaggggcggcaaagacgcctccgtcgcgcacgaggtggcctcgttggctttaccttggttcgcggtcgtccttggttatcgtgagcgtccgcgagtctctgggaggccaagcctaggggcgccacagcgcctgcgcgcgtacggcggccggaaggggctagaggcggctccctgggtgacaaccgcgcgccccacctttccccacgtggccgcgaagaccggcacctgtgcactgagtgcctgctgcgtgtcgggccccgtcctaggcagtggggacaaggaggctacagggtacaaataaatgagtgaacgatgttgctctagatacagctcaggagcatctatcggctgcacgccaacatcaacacaggcgaagatggtctccaagcgcattgcccaggagacctttgatgcagctgtgcgcgagaacatcgaggagtttgcgatggggccagaggaggcagtgaaagaggccgtggagcagtttgaatcgcaaggggttgatctgagcaacattgtaaagacggcacctaaagtctctgcagacggatcccaggagcccacacatgacatcctgcagatgctcagtgacctccaggagtctgtggccagctctcgcccccaggaggtgtcagcatacctcacccgcttctgcgaccagtgcaaacaggacaaggcctgccgcttcctcgcggcccagaagggggcctaccccatcatcttcactgcctggaagctggccactgcaggtgaccagggccttctgctccagtccctcaatgccctgtcggtgctgactgatggacagccagacctcctggatgcccagggcctgcagctcctagtggccacgctgacccagaatgctgatgaggctgacctgacctgctctgggatccgctgtgtgcgtcacgcttgcctgaaacatgaacagaatcggcaagacctgggtgaaagctggcgtgctgcctctgctgactggtgccatcacccatcatggccaccacactgacgtggtcagggaagcctgctgggccctgcgtgtcatgaccttcgatgacgacatccgtgtgccctttggccatgcccacaaccatgccaagatgattgtgcaggagaacaaaggcttgaaggtgctcatcgaagccaccaaagcgttcctggataaccctgggcatcctgagcgagctctgtggaaccctgtcccgcctggccattcgcaacgagttctgccaggaggtcgtcgacctcgggggcctgagcattctggtgtccctgctagccgactgcaatgaccaccagatgagggaccagagcggcgttcaggagctcgtgaagcaagtgctgagcaccctgcgagccatcgcaggcaacgacgacgtgaaagatgctattgtccgtgctggtgggacggagtccatcgtggctgctatgacccagcatctgaccagccccccaggtgtgtgagcagagctgcgcggccctgtgcttcctggccctgcgtaagcccgacaacagccgcatcatcgtggagggtggcggggctgtggcagcactgcaggccatgaaggcacacccgcagaaggccggcgtgcagaaacaggcttgcatgctgatccgaaacctggtggcccacggccaggccttctcgaagccccatcctggacctgggggctgaggcactcatcatgcaggcccgatctgcccaccgtgactgtgaggacgtggccaaggccgcctgcgggacctgggttgtcatgtcgagctccgagagctgtggacaggccagaggngcancctggcgccatgaccccaggcccantctgggccgtgantctgggtgagtcgtgtgactcaggaatgggggtagatccatgtcctccactgtcccccattagttctgtccccttcacaatgagaagtgttttctggcaggccctaggtaaagggtcgggggaggggggagccttgtagggaggcntctacacagaagaaagcagcccccntgtcccagccacttctgggnnccagccagcagcacggatgttactgtcctgctccttcccnnagccccacgccctaccagagggggngaagggcacgtcccatcactcactgccctgtctgaaatgtggcagccactgtgggccaggntcagggcagggcaggcgattccagtggggttgggncncctggcccctgcggcttactgcagtttcatgcaggcctctgcnccttgtctttcttacctgtaaaatgggtntcagatntccgccntgnttggngnngggttgtntgtntctggnnctggccagccagg

SEQ ID NO: 440721 - DNA, 1267 bp, Homo Sapiens
ccaaatttatgcaggcaggcacatagagcgaccgtgccatggcaccggggcaggcaccaagtccgcccggtagacccgcaaacctgcgatgccagcggaccgttccacaggctccccgagccaggtaaccagaaccttgggctcgagagcacctgcaacccttgtctccggcacaatcatctggcatgttgtggcatgccaaggcacacggagtcgtcatcgaaggtcatgacacgcagggcccagcaggctttccctgaccacgtcagtgtggtggcccatgatggttgatggcaccagtcagcagaggcagcacgccagctttcaccaggtcttgccgattctgttcatgtttcaggcaagcgtgacgcacacagcggatcccagagcaggtcaggtcagcctcatcagcattctgggtcagcgtggccactaggagctgcaggccctgggcatccaggaggtctggctgtccatcagtcagcaccgacagggcattgagggactggagcagaaggccctggtcacctgcagtggccagcttccaggcagtgaagatgatggggtaggcccccttctgggccgcgaggaagcggcaggccttgtcctgtttgcactggtcgcagaagcgggtgaggtatgctgacacctcctgggggcgagagctggccacagactcctggaggtcactgagcatctgcaggatgtcatgtgtgggctcctgggatccgtctgcagagactttaggtgccgtctttacaatgttgctcagatcaaccccttgcgattcaaactgctccacggcctctttcactgcctcctctggccccatcgcaaactcctcgatgttctcgcgcacagctgcatcaaaggtctcctgggcaatgcgcttggagaccatcttcgcctgtgttgatgttggcgtgcagccgatagatgctcctgagccggtcttcgcggccacgtggggaaaggtggggcgcgcggttgtcacccagggagccgcctctagccccttccggccgccgtacgcgcgcaggcgctgtggcgcccctaggcttggcctcccagagactcgcggacgctcacgataaccaaggacgaccgcgaaccaaggtaaagccaacgaggccacctcgtgcgcgacggaggcgtctttgccgccccttccgggacgctcacggtggtcgccgcccccagcagggaaatgttttgcctccagagcgtgcaaacagaagaagcggacagcgcgcatcgtagaatccgg

SEQ ID NO: 440722 - DNA, 950 bp, Homo Sapiens
ccacacctaagcctgaccttccccccgttttcccctgcgcccggcccaagtgcctgtccttaactgtcgtcgcggctcatcaccctgttgcgtcgtttctttcgcctccacaaacgttttagctgtgcgcctttgcacaacgccaggcgccagactcgcgcggggaaacagggataagcactgaggaggggtcccagccctcagcgatgggatttcagagcgggagataaagggttgcccagaagggtggtgagtggaatggctgatataaacaacgggggcgcgatgaaatacacaggagggctgctagtcacatatggggcgggtgccgagggcccttgactaagggaggcttcctgcacgggtgacacccaagcggagtcctgacgacctgcgtcagcagtagccaggcgaggaggaggggaaaggaatccacgtcccgagcagagaggcagcgttccctacacagcacaggacacggtccgcgcacagaagccgcaggagacgcaggcacaggggctggggagaatccttgctgggccctcgccgcctccctctgccgggtgtctggtgccagcctcctgcctggcagaggagctccagcccctgctcccggaagcccctccaggccttcggcttccctgactgggcatgggcccctcgtcccctcgtcccctcgggtacggggccggtctccccgcccgcgggcggcgaagtaaaggcccagcgcagcccgcgctcctgccctggggcctcgtctttctccaggaaaacgtggaccgctctccgccgacaggtctcttccacagacccctgtcgccttcgcccccggtctcttccggttctgtcttttcgctggctcgatacgaacaaggaagtcgcccccagcggagccccggctcccccaggcagaggcggccccgggggcggatcccgggaattccggaccg

SEQ ID NO: 440723 - DNA, 900 bp, Homo Sapiens
cagttccattagagcactttgcttcactgcccagctctccgggactctgggacctcgtgttagatggaagattggagcctctgacacctccaggtttctgccttccaagggttcctccgcaccgggctgagctgagcaggacaatgggctctcgcttctgtcctgagtttcttggcgtggtgagcaagagagctaagggcaggagtcttacgtggtgcctcataggggatagagatgccagagactgcactggaacggggggtctccggggtggtcttcagcacctgccacacctctgggggaggctccaagcccatctgcttggcccgacaccagcgctgcaccgtgtgatcccggtgcagggcccgtactgccaggaccaggttcaaactgcctcagcagctccagctccgcttcctcctcgtcgcggggtctggggctcctcccctgcaatgacagctgctcttcagtacgagcttggcttcagtctcctgcccctcacctcccagccttcctcaccaccgctttgcctctgccacccgcagctagacctggtgtcgggaggggaggacaggccacctttcccgttccatcggcccctccgcccctctaggggcctcctctaggcccctccgtgtccactcctcctgcctccctcacacgtcagagacctagctcgggtgccagctcccccttgctgtgcccagcgggcccctccctcctcttcacaaccgggtaggaatcagtgatgagccgcttccggcccatggcggccacccaggcaggcagagaaggaggccactgcggggaagaggagagaccggccatgggcgcgagaaagacagctgctgagcgcacgcgtgggtcgacgatatcccggaattccggacctgtaccacc

SEQ ID NO: 440724 - DNA, 921 bp, Homo Sapiens
taccaggctcaatattctttattgataagcattagtgaaccccttgccctgggagctcagccagtcctgctctcagattcctggccttaggtgggagagcatcttttcctcatggatcaactgtccatgtctgactgtgcctaacttgccagatcatgggtcagggagacaggcagcaggtattggaaggtgatggccaggtccttttccccagtgaccactctccatctagaagcactctgcttcagctgcgcaggctcttccggggactctgggagcctgctggttagatggaggagttgagcctctgacacctccaggttctgcctgccaagggttcctccgcagccgggctgagctgagcaggagcaatgggctctcgcttctgtcctgaggttcttgggtggtgagcaagagagctaagggcaggaggtcttacgtggtgcctcataggggatagagatgccagagactgcactggaagcgggggtctccggggtgggtcttcagcacctgccacacctctgggggaggctccaagcccatctgcttggcccgacaccagcgctgcagccgtgtgatcccggtgcagggcccgtactgccaggccaggtcaaactgcctcagcagctccagctccgcttcctcctcgtcgcggggctggggctcctcccctagctcgggtgccagctcccccttgctgtgcccagcgggcccctccctcctcttcacaaccgggtaggaatcagtgatgagccgcttccggcccatggcggccacccaggcaggcagagaaggaggcaactgcggggaagaggagagaccggccagtgggcgcgagaaagacagctgctgagagagacagacggggccaggccagcggcgggcagacaagatgacccagacaaaccgagagagccc

SEQ ID NO: 440725 - DNA, 1025 bp, Homo Sapiens
  misc_feature (996)..(996): n is a, c, g, or t
  misc_feature (1004)..(1004): n is a, c, g, or t
ggctgactgagccgctttcaatttatttagcttttgacaataattccgtctaacccatcaggcccctagaagggctaactatgccctttctgagtcttccacgcggtgggggcgaaggaggatggagctagaacgaagcctcagcgcgtgccccgcacaaagcatggcatgcattcccagcatgccctaaacctgcccgacggtgagctgcgctgcgcggcgcaggcgcatttctgctcattccgcggcgtcggctgcggctgcagtggtggtggcgggtaccgcacggggtatggtccccgggtccgagggcccggcccgcgccgggagcgtggtggccgacgtggtgtttgtgattgagggtacggccaacctgggaccctacttcgaggggctccgcaagcactacctgctcccggccatcgagtattttaatggtggtcctcctgctgagacggacttcgggggagactatggggggacccagtacagcctcgtggtgttcaacacagtggactgcgctcccgagtcctacgtacaatgtcacgctcccaccagcagcgcctatgagtttgtcacctggctcgatggcattaagttcatgggcgggggtggtgagagctgcagcctcatcgcggaaggactcagcacagccttgcagctgtttgatgacttcaagaagatgcgcgagcagattggccagacgcaccgggtctgcctcctcatctgcaactcacccccatacttgttgcctgctgttgagagcaccacgtactctggatgcacaactgagaatcttgtgcagcagattggggagcgggggatccacttctccattgtgtctccccggaagctgcctgcgcttcggcttctgtttgagaaggcaggccccccggccttgctggagccgctgcagcctccgacagatgtgagccaggacccgagggcacatggtgctggttcggggactcgtgctgcctgttgggggtggctcancccaaggngccctccagtcaaagcagcca

SEQ ID NO: 440726 - DNA, 975 bp, Homo Sapiens
  misc_feature (698)..(699): n is a, c, g, or t
gggacttacctgcgtttctgcaagttcatttggcctgtacctgccaatggcgagagaggattgaggtgaagggggaatcagctacttgccatgcccccaatccccgggccccccagtggctcaagagccacttacagatgtctgccccatacaagtcccctgtggagagctcatgctggccttcagacaccagagtcccctggcagggcgaggggagtcaaaagacacacggagccaaatgctttaacagaagcctgcccaggtgggtatgagggccctaacaagggcgcctgccagctggccagaaaggacctcccagaggtgacagctaactgcggaaacagatgtttcccaagccggtactggagtgtggggcattcaaataggagggtacagtttatgctatgggctggggagaggagagaagaggaggaagccagcgggggaggtgagtggcctgatgtctggggtgcgggagtgcgagtggaagcgggaccccaactgctgttggctagttcccggcacatctagaggtgctcaagaaatagtccttgaatgaatagaaaggtgtgagtgtgtttggagagtggggagatggcaggatggggtctgaacgcttcctggagcgggacacctggcccaaaagatgcaagcaacaagtgggcagaggagggcccgaccaggggcggcgcaccccnncccccatctcctcgctgccctccggcctcctcaccgccacgctgtcctgcgcagccaggagcactgggggggtcgcttcttcctcctgtggatggggcctggactgcgatgcgggcacagggacgcataaccatgctcggcctctctctcacggcgctccaggaactcggccgcactgcagcaggacctggatgttgctggccaagggttccatgtcggcgacagctggcggcgggccggcctagggtgccggccggagcaagcggcttgcagcac

SEQ ID NO: 440727 - DNA, 1130 bp, Homo Sapiens
  misc_feature (181)..(181): n is a, c, g, or t
gacataaaaatagtgcttcccctgttttatgttttggggggccaaaagaccccggggggactcctcttctccccgacaaagggaaagagaggccccaaggaggggtttccctcttcccccctgggggcgccgccccgaaccccaaaaggcttggtggttgcggccccacagagtgcccttnccctgccaggggttcccaggggagggtcccggaggagtccctgcccctttccccttccccggagggccttgcctggcagcccagcagccagggtgtttggggagccctgtttcccccacaagggtcctttttagtccatttccacccggtgactcggagcagccctgaaggcttggggagggctcctgcctggcaagtgggcctggcacgagtagagggcagagggcccgccctgggtgaggaacatcatagccaggcgccgccgccgtgcgagtagctgtgctcctggccggcgacgaagccccgcagcagctcggcctcacccccaaacaccaggctctccacatccacctccagctcctcttggtctgagtctgagcgctcagaggagaggcctgaggagtccagactgtccgcccgcagccgctcccgctcggccgcccctgccagcccccggagctgctccagctgccgctgcaggctctgctgcttgctgcgcagcctctccttgagctgtcgggcccgctgctcctgatcctccagcttctggatgtgcatcctggcacggcgcagcaggctcagcgtggtgtaccgggcacagtcggcccccaggggcatctgctgcttcagccgctccaggcaccgcttcaactgggccctcctgcgcttctccagttcattgtgcactgaccgcccgctgtcctgcgcgccaggagcctgggggggtcgcttcttcctcctgtggatggggcctggactgcgatgcgggcacagggacgcataaccatgctcggcctctctctcacggcgctccaggaactcggccgcctgcagcaggacctggatgttgctggccaagggttccatgtcggcgacagctggcggcgggccggcctagggtgccggccggagcaagcggctgcctcgtgccgaattcgccacccaggcc

SEQ ID NO: 440728 - DNA, 1292 bp, Homo Sapiens
  misc_feature (63)..(63): n is a, c, g, or t
  misc_feature (69)..(69): n is a, c, g, or t
  misc_feature (82)..(83): n is a, c, g, or t
  misc_feature (90)..(90): n is a, c, g, or t
  misc_feature (106)..(106): n is a, c, g, or t
  misc_feature (115)..(115): n is a, c, g, or t
  misc_feature (264)..(264): n is a, c, g, or t
  misc_feature (301)..(301): n is a, c, g, or t
  misc_feature (353)..(353): n is a, c, g, or t
  misc_feature (1285)..(1285): n is a, c, g, or t
gccggtcgcttgtccggatcatgggcttctgatgggactcgctgctccaggcagcatgtttgncgatgnacacttccggcgnnaagaggncctgcgtgtgctgtgnaagtgctgnaggcccagttctcgatgtccgtctccgagaagggcttgcgcagcgtgaaagtggggaagacgcagctggagctgggaacgccgctgcggctctgccggctgctctcgaactgggcacaggcagcgaggtcctcagactgtgaggggtgnaggtagggctctggtgaggccaggttggtctgcacgnagacgctcttctccagcaggatctgggggaagcctagcttctcgaaggtgcncctcctccagtgcctgttctcctgctgggccagcgcctcgtcctcgctgaaggcccgcaccaccggcccgggcatgggcagtggcagggcgccgtcgctctcgtagccagagccgtcctgctgggagtcccagctgctcctctgcttcatgtggaagtgggcctgctgcgcctcccaggccagccgagcctgcgccaggaagggctcggccgcgccccgcgccccttcggcctcaccttccgctcgcttcacgggggcgaggctggtcccgcacgggggctgttcctcggccaggggctgctccacaagcaggtccccggggccctcagtgggggtggcgctggtggcttggcacaaagagggctttctgctcttccgcttgcgcgtgcccggggagtagcctgtggaggacagggtgtcctgctggctggaccaggacatggcatcctcctgggcctgtggcagcggcgtgggcggctggctgtgccgcagctcaggtccctccatggtgctgtagtctccggacttgacgcccaggcgctggtccctcagcaggcaggggctgggctgcaaggagtacgaaccaccgccggggttgggcgcgtacttgtgccgcgggccggcgcgcagcttggggctggagcccgcctgctccacgtagaccagctgccgcacgtactccttgccggcgggactgtactccaggctcaggaagcgctcgggacacttctgcttggtgagcaccagctgctggcagggcgagggggggccctgcttgttgggctggaggaacggccggggcttacggcccggcgaccgctggggagagccggcctggtagcccccgccagcctcgaattgcacgtccatggggggctcatcgtagatgggggcctggtactccactgggggctcctcgtagagcggggatncatatcc

SEQ ID NO: 440729 - DNA, 1209 bp, Homo Sapiens
tgtgcagtcattcagcgctcccgggcgtgtaacccatcacagcctggactcgtttggtcaaagccctcacattctgttgatggaaaagagttaggtcaacgatattctcaatattctttgctgtttgatgtctgcctaggtgcagtttcatttcatcgctgttcattgtgttctataggagtcgctggtgttgatgctgaaaagttacaggatgtcttccaggaggaggatggcagtacagcagcttaccactgacatagtccttcaggatgtagcgcgcagatggaggctggtgtggctgtccatgcgctgtcatgaatcctcgcatgtatccataagctgtcaacagttcttccgatgttggaggtcggtggggatcttcatcctctctaggcgttatgatgttaatgccataggtagcttctaaaacatgtcttggaatattctggcaaactagtgatacaggaggaacctgatctctcatctgatcaattgggaggattccgctgcaagtcatttctgccttggtagacacaaaagatggcatcaccaagccaggacagtcacacaggcagaggccaggctccacatagagagtctgaaagtgctttgtgtgaccaggtgtggcagacacagatactttcttgttgcccatgatggtgttgattgttgaactcttaccaacattagggtagcccaccagtccgaccgtaagttgcccatctttcacctttctcccagtgtgtagctccttaaagagctccagtaactcctgcttggataccagatggctaaaattgtgtatctgcctcttctgtggggttttcctgctccgagcctcagaatctgcagtagagctttccttccagtcctggctgcagtcctcttccttgggaccgtcttcttctgagcacgtctgccagtcgtcttcctcctcctctggacagtcctcatactcactgtcatcttcatccgttgtgggattttcactaagtgaaggagaatccctagctgggagatgttcggattcactgtgggaaatttcagcctggtcgaaactggaatgtccaaactcagttgtgttgctttgtctatcatctctgtttgcctcttcctcagagtcaccattcaggggaatggctccggccaaagctgaccagaaaataaccttcacatcttctttttcgaagtacaatcccgggaattccg

SEQ ID NO: 440730 - DNA, 953 bp, Homo Sapiens
tcacctgttgtgactgtcttcggttcataggtggggtggtggtgagcagctgaggagacaggtgatccatagcaaagcagccttccccaccccctgactcccatcaagaccccagcccccactcaccgctaaacttccgattcagatgcagccctgtccctactctagacatccaacatacttgcaagcccccacacagttccctccaccagatgtgctctctctccatctctaccttccaggctcattactgatgccacctcctccaggaagcactccctctcattccctctgaacttccaaagtccttgctatgccttaaactagaagaagagctaacactcccatcccctccacacacctgtactaattttcagatgaggaaataggcagagagaggaggggacttctcagtgagctaaaggcagaactgataccgggcccaggtttgggttagcaaaatcccccgcctgagaggggctgtttcctcctggggggccaggctatggttggggggaccccatgcaccttggcttaggttcaaggacccccttacctggacatgcctttgaagcgtttgtagatggagcaaccttccttgaccacctcagattgggccacacagtgtcctggctcctctggccggcactgctcccacacgcagctggagagattgcgcgctctgtctccctccacgcagtgctcacagacctccagctgtctgcaggccccttggaccgccggccagatattcaggcggatcagggctcccctcccaaagcctcgagctcctttaccagccacagccagctgggcacataggaggaggcagcaacagccgccacagagcgcagtccgcaaggcgcggggtcccggagcctccatgggctcgcggggtgggggtggccgggggcggtggccgggatcggtggacagctgccggtcgcgatccc

SEQ ID NO: 440731 - DNA, 267 bp, Homo Sapiens
tgtgtcaaatccagggctgtgggcctcagggactggggggctccctgttgtgactgtcttcggttcataggtggggtggtggtgagcagctggacatgcctctgagcggttgtagatggagcaaccttccttgaccacctcagattgggccacacagtgtcctggctcctctggccggcactgctcccacatgcagctggagagattgcgcgctctgtctccctccacgcagagctcacagacctccagctgtttgcaggccccttg

SEQ ID NO: 440732 - DNA, 1259 bp, Homo Sapiens
  misc_feature (1)..(1): n is a, c, g, or t
  misc_feature (5)..(5): n is a, c, g, or t
  misc_feature (7)..(7): n is a, c, g, or t
  misc_feature (39)..(40): n is a, c, g, or t
  misc_feature (43)..(43): n is a, c, g, or t
  misc_feature (53)..(53): n is a, c, g, or t
  misc_feature (67)..(67): n is a, c, g, or t
  misc_feature (85)..(85): n is a, c, g, or t
  misc_feature (115)..(115): n is a, c, g, or t
  misc_feature (245)..(245): n is a, c, g, or t
  misc_feature (852)..(860): n is a, c, g, or t
ncccngncccgtagtggaggtgactttcctgcgccgccnnctnctgagggcgnagaacccacagggngtgcgacccgctttgcangctgtgagtgggcaactgtccgagggactnggggcggtcgaagggtgaggaccagctcgcctgggggtggacggcctggaaaagccgcccctctttggcttccctctgccgcctgcagcccgcacccctccgagattcgtgccccactggacggtttgcnaaggctgaggctgccttggggactcacaaaagaccatcaggggtgattcgaagtgtaaagagggaaacaatcatcagcacacaatccggctaaagggataacatatgagtttgcttgttgtccttatgggattcttctctttttatagctggacgccctatagggctcttggcagtccacgaaagacctggagtccgcctccccatttctccggtcggtgagtggcaggaggaaatcgccaaacatgttttcccgctttgcctccccaactcggaaacttgcaacttgccgtgtcctggaggttgagacaatttggggtctcttggctgccgtccaacagatttatctctgagggcagtgtccttggtgagaggtccaagtaggtgtgggcgacattttcctccatctcatgagggagcagccctgcacactagggcccaaaactctgcgaaggagcttggaagttcttcatccgttccacttgttttgctactccacacacccttctaggacatgttgattgccaactgctctgtgcagctttcccatagctgtctgttcccgtgcatttcggagcaccaagcaaatacgagcagagagacctggnnnnnnnnntgatgaagacagtattaatgataaaattaacatggctgagtgaattgtcaatgcaagttcctttactaactctttgttaagttttgctttgtactccttacatcctctttctcttaagccattgttttaatttcttctcgttatcatttttaaaagtaacagaaatacagctttcttcctaccttcacgattgacttggtggaggttgggttgcaaagaggaagcagtaagaaaaaataattattctatacattcacaagtccttcaaggcacaaataaaagtaaggaattgaaaatttgtcctttctcctaataaggtctttataaaaaatttaaaggaagttttgtgtttcattaccagtttcccaaatactgttggaggatactaaaatgtgcctg

SEQ ID NO: 440733 - DNA, 939 bp, Homo Sapiens
  misc_feature (295)..(338): n is a, c, g, or t
tgcttttaaggaactttacagacttccgggcttttgatagccatttcctctgtaaaaatgctatttggctcagcagcaatccaagggagtgggtataaggcttggtgtgtgacaaactgctcctgcctccttttgacagcaaagcctggcaaggttgtttggaaatctgtcaaagaggcaagtctactttctacaagccaaaaaaatccccccaccacttcacagtcactccattaaagtaaaactaaatctctctgaaaaataatatgctttgaaaccctctgttacatttatnnnnnnnnnnnnnnnnnnnnnnnnnnnnnnnnnnnnnnnnnnnncctttaaaaatattgtagcaatagccttcttcgtaacaaatataaaacagcttaagacacttggtgactttcttagttcatctgtgggggaatggatacacaatgaggttttactactaaagttagctatttggtaaaaactctaggaagagttccatcaagaaaatggttattttggaaagacaagttatgattatttccaaaatgtcaaaagaaataagaatgtaaacaccatatacttaaaatgttaatacaataatattaactcagtcaaataaataaaagaaagtggcaccaaatttatggcaatttttcaaaacaaaaatgtagcttaaatatattttaaaataaataattggttcaaatacggacgaccattctcagcacaaactaacaacattcaaaataaagtgctatgagaaaaagtagccccacaatcttcaacttattcacatatgaacagagatactatctggatctttaggtctgaaatattcaccacgagtgaaagctagaggccaggcttagggccatcttttgtcatttttcttttttcttccagcgtgtgcttaaatattttcttcagggtgttgtaaactgt

SEQ ID NO: 440734 - DNA, 885 bp, Homo Sapiens
  misc_feature (321)..(333): n is a, c, g, or t
  misc_feature (352)..(591): n is a, c, g, or t
gggatcaaatcatgaagtgccttgtattttatactgagagcttgaaagtttatcttgatgggcgcagtggggtgtctttcggcagaagaatgatgctaggacgtcagtcgcttttgactggttagtatcctgtttttttagtaacaaatcttatctttttcctcatggggaaccctttcctcactctcagtttacatgattgggtggggctgatcccattcttcaacgtcagcctgagcactgcatagcccctgtcaaagtgataggttcaagggcgggtgtagaaacccaaactagtccactgagagtcttctttgaacnnnnnnnnnnnnnggggtggaatctctgtaannnnnnnnnnnnnnnnnnnnnnnnnnnnnnnnnnnnnnnnnnnnnnnnnnnnnnnnnnnnnnnnnnnnnnnnnnnnnnnnnnnnnnnnnnnnnnnnnnnnnnnnnnnnnnnnnnnnnnnnnnnnnnnnnnnnnnnnnnnnnnnnnnnnnnnnnnnnnnnnnnnnnnnnnnnnnnnnnnnnnnnnnnnnnnnnnnnnnnnnnnnnnnnnnnnnnnnnnnnnnnnnnnnnnnnnnnnnnnnntgagcaactccgcccagccttctttgaacttttaattgaagcaattaggaaaggaaagttcaccttcttttagaattaataaaattgtaggatttggccctggaaactcttaaccactgagaagggactgcttgagaatgaagccacagagcagagtggagcagagtggagagaaggagagacatcgtcctgatcaacttgtttgggcaactaggatccagccatgccagaataattcttcccctagaagattcacaagccaataaactcactctttttgtttgtttgtttaca

SEQ ID NO: 440735 - DNA, 1454 bp, Homo Sapiens
  misc_feature (11)..(11): n is a, c, g, or t
  misc_feature (1004)..(1004): n is a, c, g, or t
  misc_feature (1158)..(1158): n is a, c, g, or t
ttcaatggtantgtttttaaaaaagtatttgagagaataaaaactgaggacgagaagccttggaaatgaaagtagaaagtccgctcctatactcaccgctccgatgagtgttgtaccttggatttccagccaatgcaccaaaatgatatggctccaatgactggagaaacaccagggtccttcgtctcctgccaattagacaaatgacatggacacacgtggagtagttttaaggagtggaaagtttaattaagaaagaagaagaaaagctccccctgtacagaggaaaggggtacccgaatggagaaaacgccatgtgcagtggaaaagcagttggatatattgggaggctgaaggaggtggtgtctgatttgcatagggtccagggaattggtgtgaccagatgtgtcattcatgtagcccatgaaaaacctggccctctcaccctagtcttttaatatgctaatgatgggcgccatgatgtcctgcacacgtggtgttatctggagatggccatgacacctggcacaagttgtgacaaggacaagagagcgggaacggccctgttgggtggacctggtttctaatcaccagtatttgcatatcaatgcttgctggtctggtttttcaagctgctttctgttagaaaagaaatgttttgggggttgctttttattaaaccaaaattccactgagaaccattaccctttctagctgcctaaaaattatttcttagtaactcctgtattaacaacactatttacagttgcaaagtcacgaaacaaacaaaggtgtttatcaatctttgactgaataatgtactaataggtaatttgtgcatatacctgcaatactacatagctttaaaaaacaatgaagacaggcaatttgcagccacatggatggagctgaagtccattatcctaggtgaagtaactgaaaggtgaaataactgaaaatcaaataccacatatttccacttgcatgtaggaaataaacatttngtatacatggaaataaagatgaaaataatagacactggggactccaaaatggggaagggtgagagaggttgaggtttgagaaactacctattcctatttggttaatgggtacactacaagcccaatcccacacagtatgcaatatatccatgtnacaaacatgcatatgtaccctttgaatcttaaaaatcactaaattgaaaaatatttaaaaagtacatttataaatattttattcatttaacttctataaaccagaaagcaagacctcaccagatattgaatctgccgccactttgaccttaaacaccctggcctccagacttgggagaaataatgtatttctgtcattataagctacccagtttgtggtattttgttatagctgcccaaatagacagactgacacaatccattattttttattgtatttttcagatccaagatttc

SEQ ID NO: 440736 - DNA, 1760 bp, Homo Sapiens
  misc_feature (774)..(907): n is a, c, g, or t
  misc_feature (1075)..(1126): n is a, c, g, or t
  misc_feature (1153)..(1195): n is a, c, g, or t
  misc_feature (1444)..(1444): n is a, c, g, or t
  misc_feature (1544)..(1544): n is a, c, g, or t
  misc_feature (1546)..(1546): n is a, c, g, or t
agattctattgctttattgattattactttcattaaacaatgttagccatataggatgattaaaaaaacaactaatatccttggaatatgaacatcctattaactgatacaaactgactccacctttcttatagcagtgaattttcaggtcacatacaatcagtaatttatactccaaatacaacaatcacgtttgtattaatcatccagtacaattcacaggttcctattacacaggtggatgtacttagagagttttagcacaaaagctgatacaaatatgaaagtgtgctcagtcgaatggttagtgaggtgctacaggtgagtgtcggcgatgggtatcctcctgagctccacgatctgggagtcagtcaaggtgcccccctcctggctgccttgaccagattcattatcactgacactgagaccagcaccagtttttaatgcaaatattaaatcatcaaactcctgggactcctcatcggctatcagtgacccctggccatatcctccagaggacgggaacgtggctccattttgtggacttggctttaaatcagggctggcctgactgccctgttggaaggatgctctctcccagtcaggtggcacctttttggattgggatggggggaaaaagaaaccataatatgaatgcatacacattcactatgaaacccaaatggacaattgatctctgcctctccgtacaaagaccttgctaaacggcagtggcattgttttgaaactagacctttacttatttataaattnnnnnnnnnnnnnnnnnnnnnnnnnnnnnnnnnnnnnnnnnnnnnnnnnnnnnnnnnnnnnnnnnnnnnnnnnnnnnnnnnnnnnnnnnnnnnnnnnnnnnnnnnnnnnnnnnnnnnnnnnnnnnnnnnnnnnngtgggaggattgcttgagcccaggagttagagacccacctggacaagactgtaagacccccatctctacgaaaatttttacaatgtaaaaaattagctgggtatggtggtgtgcacctgtattcccagctactcaggaggctgaggtgggagactcacttgagctcannnnnnnnnnnnnnnnnnnnnnnnnnnnnnnnnnnnnnnnnnnnnnnnnnnntgacagagagacatcctgtctctactnnnnnnnnnnnnnnnnnnnnnnnnnnnnnnnnnnnnnnnnnnntttaattttatcttcattctttagaaaattatgtctctccctgagacaatttaatctgtgattctaaaccatgtctctatttgaattacttgtagatttctatgttgtcatgtgtggggaacgaaaactaatttttaacccaataaatacttttttttggtaagatgtatgcaaagaaaattctgttaaaaaatataagaaatggagaagaatcctcctaatcctttatctaaaatgccacataggatnttaaatatagtaggtatctataaggatatactaaattgagaaaaatactttcatagcattcctccttgtttttgattgaatgattaaaaaaggtagctcnanaaaaaaatgattaaatgtatttacatccctctaggttactggtaaacaaccccttaatccttccttcctgtactttcccttctctgcatggttttttagaatgtctctgacggcacttcactgacagctgaatcaaggccaattctatgcctctgaggaatgcagagcatacttcaggctctcctgttgcacaacacccaagtgagcacccaag

SEQ ID NO: 440737 - DNA, 972 bp, Homo Sapiens
  misc_feature (863)..(863): n is a, c, g, or t
  misc_feature (867)..(867): n is a, c, g, or t
  misc_feature (873)..(886): n is a, c, g, or t
  misc_feature (890)..(890): n is a, c, g, or t
  misc_feature (897)..(897): n is a, c, g, or t
  misc_feature (902)..(902): n is a, c, g, or t
  misc_feature (904)..(904): n is a, c, g, or t
  misc_feature (926)..(926): n is a, c, g, or t
  misc_feature (942)..(942): n is a, c, g, or t
  misc_feature (947)..(947): n is a, c, g, or t
  misc_feature (951)..(951): n is a, c, g, or t
  misc_feature (959)..(959): n is a, c, g, or t
  misc_feature (965)..(965): n is a, c, g, or t
  misc_feature (972)..(972): n is a, c, g, or t
tttccattccatacctttttttaatctgcatcttctcagcctcctcccttccccgccaccccttagagggcgtggaagccctcgttgaaagggaaggaactcctctctcctccctgggggagggtcagtgtcccctgggccaagactcgttgatgggagaagcaagggcctgcgtggtggagcaaggacatcatccaagaggctgtggccaaggcccagcccctcggatgccctctaggcctgggccccatggatcatcaggaaagtgaagagtagataagtccgggagggcaaggaacgggcgtccctgcgtgtgtgtggctgatggaggcagacatggactttgggaggcaggagcagaggccaggggatgtggggaccaggtgaggccctgagaaggaaccccaggttgtaggggtagctgcatgtggggggagtgactggccctgagcagcgggagagagggcaggcaaggaggaggggcctatcaggggaggatgggaatgttgggtgagtagcagggccaaggccatggtgccaccacagccagctcttcagccccagggaagccaacctggctgggcatggccccaagcctccaatttgtgcttctgcgtcactggggggggctcccagcatggcctcagccccggtagggaagtgtccacaggcagcctctgctgcaggcaacagctggccgcaggactcctcctccatcccagcctttctggaagcttcttctcctgccctttgtgagaggccttcaggccagatcatcggccatcttgggggatgaagccatgctgggggcgattcttaggcttccacttcctccaaaatgaccacaggtaactgcattttantctntttaannnnnnnnnnnnnncccncaccccnccccntntgtgtggctggtttgttttccngcttttttggaaaaantaatngggnatttaagncatggnggaatgn

SEQ ID NO: 440738 - DNA, 1225 bp, Homo Sapiens
gtgtgatccttttgcgctcgttgccctgccggggccgtccgcatcgggcccccgctgttccgcttggccacagtggaccttcacttgtgctcgtgatgtgccacatctgctcccaccgggcatctgggtgtctcagctttattcgcgggtccgtggttcatgtgctcgggctccggcgccttgccgtcagaggctgccagcgcttccctccgcttcggtctgctgcgactctgctgccccccgcccggcaccagcggggccccgcgtgccccgtcagcctcagccgcctctcgctgggccctggcggctctggccacgtccaggggtcttccgcagcctgagcggcggggccgcctggggcgccgtggagtgcgactctggtacccctggagagcccgccctgctatgaggactgccctctagcttcccggtgctcattgtccacggatgacagcgcgctgccaggggtgatcgggcacggttgctctctgagacctccctcactggcccccagtagtggccccctccccaccattccaccatgggcttagatgcccgagtgattgttgtccaaaacaggcgggaaaacagaccagccacacacaaggggcagggtgagggtgggggtgggggtccttaaacagactaaaatgcagttacctgtggtcattttggaggaagtggaagcctaagaatcgcccccagcatggcttcatcccccaagatggccgatgatctggcctgaaggcctctcacaaagggcaggagaagaagcttccagaaaggctgggatggaggaggagtcctgcggccagctgttgcctgcagcagaggctgcctgtggacacttccctaccggggctgaggccatgctgggagcccccccagtgacgcagaagcacaaattggaggcttgggggccatgcccagccaggttggcttccctggggctgaagagctggctgtggtggcaccatggccttggccctgctactcacccaacattcccatcctcccctgataggcccctcctccttgcctgccctctctcccgctgctcagggccagtcactccccccacatgcagctacccctacaacctggggttccttctcagggcctcacctggtccccacatcccctggcctctgctcctgcctcccaaagtccatgtctgcctccatcagccacacacacgcatggacgcccgttccttgccctcccg

SEQ ID NO: 440739 - DNA, 963 bp, Homo Sapiens
  misc_feature (519)..(528): n is a, c, g, or t
aaaaatttaacattttaattagaaccaatccctatggtctattgttcaatggaagctcagataggcaaagtggaatgaatagaatgaactattaaacatgtctgtataaatcaacatgaaaaggtattgaaggtattgcaagttacaaactaagtacagtgagagtttagtgttaaacatttctctaaactttatatatattcatgtagtatttttgcaattatgttttgtttttacagtataaaaacaaaatcaacacatttccaaataatgttcaaaacacatttatttactaaatcacctgacactgacatctaagataatttcaacaaataaaatgtttaagaaaaattgtggtatacatcatatttgtctctagaaaaaagtcttatttacaagttgaggaacaaagatatttcttttaattaaaaacacattaattatgcagtgctaccatactaaaagtgaatctcccaagaacagctcaagtatcttgtgaagtattaagaggtgaactgnnnnnnnnnncaatcatattcagaaaatcttatatgtttactcgcttgttgagtctttgccagtctaatcttttcagctttggtgattaacttttcagtgcctcttttcttttcccgaggctgattaagttttgcctgtctatcaaccaaaatcttctgccaatacctttgttcgtgatcaccagaaaggatctcgagtttccagcagtgtttcttgttaatttctgtataggcatttattactgcttgagcatcctcaggagttttaaatctagcatggcattctgtatccccttctagcagatcaacataaagaacttctgagattgctggcagagtatcccggacttggtttcctgccatgtagaggctctgtgctaatgatttttaccatcactccactcacgaaactggggtcttgtgcattaacctttctctgggtgcg

SEQ ID NO: 440740 - DNA, 861 bp, Homo Sapiens
gaggcttggaattgatttattaagcacatcccttgccaccctcccaccttaaaagttttcagtatcaaaagaagctagcgcaggccacccgagtccctgaggttggagtcctagcatagctcccctccctcaaagagggacaaggggtcaggggcagagcaaaaatccagtctgcttcaaccacggagactgcctttgggatggaaagtttctggagctccctccattctattcctgtggggcaggaacatgccagggctgctggtaaatggcaggggtcacctttaccagggcgcaggcatagtgtggcccctgcctgccctggggccaccctggaacagtaagaccctctgggaagggaagaaaccagacccagccattaagctttctccccttctccctcaaatcgccccttcctcctccccaaaatcaggctatggcaaaggggctggcagcaggggaatggaggttttggaggggaaggccagccatgcgaaggcaaggagaaaaggaggatggagagagccccagccatccccattttccttcctctgcctccgaggggctgcttctggagggcactgttgtgtggggaccctgtgaggtttgcaggaggcggccaaaggggcaccagacagggaacatgcacacaggcagcctggccatggagagctcctggctgtccgcccagtggcgccttggcagagctggcgcttcacagtgtatattgatggtgacaggattcccttatcctgctccaaccttttaactggggacacattcaccggcagttcactcattttacatgccccccagaacgcgcaccacactttcccttaacccagcttaaacaaccacccc

SEQ ID NO: 440741 - DNA, 1215 bp, Homo Sapiens
  misc_feature (418)..(418): n is a, c, g, or t
  misc_feature (467)..(467): n is a, c, g, or t
  misc_feature (484)..(484): n is a, c, g, or t
  misc_feature (571)..(571): n is a, c, g, or t
  misc_feature (632)..(632): n is a, c, g, or t
  misc_feature (768)..(831): n is a, c, g, or t
  misc_feature (1068)..(1068): n is a, c, g, or t
  misc_feature (1142)..(1142): n is a, c, g, or t
gacgagcgcaatggtttttggatcgcttaggggcataaatgcatccatccacgcctcttcacacacttaaatacagaaccaaattctccagagccgattttctctagctcatgaaattctgtgtataccgggacttcatattgctttcagtaattgtaattctcttagcaggtcttgtttcatcttcaagctcataatcactggcttccatgtcttcaccacaggaatcattccaatacgttctctttctacgacgacactgtcctgaggaatgaagcaacaaagaatccggagtaaaaggattaatattcacttgaggagtctgtcgcacatcaaattccctttttcttgatttttctgtatccatgaagagagaactaccccggagtttaacagagctggaatcaattccccgagntttggagagcaaactcttgggcgtgtgcggggtgtcgaagagtcgcagnttgcggaaggttttgtntggcggggtgcccgggtggtccggccgcggcgagcggcggccttcgcccgcccggcgcgccccgcaaccccgcggcgacgcatctcntgggccgccgcagcgcaccggcgagaaagagctacccaggaagtagggggccgccggcganttgaccggcgacgaggagccgaagccctccccctcccacgagtcgccctccgccccaccgcccgcctcgtccgcgcccgggcaggcgccgggcagcaacaggtcctcctccagctcgccggggctcccgggggccnnnnnnnnnnnnnnnnnnnnnnnnnnnnnnnnnnnnnnnnnnnnnnnnnnnnnnnnnnnnnnnnagtcgggctcttgaaaggccgagtcctccccggtgctgtggccgctgccctcctcctcctcctcttcttcctccccctcacagtcgctgcagggcgagaagatcagcttctgccgcaaggtgcaggccgccccggcgcggcggggtggcggcggctgctgtcggctcaggaagctcatcgcggccctggggacggggccgaggacaggagagcggaggctgcggggtccaggacacngcgggcctgggggcgggtccgccacgtgcggctgggcgcgcctagtcgcagccgcggcgtctctgcgcggcggnccgcgtgcggctccggggcgctcgggctgcggacggtggcggcagcggcggcgcggactttccggcagaggcg

SEQ ID NO: 440742 - DNA, 1595 bp, Homo Sapiens
  misc_feature (227)..(256): n is a, c, g, or t
  misc_feature (329)..(380): n is a, c, g, or t
  misc_feature (959)..(959): n is a, c, g, or t
  misc_feature (1042)..(1043): n is a, c, g, or t
  misc_feature (1048)..(1048): n is a, c, g, or t
  misc_feature (1050)..(1050): n is a, c, g, or t
  misc_feature (1062)..(1070): n is a, c, g, or t
  misc_feature (1095)..(1095): n is a, c, g, or t
  misc_feature (1108)..(1108): n is a, c, g, or t
  misc_feature (1110)..(1110): n is a, c, g, or t
  misc_feature (1117)..(1117): n is a, c, g, or t
  misc_feature (1133)..(1133): n is a, c, g, or t
  misc_feature (1170)..(1170): n is a, c, g, or t
  misc_feature (1190)..(1190): n is a, c, g, or t
  misc_feature (1196)..(1196): n is a, c, g, or t
  misc_feature (1234)..(1234): n is a, c, g, or t
  misc_feature (1248)..(1248): n is a, c, g, or t
  misc_feature (1257)..(1257): n is a, c, g, or t
  misc_feature (1275)..(1275): n is a, c, g, or t
  misc_feature (1295)..(1295): n is a, c, g, or t
  misc_feature (1297)..(1311): n is a, c, g, or t
  misc_feature (1333)..(1333): n is a, c, g, or t
  misc_feature (1343)..(1343): n is a, c, g, or t
  misc_feature (1349)..(1349): n is a, c, g, or t
  misc_feature (1366)..(1366): n is a, c, g, or t
  misc_feature (1381)..(1381): n is a, c, g, or t
  misc_feature (1384)..(1384): n is a, c, g, or t
  misc_feature (1389)..(1391): n is a, c, g, or t
  misc_feature (1393)..(1394): n is a, c, g, or t
  misc_feature (1398)..(1400): n is a, c, g, or t
  misc_feature (1404)..(1404): n is a, c, g, or t
  misc_feature (1406)..(1466): n is a, c, g, or t
  misc_feature (1471)..(1471): n is a, c, g, or t
  misc_feature (1479)..(1479): n is a, c, g, or t
  misc_feature (1493)..(1493): n is a, c, g, or t
  misc_feature (1520)..(1520): n is a, c, g, or t
aacctggaccaaaaaagtggcactcccaggggcggctgttgaaataaccttaatcaatctccgcgcccctggcgtgattaagtcttcgcaaaccaggctattagaaagggaggtccacgggcaaggccaggtactccaagcattgtggaggccaaagccaagggaattgctttagcccagaagttcgagaacaagctggggcaacatggcaaaagctttcctctacnnnnnnnnnnnnnnnnnnnnnnnnnnnnnngctgtgtatggtggcgcacacctgtggtccaagctacttaggaggctgaggtggaaggatcacttgagcccannnnnnnnnnnnnnnnnnnnnnnnnnnnnnnnnnnnnnnnnnnnnnnnnnnntgacagaggcagaccctgtctcaaaaaaaagaaagtggggcccatctgggggggctgcagagcgcagggtgggccaagggcaggtcccacgggcctcacctccaccacctgtgtaacaggtcccagaaccccttggctaagctccacggctcctcgattttggagcggcaccacctggagtttgggaagttcctgctctcggaggaggttggtatactcaccctcggtttctgctgtgggcgctggggacgcagcgtccgcaggacggcagggccgtatcctgcggagcagggttctgatgcagcgggtgagcactgggtgtgtgagcactgggggagggcggcagagaaggcggagggccgaggctgagggcaggtgcatcggaggccctgggaaaacgcttgtggggaagacaactggaaagggcccctcatggggtggggtggaagccgaaggggaagcggcccgggacccaccagcgggggaatgaagggcagccgagccctgagcggcccccaaggacctggacactcagtggacccctccctgcgctccccggtggtgacctctgaggccatntgcgtcccaagccgacgatggagccgctggtggagagctgggcaccctgaggagggccctgagcagcaggcggattagggttnnggccnanggagggccggannnnnnnnncgtgagaggaacaggcagcggaggnggaaggggggggntngcggggnaccttgagaggtggcngcaggggcgtgagggggtgggcataacctcggcagancctgaagatctacgagaacntgaacnggcgggaggacgagcaggtgatccacgtgatggacatngccatcatcgccanggacctggncctgtacttcaagtgcgngccttccgggagggggcgcntnnnnnnnnnnnnnnntagcgtgggacccccggcaganacgggggagnagcggngggacagcccgggggangcagccccggattcngtncgtgnnngnnggcnnngggnannnnnnnnnnnnnnnnnnnnnnnnnnnnnnnnnnnnnnnnnnnnnnnnnnnnnnnnnnnnntcganacttgctnccacctgcacctcncttgttccctgggttcaggaagagagngatgtttcagaagatcgtggatgagtccaagaactaccaggacaagaagagctgggtggagtacctgtgcgtgga

SEQ ID NO: 440743 - DNA, 618 bp, Homo Sapiens
ctcctccagagccttcactttggccttcatactcatcagccagcgccttccactctttcctattgttctcagtcgtcgaacatggcaggatctcttcgtggaaacgagagaactccttgtacacgaatgtgcacacgaagtcgatgaagcccacttgcagcttggggagctcgccgccttgttccggtccatcataggaatgggctgctgatccaagacctgtcctttccaagtcaccttgctcccagaactcagcagccacgagaagtgcgaccttgctctggacttcccagggcttggtgatggcagacaggtcgcaggctgtcatcatcatggccatgacgatctccttccgggtcgtctccagggacaggtactccacccagctcttcttgtcctggtagttcttggactcatccacgatcttctgaaacatcgctctcttcttgaagtacagggccaggtccgtggcgatgatggcgatgtccatcaggtggatcacgtgctcgtgctgccgccggttcaggttctggccagatgttcagggtttctgcggaggtaacgcccagcgcgtccagccggccacccagcctcgctaccatacccgagggtaactgc

SEQ ID NO: 440744 - DNA, 798 bp, Homo Sapiens
ggtgggtgaaccgaaggggaacggcccgggacccaccagcggggaatgaagggcaccgagccctgagcggcccccaaggacctggacactcagtggacccctccctgcgctccccggtggtgacctctaaggccatctgcgtcccaagccgacgatggagccgctggtggagagctgggcaccctgaggagggccctgagcagcaggcggattaggggtcccgcccaccgagggcccgagggcgggggcgtgagaggcacaggcagccgaggcggaaggggcggggtccccgggcaccctgagaggtggccgcagggcgcctgacgcgctgggcataacctccgcagaccctgaacatctaccagaacctgaaccggcggcagcacgagcacgtgatccacctgatggacatcgccatcatcgccacggacctggccctgtacttcaagtgcgcgccttccgggagtgggcgcctcgcggggcgggcgggtagcctgggacccccggcagacacgggggcgcagcggcggcacagcccgggggacgcagccccggattccgtccctgcccagccggccccgcgcaccccggatggggcctcgctcagggctccgcgcctcccatgcagacgggcgcttggggcggggtctccacacttgctccacacctgcacctcccttgttccactgggttcaggaagagagcgatgtttcagaagatcgtggatgagtcacaagaactaccaggacaagaagagctgggtggagtacctgtcctggagacgacccgaaagccgct

SEQ ID NO: 440745 - DNA, 1005 bp, Homo Sapiens
aagaatgtgctgtcctgccctcgtcaacaataggaggagattgtgggagtcgccacattttacaacaggaaagacgggaagccctttgacgaacaggacgaggttctcatggagtccctgacacagttcctgggctggtcagtgatgaacaccgacacctacgacaagatgaacaagctggagaaccgcaaggacatcgcacaggacatggtcctttaccacgtgaagtgcgacagggacgagatccagctcatcctgccaaccagagcgcgcctggggaaggagcctgctgactgcgatgaggacgagctgggcgaaatcctgaaggaggagctgccagggcccaccacatttgacatctacgaattccacttctctgacctggagtgcaccgaactggacctggtcaaatgtggcatccagatgtactacgagctgggcgtggtccgaaagttccagatcccccaggaggtcctggtgcggttcctgttctccatcagcaaagggtaccggagaatcacctaccacaactggcgccacggcttcaacgtggcccagacgatgttcacgctgctcatgaccggcaaactgaagagctactacacggacctggaggccttcgccatggtgacagccggcctgtgccatgacatcgaccaccgcggcaccaacaacctgtaccagatgaagtcccagaaccccttggctaagctccacggctcctcgattttggagcggcaccacctggagtttgggaagttcctgctctcggaggagaccctgaacatctaccagaacctgaaccggcggcagcacgagcacgtgatccacctgatggacatcgccatcatcgccacggacctggccctgtacttcaagaagagagcgatgtttcagaagatcgtggatgagtccaagaactatcaggacaagaagagctgggtggagtacctgtccctggagacgacccggaaggagatcgtcatggccatgatgatgacagcc

SEQ ID NO: 440746 - DNA, 924 bp, Homo Sapiens
gtccattaccaaccctcaggtttttcatcaatgccccctaaaaattcgtccccaacgcaacacccaggtaattcacaacttctgtcttctgggaacctctgtagcactcagcttcactcgcctcagcagaaatggctgcaagagtttgtgcagttcacttgcctgactcagattctttctcaatatcctggtagcgttgaataaaatctcccacctcttccttggaaaagagatcaggctccacaaacttgaggagggagtagagctcttggaggctgttctggatgggagttccggtcaacaggagactgaagactactgagaactctgacaaggtcttatgcagcagggagctttggtttttcaacctgtgagcttcatccacaacaagaacactccaagggaatgattttagaaatgatgcatctttcaagcaaatctcataggtagtcagtagcacatgaaaacgtgactcctgtttcaggtcttgctgaaggcaggctctttcctccttgtcgcctgcatatgttacacaggaaagacctggagcaaatctctgcatttcttctttccagttgctcaaaacagacaagggacaaagaatcagaaatggcccttcatcatttaatcttcctgccaaataaatgaagagagcaatagtctggcaggtcttccccaggcccatctcatctcccaggatacagccattctgacaatggaagcgctgggcgagccagtttactccctccagctggtaagagcgtaggtgaatccctgtcagcccccactgccgtaagtcctgctcctgcacccgcgccgcctcggctcggccctcagtatgaagccgcagtaagaagccaggggcttggcccccgcggctagtagcgcccgcgcgctccatcgggccggtagaggcctgccgct

SEQ ID NO: 440747 - DNA, 805 bp, Homo Sapiens
  misc_feature (588)..(592): n is a, c, g, or t
  misc_feature (598)..(600): n is a, c, g, or t
  misc_feature (603)..(603): n is a, c, g, or t
  misc_feature (608)..(608): n is a, c, g, or t
  misc_feature (620)..(675): n is a, c, g, or t
  misc_feature (685)..(686): n is a, c, g, or t
  misc_feature (702)..(703): n is a, c, g, or t
  misc_feature (706)..(706): n is a, c, g, or t
  misc_feature (710)..(713): n is a, c, g, or t
  misc_feature (716)..(718): n is a, c, g, or t
gttggggggggtgagggagaaggtagtattaaaaataaaatttaaaggcagctgagcaatttgaatttcaaaacatggaatcagcatcctgcaatggtatttagagattggtggtattaatgaggatggtaatgatttaatcaggataattatactttcaggctcaacatccttcttaatcatttttgaatttctgcctagtgtaatgttccacacccgttttaagaggaaatgccaagtaataagagataattgtgtattgagagagggggtggcatttcaaggagatcgcatccagcccccctctttcttcctcacacacccactccccctcacccccatggctaggctggcctgagataggggatactgccgcttaaatagcaatgccttcctcagatggagacaggaaatggttaagagggtgtcacaatacagctaaatgcggaggcagaagggtcacagcgcacacagcagcgagttgaccattcactgagctctgtttcgcacagagccaaacactggaagcacgagatagccgacgtggaccaggaccatcctggctcctcagcaacggcggcagcgccnnnnnacagcnnncanatttntagcgcagctcnnnnnnnnnnnnnnnnnnnnnnnnnnnnnnnnnnnnnnnnnnnnnnnnnnnnnnnnagcgcggggnncgggcggtggtggggnngcngttnnnnggnnnacagatggcccatggaaaggctcccttcccggcccctctcgacattcaaaggcgctggggccgcagctgccgccacacaaaggcgcg

SEQ ID NO: 440748 - DNA, 1659 bp, Homo Sapiens
  misc_feature (360)..(360): n is a, c, g, or t
  misc_feature (1506)..(1519): n is a, c, g, or t
tgtggatatgtctgtgtgcatgtttgaaacagatctgaacagcttcccatttcaactccatagatacgtgactctccaagtgctttattttgaaaactaggacgtagcactttgcagaagaaaaatcagtccacttgctattatttatgtgatcgctgatctgctagatggatatagaaagcaccaagaattataataatttatggagtagagcactggtttacaaacatatttctctgcccgagctttgtgtgtttctttgcgtctcggggctccgttctgtgcaatgggaatggagaatattcagaatttgaagacaagcccggcgagccgactgcattcatagctaaaattaaaggnaataagtgagcagctatttgtggcagacaggacatgatccaggaccacttaggaagggttagtgtggtttctctgtgacatttcgccacattgcaacaaaagccctagtaagcactgcctttgctgagccaagccggctttttctctgcatcgccctgagccaccggcctgaagacaggcagctgcacttttggctgtcccatcagagaggctggggctattcagtcgctcctactctcagttaaaggccccaagaggagacggagccaaggtgcgtctaggatcctggtgaaagctttccaaggtggggttcctcagaacgccgcagcggggatggctgttgggggagatgtttctctggaagcttctcatgcttaataagacagtcgtttctgtgtgctcattgactgtcatccgagttttggacccaggacagcaccatattatgctagccccccagtgattgttaaagagctgccgatgaatggaagagaaacacaggtgtgttctggggatggctgccttaccggcctggcactggctttgatcagagtgaccttttccttccaaacgagagcactttcgagagccggagaggatgctggtaatagtggcacagggacagcagatgtgaactggggctgtcctgggcctgcgctgagtttgagaggcctgtgttggctggaagtgatgcttcaagtcacacggtgaagcaaaatctatctttggtctgcagggcagcagctcctctggtagtgcaatcctccaagatcttcctcacacatcttcggacagagaggggccaccagaatgatccaagcatctcttttgcaaacattcatctgctgctgagatgctctgtgtgagccaaggcctctctctctctccttcctgggccttcagcacacactggctggcctcgctgtttggtgggggccttcttaggggcccacagaccccctccactgcaactcctcaaaatagagttctgaggaggtctgttttctgcctggctggttcgccgggtctgagcccttggagggctagtttcgtgtctgggtcctgtggctccccagaacaggatctggcccagagcaggagcagcagtgggtgcgttggggctgaccagtgccctgcatgtcgatnnnnnnnnnnnnnnaaaaattggccaaaaaacgttcaaggtgggttggaggggccctgccaccccactcctgggaagcaaacctcaaatctacccgggggccaaaggaggcccagcccctggctttcgcggaaagagggtgcttgaataccttc

SEQ ID NO: 440749 - DNA, 875 bp, Homo Sapiens
  misc_feature (10)..(10): n is a, c, g, or t
  misc_feature (20)..(20): n is a, c, g, or t
  misc_feature (27)..(27): n is a, c, g, or t
  misc_feature (48)..(48): n is a, c, g, or t
  misc_feature (128)..(149): n is a, c, g, or t
  misc_feature (162)..(411): n is a, c, g, or t
  misc_feature (514)..(514): n is a, c, g, or t
  misc_feature (597)..(630): n is a, c, g, or t
tctgcgcgtntgggcggttngatatcnaggtcctggcatctagtgagngccttcttgctccgtcctcacatggcagaaggcaaaaggggtaagaaagcaaaacagagcttcctttaacctcaactcannnnnnnnnnnnnnnnnnnnnngagacagagtctnnnnnnnnnnnnnnnnnnnnnnnnnnnnnnnnnnnnnnnnnnnnnnnnnnnnnnnnnnnnnnnnnnnnnnnnnnnnnnnnnnnnnnnnnnnnnnnnnnnnnnnnnnnnnnnnnnnnnnnnnnnnnnnnnnnnnnnnnnnnnnnnnnnnnnnnnnnnnnnnnnnnnnnnnnnnnnnnnnnnnnnnnnnnnnnnnnnnnnnnnnnnnnnnnnnnnnnnnnnnnnnnnnnnnnnnnnnnnnnnnnnnnnnnnntgagcaccgtgcccagccaacctcaagtacttttataagggtcctaatcccatacatggcctcacctcttaatattgtcacattagggattaggttttaaccnaggagttttggagggaacacaaacattcaaaccatatccctgagataattttaaaattttcccatgatttcctcctgttatgnnnnnnnnnnnnnnnnnnnnnnnnnnnnnnnnnngtgtgtacaaatccaactttacccctctacagttacctagtttccaatgatcatttacaaataattcaacatttgccacatatttgaaatgtcacctttaacatatacctaattactacatgtatttgggtacattcatgtatttcctattctgttgcaataatttgttcaagtctactgtctgcttgtttcttgagagaagagttttgaaatctctgctataattatgaatttgtccatttctc

SEQ ID NO: 440750 - DNA, 1813 bp, Homo Sapiens
  misc_feature (119)..(119): n is a, c, g, or t
  misc_feature (140)..(165): n is a, c, g, or t
  misc_feature (178)..(178): n is a, c, g, or t
  misc_feature (207)..(207): n is a, c, g, or t
  misc_feature (254)..(254): n is a, c, g, or t
  misc_feature (294)..(299): n is a, c, g, or t
  misc_feature (303)..(303): n is a, c, g, or t
  misc_feature (306)..(306): n is a, c, g, or t
  misc_feature (321)..(373): n is a, c, g, or t
  misc_feature (408)..(408): n is a, c, g, or t
  misc_feature (448)..(448): n is a, c, g, or t
  misc_feature (704)..(704): n is a, c, g, or t
tttaaaaagtgtcttcctcctttgttacatccatgtgtgtaagtgagcatctgtgaacttttatcagtaacctacattattgacattatgtgttgttcctttaatcatcagtgattatntaaggacagaagactaggatnnnnnnnnnnnnnnnnnnnnnnnnnntaattgtttccanagaatctagaaagaaatacctataaaatnagaaaacaaaagatctcagtggtgagaggaaatatattttgcaaaanaacccattgggcaatttgaattacaaatttaataaataannnnnnaccnacnaggttaagagtaaannnnnnnnnnnnnnnnnnnnnnnnnnnnnnnnnnnnnnnnnnnnnnnnnnnnnccaagtcccatatgtggtagaaaaggaagagcagntgaggaaagaacaagcaaatccacactcagtcagtagacntataaaagatgatgcaagtgatgttcaagaggattctgcaatggaagacaagttctatagcctggatgaattgcatattctggacatgatagagcagggctcagctggcaaagtaactacagactatggagaaactgaaaaggaaaggcttgctcgtcaaaggcagctttataaattgcactatcagtgtgaagatttcaaaagacagttgagaacagtgacttttcggtggcaagaaaaccaaatgcagattaanaagaaagacaaaattatcgcatctcttaatcaacaagttgcttttggaatcaataaggtttccaaattacagcgtcaaatccatgctaaagataatgaaatcaagaaccttaaagagcaactttctatgaaaagatctcagtgggaaatggaaaaacataatctggaaagcacaatgaaaacatacgtaagcaaactgaacgcagaaactagcagagctttaacagccgaggtgtatttcttacagtgtcgtagggattttggtttgcttcatctagagcagactgaaaaggaatgtctcaatcagcttgccagggtgactcacatggcagcaagcaacctagaatcacttcaattaaaggctgcggtagacagttggaatgccattgtggcagatgttagaaacaagattgcattcctcaggacacagtacaatgaacaaataaacaaagtcaagcaaggatttgccttgagtaccttgcctccagtccagcttcctcctccaccacccagtcctgagatactgatgcagcagttcttaggaagaccccttgtgaaagaatctttctttagacccatacttactgttcctcaaatgcctgcagtttgcccgggagtcgtctctgcaactggccaacctagagcccccctgatgactggcatagcctgggctctgccagcgcctgtgggagacgctgtgcctcccagtggcaggtctgcggagtgatccctccatcatgaattgggagagaatacagacaggctgaaaactgcctttccacagcaaaccagaaaggaacttacagatttcttacggaaattgaaggatgcttatggaaaatccttgtctgaactgacatttgatgaaattgtttgcaagatttcccagtttattgaccccaaaaagtctcagagtcaagggaaaatcagtggtcaaatgttaattgtgtttcacctagtcattctccatcacagcctgatgctgcccagcccccaaaaccagcctggaggccactcacttcacagggtcctgccacatgggaaggagccagtaatccagatgaggaagaggaagaagaagagccttgtgtgatctgtcatgagaatctg

SEQ ID NO: 440751 - DNA, 1633 bp, Homo Sapiens
  misc_feature (1425)..(1425): n is a, c, g, or t
gggatggggtacttcctggggaggctgcctttggggtgagatgtcacccctggacaggcggaggggctgtccctggccccagtgctgtgtgtccttcgcctcccaccgccctgaccacagcctgcctttgcagccaccgtggtgtccgtgagtcacatctactcctcccaaggtgagctgccctgagggacgtggtcacatgaggcccaggggtgttcctggggtgaagtgggacagccctggccctcacgtagcacctgacctttcccttgggcagccctgggctggggaaacgtcctggtttggttcctgccctggcaccgtgggggccatgggacaggctccccctgagtcctgggctcctgccgcagcgccggtagtgttggacgttgcctgctttgcggaggccgagcggctgtacatgctgctgaaggacatggctgtgcggggccggctgctcactgccctggtgctccccgacctgctgcacgcgaactgcccccagacagctgtcccctccttgtgttcgtgaaccccaagagtggaggcctcaagggccgagacctgctctgcagcttccggaagctactgaaccctcatcaggtcttcgacctgaccaacggaggtcctcttcccgggctccacctgttctcccaggtgccctgcttccgggtgctggtgtgtggtggcgatggcactgtgggctgggtgcttggcgccctggaggagacacggtaccgactggcctgcccggagccttctgtggccatcctgcccctgggcacagggaatgaccttggtcgagtcctccgctggggggcgggctacagcggcgaggacccgttctccgtactgctgtctgtggacgaggccgacgccgtgctcatggaccgctggaccatcctgctggatgcccacgaggctggcagttcagagaacgacacggcagacgcagagccccccaagatcgtgcagatgagtaactactgtggcattggcatcgacgcggagctgagcctggacttccaccaggcacgggaagaggagcctggcaagttcacaagcaggctgcacaacaagggtgtgtacgtgcgggtggggctgcagaagatcagtcactctcggagcctgcacaagcagatccggctgcaggtggagcggcaggaggtggagctgcccagtattgaaggcctcatcttcatcaacatccccagctggggctcgggggccgacctgtggggctccgacagcgacaccaggtttgagaagccacgcatggacgacgggctgctggaggttgtgggcgtgacgggcgtcgtgcacatgggccaggtccagggtgggctgcgctccggaatccggattgcccagggttcctacttccgagtcacgctcctcaaggccaccccggtgcaggtggacggngagccatgggtccaggccccgggcacatgatcatctcagctgctggccctaagtgcacatgctgaggaaggccaagcagaagccgaggagggccgggaccaccagggatgcccgggcggatgctgcgcctgcccctgagagcgatcctggttagggggtggctggggcagcccaagggctcgagccatctctgcttccgccagccttg

SEQ ID NO: 440752 - DNA, 1490 bp, Homo Sapiens
  misc_feature (902)..(902): n is a, c, g, or t
  misc_feature (1288)..(1288): n is a, c, g, or t
  misc_feature (1447)..(1447): n is a, c, g, or t
tttttatccaaccatttataatctttattctataattctccaccagtgctagaattttcttcccaaatggcctcaattcggacactgaataaacgataatgaattttttaaagctgtgcttaaatataaacaaaataaaccgctaagtttttctggctccaagcacgccatatgaagcacgccaatgtcacttatgtgccctgatcacattcaggcaaagtgttcttcactttaaatactcctgtgttccattattgtttaagtaaaatcctatttcaaatgcctttgataacagagaaaccgcctgtagacaaactctttgaaagtgactgaattaatgtcttctgtgatgtcagatttccccactgggctcttttggaagcattcttcctgaattgaagtcactgtgaatatcctttagatttcgtcttgttaactcagttttcagtcagagcagcacttgggcctgctgcccttcaaggcacagtgcaacaaatagtggttacgggatttccatcagccaaggttgacaactaacaatgtaaagagagctcgagtgtgggccaaggcatcggaccttacacctaacttaggacataggtcgacctatggattattagccagtgaatgcttttccttgtctaaccagtctttaagggcacataagaaactcacgttaaattatatcctgacatattattattccatgaaaacaaaacaaatcttccaaagtgcttgttttccagtagctctgggtcttgtctcaccacgggtacagaaaggtattgctccgaggctctgacagggctactgctcttgactaattgttcttgtctttctgcttttcatttgatgaggacttacacatagttacttgctgcagtttactatctctcaggtgncttcctatgggaagttcataaaccattcttcccataaccttttgttgatcaccatttccattagggactcaataagacatgctcagtatctccaccaagaaccatttattgcaaaccagctgtgaaaccaacaggggtgctttagccaaattaaatcccatgtcgcagaagtcacagatttacagctcaaggaaaaaaatcatcagcaagaagaatccagaagtctctgtcgggcattcttctctccattatttgctttaggtttcactgtctatgttcataccttggaggtctgccgtctggttcccctgctcctctctcatctctgcagacatgggagttttgccatcaacaacatccatcttgatcatgccaaggtttgtcanggagtagcattgggtcgatcccctgaccactgctcttaatattctccagtaccttaagacacttgtatgacttgacctcacttatattttcctccaagaagagattgtagaggctcaaatcgttgtacccttcagatttgaaatgcagaacatcaaaangtggggaggatttcgtacactttgagaacatctgtcttctgtc

SEQ ID NO: 440753 - DNA, 1263 bp, Homo Sapiens
  misc_feature (1203)..(1203): n is a, c, g, or t
  misc_feature (1218)..(1218): n is a, c, g, or t
  misc_feature (1229)..(1229): n is a, c, g, or t
  misc_feature (1243)..(1243): n is a, c, g, or t
  misc_feature (1249)..(1249): n is a, c, g, or t
attgtgcattaccgtggtttaaagcaggctggtccgctcggatttccgggatatcgtcgacccacgcgtccggtaatgatcatttatgtgaatgagtttgcatttcagctttatacaatgcagtacaaaatagttttcttcaagcaggcttttatcaatcaagtgctgcactagaaatagattctcaaaaagttactaaacacttatacttgtttggtttctgaaaagaaatgcagatgagtgtaaaacatctgtctcaattatgttgatctgtgtgcgcaggtactggcagcatttacccattcatgttgagcctcaagatgcttgtgtttctggggtccacaataagacagttgttatacattttgacgttgttcataaagtttgtcttgtgatagtcctggcacttaaagacaaatttttctggtagtaaaagttcagaatttattgactatgtcaatgaaacacaagtacattcaaatcaaacggcagttttctttctaagtaaatgatttccagtcatctaaaaggtgggcaagatgagataaagacattttgatacagtaattgttttggttgggttttcatgtcagtttatgtttgactaaagctctcttcatatgcaggtttataaatttgttaggtctgttgtcccatgattaaacatggagtgcctcctctctgatttaatattctgcaggtcattgtaacctgctaggcaaagtcacaacattgcattaaagaggtgatagctttgctaatatcactgttttaaaggacgtacagttaaaggaatattaagtgggagaaagcctacaaggcttttagaatattatcagtatcttcatttctggtattcagatgttatgtgataaaacacattttttttggctttcccagatacactatatatttgttcaagggtaaatctataaaatgtatatactttattttgtggttttgctatttataaatttaatgttttaactgttgctcatttatggtttgttttgggtggtggtgttcatctgtatatcaccatgttaatttgtaatggaagtgcacttcgtagtgtatattgttactggacattaaaatactttataggcattgtctctgaggccaaagctaggtattttaattgtaccaaatggaataggccaggttaccaggttattgtttggcccctggacagggtagggncccccttaaaagggnaaaaaaccacntggttttttccctntgggtncccccctggcccaa

SEQ ID NO: 440754 - DNA, 967 bp, Homo Sapiens
  misc_feature (181)..(201): n is a, c, g, or t
ttgagacgatgattgagaaaattatctttgcctaaaaattgacctatcacctttttcaattactgtttaacattctaaaaactttccgttatgtaaaatacatttaaactttgccaataattgtagataatactggattcttcccaaaaggactaccacaaaacaaagctttcaaagagtnnnnnnnnnnnnnnnnnnnnngtaatccaatggggcataaaactgaggtctgtaacctatgacttcatggttcaaatccttaaagttaaacatgtgaagaatttgaagagatttgggacctgggccctctccaaggcaggtaggttcacaccttaccttctctgctgaattaaaccaggaataacacagctaggaaaacgcagtgctcccaggataaaagatacaaaagttcttttttatttctttaataaagcccttcaaggtttactctcccatcttgcaaggcccacatcttgttcaaggaccaaacccacaggctttagcactgcctaatttacttcaccaatgaatgaaaaccataaaccaaagcttgctgcctaaccactccccaggtccagacgggacaaggaaatgctgagaggggaggggacccatggggcacactcatgagatgcaggagcaccagagttcacggaaatcaagccggctttggactggaggctcggaaagtcagtcccagatgtagtgggacagaaaggggtgacttcatcacaccctatagccctggactttcccctcctctgctccaggtatcgaaccaagagttccttttccaagatgccctgctggctcaggggtgcatgagcccgtgggtctggcctctggcacagtctacatgcttccacaacaacgacagcagtttgataacagatgttaccccacgacgtgggggcgggctcacactgtcgcctcccacactctcccactgggttgtgtgccaggacac

SEQ ID NO: 440755 - DNA, 481 bp, Homo Sapiens
  misc_feature (359)..(359): n is a, c, g, or t
  misc_feature (417)..(417): n is a, c, g, or t
  misc_feature (426)..(426): n is a, c, g, or t
  misc_feature (460)..(460): n is a, c, g, or t
ttttttttaaagatacaaaagttcttttttatttctttaataaagcccttcaaggtttactctcccatcttgcaaggcccacatcttgttcaaggaccaaacccacaggctttagcactgcctaatttacttcaccaatgaatgaaaaccataaaccaaagcttgctgcctaaccactccccaggtccagacgggacaaggaaatgctgagaggggaggggacccatgggggcacacttcatgaggatggcagggagcaccagagtttcacgggaaattcaaggccggctttgggactgggagggctcgggaaagttcagttcccaggatgtaggtgggggacaggaaaggggggtgantttcattcacacccttttaggccctggggactttttcccctccttttggttccagggntttttcggnaaccaaggagtttccttttttccaaggattgccntgttggggtttcagggggttg

SEQ ID NO: 440756 - DNA, 746 bp, Homo Sapiens
ttttttaacatttttgcaaatactctatctttactgtccggcttaatagcagaattctcttatgtgcttctacattcagtctggtgtgataatgtagcctctggaaagctccattgtacattcatgacagaacgagggaaacatgaacaaataacagcttagtattactatgaacctcttggagagtcactaccttagcaatcttatccgttactgtgatttgagatcctcagttcaaagttcctaactttgacatcacttttgagttctctgattatgcctgtcgtcataccctcgcttttttcccaaccatctacccttttaagactccctggttcatgtcaacatgaccattgtgcctctgctcatagcagctttgtggaattaatggtcaagacactgtactccccactgtgcacaaattatttagcaatgatacagttactcctgtcatttctcctgaacatactgagaagtgttacaactcctagaatagtgaccaatatatgattgttggatgattagaaacaattctggagtctgagttatttttctttctgatgaaataccttcacccctgcatagcaacctgagtttccaccatgcaatgataacattctgatttagtacgttttgacattacatatgttagctattagggtttttgtacctgttttttaatcaaattgagggagtttacttctattccttactgacgagagttcaatgaatgggtgtgcagtttt

SEQ ID NO: 440757 - DNA, 1016 bp, Homo Sapiens
  misc_feature (300)..(338): n is a, c, g, or t
  misc_feature (534)..(543): n is a, c, g, or t
  misc_feature (973)..(973): n is a, c, g, or t
ggttggcagtaaccgattttaatgactagcttttaaaaatacagtacaaagactttgtaaatgtgattcagggcccccagcacccctgtgtctgcagagtgccttcaaaactcagctgttccagccggtgccaacctgtgaacttcccaccatatcccagaattttctattccccaaaccacttcccagtttcctttcagtaatctttctgaaggagccaggacaatagggcctgttgtttagtgaatttctttattattttcagcctttaaaatgtaatttccatctcttgcaatgaannnnnnnnnnnnnnnnnnnnnnnnnnnnnnnnnnnnnnncaggtatttagctcccctttcatattatttttaaattttttaattacctgttgtagggtgttcctccagaagcaaagagcaaaattttactgttgtgatgtaccaattctaactaattgtaatttttaatttcatgcgtttaatcattgtctcttcattttaagacttttaatacaaatgtcatttttaaagaaannnnnnnnnntcattatactccacaacacaataatataataacccacaaacaaaacaattacaaagggggggcgcctctaagaatatcccctcggagggggccaaaactaaaccggaacccactttttctttaaacaaaggggcccccctaatcaggaaccgccatcacataagatctggggcctgggcgccacgtgttttatcaccccccttgaacacggggaaaaatatgaattactcgggcgaatacttatgacgagaggcaccactttacttttctgtttagttggtaaacaagcatttggcgtccactcttcacatcaaccaaagtaatttccaccggtcctacacgcgacccattaaccacaatacctctaaatgtcggcacaattagggtatttaccacttttctctcaccctatcttacgctctatcactancataaaaaccactgcctatcatagttaggctccgccactcttg

SEQ ID NO: 440758 - DNA, 1018 bp, Homo Sapiens
  misc_feature (380)..(391): n is a, c, g, or t
  misc_feature (431)..(505): n is a, c, g, or t
  misc_feature (749)..(749): n is a, c, g, or t
  misc_feature (803)..(875): n is a, c, g, or t
  misc_feature (895)..(895): n is a, c, g, or t
ggtcaacagccgtttttctagttccaagttttaaatacatggaaggaagtccgggagaaccatatgaaggagcaggaggagaggaagaaactttttttccttcttttccaggagtagctggaaattaagatcgggttccttttctgccagcttgggaagggcaaccccatgactgattgcgattctgaggatgtctatgcaaagttggattcttgttacagtgtatccaatctgaagtattgcacatctgaactgggactgttaacactgatgccaatacagtgtggggtgccagaaagtgtctgctgatatttgtggaaaaaaaatctattttgtttacctactgtatcaaaggggagtctgggggagaatggtagtannnnnnnnnnnnatcagctgtgaaaaaaatgttacagatctgcacattttcnnnnnnnnnnnnnnnnnnnnnnnnnnnnnnnnnnnnnnnnnnnnnnnnnnnnnnnnnnnnnnnnnnnnnnnnnnnggttggcagtaaccgattttaatgactagcttttaaaaatacagtacaaagactttgtaaatgtgattcagggcccccagcacccctgtgtctgcagagtgccttcaaaactcagctgttccagccggtgccaacctgtgaacttcccaccatatcccagaatctgctattccccaaaccacttcccagtttcctttcagtaatctttctgaaggagccaggacaatagggcctgttgtttagngaatttctttattattttcagcctttaaaatgtaatttccatctcttgcaatgnnnnnnnnnnnnnnnnnnnnnnnnnnnnnnnnnnnnnnnnnnnnnnnnnnnnnnnnnnnnnnnnnnnnnnnnntaattttttaattacctggntgtagggtgttcctccagaagcaaagagcaaaaatttactgttgtgatgtaccaattctaactatttgaaatttttaatttcatgcctttaatcattggctcttcattttaagacttttaaaa

SEQ ID NO: 440759 - DNA, 598 bp, Homo Sapiens
  misc_feature (156)..(170): n is a, c, g, or t
ttttttagggttgttaagaaattattaaaaaagtttttccttgcaagccctgaggccaaaaaattagggaaatggcatgtttgtccgataattttctaattacttcccatggaaaagaagctaagccccttgggagaaacaagttctggcatagcnnnnnnnnnnnnnnnaaacatactattcctataagaaacttttgtggattttcgccagtgagaagcaaaaggtgaacttttgctggaatgctctgaaataaaaattccatgtagtaggtgagctgttatttttatttcagattgctttggccttgaacaaagtggatggagccaatgtggtaagaaggcctttaaaaatagctaccttctaaaactttggctaggtcataacgaagaaggaaatatcatttaagaaatttgtgttttatgctttatggtataaaaataaatgcttattctagatattttaataaattaataattctcattttaaaataacatgagcttagctggtagagcattcctttctcttgacatacatatttgaattttgtaaagcaggaaaaacagaattaatgactactcaaatacttaagataaaa

SEQ ID NO: 440760 - DNA, 1324 bp, Homo Sapiens
accgcctgggtgggtgggcaatggccaaccccaaaggccagggcaaaaaaccaagggcaaaaaggttttccttcccaggtttagcttttgttacctccaggctggtgctttttccggccaaagcaagaaaggatcccatttttaaatgaatttcttgaaaggactttggaaattatttggaacttaggggaagggattttgagggttccctggctgaggaacttcccattgacttgggcttcgcatttacctttcaaaaataccagtacactttccaattgtccatataaatagctttccacaattctacacacccatcatctcctgaagatgctagcaccgttcctgttatattccaactcactcgccagacctgagaattatgattatcgaactgagccactatatggatttcaaactttgttggcccaccagaggaagtcagttctttcctcacaggctttaatgtaaaaattctcacatctttggtcgctattgctagaatatggaaagatcttcccaaatttggagcgaatgcaatatcatgaacaggatcagtgactgtcataagagtttcagcttttgcatatttcttggtgttttcattatattcaaaaatctgaaccttggccattgcgttggggctactgtcatcacttcctacggcgatcatgggggaatgagcacgagagcttgaagggttccaagaaatacaactacagcttagcttacatgagatctcatgctgcaaagaccactggctgagattcataacatctggtgcctcatagattcttactataccatctgcggaacaggttgctaacataagacccatgtgcttgggagcaaacttcacatcagtaacagatgttctgctatccaccagagttgtccttttaacccagtggctctgtcctcgcagtttatcatttgattctcctactatttcttcccatacagcagctgttcggtcaaaagaacaggaagccaaaacctgcccaaattcaggatgggcccatgtcacacgccatacagatccactatgtgtcttccagctagcagtacaatgccaatcaccactttcacttttatcccagaccttaacgctctgatcgctggagcaggttgccatccgccgcccgtggaagtcgaaagagacatcgtggatgagatccttgtggtccgcccgcgatgctgcgagccacaaacatggtttccgtcgggcccgcgcctccgaagaggacagtggcggcggcagcggcggcggcgcgtggcccgtagcctagccagacttcgcagcccgggagcgcacggcttgtgc

SEQ ID NO: 440761 - DNA, 1179 bp, Homo Sapiens
ctggtaccggtccggaattcccgggatcaggctgaacggctcgggccacttacacaccactgcctgataaccatgctggctgccacagtcctgaccctggccctgctgggcaatgcccatgcctgctccaaaggcacctcgcacgaggcaggcatcgtgtgccgcatcaccaagcctgccctcctggtgttgaaccacgagactgccaaggtgatccagaccgccttccagcgagccagctacccagatatcacgggcgagaaggccatgatgctccttggccaagtcaagtatgggttgcacaacatccagatcagccacttgtccatcgccagcagccaggtggagctggtggaagccaagtccattgatgtctccattcagaacgtgtctgtggtcttcaaggggaccctgaagtatggctacaccactgcctggtggctgggtattgatcagtccattgacttcgagatcgactctgccattgacctccagatcaacacacagctgacctgtgactctggtagagtgcggaccgatgcccctgactgctacctgtctttccataagctgctcctgcatctccaaggggagcgagagcctgggtggatcaagcagctgttcacaaatttcatctccttcaccctgaagctggtcctgaagggacagatctgcaaagagatcaacgtcatctctaacatcatggccgattttgtccagacaagggctgccagcatcctttcagatggagacattggggtggacatttccctgacaggtgatcccgtcatcacagcctcctacctggagtcccatcacaagggtcatttcatctacaagaatgtctcagaggacctccccctccccaccttctcgcccacactgctgggggactcccgcattgctgtacttctggttctctgaggcgagtcttccacttcgctggccaaggtagctttccagggatggccgcctcaatgctcaggctgatgcggagacgagttccaggcagtgctggagacctggggctttaacaaccaaccagggaatctccccagaggttgtccgcgggattccccaggccaggcccaggcaccgtccctgcctcagagatgccaaaattcttgccaaaaggagtctggcgacaccttccacgagggggaatctcttggggccaac

SEQ ID NO: 440762 - DNA, 974 bp, Homo Sapiens
  misc_feature (722)..(722): n is a, c, g, or t
  misc_feature (786)..(786): n is a, c, g, or t
  misc_feature (791)..(791): n is a, c, g, or t
  misc_feature (872)..(872): n is a, c, g, or t
  misc_feature (874)..(874): n is a, c, g, or t
  misc_feature (909)..(909): n is a, c, g, or t
ggctgtggtactccggcttggtctccagcagtttcaccagataggtagactccatccgctccagctgcacctcccagtacacatagatcttctggttgaaagtgacatatacgaggcaggggctgttgcggccctctttgcaggcgtacaggcctgcacagaaggcacggatattttcatccacttggaagcggacgacggtgcggttgtgatcaatgatatatgtctgtccatccccaggcgcatgcaactacctcctcatgcccgttgccggtgacatccagtttctccagggcaaagagctggtgatccacctgcactgaccacagcagcttgtctgcttcttccatttcttccatgagcttcagtgtcccatccagggtgcacagggcaaagaggccagagccactactctcagtgccgtggccttgtttgatgttgccaattaggtgagtggagacattcttgttgtggatacggccagatgtctggtgcagcaccacgtctcgggcagctggggtctccctactaccatccgtgggcccttcagaggcaggaggggacccagtgtcctttttccaggtacacagtagaattgcatacgcacaacctggctgagacaccatcagttcaggaagacccagtggccccagagtcactgagaggctgtccacctgaccctccagcatccatttcttgagggacaccagctgccctgtcanatgttcaggaccctcacctagctcctcccagcggaaagctcgcaccacacggtctgtgtagccnaccancagttcacgacacccatctccatcgtatcgttatcaacgtctccgaggcagattgcgtgcgggaagaggctcccgctgaantnccagcgccacgcgctgcacgtagctaactgacctnatggcacctccaagagcagagggagcggagaggcccagtaaatattccctgaacccccgtcgcga

SEQ ID NO: 440763 - DNA, 858 bp, Homo Sapiens
  misc_feature (19)..(19): n is a, c, g, or t
  misc_feature (744)..(758): n is a, c, g, or t
aaagaggcccagaggccanttacttctaagttggccgtggccttgtttgatgttgccaattaggtgagtggagacattcttgttgtggatacggccagatgtctggtgcagcaccacgtctcgggcagctggggtctccctactaccatcccgtgggccttcagaggcaggaggggacccagtgtcctttttccaggtacacagtagaattgcatacgcacaacctggctgagacaccatcagttcaggaagacccagtggccccagagtcactgagaggctgtccacctgaccctccagcatccatttcttgagggacaccagctgccctgtcagatgttcaggaccctcacctagctcctcccagcggaaagctcgcaccacacggtctgtgtagcccaccaccagctcacgacacccatctccatctgtgggcatgaaagacaagatgggctctggagtcccacgagcagcccccgctcctctgctaacagtggcaccttccagccagtgcggcttcacacccgatctgcggtgctactcacttcaccctcagtctgcccccgcccctgcctgtgtttgcggcatcttgcccgtccatttggtccatctgttccgcagctcctatccgctctctgccttcatattacttctcaaacatgcaactcaaagtgtcccaattcatcccacgtatctcccaccacctacaagccccctatctggatggttcccttgcttgccacnnnnnnnnnnnnnnncaccaaatgttaccttctcagtgaggatttccctaacatctccatttaaaattgctacctctacctcgacactctagctctttctgtgaattattttctc

SEQ ID NO: 440764 - DNA, 1896 bp, Homo Sapiens
aaatgacccaagatataattctgattggggtctggatcataaacccgcatcacattttaaatgtctattgtcttggagacaataagctgttttatgggggaatgggtgggtggaaaaatgggagcagggcttctgaagctgactaatacctgaagaatacggcaacgtgagaaagcactgacccggctgctttggtaaatggacgaaaatcatctcagggttgctaggaacatgggtaagaccagactgtagaaagatccttcaaaacaaaacagtttgccattcctttaacaattactaacgtcaagaacttggaattgtgccacggaagacagagcttaagatggggtggagcccttacctccactgctcccctgggcctaaagcctggtttccttatgggtgttggggccacacaaacaagtctctgttttcaacacagtgacaagtggggagtgggtcatgtcccagatgatttggaacaaggccagggtcctatgaccctgctggcatgatgggtgaggtccataaggaaatgggcagagggtcaacttgtctcttctttcaccgaaaagactgcgaggtctatagttcacggtcaccctagggctgctgccatcttgtcatgcccatgagtcaaatcctgcattttctgtaatgcatattccctatcctgccaataccacagatacctttagggggtagggtagggggttcagaagaatccttcaccagctatgaggcaagtacagctaggtgggatcctggaggcttgagggagcacactgtggtggctggtctggatggtagagcgtttggtgaagcagggcacgagtcacagggaggtcgtcaggatccacgcccagctcctgcagcaggctgtggtactccggcttggtctccagcagtttcaccagattggtagactccatccgctccagctgcacctcccagtacacatagatcttctggttgaaagtgacatatacgaggcaggggctgttgcggccctctttgcaggcgtacaggcctgcacagaaggcacggatattttcatccacttggaagcggacgaccggtgcgggttgtgatcaatgatatatgtctgtccatcccagggcgcatgcaactacctcctcatgcccgttgccggtgacatccagtttctccagggcaaagagctggtgatccacctgcactgaccacagcagcttgtctgcttcttccatttcttccatgagcttcagtgtcccatccagggtgcacagggcaaagaggccagagccactactctcagtgccgtggccttgtttgatgttgccaattaggtgagtggagacattcttgttgtggatacggccagatgtctggtgcagcaccacgtctcgggcagctggggtctccctactaccatccgtgggcccttcagaggcaggaggggacccagtgtcctttttccaggtacacagtagaattgcatacgcacaacctggctgagacaccatcagttcaggaagacccagtggccccagagtcactgagaggctgtccacctgaccctccagcatccatttcttgagggacaccagctgccctgtcagatgttcaggaccctcacctagctcctcccagcagaaagctcgcaccacacggtctgtgtagcccaccaccagctcacgacacccatctccatctgtgggcatgaaagacaagatgggctctggagtcccacgagcagcccccgctcctctgctaacagtggcaccttccagccagtgcggcttcacacccgatctgcggtgctactcacttcaccctcagtctgcccccgcccctgcctgtgtttgcggcatcttgcccgtccatttggtccatctgttccgcagctcctatccg

SEQ ID NO: 440765 - DNA, 999 bp, Homo Sapiens
  misc_feature (20)..(20): n is a, c, g, or t
attttccttccatgagcttncagggtccccatccagggtggcacagggcaaaagaggcccagaggcactacttctcaggtggcggtggccttgttggatgttgccaattagggtgagtggggacattcttgttgtggattcggccagatgtctggtgcagcaccacgtctcgggcagctggggtctccctactaccatccgtgggcccttcagaggcaggaggggacccagtgtcctttttccaggtacacagtagaattgcatacgcacaacctggctgagacaccatcagttcaggaagacccagtggccccagagtcactgagaggctgtccacctgaccctccagcatccatttcttgagggacaccagctgccctgtcagatgttcaggaccctcacctagctcctcccagcggaaagctcgcaccacacggtctgtgtagcccaccaccagctcacgacacccatctccatcgatgtcgctgatcagcatgaccttggtgttggcagggatgtgctgcttgaagactggacgctgctcctctccgattagtgtctcgtggtgcccagaagcatccaacaccttggcaggtgtcaggtcaaacaaatgaaaccagccttcagcactcactgccaccaacaggttctttcctttattacacacgtctccaaccccaacgcaagtcagcattccctggcaggaacaggtgagccatggccgactgtcatcatttttatacacagacaccttcccgctggtgtctcccaccaccagttcatttaacgtatcgttatcaacgtctccgaggcagattgcgtgcgggaagaggctcccgctgaactccagcgccacgcgctgcacgtagctaactgacctcatggcacctccaagagcagagggagcggagaggcccagtaaatattccctgaacccccgtcgcgacagccgccagagcggaaggccacctaaggcagcaagttacgtcactgcctccc

SEQ ID NO: 440766 - DNA, 973 bp, Homo Sapiens
  misc_feature (392)..(479): n is a, c, g, or t
  misc_feature (511)..(521): n is a, c, g, or t
ggtggttcccttctgtgtagaatggtttctcccctccctttcctctctgaaaaaaggtttttccaaggggtttttccagagaggttttcaaagctttataagatttcttttcttaagtctggtccggttacagcctgttaaaacttggggattgcattgttaaatttctccatagaaatggttaccaagttctacccagaaaaaatttggtccttggttattaagggcccatttggtctataagttcctgttcagtttattgtaacccttagatccttttattagatttcaactttctcctgtatctcaataatcttcatttctgtccagaatctgaattctatttctgtaaattttggccatctcagcctgtttgggaactagtccaatcnnnnnnnnnnnnnnnnnnnnnnnnnnnnnnnnnnnnnnnnnnnnnnnnnnnnnnnnnnnnnnnnnnnnnnnnnnnnnnnnnnnnnnnncaatctttgtagttgctgacttttagataagnnnnnnnnnnnctttaattccattttatgttctgggagatttaattgtggtataaggtgggttcaattgactgggtttgtttctggaggattttagggaaccaaggctcagctcagaactcctggactgtgtgttctaactctggggtgttgatttcagacctctggctttgttctgtggtccctggaagttaggaacctgccatgctggaagggccaagttgttcctgaagcagtgttcacaagagtctgatgggtggtgccagccacagaactttgtagggaagtggcaatgggatccatccttgtttgcatgtgccagcagtatgggtagcatggcagggtgcacactcattctgcagtgaggtgctggtaggttcaggggtgccaacttctgtgtgggtgttcacagtggtgatggtggcaggatagtggtggccagccagggggttccccccaagtgt

SEQ ID NO: 440767 - DNA, 993 bp, Homo Sapiens
  misc_feature (5)..(5): n is a, c, g, or t
  misc_feature (9)..(9): n is a, c, g, or t
aagcncacngggaagtttcaaaaatatcttgcctgcctgatgcccagaaaattctgattcaattgatctgctgtgggacctgggcataggtgttcaaaaaggattccactgtgaagactgagaaggcttccatctttcagttctttcccttaggtatttcctaccttcaaaatcctctttctctttttaaacttatcttcatggtcagtgactccccagagacattacttagccctctgtgtaaactgcccataaaatacaaagggatacagattgtgggagtccatcccccactggcttcacttggcttcctttcacatttctcttgaacttgagaaggcagcaaccacaagatctgagattcatcaggctccctcataggtagggtaccactgagaaagctgtcttacccagcagaatgagcaaaacaccagccagctgggcccgcctgtacttagccacaccgggctcctggcccatccggatgcagggaagaacagtcagcagcagtaaaatggccggcagacccaggaccgaggcagcaatcatcagggcgcggcaggcctgcacgtagcccggcaggatgaggatgtccaccaggggcttgcagtggtacagccccgtggccatgacgcagtcggcccacagccccttggagcccagctcatccagcttgcggcaggtggggatggtgtagccgcaggtcaccacccagtcattggtggaggtggtcacgatgaccccgatccagcccacgaagctcgtgacgaagcccaccacctgcaggcacgtggccaccatggtggccgccaggatgtccccgtgcctcgcccctcacggctgtgcctgggcctgggctggacagtgcctgcccaggtacgtctcccacgctcgcgagccgctggagggcgacggcccgaggcgggacactggaggtggaggtgggcgccggaggctgcgagctcagcggcgaagggcgcacggcggggacag

SEQ ID NO: 440768 - DNA, 850 bp, Homo Sapiens
  misc_feature (77)..(96): n is a, c, g, or t
  misc_feature (825)..(825): n is a, c, g, or t
gtatcttgtatttctcttccccacccccacctaactcagtgatgtttgcaaaacatttgaaatttaaagtaacaaannnnnnnnnnnnnnnnnnnnacagcaaaagaatgcccaagaaaagagctaataggggcaacaccaagggaaaaaaatgtctgggcattatctgagctagagaatttctttttaaggcaaccaaaagatgggggaaatggggagaaagttaaagactacaaaatgccagacaggatgcttttctagacctttggctttagagcctggcagaggaatgggcttccccacactgtgacgagcaaacctagggccctgggcccagcatctacagcacctctgtgggcagccgggcagccctcttatacgtgggcactcttcgcatgagtcggggagctagagcccgcagtgtagtagaaacggttttcaccaaaggcctgggcatctccagcgcagcagaggatgacacagccacccacgaggcacagcacagcaccaatccagcctgcatacagggagtagccaaagctcacgatggtggtctcacggtgggcgcacacagggaaccagatggtggcaacaagggcgcagagagccagcagaatgagcaaaacaccagccagctgggcccgcctgtacttagccacaccgggctcctggcccatccggatgcagggaagaacagtcagcagcagtaaaatggccggcagacccaggaccgaggcagcaatcatcagggcgcggcaggcctgcacgtagcacaaagcaggcagtcaactggcaatgcaggttctaaaatccatggcactggcngtccatctgaaggaattccggaccg

SEQ ID NO: 440769 - DNA, 980 bp, Homo Sapiens
agcggagtgctgctgtccccgccgtgcgcccttcgccgctgagctcgcagcctccggcgcccacctccacctccagtgtcccgcctcgggccgtcgccctccagcggctcgcgagcgtgggagacgtacctgggcaggcactgtccagcccaggcccaggcacagccgtgaggggcgaggcacggggacatcctggcggccaccatggtggccacgtgcctgcaggtggtgggcttcgtcacgagcttcgtgggctggatcggggtcatcgtgaccacctccaccaatgactgggtggtgacctgcggctacaccatccccacctgccgcaagctggatgagctgggctccaaggggctgtgggccgactgcgtcatggccacggggctgtaccactgcaagcccctggtggacatcctcatcctgccgggctacgtgcaggcctgccgcgccctgatgattgctgcctcggtcctgggtctgccggccattttactgctgctgactgttcttccctgcatccggatgggccaggagcccggtgtggctaagtacaggcgggcccagctggctggtgttttgctcattctgctggctctctgcgcccttgttgccaccatctggttccctgtgtgcgcccaccgtgagaccaccatcgtgagctttggctactccctgtatgcaggctggattggtgctgtgctgtgcctcgtgggtggctgtgtcatcctctgctgcgctggagatgcccaggcctttggtgaaaaccgtttctactacactgcgggctctagctccccgactcatgcgaagagtggccacgtataagagggctggccggctgcccacagaggtgctgtaagattctgggcccaaggcctaggttggtcgtcaccagtgtggggagcccattcttcggcagggtcaaaggcaaaggtctaaaaggatctgtttggctttggagtttatttcccattcca

SEQ ID NO: 440770 - DNA, 1534 bp, Homo Sapiens
  misc_feature (446)..(446): n is a, c, g, or t
  misc_feature (666)..(666): n is a, c, g, or t
atatttttgaccgtccactactcacctaactctatatatgctaccatagtcctaattaaggaagttctgcttttatttttaagaaaaattcataagcttcagaatataatttaaaatattttagagtgaaaaatgagcactgaaaattatacatggtcatgatttttaaataaatttttatccatgtttaaggataatgtgtcaggcacattgatctaaaatgtaattacgatggtaaatgttcaaatctagatcagtgtgtaatgtggtacattagtttgtaaaatgctttcacagcattaactcattgttaattcttataccgccaaatgagatatcatttctttcctatccatctgttttacaaatgaggagacaggctcagagaagtaacctacttatctaaggccacatagctagtaagtggtggaaccagaactggaacnaaggccatttaactgcaaatactgacctcctgtcatttatcaagccattttcagacggcatgatattctcctgaggagcaaaggaatggaattagagctagcacaaggagaaattgtgcatagcttgctgcctatgtaacttatgcagaagatctgagcagtcttcctgtttttagggatattttgcacatgtgaactatatagtgagaaaatgtcaaanactaatacatgatatactgtttgtctcttagtgtccatccttgagtaatagaattttgttttagatttatttgaacatttaccatcacaattaaattttaggtcaacaaccagccttgagaaatccaaataccaatttgactataaatatagtaatacgtttaactgcaataactatagctataagtgcgtaccaaaccatgttttttccaaatgaccttaatttcttggcactacccatgttggatacctcatttgcttccccaaagactgtgcccaaaatttctgttgtttctacaatgattctgcctgccaacaaagtctgaaaatctctcaagtttgttataaaaacagcacagttagaacatgatgacattcctggagggaaaaataagtccacttatttgtttctaaaatgcctgtatcccaagcaactagaacacatagttggctatacttaatgaggagtcaagacaaaccattcaattcttctaaaaaagtaagaaagtattcaaagcaccagagtcacaatgttgagctcaggtgcaattttctattcactttacttccagcatggtcgggttaagagtggactacatagcttgaagcggatttcgttgagattcgttgtaattgaatcaacaactgaatgagcatgcctaagtagtggctccagagagtctgctttcagattttcttgccagctttgacccaagattaccctgggtctgcgagttttatcacctgctttatcatttgattaccagtatagtataactgtatttccttgtgggatagaagctgtaaaaaataagctgaaaatataggggatatatttaaataacgatctgagaagaataaggaaatta

SEQ ID NO: 440771 - DNA, 992 bp, Homo Sapiens
  misc_feature (4)..(4): n is a, c, g, or t
  misc_feature (6)..(6): n is a, c, g, or t
  misc_feature (12)..(12): n is a, c, g, or t
  misc_feature (22)..(22): n is a, c, g, or t
  misc_feature (35)..(35): n is a, c, g, or t
  misc_feature (39)..(39): n is a, c, g, or t
  misc_feature (50)..(50): n is a, c, g, or t
  misc_feature (55)..(55): n is a, c, g, or t
  misc_feature (58)..(58): n is a, c, g, or t
  misc_feature (71)..(73): n is a, c, g, or t
  misc_feature (76)..(76): n is a, c, g, or t
  misc_feature (78)..(80): n is a, c, g, or t
  misc_feature (82)..(82): n is a, c, g, or t
  misc_feature (91)..(92): n is a, c, g, or t
  misc_feature (97)..(98): n is a, c, g, or t
  misc_feature (109)..(109): n is a, c, g, or t
  misc_feature (111)..(111): n is a, c, g, or t
  misc_feature (113)..(113): n is a, c, g, or t
  misc_feature (115)..(115): n is a, c, g, or t
  misc_feature (117)..(117): n is a, c, g, or t
  misc_feature (124)..(124): n is a, c, g, or t
  misc_feature (147)..(147): n is a, c, g, or t
  misc_feature (164)..(164): n is a, c, g, or t
aatnanttcgcnctcgggctcncctttttagttcnagcnccttttccggntaggntgntttccattatggnnngcngnnngntctaacacnntcttnncactcgatgangncngngnaggaaangccgattgcacctccccgatacnaaaaacatggagagaanttctttaaataacggcacgaaactgagactgtccccccgaggaacctccgtgggcctcgggctgggggagggacccgcagtgcagtcctctgccagtggacctgggtgccattagcagcagcgtttcctttcgtttacctgttcttcgtgagcttcaccacatcgttctgttgttgctgctggctgttttgccaaggttgtctttctttgctcggaggaccagctccgtgatgcagttgaacatctcttccacgttgacattctccttggcgctggtctcgaacaactggatgcccatctgcccggcgaatttgtaggcatcttccgtctccaccaccttccgctcagggtcgtcattcttattacccactaatattcggcacacatcatcacagttctggttgatttcgtgaagccaccgcttgacgttgacaaaggactcggcactggtgacgtcgtaaaccacaatgaccccgtgggtcccccgataatacgtggaggtgatggtgcggaagcgctcctgccccgctgtgtcccagatctgcagcttcaccttctccccgttgatctccacggtccggatcttgaaatccactccgatcgtggtgatgtagctgcctgagaaagtgttgtctgcacaacgcaacagtaaactgctcttgcccacaccgctgtcgccgatgatgagcagcttgaagaggtggtcgtagtcccgggccatggcgggcgggggcggtgcgcgcggccgggccgggtcggtactggcctcgcgatccgcagctcccttcgggctgctccggcagcggcggatccacttcccgacccgct

SEQ ID NO: 440772 - DNA, 1129 bp, Homo Sapiens
  misc_feature (4)..(4): n is a, c, g, or t
  misc_feature (10)..(10): n is a, c, g, or t
  misc_feature (13)..(14): n is a, c, g, or t
  misc_feature (19)..(19): n is a, c, g, or t
  misc_feature (27)..(27): n is a, c, g, or t
  misc_feature (35)..(35): n is a, c, g, or t
  misc_feature (37)..(37): n is a, c, g, or t
  misc_feature (42)..(42): n is a, c, g, or t
  misc_feature (46)..(46): n is a, c, g, or t
  misc_feature (54)..(54): n is a, c, g, or t
  misc_feature (56)..(56): n is a, c, g, or t
  misc_feature (60)..(60): n is a, c, g, or t
  misc_feature (62)..(62): n is a, c, g, or t
  misc_feature (66)..(66): n is a, c, g, or t
  misc_feature (68)..(68): n is a, c, g, or t
  misc_feature (79)..(80): n is a, c, g, or t
  misc_feature (83)..(84): n is a, c, g, or t
  misc_feature (90)..(90): n is a, c, g, or t
  misc_feature (98)..(98): n is a, c, g, or t
  misc_feature (100)..(100): n is a, c, g, or t
  misc_feature (109)..(109): n is a, c, g, or t
  misc_feature (111)..(111): n is a, c, g, or t
  misc_feature (128)..(128): n is a, c, g, or t
  misc_feature (139)..(139): n is a, c, g, or t
  misc_feature (223)..(223): n is a, c, g, or t
  misc_feature (974)..(1007): n is a, c, g, or t
  misc_feature (1123)..(1123): n is a, c, g, or t
gggngggggngtnnggggngttttttncacaggtngnacaanaagnaaaaccanancagnantgtntncgccggtagannatnnacattnttacagantngcaatcatncnctcgcgggcacttctcnccagtccagcnccttggccgggaggaggggcaccagtagggaagggcgggctgtccaacaccttcttggcactcgaggagggcgggggaggaaangccgatggcacctcccgatacaaaaacatggagagaattctttaaataacggcacgaaactgatactgtccccccgaggaacctccgtgggcctcgttctgggggagggaccgcagtgcagtctctgcagtggactgggtgccattagcagcagcgtttctttcgtttactgttcttcgtgagcttcaccacatcgttctgttgttgctgctgctgttttgccaggttgtctttctttgctcggaggaccagctccgtgatgcagttgaacatctcttccacgttgacattctccttggcgctggtctcgaacaactggatgcccatctgcccggcgaatttgtaggcatcttccgtctccaccaccttccgctcagggtcgtcattcttattacccactaatattcggcacacatcatcacagttctggttgatttcgtgaagccaccgcttgacgttgacaaaggactcggcactggtgacgtcgtaaaccacaatgaccccgtgggtcccccgataatacgtggaggtgatggtgcggaagcgctcctgccccgctgtgtcccagatctgcagcttcaccttctccccgttgatctccacggtccggatcttgaaatccactccgatcgtggtgatgtagctgcctgagaaagtgttgtctgcattacgcaacagtaaactgctcttgcccacaccgctgtcgccgatgatgagcagcttgaagaggtggtcgtagtcccgggccatnnnnnnnnnnnnnnnnnnnnnnnnnnnnnnnnnntcggtactggcctcgcgatccgcagctcctccgggctgctccggcagcggcggatccacttcccgaacaaacagccggaactgacagaaacacctccctccgctccccctcctccncctcag

SEQ ID NO: 440773 - DNA, 901 bp, Homo Sapiens
  misc_feature (774)..(811): n is a, c, g, or t
agaaagggcccgaaggcccctttccggattcccaaaaccaggggagaattcttttaataacggccacgaaactgagactgtccccggaaggaacctcccgtgggccctcgggctgggggagggaccgcagtgcagtctctgcagtggactgggtgccattagcagcagcgtttctttcgtttactgttctttcgtgagcttcaaccaacatcgttctgttgttgctgctgctgttttgcccaaggttgtctttctttgctcggaggaccagctccgtgaatgcagttgaaacatctcttcccacgttgacattctccttggcgctggtctcgaacaactggatgcccatctgcccggcgaatttgtaggcatcttccgtctccaccaccttccgctcagggtcgtcattcttattacccactaatattcggcacacatcatcacagttctggttgatttcgtgaagccaccgcttgacgttgacaaaggactcggcactggtgacgtcgtaaaccacaaatgaccccgtgggtcccccgataatacgtggaggtgatggtgcggaagcgctcctgccccgctgtgtcccagatctgcagcttcaccttctccccgttgatctccacggtccggatcttgaaatccactccgatcgtggtgatgtagctgcctgagaaagtgttgtctgcaaaacgcaacagtaaactgctcttgcccacaccgctgtcgccgatgatgagcagcttgaagaggtggtcgtagtcccgggccatnnnnnnnnnnnnnnnnnnnnnnnnnnnnnnnnnnnnnntactggcctcgcgatccgcagctcccttcgggctgctccggcagcggcggatccacttcccgaacaaacagccggaactgacagaaacac

SEQ ID NO: 440774 - DNA, 1636 bp, Homo Sapiens
  misc_feature (89)..(89): n is a, c, g, or t
  misc_feature (1347)..(1347): n is a, c, g, or t
  misc_feature (1634)..(1634): n is a, c, g, or t
aaaagcttgtggagtggggattttggtcccttgccccaggcaaggcctgatttagtcctgtttgtgaaggggaacaggctgtccgctcncccacatatggcgaccaggatcagcgtcccagggaaattgatttcgcctggtgcttgctgggctaccaggaagacgacagggtcggacccaaaggagactgactgcagcttggggacagtgacaggtggatgaacattcgggtctaagcctggagtctccttagtagcaacctccctaccccttcaccgcagacactccactgatacaagtcgagagcacttcttcctagtatgcaccccacaacaccatgtggttctgcatcccataccctctggggcttgggccatccctgtagccagaagcctcagctggcctgtctaccgggaccccgcctcacatcccctgctgccccagcctgtgctgcacccagagccccaggaggactcctcggaggagtgcaggagacgcataaacccccagcccactgtgggtgttcttccaccctttagacaatgccttgtcatccctgtttctaccgagaagccactggcatccgggactctggctctgctattgtcttgcaatggctgccctgagtgacccagggggacaatggcagagaccagagacctggccaggcagtgcctcagtcggccatggagtattctgccggcataggcagaagccgctggcacctccttcacctgaggcccaggagagagcagcttctgccgggcctcaggcacgacgtccactctcgtggccttgaggggcgctgggtgggacgttgccctccacactcagccaggatggctctctcagctgtagggcacgtggtgctggagagcccggaagtcagagcaggcagccctgggctcctggtggctctgctccctgccagctgtgagggcccaggcaagtcacctccctttggtgagcctcactttcctcctggccttgtgatgatggaataaagccctccgccctccaacatgaaggagacgagcctggacactccctgaggacagggcgagtgcccagagcctggctggcccgtgactgggcctcagtgacggccactgagtgaacggaaggactgtggactccatctccctccaggggggcactgggcaacagcaccatgctgtcaacatctgtgcgtggcgtacgcatgccctggacaggcaggaagggctccatcctgatgcctcccccttggtggacctcaggtggtcccagggctgactcctgtgctctgagtccctgaaaaaactcttaaccttcacccctacagctgttctcccagtgcctgttcantcagctccaggagcccttgcccatggccaggcaatgagcaccaatgtgggaggggagggccagcagggctggtcatgtcacctccaatctctgctgccagcagggagggaggccagaggcctctgtccccatgaaataagccttcctggcacatggctcacacccctaaggtcctctgtgggatcccaacccagcctcagcggggagctcgggtctgcatggaggcctaagcaaggtggcggggaggccccgggttctgcagccccccagaactgtgccttgcactnac

SEQ ID NO: 440775 - DNA, 2081 bp, Homo Sapiens
  misc_feature (235)..(297): n is a, c, g, or t
gaagtttgcaggagacccgcgctgcctaggcaaagggacccggcgaccaagacacccccgcaagggcccagggcgcgtccctcccgccaggccccagactccggctctgcgccaccccctcctacgccccggcgcgggcgcagccagtccggcttcctccaggcccccaagtcccggaccgagtgtggggccgcctctccctctcggaaggagccatcgccgctttaagtggaannnnnnnnnnnnnnnnnnnnnnnnnnnnnnnnnnnnnnnnnnnnnnnnnnnnnnnnnnnnnnntccccctggctcccacgtggtccgggcgcctgtgaatcgcgcccaccggagggtctcacagcgaaatacaaaagcagctgggaagcggcggggactcgagttcccagcgccgggcggagcgccggacagagccccgcagcgccccgcggccgcgatggggccgaagcgcccgaagccccggagcccacaaactgccgggcccgcctcgccgccgggacccgggtgcctgggctcggccttgaagcggcggcggcgcaccggcacagccgcgggagcatgggcaggaggatgcggggcgccgccgccaccgcggggctctggctgctggcgctgggctcgctgctggcgctgtggggagggctcctgccgccgcggaccgagctgcccgcctcccggccgcccgaagaccgactcccacggcgcccggcccggagcggcggccccgcgcccgcgcctcgcttccctctgcccccgcccctggcgtgggacgcccgcggcggctccctgaaaactttccgggcgctgctcaccctggcgtgcggcgcggacggcccgccccggcagtcccggagcgagcccaggtggcacgtgtcagccaggcagccccggccggaggagagcgccgcggtgcacgggggcgtcttctggagccgcggcctggaggagcaggtgcccccgtggcttttcggaggcccaggcggcggcgtggctggaggcggctcgcgtgcgccctggatggtggccctgtgagcgcggtgggttgcgggcgcagctccaaccgactggcccgttttgcctgacggcacccgcgcctgcgtgcgctacggcatcaacccggagcagattcagggcgaggccctgtcttactatctggcgcgcctgctgggcctccagcgccacgtgccgccgctggcactggctcgggtggaggctcggggcgcgcagtgggcgcaggtgcaggaggagctgcgcgctgcgcactggaccgagggcagcgtggtgagcctgacacgctggctgcccaacctcacggacgtggtggtgcccgcgccctggcgctcggaggacggccgtctgcgccccctccgggatgccgggggtgagctggccaacctcagccaggcggagctggtggacctagtacaatggaccgacttaatccttttcgactacctgacggccaacttcgaccggctcgtaagcaacctcttcagcctgcagtgggacccgcgcgtcatgcagcgtgccaccagcaacctgcaccgcggtccgggcggggcgctggtctttctggacaatgaggcgggcttggtgcacggctaccgggtagcaggcatgtgggacaagtataacgagccgctgttgcagtcagtgtgcgtgttccgcgagcggaccgcgcggcgcgtcctagagctgcaccgcggacaggacgccgcggcccggctgctgcgcctctaccggcgccacgagcctcgcttccccgagctggccgcccttgcagacccccacgctcagctgctacagcgccgcctcgacttcctcgccaagcacattttgcactgtaaggccaagtacggccgccggtctggggacttagtgtcaccgggaggaaaagagagagatctggggctggggtatggatgatggggggggaaaggcggccctacggcccaatggacttcctcacccagggggcaaacaagcatcccaccatggtggtacaaccccagcgcgaccctgggcggaaaaatcgggtacacagatgggggcgggaaatggtgggg

SEQ ID NO: 440776 - DNA, 949 bp, Homo Sapiens
  misc_feature (899)..(899): n is a, c, g, or t
ttcggttcggaattcccgggatggaggatgcggtgcgccgccgccaccgcggggctctggctgctggcgctgggctcgctgctggcgctgtggggagggctcctgccgccgcggaccgagctgcccgcctcccggccgcccgaagaccgactcccggccggaggagagcgccgcggtgcacgggggcgtcttctggagtcgcggcctggaggagcaggtgcccccgggcttttcggaggcccaggcggcggcgtggctggaggcggctcgcggcgcccggatggtggtcctggagcgcgggggttgcgggcgcagctccaaccgactggtccgttttgccgacggcacccgcgcctgcgtgcgctacggcattaacccggagcagattcagggcgaggccctgtcttactatctggcgcgcctgctgggcctccagcgtcacgtgccgccgctggcacttggctcgggtggaggctcggggcgcgcagtgggctctggtgcttgaggagctgctcgctgcgccctggaccgagggcagcgtggtgagcctgacacgctggctgcccaacctcacggacgtggtggtgcccgcgccctggcgctcggaggacggccgtctgcgccccctccgggatgccgggggtgagctggccaacctcagccaggcggagctggtggacctagtacaatggaccgacttaatccttttcgactacctgacggccaacttcgaccgggctcgtaagccaacctctttcagcctgcagtggggacccgcgccgtcatgcagcgttgcccaccagcaaccctgcacccgcggttccggggcgggggccccgggtccttttctggggacaaaggagggccggggccttgggtggcactggctttcccgcggntaacccaagggcatggtgggggtcaccaaagttcttaacccgcgggtccg

SEQ ID NO: 440777 - DNA, 1475 bp, Homo Sapiens
gttctacattggtcaccaccagagcctgatttgatgagatgggatcttcaatgtggaacaatggtaatctacaatatgtcccacaacccaaaaataaggctagcatgtccccccgccaaagtagatccttttatgtgcaagtaatcaaccatctgccagaagtcttacttgaatcataacgctccacactgttcatgtgggcagttccatttccatcaatggcatatatcattccatccaataacgctgcagcaaaacaacttcttgttgtcgtcattggtcccacaggttgccattttcttattttggcaatgtacttctctacagattgtaaataagattgtccatcataaccacctaaggcataaagttctcctgcaagtactactactccaagagtacttcggcttatattcattctctctagagaagtccaagtatttgtatcaggattccagcattccactgaattttcatgttttctgatagtgacgccaggacgcacattagttgcaataccacctataacatatactttttgttctaaaccgcatattccaaattcatagcgaggaatgtttaggggtgccaaaccaatccaagagtcattctgaggaaagtacatctccacactatccaaacaggcaaagagtccagatttccctcctactgcacaaagtactttgggagcacagcgaggtcgtgtcatcaagactgtctgatgagagagtctatgttcaggcataaagtggtactttagggcttcattcaaaagatgtttacaagtgcgatcatcacgaataagatgatttgcttcatatagtctagtgagaaacttaacactcaacaatggtaatcgtacactgtttagtaactgtgctaagtatttctggcgttcttgtacatcatacttgatccaagactctaatgcataaaaaacagtctcttcggtagctacattcaaacagtcattggaaacaatttcatccaagtcagcatgtgtaagctcaaaaaactcttcagtctggcaaacagcttcaaaattctggcatatgtatttagtggctgccaaataaaggtcacggcaaccatatgtttctgcaaaacgagaaattccaatacaattaccaggatcaagttggctttcaagaaatgcacaacattctttcaggacaagttttatctggagtaggtttgctgctggcaggagagattcaactgtgtcctgagaaataaaaacagtccctgtataggcatactccacaatggcctggagagcagtttcatcaatgcattgaaactcaacctcactgttctctttttcagaaaggtttccagtgaacatagctttgaaatacgggtgacgctggcaagtaccgctttgtgagcatgaattttaacatcacctactcgaagaatgatgtcacagagttcgtgatgttggcgaagaagattcaagccctgcagaagttgtt

SEQ ID NO: 440778 - DNA, 984 bp, Homo Sapiens
accagtgaggaacccgattttcatttagtcccctggggagcagattccgttttgccttgggggtttgggcttcaattccggagccttttccggggagagaatcctctagccgctgagttagcggctaatcacccccccaaaagcaacagagacaaaaggcaaggaaaggggttgccacagagggtggaggcaggacaggtccccggtggctgagccgcttccccccacttcgtgcctaaccacgcacaagtggatttggtcctggaagcacacaccccctccggaggtgccatgggctccatctgaaggtcagagagggaacagtggccaaggccatctggaaagtgccgcggcaagggttcaaaccctgtcggcctgattgcaaaggccctgtcgcccagcgtgggacccagcaaccggcgctgtccagagaccccggtccttggcccctgcacaggcttggcacggaacacgtgctggatacgcagtcagcctccttccttgtcctccttccgccatcatgtgaccttggtcccaccgttctctgtttccaggcctcagtttccccatctgcagagagagggggttgtcctaggggtgccctggctcccctggaagcctccagtaccttagatttccactggggaagccaggaagggcaggtagggccccctggggctggagcaaatttggggttcagggctgttttctggggtgaaagcttggagcccgaggagagccccgcggacggccccaaattccccaagccagcagccccgcttaaccttcccccctctgccacccagagccccgctggaccagactcgggcccccaccccggaatcgcccgacacccctgactctggcggggggaggcccccaccgggccggccggagcccccagcgccttgaaaagcctctggcctccccctccccgccaacgcccgacccgcgtcggcgcagggaacgagggggagcgccggc

SEQ ID NO: 440779 - DNA, 1071 bp, Homo Sapiens
  misc_feature (10)..(11): n is a, c, g, or t
  misc_feature (15)..(15): n is a, c, g, or t
  misc_feature (29)..(29): n is a, c, g, or t
  misc_feature (38)..(38): n is a, c, g, or t
  misc_feature (40)..(41): n is a, c, g, or t
  misc_feature (44)..(44): n is a, c, g, or t
  misc_feature (47)..(47): n is a, c, g, or t
  misc_feature (49)..(49): n is a, c, g, or t
  misc_feature (55)..(55): n is a, c, g, or t
  misc_feature (58)..(58): n is a, c, g, or t
  misc_feature (63)..(64): n is a, c, g, or t
  misc_feature (71)..(71): n is a, c, g, or t
  misc_feature (89)..(89): n is a, c, g, or t
  misc_feature (119)..(119): n is a, c, g, or t
  misc_feature (176)..(176): n is a, c, g, or t
  misc_feature (182)..(182): n is a, c, g, or t
accttttctnncgcncccctttctctgcnctaaataantnnaancananctggtnganagctnntctcatntgcgaatcatttgatctntcttcaggaagcgggggaggcccaggaatngcgcttctcagccttcatgctctgcagctcctcaaagccgcctagcgtgcacaatantgtctnccagagcagcaagagaactttcttcatgggaaagtgagggcgtgaccactgcaaaatttggtcaccatcccaaacagcatgatggcaaatggctcattgttgtacagcggggagcccagctcggctctgaaggtctgccgcatggtcctccactcagctttgtcaccctcacactcctgatgaacggtctccactatcaggtacatgatgttgagcaggaccctgaggtctgtgctgtcagccagggagatggcaggcttcctcacagcactgctgcaggcggcactgttgtctatttccatgttcagaagctccaccaaagcattgaacgtgcccacctccaggaggagaaagatgttgtagcgcatccaggactgcacctctgcctccgagctgcactccccaaacgtgccttgagcaacatagagaattgctcgagccaccttgagtctcttctccctggcagtgacttccaagccatccaggagcctcatggcatgggtccggtgctggttggtatccagctcagtccacttcttgtctgtcacatggatccggaagtcctcctcaaagcattttcgattcatcaggaattctggcccttccgtgtagctgtaaagctccgagagctctgcagcccacttgtctgtgtcagcatactcaaactccaggtctggtgactccgaatagccctctgagtctttgcgctggttgcggttgaactcgcgggctttgcccccaggcaggaggcccgcggcggcccgcggtgccccgggtggtggctgtgcggctgccggcggcggaggtggcgggggctggggctgtttgttgttcacgatcagtgggcccggaccgccgactgccggctccatcttggctgctccacacc

SEQ ID NO: 440780 - DNA, 1079 bp, Homo Sapiens
  misc_feature (208)..(208): n is a, c, g, or t
aatttttcccccgggtacttcccccggggcgaaagattccgcgccatttggccgggtttaatatttggaggctccctgcccgctctgtgccggggttcaagctcccacggtcccccaaaaaagggaactcccttcatcaggccagttccggccttccaggtcctcaaaagtttctctcggttcccggcttagcccaggtactctcggncgagatttcttccgcagctcaggggaccatggccttccggtcttcctcggccatcttgaggcgcttctgagcctcttcataagccttcttgtctgaccgttccaggacatttcgagtccgatccttgtcccgctgtcgaacccgctcagcaaaggcatcacgctcctccaggtcctgaaggcgttcacgctctgtccgttcccactcatcttccgactctggcttctctgtctgctgtttactcccccctgttttcttcttccctttctcagaagcctcttcctcctcttcttcctcacgcttcttcctgaggtgtttccgctttttacgtttcttctggaggctgcttccagccctactcacagtctcctcactgctctcttcactgtcttccagtaacctataagatcggttcttctccagcagggcccgggcctctcgctctgctgcccgagctggcttttctaccactgcctttcgtggtaccttgttccagagtctcagggcgaagtcccgggccggcccactgagatccaaggtatcagtgtctcgtaggcgctgcacgaactcctcggcagaggtgcagcgctgtgcggtaccgatcagaaactgggcgacgtgccgctcgctcagccccaacaccgagtgcagctcgtcctgaacccagcgctccagacccgccggcgtcgccatggcgactcacgctccctgctcccggccctgaagcgtcgggcagccgcgctcactgctgggccggtcagaggcctggagccctcggctggagcctcagcttcgcaagtcagctaccttgggacctctaggatcttccgacatcccaaagctgtcttcccgggaattccggaccggtcca

SEQ ID NO: 440781 - DNA, 515 bp, Homo Sapiens
  misc_feature (54)..(54): n is a, c, g, or t
  misc_feature (101)..(101): n is a, c, g, or t
gccgggagggccaggcgcgcacgctgggacctgcggcgcccacagtggactcanacttgtcctccgaagcgcggcccgtgacctccttcctgagcttgtcncaggtgtccgggccgcagctgcccggggagggcgaagaggaggaggaaggggaggacgatggggccccgggcgacgaggccgcgtcggaggacagcgaggaggccgcgggcccggcgctcggacgctggcgtgaggacgccatcgactggcagcgcacgttcagcgtgggcgccgtggacttcgagctgctgcgctcggactggaacgacctgcgatgcaacgtttcggggaacctgcagctgccggaggcggaggccgtggacgtgaccgctcagtacatggagcggctgaacgcgcgccacggcgggcgcttcgcgcttctgcgcatcgtgaacgtggagaagcgccgggactcggcgcgagggagtcgcttcctgctggagctggagctgcaggagcgcgggggcggccgc

SEQ ID NO: 440782 - DNA, 1143 bp, Homo Sapiens
  misc_feature (920)..(983): n is a, c, g, or t
  misc_feature (1058)..(1094): n is a, c, g, or t
ttttttctcttaaacaggtttattttagcagctcagtatattacattctacatatttgtcttttaatgtgtttatatttctgcctgttctgcatagatggcatattcattaacttttgtagctgactttttcatttgctatttgctgctacctggcctgaagagtcaggaggataaaaaaaattcatttggtggaaacatggagcagcacttcagaagaactttactttgatgcagacttccgtgttaggttttcttcctcttctttttcaaatcctgaacagacgacagatcttcccttgggatactgagcacaacacttacgcagttcttggatgacagcctgacactttgattccatgtagctgttggcttgtaaacatttctgtatctcacaggcttgcttctggcacggatccttctgcggcatatccagaaaaatgaatataatgtttcttgggctaattaatccgccttgagaacagctaggctaaaacttccaggtctcccaccctgggccactcaagccaggatcgcgacgtgagcccggggtgagccgaggggcatcccgggccgaggtcactcgaaccgaagttatgaggcgcgggccggcaaccggaagtggtccagggagagttgtacgagattcgggggctgtgacttggaaataaaacaaaataaaataaaaccttaactgttttgggactgactttcaaaagagcgtccccctggctcaagaggccggcgttcgcggagatgtcgtcttaaagggctgtcccccaagcgtgtaggccgcgcacgggtctccttagcgggcgggcaaaatgggcgccggtactcgggaggcgcctgcccaggcgcccgggcgccgctcacagagtacgtccgcctgcggccccagagcgccgcctccctgccgcnnnnnnnnnnnnnnnnnnnnnnnnnnnnnnnnnnnnnnnnnnnnnnnnnnnnnnnnnnnnnnnngccccaaaccgcgcgggcgtttcccaggtgctgcccgctctcgacgaattcgagctcggccgatttggcctgatnnnnnnnnnnnnnnnnnnnnnnnnnnnnnnnnnnnnncggccgccaccgcgtagagctccattcgccctatagtagtctatcatcg

SEQ ID NO: 440783 - DNA, 807 bp, Homo Sapiens
agaggtagtaggtgtccacatctcgaggcagcactctggtaaagcgggctgggatgatggacaggccaatagcatgcagatctggctggctgcagatgttatttcgatagaagccatttgctagcaggcagagagggtgaaccttgtgtgtgtcctcatggacccctttattgaaacgtttcatcgccctccgaagatatgtctcaaactccagcttttatcttttcacttctttctcttgtcttcgcctgctctggcgtttcaatctctatctccactggcttcacaggcagaagagatcgagagaaggctgtactttctctcacgtcacccagcacaggctcactaagttcttcaacctcttcccaatcattttcactttcttcctcttcttcattgctgtcttcattcatggtagcccctctcttcagatggtgtgccttcttgaggtcacttggaaagtccctgaggtcatccccatcgctgagggcttcatcctttataaccttgaggttttcagatttaacagtcaccttggccactttcttttttgctggaccatctgctgaacccccaggatgactgcagcctcttttcctctttccttgtgaaactttggagagaaggctcttctttgggggtttctcatcttcaaaggcatcctcctcctcctcctcacgccgggccttgctcttggccttggatttctggctgcgcagttcgcgtccccgcggctccccgccggccgcgcgtttccgagccatgttgcttgtctgggcaaattccacttggcgagtgacatcccgg

SEQ ID NO: 440784 - DNA, 889 bp, Homo Sapiens
  misc_feature (523)..(523): n is a, c, g, or t
  misc_feature (546)..(546): n is a, c, g, or t
  misc_feature (555)..(555): n is a, c, g, or t
  misc_feature (563)..(563): n is a, c, g, or t
  misc_feature (576)..(576): n is a, c, g, or t
  misc_feature (611)..(611): n is a, c, g, or t
  misc_feature (652)..(652): n is a, c, g, or t
  misc_feature (664)..(664): n is a, c, g, or t
  misc_feature (668)..(668): n is a, c, g, or t
  misc_feature (670)..(671): n is a, c, g, or t
  misc_feature (673)..(674): n is a, c, g, or t
  misc_feature (681)..(681): n is a, c, g, or t
  misc_feature (699)..(699): n is a, c, g, or t
  misc_feature (703)..(703): n is a, c, g, or t
  misc_feature (709)..(709): n is a, c, g, or t
  misc_feature (730)..(730): n is a, c, g, or t
  misc_feature (734)..(734): n is a, c, g, or t
  misc_feature (743)..(743): n is a, c, g, or t
  misc_feature (747)..(747): n is a, c, g, or t
  misc_feature (756)..(756): n is a, c, g, or t
  misc_feature (778)..(778): n is a, c, g, or t
  misc_feature (781)..(781): n is a, c, g, or t
  misc_feature (797)..(797): n is a, c, g, or t
  misc_feature (804)..(804): n is a, c, g, or t
  misc_feature (806)..(806): n is a, c, g, or t
  misc_feature (811)..(811): n is a, c, g, or t
  misc_feature (821)..(822): n is a, c, g, or t
  misc_feature (824)..(824): n is a, c, g, or t
  misc_feature (842)..(842): n is a, c, g, or t
  misc_feature (861)..(861): n is a, c, g, or t
  misc_feature (866)..(866): n is a, c, g, or t
  misc_feature (872)..(873): n is a, c, g, or t
  misc_feature (875)..(875): n is a, c, g, or t
  misc_feature (883)..(884): n is a, c, g, or t
tgatgtttagtttttctttattcaacaacagaaatggggatgcacatacaattacctttagagacatgtcatgctacaatgttttgtaagctaattttcaacaagatagaaacttaagttcttaatataccctgaaactattaaggagttcaagcttattaacacgcggtgaaactacattatccatgttgatatgttaggagataatgaaatgatatactgttaatttgtaaatctgtatatcagtaagtggcacatttccacaaagtaagttgtaaattcacatcctctaaaagtaaatgccttgaggttcggaaaacctgaaaatgcatagcttgatgtaattcaacagaatttaaaatttttgatattgtaataatttagataaaaaggatttcataaacttaggaaatctttttcaaacctaaatttcttttgtcagtttataaagtgcatgttgttaacatttaaaatgagtttgcggtaaatgttgttacttcccaagaagaacagaatgggaggncttctttaggcccaaccatgatnatttataantctctatnttgtctgaaccanttttttttccggttacatcagggtaagtggagagnaaatgcggtagaagtttgatgccgcactgttaactatttangtggcagcggtncctntnncnncccaacnttcgcataatacttaganaaantaaaanatacagggatttttagtatcntttntttttttanagcncaaatgccncacaactttgacttacaaggtngtnctatatagaataattnaaatgtnantaaanctgtgttagnncnatgagcaataagtggggnttcagggtaaaaatatgcntttanataaannangttgaggnnattat

SEQ ID NO: 440785 - DNA, 1092 bp, Homo Sapiens
aatgttttattttatcactcaattttactagtaattaaagtatagcaaatgcctactgtgtgcaaaatatgaggccaggcacttgtaagaataaaagatgaaaaaagtagactcacagtctactgggtgcggccactatgcagggccagggaaggaaatttaattcaatctagaaaagtcccttcttagaggagataggacttgggctagattccgagggaagggcagaattccaaaaggcagatggggtgaatggcatttcaggaggagggaacaatttatcaaaggcctggagactcagaagcacacttttaggggatgacaacagcctgtgtggctaaaacataggacaagtgggagatggggaggacggataatcagagaaaaggctggattgcccttttttaaaaaaaagaaattgtaatttgagttttctagaaaatcaacctgttaatcagtcattaggtagccagacactggggtgatggagaagtcctgaaggaaatcgtgaactctttgggaaaataatcttcaatgcaggaaactgttgacattaatctcattacagaatgcagggctctgaatcactgggtggtcccaggaagagaaagggaaagtgagttcaaactgaagagccggactctaatcctccagttggtgtttcccaggcaagctgggtaaacaatgtggggaaaatgacttccatattctcgttcacaacagtccagactgaagcggtaactgagcctgaaagtatgggaaggaacgatggtgcttccagtcaccctccaaagcacacatgtacacagcatagaactcacagtccccagaacggaactcactgtccttagagactcaccacaagaaaagcaaagccaattatttgcagaaaaattgattgtgaccaggacccaagcgataaaagtcccactgtgagaagcatctttacaggtgtgggtttcaccggggtttccttcagcccaacccagcaaaagccactgaagttcctttccacgttctgaagactcttactatgcaggacgatgagagcttgctggatctttgcttcttaacactgtagtctaatttttc

SEQ ID NO: 440786 - DNA, 898 bp, Homo Sapiens
  misc_feature (721)..(721): n is a, c, g, or t
gaatctattgctgtctggtggctttttgatgatggaggtttgaccttattgataccttaccttctgacgaccaagaaaaaatggaaagactgtaagatcagagtattcattggtggaaagataaacagaatagaccatgaccggagagcgatggctactttgcttagcaagttccggatagacttttctgatatcatggttctaggagatatcaataccaaaccaaagaaagaaaatattatagcttttgaggaaatcattgagccatacagacttcatgaagatgataaagagcaagatattgcagataaaatgaaagaagatgaaccatggcgaataacagataatgagcttgaactttataagaccaagacataccggcagatcaggttaaatgagttattaaaggaacattcaagcacagctaatattattgtcatgagtctcccagttgcacgaaaaggtgctgtgtctagtgctctctacatggcatggttagaagctctatctaaggacctaccaccaatcctcctagttcgtgggaatcatcagagtgtccttaccttctattcataaatgttctatacagtggacagccctccagaatggtacttcagtgcctagtgtagtaactgaaatcttcaatgacacattaacatcacaatggcgaatggtgacttttctttcacgatttcattaatttgaaagcacacaggaaagntgctccattgataacgtgtatggagaacttcgttttagtcaattccatatctcaatcttaatggtgattcttctttgttgaactgaagtttgtgagagtagttttcctttgctactttgatagacataaaagcgtgttaacctttttggttgatgaaagaagtacaaaaagccttta

SEQ ID NO: 440787 - DNA, 1793 bp, Homo Sapiens
  misc_feature (199)..(199): n is a, c, g, or t
  misc_feature (340)..(340): n is a, c, g, or t
gaacggcactcctagctgggggggctatcccagcatccatgccgcctaccaacttcccaacatgatgaagttgtccctgggctcgtcggggaagagcacgcccctgaaacccatgtttggcaacagtgagattgtctccccgacgaaaaaccagaccctggtctctccacccagcagccagacgtcccccatgcccaanacaaactttcatgccatggaggagctggtgaaaaaggtcactgagaaagttgccaaagtggaggagaagatgaaggagccggatgggaagctttccccgcccaagcgggccgctccctccccatgtagcagcgaagtcggnggaacccatcaagatggaggcatccagcgatgggggcttccgcagccaggagaacagccccagccccccgcgggatgggtgcaaggatgggagccccctcgctgagccggtggagaatggcaaggagctggtgaagcccctagccagcagtttgagtggcagcacggccatcatcaccgaccacccgcctgaacagccttttgttaaccctttgagcgccctgcagtcagtcatgaacatttcacctggggcaaggccgccaagccctccctgcctgccctgggaccccatgagcatgctttttcaagattgagcaacagcctggcggagaaggccgctgtggccaccccgccgcccctgcagtccaagaaggcagaccacctcgaccgctatttctaccacgtcaacaacgaccagcccatagacttgacaaaagggaagagtgacaaaggctgctccttgggttcagtgcttctgtcacccacgtccacagccccggcaacctcctcatcaccggtgacaacggcaaagacatctgccgtcgtatcattcatgtcaaactcgccgctacgcgagaatgccttgtcagatatatccgatatgctgaagaacttgacagagagccacacgtcaaaatcctccactccttccagcatctccgagaagtctgacattgacggggccactctggaggaggctgaggagtcgacgcccgcccagaagaggaagggcccgccagtcaaactggaaccccccagcaccctcctgatccttcaggcccagtttgccgccagcctccggcagacctcagaagggaagtacatcatgtcagacctgagcccccaggagcggatgcatatctccaggttcaccgggctgtccatgaccaccatcagccactggctggccaacgtgaaataccagcttcgaaggacaggtggaacaaagttcctcaaaaacttggacactggccaccccgtcttcttttgtaacgattgtgcgtcccaaatcaagactccttccacgtacatcagtcacctagagtcacacttaggcttccggctacgggacttatccaaactgtccaccgaacagattaacagtcagatagcacaaaccaagtcaccgtcagaaaaaatggtgacgttctcccccgaggaagacctgggggactcctatcagtgcaaactttgcaatcggaccctttgccagcaagcacgcctgttaaacttcacctttacaaaacacacgggaaaacttccggagaaccacctttctggatgtgttctgagttagagaagcaagtaccattttgctttttgattaaaaaggacctgcagctttgcttttgaaggagaactggtggaaagggaccctttcagagcccccccttggacttggtgtgttctttgggcaaaagttgtctaatttcttaaactgccagaaggaatat

SEQ ID NO: 440788 - DNA, 1515 bp, Homo Sapiens
  misc_feature (1422)..(1447): n is a, c, g, or t
ttatttcatgcaatttttgctggaagtaaactttaccctttagtgtttaggtaccattctcttgttctgtaaatctattcagatgggattgaaactgaattagaagagtcaccacagctcagagattgacagtgactggtgagctttacatgtcctcatttttgagagagggtaacagcttccaattaattacatctccttgggcacaaagaattgcttttgtggtgggacagaagttcaaaggtgtagaaggctgtgtgcagatgctgagtggctaacagggtctgtgccagttaggaagctcgtctctcagttccacacccgctctttttagctctgcttttgtgataccagcgacagaactctgcaaacatctctgcttcgcagctggcatcctgttggatttttccagtagagggaagcttccatgctgcaggaagaaggggcgtgctccttcccgttcctgtcagcactgctgcagcagtttgctctcacagctgcatgtgatcccagctgccatttctgacctgctcagaaccagcttcatgatgggctcaaagacccaggaccaggtgagcaacacccatccttagagcacttctggaagttgctacttccttaattcttgtgtgggttttttgcttttttggttactgtgtcagtaattctttttatcatattgttgaaataactggaatggtttctgtctcctatttggaccatgactgatagacagagagaggagatttctatctacagaaactaagtctcaagactgtattgttttaaatcctttgtcaacaataactgaggctcagcaaagcctctttctccctcagtgtttcatgtgggcaccaaccgtcggcatgccccatgtgtccctctttaggctaagatacttaatataactaaaacattccaagcttaggctgagtgatttcttacagtaaaatcaaattctttaaactttcttctattccaatattccttatcccaagttaaggagcgttaccaactatattttgataataaaaatgtaaactgagttgtggcaatgattaatatcaattagagaatattttcacaataaatttgtgtcattgagattgacattgcctggactattccacatattttgttttggaatgcagttaagattgggacttatacactgtagggtagaatgagtaacagtacccccggttcccttgtattgacaagtccacgacctggttcttgctgatattttcaatttattactgcagtagataattgctctgaaagtgcaacactaaatcactcttgtcatagcctctgctccgtttccactggcaaatacttggaaattcattcttcgagcattgtggaccacaagcttctctctgggtggaaaattattgccactgccagtatcatagggannnnnnnnnnnnnnnnnnnnnnnnnngaacagaaggattcaaaaagcagacactggagaggagtaggggccaatttcaaacagaaaacccaata

SEQ ID NO: 440789 - DNA, 1249 bp, Homo Sapiens
  misc_feature (441)..(480): n is a, c, g, or t
  misc_feature (1041)..(1066): n is a, c, g, or t
acactcttcctacttttcattcctgaacaccctctaattaccactgttttggggatgctttttttctgaaagaacggggagtacaggggccaaaagggaggtgcttctattacagggcaagttagatcagataagaagatctagcagtgatttaaactccaggaatatgaagagtgcattctggtgtccagacagttgtgaagggctcggcaaatataagagcaccattggctacatggagagcaaaggctgtctttgaagaccccagggaggtcttcacttttgcctaaattcagatttgccgtgaaaattccaaagagagcagatatttggatttgccctcctttgggcatctacctgactgttgtgtgtgtgggaaagtcagtgtgtatgtgtagagtgtgcttaggagtgagtgagtggtcaggcctcctggctagnnnnnnnnnnnnnnnnnnnnnnnnnnnnnnnnnnnnnnnncagagttttgaatcttacgttttctagagctgctcatgttttcccttcctttttgtcgttgtagtatttgacagttgtcttttccatcaaaaacatactggccctaggctggttagagcaaggggttatgcctgttaggcagcatcttacgcccaggtgttctcccagatattctgcctaacaggtttaagtgggagattaaatagtcagtttatctaaaccctctatttttccaaactagcttgagaggtcttttcatctatttttactccatgggcctctgatatgctgagatgtggcacggttatgattatggtatcaccgttacagaggcaaagggataaaggtctaccagggccaacgtaaccagaatgtgaggagagtgaagagtcggtctccgctttgcacagtaccagaatgtgaggttgccactggagagtggagagtcggtctccactttgcacagttggagctgttctcctctaactcctttgctgggttttctgtttgaaattggcccctactcctctccagtgtctgctttttgaatccttctgttcnnnnnnnnnnnnnnnnnnnnnnnnnntccctatgatactggcagtggcaataattttccacccagagagaagcttgtggtccacaatgctcgaagaatgaatttccaagtatttgccagtggaaacggagcagaggctatgacaagagtgatttagtgttgcactttcagagcaattatctactgcagtaataaattgaaaatatcagc

SEQ ID NO: 440790 - DNA, 843 bp, Homo Sapiens
  misc_feature (210)..(219): n is a, c, g, or t
ctgtgacaggtgcctcaccactcctccctcaaaactcaccttccctcatgggctttgtgctcccaaagctccccttggggtgcacgtagcggctgaggcacaccctgagctcgaaccagggacaccagggtccccgggtcccagtgcagggactgatgggaagacactttcgtccgtggggaatcaggccgcgcttctctgcggcgaagnnnnnnnnnnctctgccccaggtgcctcgccttccccttatgggctttctgcccaccttggggtaacactagtggcccgaggcgtaccctgggatcaaaccagggacgccagggacctcagtgccaagcgaacgggctaaggagaagacaatttcctccgtgagggacccaggcactgcttctcggcggcgcgtttctttactttctctgcctcaggtgcctcaccttccgctcatggaccatttgttcgctttctggtaaccgcaagcggtcccgaagcgcaccctgggctcgaaccagggtcgtcactgtccactctgcccagggtacagcataatgggaaggcactttcatccatgggggacccaggccccacttgtctgaggcgaggtctcctgtttttttcctgcccctggtgcctcacctctattcccacaaacttcaaattcaactcatgggccttctgtccgagttggggtacccctagtggcccgacgcgcaccctgggcgccaacgacggatgccagggtccctggggaccagcgcaagggctgatgggaagacattttcgtcagtagatgacccagaaaccgcttggcgatgctttttttctctgccccaggtgcctcaactt

SEQ ID NO: 440791 - DNA, 770 bp, Homo Sapiens
ttttgcctggcaataaatattttaatttgtttcgtttttatgatgacaaataattttcaagtttatttccttgtttaaatacaagagctaaaccacaaacaggtataatcaagacattgtgtctcacatttacactcccatcggatcctcttccaatttgctgaccactgaccaggctagcggggggtgggagggaagactttcttaggtagcaccgtcgtgaggcccgaggtggggttgggggggaatcaaagacgaggacagcctctcatacctgtctccattcacatttacctgggaccagggtgggcaggagacaccaggtcatggctcctgagccccggccccctggactgaagggacagtgtgtgagaatcagttctgtgaagggcgggaggaagcagtcacctattcctcctgccttcacagttaaggtgaaaaccttagccctatccttgattcctgggggctgccgggccctgtgtgctcccctgcacacctgggtgcctttctgaggctggcagcagcggccggggtcaggggtcctgggctcctaggctcacacctcagctcacagttgcgtccttgcaggaggacactgggtgtctgacaaacacaaggcctcgacagcaggtctggaactttcaaccccagcaggatgagggggaatggcggttgtatgtcaggtaagtaatttctggtcccactacaaaactttatttttgattagagtaccattctgaatctcttctacaaaagctgaaaagagc

SEQ ID NO: 440792 - DNA, 1536 bp, Homo Sapiens
  misc_feature (54)..(54): n is a, c, g, or t
  misc_feature (57)..(57): n is a, c, g, or t
  misc_feature (70)..(70): n is a, c, g, or t
  misc_feature (162)..(609): n is a, c, g, or t
  misc_feature (774)..(791): n is a, c, g, or t
  misc_feature (960)..(974): n is a, c, g, or t
  misc_feature (1174)..(1187): n is a, c, g, or t
  misc_feature (1199)..(1334): n is a, c, g, or t
  misc_feature (1337)..(1351): n is a, c, g, or t
ccataagccgcggtttgtgttacgccagtttaccgtaaattgcaaggccctagngcngtccttcgcttcntccttccctctgccaagttcgccggcttccccgtcagctctaatcggggcttcccttagggttcgatttagtctttcggcacctcgacccannnnnnnnnnnnnnnnnnnnnnnnnnnnnnnnnnnnnnnnnnnnnnnnnnnnnnnnnnnnnnnnnnnnnnnnnnnnnnnnnnnnnnnnnnnnnnnnnnnnnnnnnnnnnnnnnnnnnnnnnnnnnnnnnnnnnnnnnnnnnnnnnnnnnnnnnnnnnnnnnnnnnnnnnnnnnnnnnnnnnnnnnnnnnnnnnnnnnnnnnnnnnnnnnnnnnnnnnnnnnnnnnnnnnnnnnnnnnnnnnnnnnnnnnnnnnnnnnnnnnnnnnnnnnnnnnnnnnnnnnnnnnnnnnnnnnnnnnnnnnnnnnnnnnnnnnnnnnnnnnnnnnnnnnnnnnnnnnnnnnnnnnnnnnnnnnnnnnnnnnnnnnnnnnnnnnnnnnnnnnnnnnnnnnnnnnnnnnnnnnnnnnnnnnnnnnnnnnnnnnnnnnnnnnnnnnnnnnnnnnnnnnnnnacaagtctttaattaagagactcaacaaaaatatatagttgggcattttacataatgcatacattcttaatatctgcaggtaagataaacaacagaaggcaaaagcagatatgctgtattgcttctttggcaactcaccaatatcatcccctgcagaagcagagnnnnnnnnnnnnnnnnnnaatccatggtcttaaaataattgtcccttagtataaacaaaatatttagcaataatacagtagacggattcttcaaattcacaacaatttataatactttataccacaagggtaaactagtaagctgctttctaaaattaaggcagcagcagtgtttagagggggagtnnnnnnnnnnnnnnngacatcctttttctagttatatcctggctctgccttctttgttgttgtttttaaataacgtcacattcaagctctacgtcttggatgacattcctaaggataataaaatccttttccctgtacataaactgtgtttcacttccagatcagtctgacactctccaacaaaaccaaatacatttcgtatgaggcaacacaannnnnnnnnnnnnngagatggagtcnnnnnnnnnnnnnnnnnnnnnnnnnnnnnnnnnnnnnnnnnnnnnnnnnnnnnnnnnnnnnnnnnnnnnnnnnnnnnnnnnnnnnnnnnnnnnnnnnnnnnnnnnnnnnnnnnnnnnnnnnnnnnnnnnnnnnnnnaannnnnnnnnnnnnnngaatttttaggagaaacagggtttcataatggttggccaggcttgtctaaaactgctgaccttaggggaatttgcccggcctccacccaatttaatttttggtagggcaagttttaaccattttactcaaggtgccccaaaattaaaaatttcctttggccctttaagagaaaggtatacatttg

SEQ ID NO: 440793 - DNA, 902 bp, Homo Sapiens
  misc_feature (166)..(226): n is a, c, g, or t
cacaaagttggtttatttgaaagatataagtgattctagatacaaactagagaacatttgtaagttgtcaaagaagcctacaggtggtggggtagaggtggggagttctcagcactatcattttaaagctatgctctttagtattctaaattgctgtgatgttctnnnnnnnnnnnnnnnnnnnnnnnnnnnnnnnnnnnnnnnnnnnnnnnnnnnnnnnnnnnnngaggtaataaaatagtatctctatgagcaaatttggtttatttccatatacagtactatgaaataagaactatccgctatttctcacctttcctgtgtactatttatgattgttttcattgtgataataggtagcagaatgatgagcatccctatcacttactttagaacattgttttataagagatgaagtgaaacaaaaaacttgtttgggtaggttttgtgattgtgtgcttatctcaggctcaaaactttacataattaagcccagctggttcaaagactacactttaaattcatcagaaagatgaaattgtctctcgaaccaaagatcaatttgaatccttttctcaactatacccaatttataccttttctcatactcccatactgttcattcacttgttccttcattttttcccttgcccattcatccaccaataagcatcatacaaagtcagagaagtcatttcctcctttccaggagaggcctgcaaaatttcaagactactgggttgaagagggattatgcatagctgcttctcaagaaaaacatagtggggatctcagtcagagggatgcctgaatgtttagcaccaaagctgaccctgagggccaacgggattgggaactttgggaaagggggcttttgggtcaagggccttaccggtgaaaca

SEQ ID NO: 440794 - DNA, 1049 bp, Homo Sapiens
  misc_feature (15)..(15): n is a, c, g, or t
  misc_feature (17)..(18): n is a, c, g, or t
  misc_feature (27)..(27): n is a, c, g, or t
  misc_feature (32)..(32): n is a, c, g, or t
  misc_feature (59)..(59): n is a, c, g, or t
  misc_feature (136)..(257): n is a, c, g, or t
  misc_feature (852)..(852): n is a, c, g, or t
  misc_feature (874)..(874): n is a, c, g, or t
  misc_feature (930)..(930): n is a, c, g, or t
  misc_feature (933)..(933): n is a, c, g, or t
  misc_feature (936)..(936): n is a, c, g, or t
  misc_feature (966)..(966): n is a, c, g, or t
  misc_feature (968)..(968): n is a, c, g, or t
  misc_feature (979)..(979): n is a, c, g, or t
  misc_feature (983)..(983): n is a, c, g, or t
  misc_feature (985)..(985): n is a, c, g, or t
  misc_feature (997)..(997): n is a, c, g, or t
  misc_feature (999)..(999): n is a, c, g, or t
  misc_feature (1006)..(1006): n is a, c, g, or t
  misc_feature (1015)..(1015): n is a, c, g, or t
  misc_feature (1020)..(1020): n is a, c, g, or t
  misc_feature (1022)..(1022): n is a, c, g, or t
  misc_feature (1027)..(1027): n is a, c, g, or t
  misc_feature (1034)..(1035): n is a, c, g, or t
  misc_feature (1039)..(1039): n is a, c, g, or t
aaggtgcggtctggngnncagggtggngtgcngtggcagggtcgtagctcacggcagcntcaacctccgtgggcttaagtgatcctcccacctcagcctcctgagtagatgggtccacagatgcatgccaccacgnnnnnnnnnnnnnnnnnnnnnnnnnnnnnnnnnnnnnnnnnnnnnnnnnnnnnnnnnnnnnnnnnnnnnnnnnnnnnnnnnnnnnnnnnnnnnnnnnnnnnnnnnnnnnnnnnnnnnnnnnnatgagccaccaagccccgaccctcacttctcttttaaggcccagcaagaaggccggcaaacctttccagaaccccaccctatccctcttcctcctttgaaattccacactacttccctcccctccagcgttggggagaggcggcagatttatcccctcctcccggattggtgagcttgtctgacctttaagatccacgcccatttaccctgaccatctattggccttatcacctattggcttatcagtcacttctaagacccaccttctcgttgctttcgtggttcttgcgctccgctgattcgccactgcgcaagtcccccgatattccctccctttattggttgctctgcttctctccccctgcctttccgcggagttgcccttctacctccctcccattggctcttcattctgtccatcttgaagcaccattcttcttttctccattcattagctagtttttcagctcttagcaggtagttctgcctcttgattggctccttcaaacttcagtccttacttgccccagtaaacgccttacgtactctctacccctgactcttattggttcactgacccgctcgtctccttcntgtacctccttggccgcaccgntcggcggtcactcaacagactacatctgattggagaaggaggtgggtgcacctgcnggncgnagcttggtgcccatagtcgcctgaggccgnancactgcaccgnggcngntgggtgacatantnaggtggnagcgcccgngggcngnggatnctggggnncgtnccgcgggggc

SEQ ID NO: 440795 - DNA, 995 bp, Homo Sapiens
gaaacacttggttcaattctcttggacacattttcatccagtcctaatgaaaccttagaagtatctgctgtactgttttgaggagaaggatcagctatccagcgactgtgagcatgaacaagaaccaagcctagagacataatcatcttgaccctctgagttacaggattcggcttattttcttcttcttctaaaactcgggcaaaatggctgagctgccaaattggacgaccctcgcggctttcccgagaaagctctaataccaaggacacacaagctgggaagaaagtcatgaacacgaagtagttggcaagaactgacatgcagccaaagcagcacttaatttcaagctgacgtacccctgacttggtaccaactccaatcacaagacattcaacaagagcatcgagggtaaacgtaggacctaaaattgccattccacgagcaatattttcccttacttcatcctgtgagttggaactgagggcaaactttgctaatgtgcttgctctggaaaggtcaatcaaaagtaggaaaaagggcaaagcttcattcaagcctgtcaattctttgtctaagaagtgaatgacaactgtactgaatacaaaacttgagaaaattgtgaaaaggccagcaatacccaaaatatattttgatccaagttgacgtaaattctggaactggaagtaaatatacaggatggctatgcatcgtgttattgtcagaattataatgtcactgctcaaaacatcctcttcaaactttggacattcataattccaaccacagatcttattgttaccagtaaacatgttcatggacatcatgcagatggtcagtgtcactgtccccactatgacttcccagggatgggaggccacaaagaggccatgcattcgaaaaagtcttgacaacattgtagctacagaatccttggatcctccagatctcactagaggccaccgaaccccggcgccgacgctcagcctggctcc

SEQ ID NO: 440796 - DNA, 746 bp, Homo Sapiens
  misc_feature (41)..(64): n is a, c, g, or t
  misc_feature (623)..(623): n is a, c, g, or t
  misc_feature (653)..(653): n is a, c, g, or t
  misc_feature (656)..(656): n is a, c, g, or t
  misc_feature (664)..(664): n is a, c, g, or t
  misc_feature (666)..(685): n is a, c, g, or t
agatctttctgcttttcttctctttcttcaggatcgtctcnnnnnnnnnnnnnnnnnnnnnnnntatattgaccaagggcattcaccaactccacaaaaatttcatcatttataaaccgcacattctctatccccgtgtactttcccatcataattttttattagttcttcaatgaaagtaccatcctgatctaaaacttcatctcccatataaggaatgttatgtaaaacagtttcatcttccaccataaaattctgctgtaggggagaccaagaatacattatgggtactgaagcaactgcattcagagtctttaatgggatgacttgtgttggaaaatccaagtcactggtcaccgaacactccctagtcccgcgcaatgagctcacagaagtcaggatgtgcacaggctgtatccttcgctgtttccattcttggtttaagatttccgttctttccaaaattttctgacgattggaactaaacatactctttacttcatcagctcgtctgaacctcttgagctgtctcagtcgcatgtactctgattttacacgcttccgccaacaaactggtcccttctcagatttcttcccagtctggcccatgattattcttcgtngccgcgcgccgactcgcgttgttcccgcgngtngcccccgngnnnnnnnnnnnnnnnnnnnngggctccactgccttctgagtcccaccgggtgtcggacgcgaccggaccgagcgccaaaaa

SEQ ID NO: 440797 - DNA, 1106 bp, Homo Sapiens
  misc_feature (466)..(467): n is a, c, g, or t
  misc_feature (474)..(474): n is a, c, g, or t
  misc_feature (479)..(479): n is a, c, g, or t
  misc_feature (481)..(481): n is a, c, g, or t
  misc_feature (495)..(495): n is a, c, g, or t
  misc_feature (512)..(512): n is a, c, g, or t
  misc_feature (547)..(547): n is a, c, g, or t
  misc_feature (565)..(565): n is a, c, g, or t
  misc_feature (567)..(567): n is a, c, g, or t
  misc_feature (597)..(597): n is a, c, g, or t
  misc_feature (651)..(651): n is a, c, g, or t
  misc_feature (681)..(681): n is a, c, g, or t
  misc_feature (693)..(693): n is a, c, g, or t
  misc_feature (701)..(701): n is a, c, g, or t
  misc_feature (703)..(703): n is a, c, g, or t
  misc_feature (758)..(758): n is a, c, g, or t
  misc_feature (801)..(801): n is a, c, g, or t
  misc_feature (880)..(888): n is a, c, g, or t
  misc_feature (1009)..(1009): n is a, c, g, or t
  misc_feature (1024)..(1025): n is a, c, g, or t
  misc_feature (1027)..(1029): n is a, c, g, or t
  misc_feature (1042)..(1044): n is a, c, g, or t
  misc_feature (1049)..(1049): n is a, c, g, or t
  misc_feature (1060)..(1061): n is a, c, g, or t
  misc_feature (1066)..(1066): n is a, c, g, or t
  misc_feature (1074)..(1075): n is a, c, g, or t
  misc_feature (1078)..(1078): n is a, c, g, or t
  misc_feature (1082)..(1082): n is a, c, g, or t
  misc_feature (1086)..(1086): n is a, c, g, or t
  misc_feature (1089)..(1089): n is a, c, g, or t
  misc_feature (1091)..(1092): n is a, c, g, or t
  misc_feature (1095)..(1095): n is a, c, g, or t
  misc_feature (1099)..(1100): n is a, c, g, or t
  misc_feature (1103)..(1103): n is a, c, g, or t
  misc_feature (1106)..(1106): n is a, c, g, or t
agcgggccattttctcgccgcttgtgtggctcgctggctgcgtggctcggttcttgtgagcgaagctttgtccggttcggcaatggacggaatcgtcactgaggttgcagttggcgtgaagagaggatctgacgaactactctcaggcagtgttctcagtagtccgaactctaatatgagcagcatggtagttacagccaatggtaatgatagtaaaaaatttaaaggagaagataaaatggatggtgctccttctcgtgtacttcatattcgaaaattacctggggaagtaacagaaactgaagttattgctttaggcttaccttttggtaaggtgaccaacatccttatgctgaaaggaaaaaatcaggcatttttggaactagcaaccgaggaagcagctattactatggttaattactattctgctgtgacacctcatcttcgtaaccaaccaatatatatnnagtactngaatnanaaagaactaaaganagataatacattaaacnaagtaagtatgtgtaggtacataaataaaatgggntagaacatattatgaatntnataaacattaataggaaggaaatgtttacntgttcagatgttccttataggcattttcttgttatttttaaggtattttcatgnagaatgtttctaagtattaaatactatgtnattttgaattcntttaatcncntggtcaaatgttctttttcttgttgcaagttaaaatttttgtgtagaaacttatnaggtaggatttattattagcataaactgtttatacaactctcntgcttagaatttaaggtaagaagttcagtgcctttggttatttgattttttttataggtcttaatttcttacggaaaannnnnnnnngaagatgtgttaatggttttcctggaaaagaaatcttaaggatgaagaatatgtgaatgtattgatgttttaaaaatgtaatatagaagatattgtttaaaattaatgtattcaaaaatangattagaatgttttnngnnntacattataagannngtgtnatgatttaaanntttgnggttttanntantttnaaanaangnnatntttnnggnggn

SEQ ID NO: 440798 - DNA, 1209 bp, Homo Sapiens
  misc_feature (128)..(165): n is a, c, g, or t
  misc_feature (227)..(252): n is a, c, g, or t
  misc_feature (414)..(472): n is a, c, g, or t
  misc_feature (519)..(567): n is a, c, g, or t
ctggtgacaggttcatagagcaggagtggaggagtttgttgcgcgggatatacgggttatgagcgttaccgcggcgctatgggggggcgggcctatgtggggacaatggaggcggcggcgagcttgtnnnnnnnnnnnnnnnnnnnnnnnnnnnnnnnnnnnnnntatttatgataaaagaaacgcaatagggattaggggcagtgtaatatgggtccactcgatannnnnnnnnnnnnnnnnnnnnnnnnncggataatctctctcgggctggtttgcagtgtggagaacgcgggtgtcttgtcagacaaacgataaaagaggggaaatagacggcggagcttgcttactagagtattgattggggtacgtgggcgtgggtgcccttcgggcgtgtgtgtgggtttaaggttnnnnnnnnnnnnnnnnnnnnnnnnnnnnnnnnnnnnnnnnnnnnnnnnnnnnnnnnnnnattaatcgaaatcagcgggaggaagtgcggtacaggccggtgatacnnnnnnnnnnnnnnnnnnnnnnnnnnnnnnnnnnnnnnnnnnnnnnnnnaagtaacggctcggcctccgggggtcggtcacgcggcaaaggtaattaggcgagagtggctgcgtgtgtagaggacatggtcaggtgcaggcgagaatgatccggctcatcaagttcatgtcagagatctcacgccggcaagtggagcggggctgaactcggccgcgatggctggcatgcccggcgccgcgtacggtaggtgctcatgctggtggtggggcgggtgctgctgtggctgttgctgctggcgccggtagagctcggcggtagcgctcgctcaggtagagctggcgcgcgttgcggagcacgtaggacaccaggaggttcttgtgcagcttgatgccgccgcgctgggttcgggagctgtggatcttgcgcagggagatgctgatcaggctctgggcgtccagggcgcactccatgctcccgcggagacggcggcggagcagccgccgccgctgctgctgttaacgcttctgctgtttctgcctccagccggccgccggggcgcgccgggcaggggtaacggagtccgggtcagaggttcggctgcgctccgaaaggagccgccaccatgcgccgcgcgccacccgcgggctcgcgctccccagacggccctcggccgaattcgccacccaggcc

SEQ ID NO: 440799 - DNA, 1085 bp, Homo Sapiens
  misc_feature (4)..(4): n is a, c, g, or t
  misc_feature (8)..(8): n is a, c, g, or t
  misc_feature (10)..(10): n is a, c, g, or t
  misc_feature (20)..(20): n is a, c, g, or t
  misc_feature (24)..(24): n is a, c, g, or t
  misc_feature (31)..(31): n is a, c, g, or t
  misc_feature (39)..(39): n is a, c, g, or t
  misc_feature (73)..(73): n is a, c, g, or t
  misc_feature (78)..(78): n is a, c, g, or t
tttnatananaaggcttttntttncaccgtnggagactnttgggtgtttcttccctgaagtcgcaatttaagncctgnaaaaagatacttgacttccctgattgataaaacagctaagctgaagttgattttcctttcctttggtgacttcttcttcttcagattctgtacatttcatggtagtttcaaactcaacacctgaagaactgatctgattaaacttttctttttagaaggtgtcagctgccgatgcagatgaggagtctgtctctttaacagaatcatcctctattgcttccaatttctgttgcaatactcgcatcatttgtatccaccattcattagcatcctgttgaagatactgtccttgttcacctttctcggcaaactgtgggaaagccatgtgcaaaaactgcagtagaataataggtggaatactggaagaagttttatccatggaatcaaacaaatctctaagggctgcagtaatatactgcgctgaagccatttcccctgaagctctcaaggcacctgcataccttttaagggcatctttgagttcaggcacagaacgaatacactgaactgtggcattcatgtaacaagtgttaccaaggtttgtcaatccacatggtaactccatagcagatgctaactgttcttctgtcatgtcttctacgaagacagttttggctgagggttcttctggaagagcatctgctgaccccatcattagtagagtcattccattttttattttgatgtttccccaatcatcatcctttagcgttcctcctttcaccataactttctgtctggcaggctggactccagtcaacgcaaacagctgagccttgaataccattggaggttcatctgtattcaattctacaccttcaaatttctcctttccccattttacagtaacggagtagagcggcatggcggggcgcggcgggaggcggcggcgcaggagagctgggcctgacgagggcggcaaagggacggggaccaggagcagctgcggcggcggccgaggcggaggcgcggtggtggcggcggcttcggtgcgacgagtctcaatc

SEQ ID NO: 440800 - DNA, 1553 bp, Homo Sapiens
  misc_feature (297)..(297): n is a, c, g, or t
cgttagggttaaaggccacggaggatggtaggagttttgtttctgggctgccgctgaattttccacgtgtggaaaatcctttctaattgagaaatttggcaaaaggactaggattattgggggaaaaggttcatttgatcttaaagattcccaaagacacaacaggcctagtaccctaggaattttagtatatgtgggagacagaagtggagaaagcttaaaggaattacagcccatgcctccccaaatgattatgaaaagggagggcttgtccaagcctacctctgggcccttaanggatgagatgaagggtaggagtagggggatacatgcacccagcctgttggagaatcccaacatgaagactattgtcccttgagaacctaaggcaaaagtacaaggaggggaaatactgggtcctttacctgaaacaagatatgggcctcccctgcccctcagaccctacagctccttaggctccaggcctcaggcacaagagatagagaatcatatctgagccttttgcccttcccttagctccaaacaagggcaggggttgaaatgtgagtgggagagaagggatcatcagacacactgtttagcacctgaaccacatctcttcctaaaccagaaatcccaagagcagaaagaaataggagcaaagtgagagaggggttgtgcttcccatcacattaaataggagacttcgtggggttgggcaagggttgtttcacatcaggacatcaatgactctggtcaaggtgaggggttataattagcaaagcttcatgtgctctccctttctttattcatcctgcttccgtttcggctttttggggttccgggaccgactcttggccttgcaaagagggcatataggtgcattccggtgaatttgctggtgacatgacaagcaggccttcataggtgggggctgctgcctgaaggtggccgtctgccgagtatcctgcttcctagccacttggagctgttgggcggcagcggctgcagcggccagggactcagggatggggggctcctgaggttctgtctgccattctgctttctgcttctcaaagtaatccaaggaaagcttctcctcttcttcacacaagtcagggagcctctgcaggcccagagtcatgcgcagggcatccacatgttctttcagtggcttatactcatcatgcagcctccttgtagactctagcagcttgtttaggtcattctcagattgtttgatagtgttttccatcacattgatgtcagcgtggatcagtcggagttcctccacatgggccatcttctcctgtagcagaaggtccatctcctgcttgtattccttcaggtgcctttcctctgactcaagtgcctcaaactcagccttcaaacgagccttgatcttctccatctgcagggtcttgttcctgatctctttaatgctttccaatttgcacatgatttcttgctcatctgccatacttttcactgtcaatttcacgtcccgagagatgtacaaatacaccagccaagatcccgggaattccggaccg

SEQ ID NO: 440801 - DNA, 1736 bp, Homo Sapiens
  misc_feature (136)..(136): n is a, c, g, or t
  misc_feature (1416)..(1416): n is a, c, g, or t
atggtctccaagaggggccctgtcccccgccggagggttaaggccgagccacccgccccggtgtaggttctcgtccctccaagcaggcttgccccacggttggtcagccaggcctgtcgtcccacgttgttgcttntgccaagttgcccccgggggtgctccgggtcccatggtgtagtagacgcggtagccgcggatcaggccgttgggctccaccggctcctcccactgcacaatcatggtggtcgcgctgagcatccgggcttgcacgttccgcggcgcgctggccggggcctgctcgcctgtgcgggtgaccacggactcgctggggggcccctggccgatggagttgacggccgacacccagatctcgtactccgagttggggctcaggccgccgatgctgtaacgtgtggtggtgatgtcctctttaatctgatacggcccgtcttggctcttggatttatattcgatgacgtaataggacacaggatctgggttgcccgagtcccacgtgatggtgatgctggtggctgtgttctcagtcaccatgggagtcccgggagctttggggagagatttcaccgtgatctgagcaaccgcctcaatgacgcccaggctggacatggccacgcaggtgtagttggccgagtccttgacatctgtgagttccagcacgttccgacccacgggcatgtcatcctcgggggtcaggtcctcggccccctgcatccacttcacgtatggcatgggcgagcccacggccacgcaggtgatgttcacgttgccccctggcatgatctcgtggctcatgggcaggatggagaagcgcggggccacgcggcggactcgcacgtagaggttggcaggtgaggagtagcgcacgccggcgctgttggtggccacacactcatatttgccttggtcggtttcctcactgctttcaatctgcagggctcctgatcgcagctgtttgatgcgtccattgctggcactaggatccacaggcaggaagtccttgaaccaggtgatctcagggtcagggttgccgctggctgcacagagcatggtggctgtccgtgtccgctccaccaccttcaactgtgggcccatgtcgatgttggggaagccagagggcagctggtcctctcggaggacagtaagcttggcatggactgtgatctccccaaccgagttctgggccacacactcgtacacgttttcatcccgcggtgtcctcagcggctggatcctcagcactgcccctgcactctcatcaaactcaatcgtctcaaagcgctgagagttgaccttcttgcccttcttgttccaggtcactcgtggcttggggtcacccgtggcctgacacacgaaagaggccacaccccccgacacgccgatctggtccttgggttntttgataaacctggggggctcttctgctgcacagcctccaacgagcaggaccacaaggaggcccatgggaccaaccacagacaccatgccagggccccaggtgggcgccatgcttggcagcgacctccgatctccgccctggagggggatggccccccggtccctcacagagaggcctcgagccgagcgtcagatggggcaacgtctggaggctggctgggctgggctcccccggctctgccccgcttcacatcgtggctgttgcatgggatccgagcggagcccgagcgccagcggctcgcggcgtgcgcgcgccggcc

SEQ ID NO: 440802 - DNA, 898 bp, Homo Sapiens
  misc_feature (73)..(158): n is a, c, g, or t
  misc_feature (297)..(351): n is a, c, g, or t
atgggtgttcaacggccccttgggggcgggacttatctcccgtccatcacaggggggcggtttgcagttcccnnnnnnnnnnnnnnnnnnnnnnnnnnnnnnnnnnnnnnnnnnnnnnnnnnnnnnnnnnnnnnnnnnnnnnnnnnnnnnnnnnnnnntggttcgggacctacagtccaggggagccccgggggcgcccccggcttccgcccccgccagggcccgcgcaccgcacactggcgctgcggctcagcgcggcccgcggcccagggcccggccccacggcaggggtctcannnnnnnnnnnnnnnnnnnnnnnnnnnnnnnnnnnnnnnnnnnnnnnnnnnnnnngctcggagtccccgaagaagcacgtgtggtagacggcgtcgtcggcgtcgcccctggcccgtcgggcgcctccgcggggacgcccgggcacggcgagcagaggcccgaagggcagcgagcccgggagcaggcccgcgccgtagaggcaggagcgcaccgactccagcgtgtcgtagatgctggggtccttcaccaccaggccatgcaccagccgctgctcctgcaccattagggacctgtactctccccacttctcatacagggtttgcttcaggtactgcagacgagcctccagttctgccttccgaattgatgtcccatatagagtttccagtctgagaacattgcctgacgccttaatgatgtccacaatctctcgatgccggatgccttccacattcaggccattgacgctggcgatggtgtcccctggtgtgagcccagccagctgggcagggctagactcatgaactcggcagacaaaggtcaccatttccacacgctgctcctcccggtggtgaaggccctaagtctggatctcaaagcc

SEQ ID NO: 440803 - DNA, 897 bp, Homo Sapiens
  misc_feature (22)..(22): n is a, c, g, or t
  misc_feature (63)..(63): n is a, c, g, or t
gcagccggaggaggggcggccncccgcccccgcccgctggatctcagagtcgccgcccccggnctgggctgcagccgccacgccccgggagaggaccgaccgcccagaccgccggtcccggggccccctgggccacgccgatcacggggagcccctcgactgcctcccagaacaaagtgggaaagggaagcttagcccgccgctgccgcctccgagcagcccgccaggactctggctgctggagatgggcgcccggctatcgcggcgacggctgccggcggacccatccctggccctggacgcgctgcccccggagctgctggtgcaggtgctgagccacgtgccgccacgctccttggtcacgcgatgccgcccagtgtgccgcgcctggcgcgacatagtggacgggcccactgtgtggctgctgcagctggcccgcgaccgcagcgccgagggccgcgcactctacgcagtggctcaacgctgcctgcccagcaacgaagacaaggaggagttcccgctgtgcgccctggcgcgctactgtctgcgcgcgcccttcggccgcaatctcatcttcaactcctgcggagagcagggcttcagaggctgggaggtggagcatggcgggaacggctgggccatagaaaagaacctaacaccggtgcctggggctccttcgcagacctgcttcgtgacctctttcgaatggtgctccaagaggcagcttgtggacctggtgatggaaggggtgtggcaggagctgctggacagcgcccagattgagatctgtgtggctgactggtggggcgctcgagagaactgcggctgcgtctaccagctccgggtccgccttctggatgtgtatgaaaaggaagtggtcaagttctcagcctcacc

SEQ ID NO: 440804 - DNA, 978 bp, Homo Sapiens
  misc_feature (53)..(53): n is a, c, g, or t
ccagcttgagggattcccgaggatctcccaggcatctttctcctaaggctttngggtttggaagacatgcagggccccgaccgtttctggcagagcccgtcgttccccctttttgtagtggtccaccagctcctgcagagtgctgaaggtgcttcggggggatatgtagaagcccccgttgtcccagggtccggatcttgtaatgtttcacgggtatctccctgccgagggtcgtagtctcgcacggacaaagagtagcttcctttagtggtctcgctatcccggatcatgaaggagcccagcatgttgccgggagccagcagttggcgctctgcgtccttccggctgatgcccttgaaaaaccactcctctgtctccagagagtcaacgcgggcgacatagttgcttgggatgtagccctccttccgggtggccagggatcgagccttccaccactccccggattcctctaggaccaccatctggtcccccttctggaagctgaggtcttcgtggtgaatggcctcgtaatcatacagggcaaccacgatgatgtcctcagagcctgcctccctgattcctggtgtgttgctgttgtggctattaggccccggcttgatggtggatgtgggatccggcacgtacacaggacagtgtgggctggcgctggtttcagtttttgagaatgtattgcctccgacctggaggaacttggacttcatgcaccccatcctgggcgcccgctcctcgtctcgcgggcagcccggatcctcgcagcttgagcgcccccccagctcggcagcccctgaggttccggggtgccagtgccgggaaactgactttctagaactagaggcgggggcgacgctctgaggggctttggtgccgcgggcgtttctcgtcctgcactgtctgagtcccttcccactcgcctctaagcctctgatgtgctcccgagatcccgggaattccggaccg

SEQ ID NO: 440805 - DNA, 982 bp, Homo Sapiens
  misc_feature (954)..(954): n is a, c, g, or t
cggtccggaattcccgggatcgcgagggcgggggtcggggctgcaggcggggcagggctgggtgggggcgcgcgacgcacctgcctgcttcctgcacgggtggtccccaagcactgcggggccccagcccaaagcggaccttgactaccgcccagccccgcgctcccaggacctcccgcccgcggagcccactcggattgctctccgcccgggtcggcggaggccccgtctcctgtacccggcgctgggactgctccgcaccgcgcggctccctttcagcagctgcgggagcatgcggaggaggccctgccggccccgcgggtcatggaggagttccggcgctcctacagccgcctgtgcagggagagtggggccgagccccaggaggctgtcctgcagcagctgcaccagcttcccaggggccggctggacctggccacgcaaagcctgacggtggagacctgcagggccctgggcaagctgctgccgagggagacgctgtgcacggagctggtcctgagtgactgcatgctcagcgaggaaggggccacactgctgctccgaggcctgtgtgccaacaccgtgctgcgctttctggacttaaagggcaacaaccttcgggctgcaggggccgaggctctgggaaaactcctccaacagaacaagtccattcagagcctcacgctggagtggaacagcctgggcacgtgggacgatgccttcgccaccttctgcgggggcctgggcggccaacggcgccctgcagcggctggacctccgcaacaaccagatcagtcacaagggcgcggaggagctggccctagccctgaagggcaacaccaccctccagcagctggacctgcgctggaataacgttggcctcctgggggggccgggccctcatgaactgtctcccagcaacagaaccctgtggagactggactggctgggaanacatccctggagacgtctcagagcgtgg

SEQ ID NO: 440806 - DNA, 1055 bp, Homo Sapiens
tggtaatttgcgtgttgatttcacgtatgtttagactcaagttcaagagatcaggatggcccatagctggctctgaacgtacttgtttgtacaaaatgtcattccgtttttctgtatgggtctgagttctgtaggaagtttttcagttaccatatatagattagatttgtatctcctcctgctagcctcttcattaaactttcaggctttgcatctgctgcagcttggcgcatgctgtttcagctggttttgtactctttgcaatctttgcactgcatgaaatagctgattcttttgttcctgtttctgttgtgcaagatattcttctctctctttttcaactcgaagttgccttgctattttaagcatccattgatgattctgagctgtctcaacccttttcttcaaatgttcaactctcttaatgagctgatcctttgtcttcttccattgcactgatatcctttcttatttctgctgtagaaaatccagatatcttgagctgctcatattctttatgcaaagttttaaaggcttccattaactcttcatactgtttattggtgtcagccacagtttcatcctgaagaaactcacttggtacctcaagttttattaaaaaacgagctaaatatgctcttttcttcagttcattagtcctctgaagaagccagtggagcactgggtaaattacaggtttacttccaatcaccaaaccctgacgaaaagtactcatatctgtggcatttcctgaaggtttgtacttaagaataccaagaaggctcaacattcgtttggctgtctgctctggcatctcctctctgatatccacaagttgctttgggtcaatctcagccagaacatcactgagaacttgtaatagttgcattggctccaaggaatcaaacgtgattaaattatagttcttcctaaagggctccttattgagactgtccataatgaatttaatttgatcactcataattaggtcttataattttaactcaaattctcctcacgaaaccgtttccccaccccccaggaggcgcccgggc

SEQ ID NO: 440807 - DNA, 1741 bp, Homo Sapiens
  misc_feature (1491)..(1513): n is a, c, g, or t
acagccagttctgtccaaagtcttgcttaaaaaaaagccttcaccagtatatattaagtggtaccttaaaacttattgtggtcttccagcttttacattcttcataaccctgactgcaccactggcaggaaaaacacaacgatgagtgcaaaataactggcatagatcaaaaactgagtggtatttctaatccaagggccctggcatctcccacaattagagtgagcagcgtctgcagtgccagggcaatgaaggtatttacaccaaatactagggcatagcgttccatgctgaggtttgcagcaatttgaaaagttgctatcgtgatgagtaacatgtagatgattctgaagacaacataggatgcatagcacacccaaatgttacccacagtgtccatgatatacactgcagcagcaatcaggagagaaaagagagataatgtcatttctccccaagttgaccaggatatttttatataaccaactgcaaacacagcaacagcacccagtaaggttgaaacggcctccacgccaccattatagatagcagcatagcgagaaggcatcactttctcccacaggccctgtgtgtagttcacaacttgaaaatagccacaggtagagagggcccaccacacagaccagcagagaagagggcgagaggagtagcacatcaggaaatcattccatagtactttcaatacaaggagacggtctggcttgggttccggttcctccacgggaggctcctccatatttagagggatttttgactcaatgtcctcccagccaggaaggtggttagaagctggggtgtcagtaacaatgccaccattttgtaccttgatgccattcactctctggcaggtagaaggaatgtggtgaaagaagaggctcttctgtggcataggtaaaaaccaggccacagcaaaagccactgaaacacaggtaagagagatgacattcaggctgaacagcgaccagcctgccactgagacaaggatttgccctaggacagagcccactgtaaagcccaccaaagtggcacttcgacagtaacttgtgactttctggtacatgcccaggtccaccacactgtagatataagagtaataggcaatttcagtggctgtggcgatgccataaaaaaattctagaaattgaatggccagcagtccctgggcatagagcagcataaaccatgtaacaataaggctgagcccctgcagtagaacaacaggtttataacggaggtagtctgtggcaaggaacacaggaaacagtagcaccaggtaagagtaagtccatactggataaatttcattgaagacctccctctcggtcaggttcttgtccggccccagcaggtacggggtcaggaagggctcggacggcctgaggctggcgaagaagccgtaggcgcagagcagcgcggtcggcaagaaccagcattcgcgacggacccgagcggtccgcaggagcacagtgnnnnnnnnnnnnnnnnnnnnnnnagacaccgggccgggcacatccatccggggcgcgaggggaggggacccggcccggccccttccttctcctcctccgccaactggagtgagggtcaggcacttgtaaccgcgagtgacgccttctccctgtaaggccaggacgttctggactcgccgccgcctccggctacagaacccccagctttaccctacagacgcctctagggtcgctgcctgatcgccgccgct

SEQ ID NO: 440808 - DNA, 473 bp, Homo Sapiens
caacctgacctgaggcatcaattcaggcacagtataactctgaccagtaagcggaagctaacccaaatgctttccagggctgaggggacatcatgagagttgtggtcatgtacagaagcacagtcccaggggcacaggtggtacccctgtaaacaaagaatttgcaatattagggcacctcaagcaggacatccattaggctgtacaggtgaacagacctcctaccaggggaactcctgcccaagtgtttccagtcccatctgaaaagttcccagagtccttggcttccaagggactgcctgaaggcagtgagtcccaaacagttttgcttgttcaggatacaagttgatccatctcatgagcatggatgacatttgtgggagatcttcatggaaagcatagaagctagacccactctgttgtcagtctgaactcaaagcactcacagcacatggaaaggcatcccgggaatt

SEQ ID NO: 440809 - DNA, 1179 bp, Homo Sapiens
  misc_feature (818)..(818): n is a, c, g, or t
ttgctcagtaaattttgtatgaaactttaaaaggacttatggcatgtaaacattatttataaagtaagtcatggttataattatttttctcctgcctccttatgtatttatttcagaaatgagccgtcagactgctacagcattacctaccggtacctcgaagtgtccaccatcccagagggtgcctgccctgactggcacaactgcatccaacaatgacttggcgagtctttttgagtgtccagtctgctttgactatgtgttaccgcccattcttcaatgtcagagtggccatcttgtttgtagcaactgtcgcccaaagctcacatgttgtccaacttgccggggccctttgggatccattcgcaacttggctatggagaaagtggctaattcagtacttttcccctgtaaatatgcgtcttctggatgtgaaataactctgccacacacagaaaaagcagaccatgaagagctctgtgagtttaggccttattcctgtccgtgccctggtgcttcctgtaaatggcaaggctctctggatgctgtaatgccccatctgatgcatcagcataagtccattacaaccctacagggagaggatatagtttttcttgctacagacattaatcttcctggtgctgttgactgggtgatgatgcagttctgttttggctttcacttcatgttagtcttagagaaacaggaaaaatacgatggtcaccagcagttcttcgcaatcgtacagctgataggaacacgcaagcaagctgaaaattttgcttaccgacttgagctaaatggtcataggcgacganttgacttgggaagcgactccctcgatctaattcatgaaggaattgcaacagcccattatgaatagcgactgtctagtctttgacaccagcattgcacagctttttgcagaaaatggcaatttaggcatcaatgtaactatttccatgtgttgaaatggcaatcaaacattttctggccagtgtttaaaacttcagtttcacagaaaataaggcacccatctgtctgccaacctaaaactctttcggtaggtggaagcatatttgcctgttgtctattcagacctttttgatatttccttcctctttcagcatttttgttttttaagtgcagttttcattgtggtatccaccaaatgtttgt

SEQ ID NO: 440810 - DNA, 1588 bp, Homo Sapiens
  misc_feature (23)..(23): n is a, c, g, or t
  misc_feature (45)..(45): n is a, c, g, or t
  misc_feature (58)..(58): n is a, c, g, or t
  misc_feature (123)..(123): n is a, c, g, or t
  misc_feature (220)..(282): n is a, c, g, or t
ctatatgttaattctctcaagtnattacttttcattatgtcagangagactccaaaangccatagccatgaagttagacactttcccatattttgttcaggaacacaaaaaccaaatgcaaanaaatgtttaagagaacatgaaattggcctcttccttcccccaaccaaaggtagtcattaacagtcaggaaggacaaactgaaacatgtaaaaagcannnnnnnnnnnnnnnnnnnnnnnnnnnnnnnnnnnnnnnnnnnnnnnnnnnnnnnnnnnnnnnaccccaaaaaaggtatcaatacttttcattccactcttgtcaactttagccaaagccttctgagctgcagtcattttgctatttttcttttcagtcttcaaatctttagtattaaacttagtgtaatcttcttttgcttctacaggctcatctgataactttattttctttgatggaggatttggcaatgaggctgaaggttctggaagctttaagtatttagataagtcatcacttaattctttagggatgtagtcagatatcagaccatgggcataacgaatataatcctcttccttgtcagtggaagcttggtcaccagagaaaaatgcagttgactgtacccgggaactgacattcacattattggtttttaatgctgccacagtttgattaacctttttttccagccactttaatgtcttctctttgctgtacttgtaatatttcttgttgtctatttctggattacctttttcctctgtcacatgatgaagtaacttctcaagtccaggaagtttcagcaacaagatgcaatttggaaacacgttatccaccacaacttgatcaaggggctgaaacttcccctccttatcagcctttatgaggtagtggagaagcagaaatagaggatccacaggtgtggcaaaatggagaagacctcctgattgaactgattgatttataaaccaagaatggtgtttttccttgaaaacttttacttcaaacagctgctgtagacacatattgaacaagtaaatggctccttctcctgaacaggggttaaccagttttacaaacattagcccatttttcatcttctttgaagcatcttttaaatattctgaaaccaggaacacgtgctgccgggcgccaaccccgtccccgcagtccacgccagcggccatgccgcccgcctcttccggggcgccgcaggctcagcgccgcgggcctcagtctcccagccccgccgaaaatggcgggagaagggtctgttccgggtggcgcggcgcgctgagggaccggcagcgcccgggaggaggcccagggaccgaatttcgtttcgtttccgagaccagcctgctgctcgtgttacgtttttaaatttagcgccaggcgaggggctctgaatgccggccggtggccgcaggcaacgggaaggggccgcggcctctccctcgcggtccgctagtggtaggtgctcatcgcgcgccgcagggcgccgagtgacgcggagcggggcggggtcgccggggccccgcgctctgtggctgcacccagcggccctccatggtctagccagcgg

SEQ ID NO: 440811 - DNA, 922 bp, Homo Sapiens
  misc_feature (259)..(259): n is a, c, g, or t
  misc_feature (261)..(261): n is a, c, g, or t
  misc_feature (263)..(263): n is a, c, g, or t
  misc_feature (265)..(265): n is a, c, g, or t
  misc_feature (270)..(275): n is a, c, g, or t
  misc_feature (302)..(397): n is a, c, g, or t
  misc_feature (689)..(689): n is a, c, g, or t
  misc_feature (739)..(739): n is a, c, g, or t
  misc_feature (749)..(749): n is a, c, g, or t
  misc_feature (800)..(800): n is a, c, g, or t
  misc_feature (819)..(819): n is a, c, g, or t
  misc_feature (822)..(823): n is a, c, g, or t
  misc_feature (826)..(826): n is a, c, g, or t
  misc_feature (828)..(833): n is a, c, g, or t
  misc_feature (835)..(835): n is a, c, g, or t
  misc_feature (848)..(848): n is a, c, g, or t
  misc_feature (857)..(857): n is a, c, g, or t
  misc_feature (862)..(862): n is a, c, g, or t
  misc_feature (866)..(867): n is a, c, g, or t
  misc_feature (869)..(869): n is a, c, g, or t
  misc_feature (871)..(872): n is a, c, g, or t
  misc_feature (878)..(878): n is a, c, g, or t
  misc_feature (886)..(889): n is a, c, g, or t
  misc_feature (893)..(894): n is a, c, g, or t
  misc_feature (905)..(905): n is a, c, g, or t
  misc_feature (910)..(910): n is a, c, g, or t
  misc_feature (918)..(919): n is a, c, g, or t
cagtgtcattgtttcaacatattttaatgatttcaggctaggaaaaaactttcagcaaagtttccaagaattacaagtatgactgctgtgggtatgcacgtacctgcaaatcagattctctcctcctatggaaaaaaacacagtttttcacatttccattttagttagcccataaaatctggctttttaagcctggacacatttatcccaaagtgattgtgctcagaaaatgtgaaagaaacgaacagcctttttttanantntntattnnnnnntttttagcagttttatttatgtatttnnnnnnnnnnnnnnnnnnnnnnnnnnnnnnnnnnnnnnnnnnnnnnnnnnnnnnnnnnnnnnnnnnnnnnnnnnnnnnnnnnnnnnnnnnnnnnnngtaaataaacttatgtctaattcacacattgtgcaattcatccatttaaagggcaaaatgcaatggtttttaacaaaatcacaaagttgcacaaccatcactacaattaattttacaacatttaatcaacctaaaaagaaactctgcaccactttgctgtcatcctccaggctccccaaactctccccaagctctagccaatcactagtctagtttctgtccctatagaattgcctgttctaggaatttcatataagtagaatggtacaatacatattcttttgtgacaggnttctcttacttagcatgatattttaaggtccatccttgttaacgcatgtnttaatatttnatttctttcttcaccaaatagcattccattacacgtatatcccacgttaantttatccattcattccttnatnnacntnnnnnntnccttccctttttngctattatnaaaangctnntntnnacattnatttatannnntttnnctccacataantttcnatttctcnnaaa

SEQ ID NO: 440812 - DNA, 1247 bp, Homo Sapiens
  misc_feature (939)..(939): n is a, c, g, or t
  misc_feature (949)..(949): n is a, c, g, or t
  misc_feature (1001)..(1002): n is a, c, g, or t
  misc_feature (1012)..(1012): n is a, c, g, or t
  misc_feature (1162)..(1162): n is a, c, g, or t
  misc_feature (1183)..(1183): n is a, c, g, or t
cataatacaaatggggacttttaatgacagtcagaaaaacgagaatgattcacattaatttcgagccttctatgtgtcctgcatcacccagtaggtatttcacatatgctatatgttttttattacaaaaataacactgcagagagcccataactgttttccaggaatcctgaattttctctttagtgatgctacacatacttactttggacatcagcaatctaactgccggctttgcaaactcattcttcaagaggcaagtcattcttggtaacagcgtcctcaggaatgaagctcctgcagttgaggttcagtgaacgctgcgtcagggatctgcgcagcacgtgtggaacccaatgagagtccttgctgtgcaggcaccgggatgctcacatagtaaaaactcgagtccatcgggaagcccaggaaaggatttaaaatgacgatcacgtggcatctctcagggccaaatggggcgcatcaaagcttcccctcgacgtttattaactctggagtcggttctctaggtgtgggaagaattgggagataacgatgtgtctgagagaagaggcgttttctaaggagacacacaaagggagtgggaccctccaacctcactctgtgagaggtacaccgcacagcagtgtgggggctcgaacaccccaagagcggcagagcgcggttcagaaaacatgacccttgaaatgcacacaaagcctaacaacgtgtcctccgcggaagaaaacagcttgaaaaggtcggctttgaagtgacccagcggaaaggaatcaccctggaagaaacacgcagcagccccggggcaatgcgcgggcaggaggagcagcgagcgcggggtgcgcagggcccttcggagagggcgctccaccggccctgcgctccgtacctgtgccgccacgcccaccggtcccctgctgagcntagcaccgcncatttagacccagcaccacccgtccggaccgaacctagcaccgcccgtccgnncccagcagcncccatttggatactgcaccgcccgtccagacccagaaccgcccgtccggacccagtaccacccatcgcgacccagcgccgcccatttagacccagcaccgccagtccgaaccgaacctagcaccgcccatgggacccatcgcccgttcgnacaacagcaccgcccgtccanatccagcactgcacccccatttggatccagcaccgtcccgtccagacccggacccgccagatcc

SEQ ID NO: 440813 - DNA, 1651 bp, Homo Sapiens
  misc_feature (3)..(3): n is a, c, g, or t
  misc_feature (1175)..(1183): n is a, c, g, or t
  misc_feature (1413)..(1413): n is a, c, g, or t
  misc_feature (1446)..(1446): n is a, c, g, or t
gangtcctcggcctgccgggtcccgggtcctttgcggcgctagggtgggcgaacccagagcgacgctccgggacgatgtggggcagcgatcgcctggcgggtgctgggggaggcggggcggcagtgactgtggccttcaccaacgctcgcgactgcttcctccacctgccgcggcgtctcgtggcccagctgcatctgctgcagaatcaagctatagaagtggtctggagtcaccagcctgcattcttgagctgggtggaaggcaggcattttagtgatcaaggtgaaaatgtggctgaaattaacagacaagttggtcaaaaacttggactctcaaatgggggacaggtatttctcaagccatgttcccatgtggtatcttgtcaacaagttgaggtggaacccctctcagcagatgattgggagatactggagctgcatgctgtttcccttgaacaacatcttctagatcaaattcgaatagtttttccaaaagccatttttcctgtttgggttgatcaacaaacgtacatatttatccaaattgttgcactaataccagctgcctcttatggaaggctggaaactgacaccaaactccttattcagccaaagacacgccgagccaaagagaatacattttcaaaagctgatgctgaatataaaaaacttcatagttatggaagagaccagaaaggaatgatgaaagaacttcaaaccaagcaacttcagtcaaatactgtgggaatcactgaatctaatgaaaacgagtcagagattccagttgactcatcatcagtagcaagtttatggactatgataggaagcattttttcctttcaatctgagaagaaacaagagacatcttggggtttaactgaaatcaatgcattcaaaaatatgcagtcaaaggttgttcctctagacaatattttcagagtatgcaaatctcaacctcctagtatatataacgcgtcagcaacctctgtttttcataaacactgtgccattcatgtatttccatgggaccaggaatattttgatgtagagcccagctttactgtgacatatggaaagctagttaagctactttctccaaagcaacagcaaagtaaaacaaaacaaaatgtgttatcacctgaaaaagagaagcagatgtcagagccactagatcnnnnnnnnnttaggtcagatcataatgaagaagatgagaaggcctgtgtgctacaagtagtctggaatggacttgaagaattgaacaatgccatcaaatataccaaaaatgtagaagttctccatcttgggaaagtctggattccagatgacctgaggaagagactaaatatagaaatgcatgccgtagtcaggataactccagtggaagttacccctaaaatccaagatctctaaagntacaacctagagagattttacctaaagacatangtgaagaagacataaaaactgtattttattcatggctacagcagtctactaccaccatgctttctttggtaatatcagagggaggatttattaagctgggaactaaagatgggactgaaggaatttctctgagtatagttcatttcttgggaaaaagaaaaagataaaaatatttttctgttggaatcccaatttgctgccaaag

SEQ ID NO: 440814 - DNA, 1140 bp, Homo Sapiens
  misc_feature (127)..(127): n is a, c, g, or t
  misc_feature (289)..(328): n is a, c, g, or t
cgctgcgtgggggtgaggggatcagtctggtggaaaggacagaggactaagtccatggactggaaattggaagggagtactcagaaagtagagtcacctgtgctgcaggggcaagaaagaaacctanaggagacaggtgaagatggacttcctgaaggcttccagcttctgcagatcgatgcggaaggcgagtgccaggagggagagatcctggccacaggcagtacggcatggtgctcgaaaaatgtccagagaaaacagagacactgggaaaagatagttgcagcannnnnnnnnnnnnnnnnnnnnnnnnnnnnnnnnnnnnnnnccaatcgtgcagaaaatccaggcatttgcccccagcacagcaaacgtttcctgagagctctaaccaaagacaaacttttggaagccaaacactcaggaccaagactatgtatcgatttgagtatgacccactacatgtcaaagaaggtagaacatccactaagcctggaattcctgctcgccatgagggaggcccagaagggtacagctttccgaagaatatggtcaactccagcttctgggattccttagtaaactagaattaagtagactggctggacagattcgaaggttgtatggttcaaacaaaaaagctgacaggccattttggatctgcctcactggattcacaacagacagtcccctttatgaagagtgtgtgaggatgaatgatggattttctagttacctgttagacataacagaagaagactgctttagtttatttcccttggaaacccttgtgtacctgactcctgactcagaacacgctcttgaagatgttgatctaaacaaagtttacatcctcggtgggcttgtggatgaaagcattcagaagaaggtgacatttcaaaaggcccgggaatactctgtcaagaccgcacgcttgccaatccaggaatacatggtcagaaaccagaatgggaaaaactatcattcagagatactggccatcaatcaagtgtttgatatcctgtccacttacttagagactcacaactggcctgaagcattgaagaaaggagtttcttcaggaaaaggctatattcttcggaactcagtggaatgatgggcctaagattgcagctgcgt

SEQ ID NO: 440815 - DNA, 1615 bp, Homo Sapiens
  misc_feature (25)..(25): n is a, c, g, or t
  misc_feature (49)..(49): n is a, c, g, or t
  misc_feature (67)..(67): n is a, c, g, or t
  misc_feature (69)..(71): n is a, c, g, or t
  misc_feature (73)..(73): n is a, c, g, or t
  misc_feature (75)..(77): n is a, c, g, or t
  misc_feature (79)..(79): n is a, c, g, or t
  misc_feature (119)..(119): n is a, c, g, or t
  misc_feature (123)..(123): n is a, c, g, or t
  misc_feature (131)..(131): n is a, c, g, or t
  misc_feature (133)..(133): n is a, c, g, or t
  misc_feature (143)..(143): n is a, c, g, or t
  misc_feature (156)..(156): n is a, c, g, or t
  misc_feature (1611)..(1611): n is a, c, g, or t
taggatccaatgatcagcgtgagangatcattgattaaacttgcttganatggctagtcaaacgccnannncngnnngngatggctagtcaaacgtcgaaaatcaaagaaaaagtaggnaacnagactttnanaatttttttnaaagggtaaaaanacatgaaccctagtctgccttaatggcaaagtagcacttattaggttctctgacagaaccaaggaataggaaaatcttttatcaaaactacggataaaacttaaaaataatctgatacaatgatttggtcttgctggaatcagtaaattaaaatacgggggcagaatggtaaaatcaggggcattagacattcctaatggcatgccaagctattttagagacagcggcaaaagcttctctacaggtgggtttgatgtaacgctccggcagcaagaatccgtatgtgcccgtatctcgaagttcaattgtaaacgaatatttgatgcccaaatcatagatccaatcgtccccacctccaggagctaggtataaggtttctgagccatggccatgtgtatacctggtatttttactagttttctcaatagcacgaactgcttcactggctactagagacagttcctcatggtctttgcttttacttcgtgtataggaatatggaaacactatatgctgggagtatgaatgcatgctgatgtatgctttaatctggcttgatatttcttctcaagaaactagccactgccttcacttctggttctgactcaggataaagtccacagtaggtttccgagcatgaggaactggatgcaccttcctcacaccagtgtttggaagcaaagttcctattcaggtctgttccaatgcaatgattgttcgcatagaaagaacggttctttctccacattcgattctttttccatgagtagtcataaccatccacattaaccaccggcataacatagaaatccacaagcctcaggagattggtatattgccctattatcccatagaattgagttatatggcctatgaaccacaagcagaaagcaggagagatccattctctggcatggattccacagtcaatccatatggcatttttggctgcttgttcttttccagaaacctttaaaacatagagtgggtacttctcaaatgaggatccaatgtggatttttgtaagcatatcaggatgcctctcagttataaattctatccaagaatagatttcatttagtgagtgatactgttcatagtacgatgcggaggctcgggggctgactgtgtcgttggaaatctgctgttgaataagatcttccacgtctgccagcaagacactgcatggaattccgctcacatttaaatgggctttcacattgtcgacatcagatgcatttacaaaaaaatggacttgttttttcttcacaataaggtcagctgttaccggctgccagagaacaatctcatatgttgtagtaagattctgtagaacttgaacttgcctagaggttctaggaagagcagctagaacttggccactctgaaacgcgaagacatgctgctcacagaagagaacaatgggtacaaggactgcaaggctgcaaagcttcntccc

SEQ ID NO: 440816 - DNA, 948 bp, Homo Sapiens
  misc_feature (660)..(704): n is a, c, g, or t
  misc_feature (941)..(941): n is a, c, g, or t
tgtagacaattttgggtgtatctttatttaataaataattattgactatgacatgggcacaattactattctaggtattaaggatatagcaatgaataaaccaagtacttatattctagtagtgggagacagatactaacaaataaatcagtaagtacagatatgtcaggtgatactaggatgaagaaagtagaataagggggcagagcgacgggagcaatgatgaatccgttggatggcagactgtccgaacacactgacaacagctgcgggtgggcctcttgctgacacttcagggccatcatggggtcaatatgcacctggtgattactgaaaaattaattctcccttactgtttttatgggagaataagtcccaagttttagatgcccagacatacaaacatatttctagcacacactctgtttcaagttgctaggctacttagaagcagtgaaaaaaaatgctacactatgaagttgttaaagcttcaaaaggcaaacgaggttaagatacgtgtgtgtgacttcagatgcacaggagaatttcttaccccaagtgttcgcctttctgaaggggctctaagcagatctcaattctccgtcctagtttatattccctgataataagtgaaacaagataatattgagtgacataacnnnnnnnnnnnnnnnnnnnnnnnnnnnnnnnnnnnnnnnnnnnnncttaagcaaagaattgttttctgagtacttataagaacacccaaacttttggaaaaggggaaaaaatgagaatccttgctgcggtgattatttagatacttgagttatttcttactaaacatgtaggtctggctctgggaagatggccaaactgccaaagaaatttccctctgttcagacggggttaagattctcatgccagttactttgggggtggtaatcagaaccgaattaaancagcctt

SEQ ID NO: 440817 - DNA, 1690 bp, Homo Sapiens
  misc_feature (82)..(180): n is a, c, g, or t
  misc_feature (264)..(264): n is a, c, g, or t
  misc_feature (685)..(685): n is a, c, g, or t
  misc_feature (1422)..(1422): n is a, c, g, or t
atctctcaggttcaagcacttctcgcgccccagcctcccaagtagctgggactataggtgcatgccacaacgtcccgttaannnnnnnnnnnnnnnnnnnnnnnnnnnnnnnnnnnnnnnnnnnnnnnnnnnnnnnnnnnnnnnnnnnnnnnnnnnnnnnnnnnnnnnnnnnnnnnnnnnctcccaccgcacccagctgaaagggtctttactaaagaaggttcattgccttagtctgcgtcaccaggtgtgaggatgtacggntctttaaccatcccactacacacacactgcgatttgcactagccccaccttagggcagggggaaggggtggagaaggatgaaatctgaaactcagaggggaaaataaataagtggaaaccaaaaagccatacatatgtttcttaaaatttcccacaaagacaaaatgctacagaaaaaaagcagaaaccaaccaagagtttgggagggatattagtgtcttccaggaatagggcagcagggaacccatgggtacacactcccagcctgtccaggaaactgaagtgggtttcaggcctctctacaacagcccagggcctgcccacatagcatccaatagaatgaagtccttttttaagttttaaaatgagtctcccaggattgagggatgaaaaggctgagaatcaaagccacacatttggnagctcttgcctgcctagacctcagcccagccctccaaaaccatcttcttaccaccagaaagtccacacgtgtttatgatgggggtggaaagaggggcagcagaggggagagagggagctcccctggctaggccaggcatccctaccctgctttccatgccagcagcctcccggagttggccagacaaggcctcaactcagaaagatccaaaagttccagaggccattctgtcttcctccctccttcccccacgttacagccctgggaatagaaccaggacattccccaacaccatcaggcctcagacacctaagtgacaagaatggcctcaccccacagaaaatgcacctcgttagctgaggcaagacccctcccctaaccatccacagaatatcctggcagggaacagaatagcagggagccacatttaatggctggaatagccactctgcctctgcaggcctcggtcacttatccataaagtgggcatgagagcaataatgctacttttcttgcctgagagccatgagatgacctagatgacctccgtatgtaccttatggagctaagatcttaactgtaggaacaatcacagcagcagcaagcaagagcagccaagtgaccccagatcagcagctttcttgcctgagcctggctggctgccccagggagggctgcagcagggggtagagacccacatgtgctatctggatgcctataaaacctctgaacctttnacggggcacacaccttggggttttaccttgcaagtctagaaggggagcagccagaccttctggcctttctaacttaatcctataccaggttcacaaattttgcagagaaggccagccattggctaacttaattgcaaaaggagattccccagtggcccatgagaaccggacctaggcattatttttttggctccttgccactacttaaaaagctctgttttccattggccaagcccagttggagaaaggagagattccacgggcgtcg

SEQ ID NO: 440818 - DNA, 1837 bp, Homo Sapiens
  misc_feature (1223)..(1223): n is a, c, g, or t
  misc_feature (1328)..(1328): n is a, c, g, or t
  misc_feature (1571)..(1571): n is a, c, g, or t
  misc_feature (1574)..(1574): n is a, c, g, or t
  misc_feature (1800)..(1800): n is a, c, g, or t
  misc_feature (1831)..(1831): n is a, c, g, or t
tacagatttcctaggtaatttgggcaagtctcttgatttatctgatcagtcttcttgatcacgaagagagctcaggaacaggctaacacaactgaacccttccagcaagtctatgaagtgatatccctcatgtggtaggtgggcccggcatgatcagagggaatggagtgacttgtcgggatcgcagggttgatgccctttcccaccgcaccactgctgtttttgagcaacccgtactctgttgactcaaggtggattacaggttttgggtacttagctccttaagggcaaggatgtattttactagtctttgtactttccgtctctgggccaatcatctgcttttgctcatgcaggggcgccgcagccagcatggacgcggtcaggggctcctgtcctgggatgtgcacagccggctcctggacccgataggtgctatgtgctgctgaggaacatttgcacggcaggagcggccggcctggtgtacatgcatcctaccccactgggtcctgtggtctgagtaccaatgttggctggggcatggcaggcaggaagtagctggagggctgctgaaaggagcccaggagggggttgctcagggtccgcatggtggagaggcgctgcatgtactggttggtcaagatggccttccgctcctctttgcgctgggccagtgccacgtagagtggcttggtgcccacgatgcgcccgttcatctctgtcacggcctttgtcgcctcttctggggaggaaaaacacacaaagccaaaccccttgctgtggccaccctctgtcatcaccttcgcactggtaattactccatagggagagaactctttcctcagtttgtcgtcatcaatggagtcgtccagattcttcacatacaagttcacaccctggtaacgcctcagccggtcctgcttcatctgctcaaacctgcgcttcagttcattctgccgctccacgcgcttttgggcccggcccgcgtacagcagccgcccgctcacctccttcccgttcatatggaccacggccttctgggcttcctcatgcttctcaaagttgacaaagccaaagcaccgcgagtggccgctgttgtccctcatcaccttcacactcagcattttcccaaactgggagaagaggtcctgcaggccttgctcgtccacatccaccgggaggttcttcacgtagatgttggtgaactccagggcccgcgcccnccagtccgcctcccgctcccgtcgagacttgaagtgacccacaaagactttgcggtcattcagcagcatcccattcatggtgttgatggcctgctgtgcggcctnatgggtctcaaaatggacaaagccgaaaccccgggagccatgctcgtcacacgccaccttgcaagagaggatgttcccaaaggtggagaaggtatcatataaagccttgttgtcaatggagtcctccaggttcttgatgaagatgttgcccacacctgacttgcgaagtcctgggtctcgctgggaccacatgatgcgaataggctggcctttgagcatctcaaagttcattgtgtccagtgnccnctacgcgtccgcgggctgctggaagttgatgtaggcgtagcccagcgagcgccgggtggctacatcgcggcacacgcggatggacaggatggggccggcgggagagaacttctcatagagcatggcctcggtcacgtcggggtgcagatcgcccacgtaaagcgaggcaagcgggtagccagaaccgctggcgttcatggtgggcagggggccggggctgcggggnaagcaggagccgggtcacccagcagccccgngctcac

SEQ ID NO: 440819 - DNA, 1107 bp, Homo Sapiens
ttgattttgcagcacttttaatacacaaagcaaaaggtaataggctggatgggtgaccaaccttcattcacatacagagcccaagtatagatacagactaattgggaaataagttagagtttgcagggccttagggctgagagccagaaacactgtccttttggcagccatggaagcgaggatttccttttctggtttcagtgcatgtacgccttcggctgctccatagcctggtgtgcctgcagcacggccactgcctcgtctatcttggcatggagggattctggagactccagcatgagcaacagctccgagttgtcaatctccagcagcatgcccgtgatcttgccagccagctgggtgtggacatcatggataagggggtagagacgctccccaatcatctgcttttgctcatgcaggggcgccgcagccagtatggacgctgtcaggggctcctgtcctgggatgtgcacagccggctcctggacccgataggtgctatgtgctgctgaggaacatttgcacggcaggagcggccggcctggtgtacagcatcctaccccactgggtcctgtggtctgagtaccaatgttggctactctctgggtatgaggcaccgtgcgtggcacctgggtggaggcctgcctgacgctgctgatgtgggccggggggcgtggaggcacgactggtggccggaccattgaggcccctggagggtaggcagctggtggatggtaggcaggcagatagctggagggctgctgaaaggagcccaggattgggttgctcagggtccgcctggtggagaggcggtgcatgtactggttggtcaagatggctcttccgctcctctttgcgctgggccagtgccacgtagagtggcttggtgcccatgatgcgcccgttcatctctgtcacggcctttgtcgcctcttcttcgcactggtaattactccatagggagagaactctttcctcagtttgtcgtcatcaatggagtcgtccagattcttcacatacaagttcacaccctggtaacgcctcagccggtcctgcttcatctgctcaaacctgcgcttcagttcattctgccgctccacgcgc

SEQ ID NO: 440820 - DNA, 1715 bp, Homo Sapiens
gaaatcaaaaagtcagctttattactgtttaaattggttggcaagcagggtttaggtatgcagccccaagggtttcttggatcattattaggttcgatgttagtgctagaaaacttacaataacagtgacttaagcaagggagagactatttctcacctgaaagtacaaaggtgtcagatcacgactgacaggaatgttttacagtaccagacacctagactccttttaaccttgttgatttttctatgcaatggcttcctttcccagggtcatcctggggtctaggatgactgctccagttccagtcatcatgtatacattccagccagcaggaagaaagaggaggtgaagggcaggatatctccatttaaggacttgtcatttttgcttatatcctattaactagaacagtcactaagacaaatctaactaggaaagtgagtattctgggtagtcatgtacttttgttaaatggagaattctattacagaaaggggaaaggatactgatggacaacttgcagtctctgccacattcctgagttaaacttatgtaactaggcagaggtaaagctagccaaccactgtcttccactatagggaggggcaagctgcttatcactgaacagactcacctcaagggtcaatcgcttgcaggaggggaacacagaaggggctgagccacacatgctgggttccttctcatttccacaactgatgttcgacttttctacggggcagtacagagaactgtcaaaaggcaggaaagcagtacatgatttggcaccacagtaacaaggtttccttagtttcccatgatctagcctttctttgtcttcactgactgttagattaagatatcttcctgaataatcataagagagttcttcttctggcacaatatctttggctgcaaaaagtgccaacttaggtaccattgagtcaattcggacaggaatcatcaaaaggtttggctcacaagaatgattaaggaatcttccaatatttcctatataagtagggtcaacaaatgtttccattacctgcccattataaacatgttccttgatggctataatgtaattggagtcggattttgtttgtaagtgaattcttctctgaacttcagagaatcctaaaacctcaccagcatattcacagacaaaccttcctttcggtataaattccaaggtacgaagtccccagccttttttatgcgtcttgaacacttggaagtggaactgtagacctttctggaccactctgtttctgcagtggtcactgcatcggcacaggacattgcattcaaaaacaggctctgcatactttcctccagatcctatatctctaaggcatgagttatcatcatagttctctccatggcggagacaggagcaagtgccagggaggcagggagttttgacacaaatgcatccgggaaaggttatttgagtgggatcaatgtctgctccaggtccaactacatgatcaggagtgtactggaagggcgccggcgcggcccccgggggccacgcgcccaccggcaagttttcctggccgcacgcgacatccagctgctcagtcggggcctcaggcttctccttaaactccgccatcccacaaggccgtgtcgtctttgccgcttccgcgaacatttacccgcctcacgcaacgcccactatcctgacagtcctgggccgcgcggtggatccgct

SEQ ID NO: 440821 - DNA, 1602 bp, Homo Sapiens
  misc_feature (412)..(412): n is a, c, g, or t
  misc_feature (821)..(821): n is a, c, g, or t
  misc_feature (1102)..(1128): n is a, c, g, or t
  misc_feature (1545)..(1545): n is a, c, g, or t
tggtaccggtccggaattcccgggatggaagaagcccaaacaaaaacgctgtccggcgccaggcgcccacctgcaagcccaagccggtgctcggccagttacaaaagaaatggtcaggatctggacaacgataatgatagtattaatcctcctattaagaatcggcccaaacaaaccctcgctgtcagggcgacaggcgcccgcccaagcccagacctcggacctggttccaagcctgttcccgctgggtctctgggcgcccggtttctgcacctggagctcgcccgatgaggacaagaggccgaggaagccggttccggggacgggcaacagggactcagggaccagaaggcggctgcaggacgcgaccgagcaggaccccaggcccgggaacgacgtcgcgagcgctganactgccgggcctcccagcccatctggcattcgagcgcaggaccgggcgccccggcaccgccgcgcgccacccgctaggatgccggtggccccagcgccctcagccgacggaggtgagaggcgggcccgggcggggcgcggaaccagggtggggggctgggggccgaagacccacctttccaacaaaatccccaccgatcccgggcgcgacggggacttgggcgcgccacggcggccggagcgctccacatcagcacccctcccccagagccgctgcaggaacagggaggaggccttttccaccgcacccggagcgtttacaacgggctggagctgaatacctggatgaaagtggagaggctgttcgtggagaagttccatcagtcgttttccttggacaattaacaagnttaggcttccacagtgccagggcctggggatgctggacgtgggagagggttgtggtcgttagcctgggaaaatcattcttttaaacaatattcgccggaaaattagttttttcctaacatttctcaaacaaggcaattagggccgtcagaatcggtgctggaagacgaagtccccacagtgcaataatgaggttcccacggaaaatcagtacgttgtgttcgtaactgagataacagctagagaaggggctttgggctttttgagtctcccaatagtcagnnnnnnnnnnnnnnnnnnnnnnnnnnntcctctgactttctggctttggacactcccaatggtatatttctttgtggtgtttttatatttggatataagagaggaacttcttgttggatttttaagggaacacacttcgttttgacccttccaataaggaaaggggagctacaggaacagagagctctttagaaggttacttttaaatggagggcccccccattcatggtacccactcccacttggacctctgagacctccagaattaggcatcattctaaaatctggacattagaagtcacagactttgtatataaccacaaattcataatttaatcttttcaatggtttttattcatagatgaaaatcttgcaggcatagttaagagaaatttatttcttaagaagtccaagggaaagattatgctcttgcagatacatgantaacaaggatagctgggcattgcccagggctgttgttgtttgagaaggtggtgatgg

SEQ ID NO: 440822 - DNA, 1631 bp, Homo Sapiens
  misc_feature (103)..(103): n is a, c, g, or t
  misc_feature (130)..(130): n is a, c, g, or t
atccatcatttccacagaatttactccatttggctcaggttcaaaaagcatttcatatgaaatgttttcagttttttttaactctttgctgaagtccacattnttggggttcggtttcttttagttgaancaatttctgtgtgcaggagtttcatgggtctggctttacatcattttctctaatggcagtgtccagttccttatcatccctccttcgagtctgagtagtcctaaatggattatcccttaaatttgaagggctttgtaagggtgactggtctgaagcaccgataacatttaacccttttttcttctccctcaggcacgcttgttgatgtcttcttattctttccatttgctcttccacagtcatccttggtcgagtactttcagccaaacagagctgttccactgcacttcttggtctttccgttcttagatccatcatcttcttagttttcctcaaggttacataggaagctattgtcgaagattcgggtgttggtgattttgctcttggagggactactccaacaggaaagtgggaacctttaacaactgaagtttctatctctgaaacaggttctgatttttcttctccattagattcatcaacttctgccactgttgttaactctggttcactcttgtagagtctataatctggaccctcatttttgtacttaactgttgagaaaggctttgatcctatcatacctatttctgtagtacctctttgctgcttatgtttactcagcccttccatgacatcctgaattcgccaaagttctttctgaatctgtgcacgctgaattcctgctgattccgtctgaacttcaccaaggtgatccagctgctcttgcatctggttcctggtaacagttacatcgtattctaacttatcatatttctctccatgctcgttccaattcggcagtggctcgagaaagttctcgacacgtactaagcagtccattttgtaaatcatccctttgtaacaccactgtctgaatggctgctgggttatctgcatgcatttctatctcttggctggctgatagcaaagcttgctcaagcgtgtatttctccttgtggagttgctgaagtttctcttccagagcatgcaccactttatcttgttcacataatcggcttaacttggcatcaatatctacttcttcaggtctgtatttgtataatgtgcctctaccttcatcttgtgacagacaatatagacttatcttgctcttctgtcttaagaactaaaagataatgaaggaaaaggatgggtttaattgaaaagaggaaaatcattcgaaatcttataaaactgaaagcctatgttataaactatggatagtcaaatttcataaaaagtttatgtgtgttagttgactccatttatgttactatattgtaaggaattattcagtgtacttaaatatcctttcttcagcttctgcccagtacattttggttaaaagatattttggttacttctgattgtgcttagcaagatttcaatagccatcccagtcagttataccacagataacatcacagcctctgcaggcaatacttcacatttttcctgcctttgattttaattgacgtgagaaaaaacaaaaaca

SEQ ID NO: 440823 - DNA, 605 bp, Homo Sapiens
  misc_feature (451)..(462): n is a, c, g, or t
  misc_feature (588)..(588): n is a, c, g, or t
tttctaactaaatttttattaaattattttttctttgaaggctggaaccatcgaagtccttagatcagctttaagcactggatggagtaaaaaccacaagggactacaaggtgatctgtgaacagactggcagacagatgacgagagagggagtgacgacaacaaaaatagacaaacaaaaataatggtcttctggcgacctagttaaattactcgcttattaaaatttattagaaataaacaaacattaatgaaataaaaatctaaaactgagccccagactcaagactactagaaaggctcaccaagtaaaaccctcggttgggtcaagtgagctctctgaatgttttgtacaacctgctgcagtttgttccccttgagcaaggtgatgctttgtcctgggctgcaatctctaacaccatcaccatccccaagtgcagctcccattctnnnnnnnnnnnncagatgcccccacccccaattcctggtgaactgctcatctctcctgactgcagaaactgactctgaaggaggaagttgcaccagtggtggaggcaggtgggcaagcgggtagggcagggaggtttnctggagaagccttcttt

SEQ ID NO: 440824 - DNA, 364 bp, Homo Sapiens
tgaacaactaagagcttaatttaaggctgaatctcaaacaagtcagctctttagaccaaaatgacatctgccagtccctcatgttttcaggacatacggacaacaaacaggattggcatcctgccaggtagaagactcagatccaagccttcttgttgccaaacttagaagaatcattctgctttgttaaagatactcccctaaaaaaatacattgcagtttctgggagaatactccatgaggtagcaaaatacagcaccttgggagagtctcacaagagctttcccaagtgcaggcataatctgacacacacagggaggaagaagctgggtgggtcacacacagtgcaggagaaaagtactgg

SEQ ID NO: 440825 - DNA, 1978 bp, Homo Sapiens
  misc_feature (872)..(882): n is a, c, g, or t
  misc_feature (1816)..(1816): n is a, c, g, or t
  misc_feature (1922)..(1922): n is a, c, g, or t
  misc_feature (1955)..(1955): n is a, c, g, or t
tcacaatcaatacaaagtcatttttatttttaaattagcaataaaataatcaagtttacatctaaaaaatacaaacaacaacaaaaaccttcacatgttgtattccaaactgtaagccccaggcctcaatgtcagaggagagcaaaggcctttagttattttgtctcttgttgctggagcccatccactgtctgacatcatagccatgggcaagaggatattgccttggctctgtctgagtgctggattgtgaccggccataagtagcctttgcaaaggaagctaatggacagtgcctgaattaagggtgcttaccctatcctagaaagcgttaaagtcaaagcggaaaatatacatggtacccaaaatcaaggagactgccagagaccagcaggggatctaagggatttaccactgggttagcacagacactacacttgaagatttcctagcggctgctgctgctgtttccatgataagaattcagtgagacaaagaacctgccaagctcattaaccgagtagcaggaagagctactgtgtagcctctggtgttccccaactgactcagccctgcagatgggacatcctgtaggtcatgtgaatatcaagttactgagggatgttctcaggacaagcctagcataggcaccaggtgggaaagggtgtcaaaaaattataccttctgtctgctaagcagaaaaacttaattgggatcaatttagctcactccagagttctcattttattctcccagtattcatccagaaaacaagtttcttgatgatatgggaagatcacatttccacagtgattcatttgcaggtaagcaaatgtcctttacccaatttttatcctagctcaaagttggcnnnnnnnnnnngaggtcataatagcttccatttttatttcctacttcctgagacacacacacttatgtgtacatacatttcatacacaattagaatacatctggaacacatgagtgaatacaccagtgtcatgaaatatttccagagcttaggattctagcaccttgtcccttgcccaatttaaaatccctgattatttttggccccaagacaatagtctcacaaagcatcactttctaacaatgagcagccagtttctaagactcagacatggaaacatattccataccgtcagccttttgcaaagcataacctcagatgactgtatcatcctggtccctccttgagtaaatatgagagactacaacacagagaaaaatcaaagttgccccccaagctgaacaactaagagcttaatttaaggctgaatttcaaacaagtcagctctttagaccaaaatgacatctgccagtccctcatgttttcaggacatacggacaacaaacaggattggcatcctgccaggtagaagactcagatccaagccttcttgttgccaaacttagaagaatcattctgctttgttaaagatactcccctaaaaaaatacattgcagtttctgggagaatactccatgaggtagaaaaatacagcaccttgggagagtctcacaagagctttcccaagtgcaaggcataatctgacacacaacagggaggaagaaagctgggtgggtccacacagtcccaggagaaaagggtacttgagagctgtggggcaggaggaggctctggggagaactcagggtcgcatcaggtagatcacattcccccagggctagattgttagctgagtcaggtccaagggtggttgcagggaaacaaaggaacgggtcgcactcgctctcaggaaggaccattcagactccattctcatctgaagancaagggtggcccacaccagtctggagtgaaatcagtttctaggaggcagggaaaggaggagtctgatcagtacacaggaagaaggcaaagggcaacagaaggagtncagccacaaacctggaaggtggggaggaaaganccagaaatcactatgaaatagac

SEQ ID NO: 440826 - DNA, 1039 bp, Homo Sapiens
tgcctgctgtttctcaaaaccaagacctgggggaagtggagaaagatggatgttttggaaatgaatgggttcaagacccacaagagtgattgcaggtttcagatagtgcctctcccaccctagtcccgacctcctgaggaacccttcaggacatgggcctgcagagactagggtgagcagggtatggcaccaagcacccattgaccagttggtgccacgcatccagtgactggaaagagacaacgtagactgaactcaccttacaagggatgaacacgggggggtcccttttggtccccttgagtgagaggtatcaggaatccatgatctaagacaataaatatttagcatctgtgtcctttcagagacagggaccagagacaaatctcttcctaaacatgctcctgtggtttcatgattcttaggagtccaccaaacccctccagcaatgtcaactctgcctgggatgaaacccaccaggagccagcagggtgaggcagaggcagaggcagacttattccagtgtaaagctgcaaggccctctctaaggagttcccagtcccactgctgcccatcaagagcagcgcaaagtgctcagcagaggggccaggctgggtgagggaggccctgtgtacacaggctcctgcacaagcaggaatccaggtgagaagcaaggaccactctggggagatctgccaggagagactgccagagttgggcagagggtgggatgtgagcagatgctgaggtcagagggaccaacagacctccacgagaacaacttcacgaaggctagaacctttatgatacttcccacagcagagctcagggatattcaaagggagctgttaggtcctataatcttgataaggatttgtctttttaccctgagagaggaacaggtcctacaatcaggtaggggcattagggtgtgccctggctttctatgctatgagaaaagaaggaaggttattttcttaccctgctaccagactgttgtcacaaggtggaccaccggaaggaatagcaactggttgtg

SEQ ID NO: 440827 - DNA, 776 bp, Homo Sapiens
aaggcttcattaataatatttattttaaagatcaacttttattgtaacaaatataaagtcatcaatgttttacaaattgtcaaaaatgctttaagtacaaaaaaatacattagtaaaatgaaagttatgttgtattatttggtatacacttaatactgccaacatgcataacatatgccagaaaagctcatgcattattggaagagaaaagaaatgtgatgtaactgctatattgtctgattataaattcattgcttcagtcagttttctttcttcagggataccatttacctgtagtctgctgttggggaatctgagtctgatgtggcaagttctgctgcgtttgcatcaatggcatgtttgtgctatcatagttgtctgtgtgtaaaggaggtatgatttccccagtcacagggtggaacacaggaagcgttgacaggggccatgctatctctctattcttggacatgtctcgaagctccttggtagatttctgaatagcactgtgatggaccagttggatgacgccttcccgtcggcagcacatgatataagcaagtattagaaaaaggaccagtgccactgccgagggcacagccagtgttattaggaaattcggtgtaatagtctctgctttttcaagaatcagaagggggtttgtattctccaccatcaggtaaaatcccctttccacgaatcacttcctgataaggtgacacttggcttgttttatcacccatgaaattttgcaccatcaatgtaaaatgaatacgaaa

SEQ ID NO: 440828 - DNA, 440 bp, Homo Sapiens
cattaataatatttattttaaagatcaacttttattgtaacaaatataaagtcatcaatgttttacaaattgtcaaaaatgctttaagtacaaaaaaatacattagtaaaatgaaagttatgttgtattatttggtatacacttaatactgccaacatgcataacatatgccagaaaagctcatgcattattggaagagaaaagaaatgtgatgtaactgctatattgtctgattataaattcattgcttcagtcagttttctttcttcagggataccatttacctcaaatctttgaaaagttgtcaaacgaaaatctcctgtagtctgctgttggggaatctgagtctgatgtggcaagttctgctgcgtttgcatcaatggcatgtttgtgctatcatagttgtctgtgtgtaaaggaggtatgatttccccagtcac

SEQ ID NO: 440829 - DNA, 1042 bp, Homo Sapiens
aaggagaatttcttactatttattctttagttaattgaaactagtcaggaaaaaatggtgccaattccccccaaacaacacatggatgtttttgcttcttgacccacttagagtcccaaaaggacaaaaaatacatggaccaatattagttcacgaaacatgttttaaagaacagggaatgaggtcttcatcccacttcagtaaggcttgggctgatgaagagagggtgtaattcagggtcctcgtcttgtcaatatgtacaagctgaacgcttgtttccgcaagcatgatagtaagtgggtagactgcctttattgttagcccctaatagaatcagtcagcacaatggaagaaattccaaagagggcagtgaagtgacaacagcttcagctcgtcatcgatgttatacagaaacacaaaaggaatccccggcctgtgatgaaggagaggccgttgctgtgtgttcaggacacctcagagcaggcacataaagtgctggagggtgacacagcctgtctggatgtcctcgggagggtgtgccatccaggaggcgacacccccatccagcacacggtcccttccacccgctgtcggtcctgctaaaggtacgaggctaaaaccggcctctccagaaaagaacgttcagtgtgtgctgaccacacttccctttgattttcccgagtattcaacaggagattcatttttaccaagaaaaattacccctaacaaccaggacagatgactcttttaacaagagagcccctacgaatattgatacaaatttaaataaaaatgtttagttcaacgtgttcgtcatggagtttcaaatcagcagatgccatgacaggaaaggagcacacagctgggcccttgcccgccgtgggtttcccgtgtccgcggcttcttcaaggaggggagagcagcttctctcttggagcgttctcagtttctcaacagatcttcacttgctaggcagccagaagcattagttcacccaagagtgagtgcttgggtacacaaggcagaatcttttgggagctgc

SEQ ID NO: 440830 - DNA, 895 bp, Homo Sapiens
agctgctgtatttttattaataccctaattaccataaatctaatttatcaagctgcttttaagataaactttaaaatgctttagagcagtttacaaattcttgccttgtttcccttttccttatctttcagtcttcatcctcccattgcattttctctgactctttcatatggatcttctttcaatttgtggaagaagcctatcttgttcctgcctcaggtccttgacacttgctgttcactctcttgggagactctttcccccatcttagtttttaaataccaggtggtcagactccttacctgccttccaccttcctttcattctcccactcctcgccttcatttctcagagtcctccgctctcttctttctattgctcttaacacaatttgtctgttttccgctaatctgtaaactctacaagagcacttaactattttgcatcccaccgaatattcggagtcagcacagaccccgtcataatagagtaggtaagcaatgcttacctgtccaatgaatgaatgaaacacccgattcatcccccaagccagcttaatacattagatgatcttatggactgaataagacatcccttccttttgaagaatatttttgcttttagcttcacatcaggcccaccccgaacggttcatcctaagataagcctggttgagagggaatgaacccacccttttagggtccttaaggggcaaccgggaacttttttaaataatgcccattcctcaggcctttttttctccattgccccaacacagagatatatcttggggggtttttgccccaagacacttttgtttttaaacaaatccttttcaggataattttctgcatcacccacctcaaagttttcgacacaggcttctctttatagg

SEQ ID NO: 440831 - DNA, 727 bp, Homo Sapiens
  misc_feature (215)..(232): n is a, c, g, or t
ttttgcccccacaaaagtcaaatgtctttattttatataaaaaaaatttgtacagttttagttcctatgtttaagaaaaaaatcctaaaattgccgtaatgtttagatccactgcaaactgtagaaacaagctttttatatattaaaaaaaatttacattttacaattttctacatgcatgcacaaggtctcagctctgtaaccccacccccccnnnnnnnnnnnnnnnnnntctagatccaacagtggaaaattctacatttacaatctcacttggaagggactcaaaaagccctcttccttttgcgcacggaagaacaaatcacaacaatcacacaccaggactgaatccatcagcagatactgccctgtgggaagggcagaggaaagagaagacagacggactgacagacaccacagaggaacaggggagttagcctgggaccaatggaggagaagtacgaaccctgggaaaaagacgtgtcagatgagaaagttccggagagtccgatgtctcatcgcaggtgttacatcatcagggtttgccattggaatactgagtggagatgggaaagagaaaagttaagggctgaaatgggaggggaatgggaagaaaaaatgagagacaggagggaaataagaaaaaacaaagagagctcaaagtccagtttaggagaaaggcccaatggggacagtggcagagtggcgaggtaggtgcaggaataag

SEQ ID NO: 440832 - DNA, 1841 bp, Homo Sapiens
  misc_feature (414)..(559): n is a, c, g, or t
  misc_feature (618)..(687): n is a, c, g, or t
  misc_feature (1505)..(1541): n is a, c, g, or t
  misc_feature (1683)..(1691): n is a, c, g, or t
ccgcccgtcgtggtgcctgtgctgttctgtgctgtgctcggcgctctcgttggggctgctctctctgttcgcctctcgccctcgtgcctcgcctcctggtcctctccgtctgcttgcttgctggttgtcttctgtgctcgcttcagcgcgtcgcggctcttgcttgcccgctctcgtgttcgtgcgcctctgcactctccttactctccgttctcgtccccaccctgcctctgccccggcctcccgcgggctgcgcctctgcccctctgtcttccttcgttctctccgcttgctcttccctggcgtctcctcctctcctcgcggctctctccgtcgcgtctctgtctccctgcttctcccgtaccgcgctctgcctggttttgtccttcctccgttatctcctgcgctgtctgnnnnnnnnnnnnnnnnnnnnnnnnnnnnnnnnnnnnnnnnnnnnnnnnnnnnnnnnnnnnnnnnnnnnnnnnnnnnnnnnnnnnnnnnnnnnnnnnnnnnnnnnnnnnnnnnnnnnnnnnnnnnnnnnnnnnnnnnnnnnnnnnnntccgcttgctttgttcgttgcttctccttgtttgcgtgtggtcctcgtgttttcttcgnnnnnnnnnnnnnnnnnnnnnnnnnnnnnnnnnnnnnnnnnnnnnnnnnnnnnnnnnnnnnnnnnnnnnntccttatctcctttgtagtgcttgtctgcttcttcttctgtttcttgtttgtgttcttttttgatgctctatatgtgtcgtatgtgtggctagcttcattctatgttttccgtagccacctgttgctgtgctctcttttttgttgtgtcgtcgtttggtaatatccagtagaagatccaggaaacaatattcacttgtggaatgtatccttctccacggcggtttcgtcctgagatcccctgcatgctgcgatatatccgatccatgtctccgggtaaacaggtgtccaggaactgatgaatggaagaatattacgcttgaatggaggaatgggaataattgatccagaggaataagactacaatggtgcacaaggccactttagagatagtaccactgggacagtggcagagtggcgagttagttgaaggactgaggcacagcagtccttgttgtggagggaggaaaaggcaagctgttccgaggtggtgaaaaaggaaggcctgctaggcacggtggggatgaaacgaggatgccatgagtcacacaatagacagtgcctggtgaggcccagcacacagcatgccctatggtgtcaagggggtaaggaggtgggcatacccctcacagcaggagaatgagcagatccagcgcatgatgggacaagacacagtggggaaactgctcagagggactgacgtcagctgcacaccccacagccagttcacagcatggagacaacttcccacaggggagaagcagaggacaaaacacatggccatatgtctgacaattcatcctgacagttttaaaaaacnnnnnnnnnnnnnnnnnnnnnnnnnnnnnnnnnnnnncatgaagaaaagacgaagatgaccagcagttctgaaagcggaaagaccagaatgctaccacgttctcctaggcacatgcccttgagtgcgttagagaatgtggaggaaaaacaaatctttttttcaggaaaacggggaatgnnnnnnnnntcacagtgattcatacacatagtgacagcgatcattgataataaacactctcccagcccctcaacctaggccaacaagctaacatacccaatcccgacgcgtgggatcgacagatatcccgagaattccggaccggtaccagcctgcttt

SEQ ID NO: 440833 - DNA, 1872 bp, Homo Sapiens
  misc_feature (471)..(500): n is a, c, g, or t
cgaccacaggcgtccccgggtgaaaaaaaagtgttccgcacaatcgcactaacctccgtgtgagccccaaagtttgcgtctcaagccgacgcaggtcattactggccccccgtgggggttttaccacaccccgtaaagaaccaccgctgaagaaggtgtttaataaggttccccctccagaggcctctttaaaaatctctcctgttagagggagagtgttggccccaactgatgggtcccccgccccgaagtgtagggttcctcttcccccaggattccccagctagggcagttgtttccgcccctgtccagcaccctttggttaaacgcgcggccccgtgtgcttctggccttatttaatacggctcccctcttaggggcccccttgtgtatccagaaaagtcgggttacgccgtaaaaactttgggccccctcccgggggaatattttctttgtgcggcgccccccccnnnnnnnnnnnnnnnnnnnnnnnnnnnnnnaatagaacaagaagtttattactcccactcagtagttcctgggggctttgatgttaagtcatacataattcgagaaataccaggaatcttcttaatctcagtgaccatctttaataccacctctacagggatctcattgccaggtgttgcaggtataccagtcatgaagtcactagtaataaaggttcgaataaccacagatctctggcatgaaggctgcttttgaagtgggtcccgatcaaaatgtaatggtgtcaaaatcaccggcatctggctgattttcccagcatacccagactccctgagaatgttatgggcctcaaaatcagcttggcgtaaagtactgagcacccctgttgtcaagaaagtgggagtaacatctgtaggaggttctttaactggtgggccaaatatataaacaactctgttaacgttgtgacacatgcgaggtataagcctagccagaaaaataagtgattcccagtcaggttcatctttactggagattccacacacgtaactgtaggaacgacagtcaccctgcacacctacagttttaattggcagcaagaaggcattcagtgaatgcagactggtaatttgcatcagcttctcctgatcctcttctgttgtgcaggctttgactctctgtaatagggtatgtggctttttaacacttgcagaaaaatcagctactattttcaaaatattgttggttttcaggaaagtccttacaaatataaggttcttcaagcacatattactctgattgccaggccaggacctggaaatggatgcctggaaactaactcttctggaagtccaagttctctgcccaaaattctcacttcatctttatgaaaatctttcagaggttctattacttttccctcctctctcaactttctgatgagctctgtgtcattgtgatgggttttgatgagttcagctttgccacttgcaacaagggatgcactttcaattagatcaggccgtaaagtaccttgggcaaggaaaacctcctctggtttcaagttcatttctccaattacttcattggcaatcttaacgaaagtatccccagtgatttttcttttctcttcaggacttgtggtcatatttaacgttttgctaattcttttccgtggggttctatcttcatctgatattggtagggttgttgttccattgtagaaagaatgagcagcatttatcactggaggaaaggggagaagcgttttaaattggtataacatgttttttaatcaaaaataacaagtcaaaatacagaaagaaaagctatttctttcccagtctgaagagcagtcctttgatctcccctaaatctccctacaaatttcaataaactatc

SEQ ID NO: 440834 - DNA, 783 bp, Homo Sapiens
  misc_feature (13)..(13): n is a, c, g, or t
  misc_feature (19)..(19): n is a, c, g, or t
  misc_feature (21)..(21): n is a, c, g, or t
  misc_feature (23)..(23): n is a, c, g, or t
  misc_feature (35)..(35): n is a, c, g, or t
  misc_feature (43)..(43): n is a, c, g, or t
  misc_feature (52)..(52): n is a, c, g, or t
  misc_feature (54)..(54): n is a, c, g, or t
  misc_feature (58)..(58): n is a, c, g, or t
  misc_feature (61)..(61): n is a, c, g, or t
  misc_feature (67)..(67): n is a, c, g, or t
  misc_feature (75)..(75): n is a, c, g, or t
  misc_feature (96)..(96): n is a, c, g, or t
  misc_feature (99)..(99): n is a, c, g, or t
  misc_feature (113)..(113): n is a, c, g, or t
  misc_feature (116)..(116): n is a, c, g, or t
  misc_feature (131)..(131): n is a, c, g, or t
  misc_feature (144)..(144): n is a, c, g, or t
  misc_feature (163)..(163): n is a, c, g, or t
  misc_feature (166)..(168): n is a, c, g, or t
  misc_feature (196)..(196): n is a, c, g, or t
  misc_feature (231)..(538): n is a, c, g, or t
tgtgacaacatcntccccntntnacagataagganacagaagnacaggcaantnaacnctntgtganccacgctnttaataagggctgaaacctgnggngtctcagactcctnctncataaagccaaactntgatgcttaagtntttttaatgctaccaaatnagnnnaaaagagaatatgcacatttacacattntcatattctgattgtactcttctttactaatattnnnnnnnnnnnnnnnnnnnnnnnnnnnnnnnnnnnnnnnnnnnnnnnnnnnnnnnnnnnnnnnnnnnnnnnnnnnnnnnnnnnnnnnnnnnnnnnnnnnnnnnnnnnnnnnnnnnnnnnnnnnnnnnnnnnnnnnnnnnnnnnnnnnnnnnnnnnnnnnnnnnnnnnnnnnnnnnnnnnnnnnnnnnnnnnnnnnnnnnnnnnnnnnnnnnnnnnnnnnnnnnnnnnnnnnnnnnnnnnnnnnnnnnnnnnnnnnnnnnnnnnnnnnnnnnnnnnnnnnnnnnnnnnnnnnnnnnnnnnnnnnnnnnnggtttcagtgtcaaactctgaatttgaatgacaatgtcaaactgagaaacaggatgaaatgcacaaaagtaatgtgtaaattgagtagctgacatcagttgacagataaaagtaatgacagtatataagcgtcaggtgaatgttcaaggaataggaaacaacattgtcaggacgtctgtttggaaaaaaacccttaaaagtaaaattacatacatcagattttatctagatattaaactgatgct

SEQ ID NO: 440835 - DNA, 1808 bp, Homo Sapiens
ttaacgtctctgccattttagtgtcatgttactgaaacttcccttccccagtggctcagttcagagccttctgtgtgaagtctttaaacaacggtgtttcagggtcctcaacagcaataagatgggacacctctcagggttctgcttgctcctatttcagtctcttctcactcaggagagtccatgcttcctactggttggcagtttcaggctgacccaacatgggtaaaacaagagcacctgccattttcaagagaggcaaacaggcttcacccaggatacctggggctttgggggtcttccaagaagccctgtccacctggaaagctcttccttccagactggctctcttccacttgcagtccctcctcctcggctcaggactgtactggctggccccaggctctggccacagcagtccctagggcaccagaagagcacatagcctgggcccaaactgcagcagttatggctccggcttccagatggagaggtggagccctgaggatcccagaccctgcctggcttcagtcggtacacagcagcagtttccctgagatcttcaggtcatcaaagggcaaaaggacaagggattcctcagtcaggtcctggggcgtctcatcctccacattccgcagcagggagtcagcacccgccttgcacagagtggatgagatgcccatgagaccccggccagctgccaggtgcaggggtgtgcacccgttcagcatgcgggcatctacctgggcaccagcctggagcaggaactgtaccaggccccgctcttgggtttccacagccaggtgcagcgctgtcttaccactggtgccctcctgcacatcaatgtcagctccattccgaagcagcaattccatgagtggttggttcttctgaagggtggcaatgtggagacaagccagaccttgccagttttgcagctggaggtccagagagtgagatgttcctctgcctggctctggccgcccttccagcaggcagcgggcacaggccaagtgctggcgctggcaggccacatgaagggctgtgtcaccatgccggtcctgtagtgcccggctggcccccttcagcaccagtgcccgaactgcgcccggttggtccagatgtacagccagatggagtgctgtctggtaaaggttattttgaatgtccaggacctcctggggcagcaaagccaggcaacagagcagcaccgctggggcctcatgaatcactgccaggtggaccagcgtgtctccgtcctcggagatgtaagtgagtgcttccagctgctgagggctcagcgcccccacgtgggggagtggcaggcgtggggccgggtcctcagcctcggggccccccagcaaggacagggtgtaggtgagcgaggaggagccataggtggaatcagcccgctccccatccgcgtcttccttctcctgtggttccttgacgggtcccggaggatgggtgcagggctgggggctgccgtccgagggcccggaggctggagccgaggtggactcgggtagggagcgcagagagcgcagagactcaatgccagagtcgtactggctctcctccgcctcgtccggccccttccgcgcctccgacatgcccgcggctctggccggccggggcccggtctgagcaggatccggctccaggctccgccgcgccgcctttccgggttgcgggtccgcttggcagagcgggcgcccggcccgcggcggcctccttcccgggctgtggggctccgaggggccggcgcgcagcgaggacaaggttcggaatcccgagaattccggacc

SEQ ID NO: 440836 - DNA, 1289 bp, Homo Sapiens
  misc_feature (992)..(1081): n is a, c, g, or t
gccagtactgaatccaaccagcatttcttttgaagctgtgtcttatggaagacgagatgttcaagcacgttattcaactgaggattgttattctgaacacaagaccaagcagcaacacagtgccagagcaggtggttaatttcatatcctcccatatcagaatctgtgttctcatatcttttcttatcttccacaggtctaaaaatggattcagaacggagttctcttttacctataatttccgaggctttcaggatgaattgcacatttgaaaagatgtttggatacttgtgatatgatgctccagagaaagaaagtgcgtataaatatggttgaagcctaagtaaatgttgtttaaaactttctagatgaccatgcaggaaaaatataaaaagtcgtaagaagaccaaatagccaatctttgctagctttatttcaactgaatataaatatgttttgagggatgcatcacaacacagtctgtataaaaccgattccgcaacaaaaaataaggcaggcagatgatcataatcaaaggaagcatggtccagagatgcataaagcatatttaaagattcatcttggatttcccctttgcattgagccagatatattacttcagtccatgcagcaggaagatgcacatgccttccagagcccagggttttgagacccaattttctcttacatctgagaatgatttttctagctagttccaacaattcttccttctctttggaattttgtgtttgattgaatctcaagatgaattcttttgtgattgaaaatgttggccttgatttatgacccctttctccacttaaatgttgaaaatttaatttccagagctcttcatgataaggggaagatatgcctccacatgtattaatcataggtgatttgttaacaggcatattcataaatcataaattctgtaaaatgagaatggtatttcctcatagagttccaggcagggcgcagtggctcactcnnnnnnnnnnnnnnnnnnnnnnnnnnnnnnnnnnnnnnnnnnnnnnnnnnnnnnnnnnnnnnnnnnnnnnnnnnnnnnnnnnnnnnnnnngggtaggctccacccgcgggttatcggctccctccaagaagcatctttgaactcctcccatgcaggccctattcctacaccagttctctttctggaatctctttggtactgtgtttcattaatcccacaaccatattcccacctattccctaacgacaacaaacttttaaggtccaggttaccgccgcgtctccctagccaccccgct

SEQ ID NO: 440837 - DNA, 877 bp, Homo Sapiens
  misc_feature (654)..(654): n is a, c, g, or t
  misc_feature (772)..(772): n is a, c, g, or t
  misc_feature (859)..(859): n is a, c, g, or t
agaggatcggctaagagtggttcctcgcagcttaacgggaggcacttttcacactctgtgtttaaatcagaagttgaattcatgaacacatatgatttagatagaagtcatgggatgcagcagttcttcaacgaaaaccaggagatctgacacatcactgagagctgcgttgatcatccagaactggtaccgaggttacaaagcgtcgactgaaggccagacaacactatgccctcaccatcttccagtccatcgaatatagctgatgaacaaggccaaatgcagttatccaccttcttttccttcatgttggaaaactacacacatatacataaggaagagctagaattaagaaatcagtctcttgaaagcgaacaggacatgagggatagatgggattatgtggactcgatagatgtcccagactcctataatggtcctcgagctacaatttcctcatcacttgtacggatattgatttacttcttgaggccttcaaggaacaacagatacttcatgcccattatgtcttagaggtgctatttgacaccaagaaagtcctgaagcaaatgccgaatttcactcacatacaaacttcatccctccaaagaggtaacaatctgtggtgatttgcatgggaaactggatgatctntttttgatcttctacaagaatggtctcccctcagagaggaacccgtatgtttttaatggtgactttgtagatcgaggaacgaattccatagagatcctaatgatcctgtgtgtgagtnttcttgtctaccccaatgacctgcacttgaacagagggaaccacgaagattttaatgatgaatctgaggtatggcttcacgaaaganattttgcataaatataag

SEQ ID NO: 440838 - DNA, 886 bp, Homo Sapiens
  misc_feature (502)..(502): n is a, c, g, or t
  misc_feature (685)..(743): n is a, c, g, or t
  misc_feature (787)..(787): n is a, c, g, or t
  misc_feature (839)..(839): n is a, c, g, or t
  misc_feature (845)..(845): n is a, c, g, or t
  misc_feature (852)..(852): n is a, c, g, or t
  misc_feature (855)..(855): n is a, c, g, or t
  misc_feature (857)..(857): n is a, c, g, or t
  misc_feature (868)..(869): n is a, c, g, or t
  misc_feature (877)..(877): n is a, c, g, or t
aggatccttaattaaattaatctcctccccccgtgcatcttcttctcagctgcctttccgtcgttcgattcccacttccttcagaagggcgcactcttccctctgaacccctcgccgggcgtaagtgtcaggaggcggcggacgcggagattgcctcgggagcaggcgatgcgcgccgctgctccgcgcgctgcccgggggaggctggcgctagcgggcgagccggccggggctgaatggagggaaggggcgcctggattccatggggtctgcttctgtcttgaaaggaggttgggccggcgaagtggcctccctagtccccgcacacaaagctaaatggatttacctagtggattcgcggtggatgtctgtcatgtagaagtgaggaccttccaggaggagctttaaacaatttctcggccccccacccgccggcacgcactctcgcccgaaactctttgggagtatctctcgagaacctggagccctggaaatctgggancagccacccgctccgcgcttgctgttcccggggctgcctttccggacaagcccctctccagctgcattcgcctcggctatgtttcggattgtttggggtgctaggcacggcggactccaggaccccgagaagactgtccgaagaggggagaggatgggtgccctggcgcggtgaggcggccgnnnnnnnnnnnnnnnnnnnnnnnnnnnnnnnnnnnnnnnnnnnnnnnnnnnnnnnnnnnaaactttgcctcccgcggcggctgcccctcggcgggcgcccgcnatggtaccagaggatgctccggtgcggcgccgagctgggctcgcccgggggnggcggncgcggcngcngncggcggcgcgnngggggggngctggccct

SEQ ID NO: 440839 - DNA, 1380 bp, Homo Sapiens
  misc_feature (161)..(161): n is a, c, g, or t
  misc_feature (300)..(300): n is a, c, g, or t
  misc_feature (410)..(410): n is a, c, g, or t
  misc_feature (1301)..(1302): n is a, c, g, or t
  misc_feature (1352)..(1352): n is a, c, g, or t
cctaacgaacctggtgattgtaggtacgaaacgtgggaggagggtaaatagtgtgggatctccaatgcacaggggcggggtacggcgcggatcggtaggccagggacagtaacgggtgtcgtgtactaccgcgcataggcaagaataaccagagtattatngatgtaatataaggagtgtcgatacttgcacgtaaataggtagtcctaacatagatagccaatagaagagcgagagggggggttaaggggacgacggatagttaccggactagtatataataataagcactgagcacgngtcttcagagaccaaaatgagaagaaggtacgagaggatgggtatagggagataaatatgagacgaggaagcgagagagcgtcgggtaagggcaatagatcgacagcgtngtgcacattactcacactgtgagggggaggtgaacaagaagggggagaacgctaaaaaacggagagttgtaagaaattaggatgtagcgatcaggtcgctacatagctgtaataggactaaaatggaacaacaatacggatgagacggggggagaggggtaaaaaactttcggacgtagtgaaagcagtactactagaggcgaaaaataataagtaaaatgtgaggtgttgctgtttgtttactggtggtgattatcggggggacaagggggaaggggaggaaagtgggtggtaaggaaaacaagactcctgcgtaaataccggatgtagcaacagggactcaagaatagttggagatggaagtatgtggccaaaaaccgaggcagtagaattggagggaaggtcggccgtgtatatcggcagtttatcaggagcgcttaacaatgatcgttgtctttcatccatgatggaaaagagatgccctggctgaatatctgaaataacactgatctgagagcatcatagttatctctccttacttgtcgaacacatttaatgtgatgccgccaaaatagctcctcataagccttcctcatcagcttgttacggggtgtctctcctttccattctcttgcacaataactgagtaaatcaacctctgcctccacactgaggttccttttgaattttctctgcagatatccaatccaccatttcagcttgtgccctgaatataaatgtagcctccggaagtagcagatggcagccaccagaaatgaaactgccaacatcacaaagccttttgccattctccagacagtgtctaaggcttggcttgtagctagcatccaggagtgaacttggtcacttcctgcggcgggagcgccaganncgctcccgctcccttgcccgcgtggggctccttgtcgccgccatgccggncgcgctgcggacgggcgctgggcctcgg

SEQ ID NO: 440840 - DNA, 1082 bp, Homo Sapiens
  misc_feature (13)..(13): n is a, c, g, or t
  misc_feature (23)..(23): n is a, c, g, or t
  misc_feature (28)..(29): n is a, c, g, or t
  misc_feature (33)..(33): n is a, c, g, or t
  misc_feature (36)..(36): n is a, c, g, or t
  misc_feature (41)..(41): n is a, c, g, or t
  misc_feature (45)..(46): n is a, c, g, or t
  misc_feature (51)..(52): n is a, c, g, or t
  misc_feature (58)..(58): n is a, c, g, or t
  misc_feature (61)..(61): n is a, c, g, or t
  misc_feature (63)..(63): n is a, c, g, or t
  misc_feature (70)..(71): n is a, c, g, or t
  misc_feature (85)..(85): n is a, c, g, or t
  misc_feature (114)..(114): n is a, c, g, or t
  misc_feature (126)..(126): n is a, c, g, or t
  misc_feature (250)..(250): n is a, c, g, or t
  misc_feature (288)..(342): n is a, c, g, or t
  misc_feature (388)..(411): n is a, c, g, or t
tcaattaaacttnccctatttanttatnntgtntgngttancccnnatagnnagtaanaananacttaannaccctcccagtggnaaatttacctcctcgcccctagaggattnccgagagaaatncctaaagcccacagagttcttttttccaaactctttttccagcctctaaagggctgcttggtgggttcacggtctcccaacctaaaactaattgtgaaggctccaaacagaaaaattctggacnttaaaaccaatgcgtggctggccacagtggttgacacnnnnnnnnnnnnnnnnnnnnnnnnnnnnnnnnnnnnnnnnnnnnnnnnnnnnnnntaacatagtgattgagacctgggtaacatagtgacaccctgtctcnnnnnnnnnnnnnnnnnnnnnnnntattagctgggtatggtggcacgtgcctatagtcccagacactctggaggttgaggtgggaggatcgcattgaggccaggaggtctgagggccatagtgagcccatgactgtcactgtgctccagcctgggtggcagttagaaccctgcctcaaaaaaccccacaaaaccaaaccaaggtatactctgactccaaccaggatcccctccgtaaactcagctttccctctggcggtgacccttgttctgcaaaggaagccagggtgaaggggagggaatctcagtttaactcactcacagagggtggcttccctaatcccaagtgggttttgattgagtcctgttttagctccctctctctctccagagctcattgggctttttgttgcttagttagatgagccatagacaaggagtttgagacctgggttttagcaactgctctgctaaaactggctgatcttgtggaagataaacctcattgagtcttagtttgtgctttttttaaagtgagatatttagttagactagtgattttcaaactctttttcctagtagcaagactctttgtacgaagaaaatcttatctggatgcccaacccagacaagagaggttaagagtcattctggttgactttgaaggtggactgtcttttctcccattgtggccat

SEQ ID NO: 440841 - DNA, 3136 bp, Homo Sapiens
  misc_feature (618)..(629): n is a, c, g, or t
tttttcacgtttccaattgagttttattctagaacaaatggttttacaacaaagctgatcttaaatagtacatttccccgctgataacagcgccatcttccttcgacccccagaccaagggatcaaagctactgctcaattgagtttgacatcagctaccgacttttaaggaatctagaacaaagttctggagccaggccagaagtggtaaaagattcagttagccccttcctctgtgctgtgctgacagggagggagccagtgactggacaatctatgaccccaagtttgtggaacgtggggcttcagctgagggtggggtagtgtgatttcagcagtgtctccacctccctgacccctgcgctgctttgctctgttgtcacctcccgcacagtgtcgggacactgaccggaagccaaacctgtgcctggtggccacagacaagacacacggatatccgtgaaccttgctgctgtgccctcaccgaggccagcgccccacctgctggaacagccaagccggagcagttctgtctgggccacagctgctcagcctgtggactcaggtgttatcctgaagaagttacaacaaattctcaaagaataaacaatgggcttnnnnnnnnnnnngggggataaacagaaactcacagtagctgtggctcaccatgtgccaggcactgtgccaagcacttcacatttagtgctcattacaaccctatgaggtaggccgtaccactatccccactttacagatgaggaaaaaacaggctcaagagtgaagtccctcgcttgcttagtatctcaaagctaagctgcaagcaaagatggggctccaaggtctgtgtgacctgagctcttggttatccaatacttcaaaactgtcacttaggaaagaagagaacatttttagaaataggagaaaacccaacagccacagtgattgtcaaagagctgagggggcatcagaccaggttcgggggcaccagaccaggttcagggccactgcgtaactgccaatgccctgccccagccccaggagacacgcagactccactgccctagacgagtggccctgctgttaataaataaataaaggtcaggcacaatcctacacaaaggccccagaattcaaaccactgtcttgtttctcagacttttgcttaagagcccagtactgggtggactggggaaatccctgatttgggtcaaaataaatatgccagttctcgtccaaagcttacctgccttccctcctccctgagctgtgcctggggctttctgttgccaagaaatgttaaggagccaactccccacgagaagcctgtgggctctgctattccactgtagcctagcagggagctgacaggccaggcacggagttcctacaatggctgtagccagagttccaggtcagggaggtggggaagaaatgcctcctttaggacttaactcctctttaacttcagggcatgtttattctgaacccaaatgagtggaggaagaggtaggcaacaaaaggaagagaactttacccccaagtcattgagttggggtaagggagctcccaggatattgacacccccacccaccatccccagagaggatgatatgatccctttcattagcacagcatgatgactcaggagatctggggggtggggaaggccgcggcaacctgggcagtctgttggcacattccctactcctgctgggccctagtagatggtccacctgacatctccatggagttctgtaaagtgccattgagctaataccacaggagtcaggagaaagttatcctacagccctggagagagagagggctatgctgtgtgcagagggtgtcaaggttacagatgacccctactcctctggtccctggggctggctcactgcatcctgccccaccctgcccaggaaggagtgcccgctgctctgcctggcccccacttcctaccggccacaccggaagcccagtccagggagccccgcccccttctcgattgccttctgtcctgtgcctccctggctcctcctctgctgccgtgggccaggtcatcgggccagtactggtcctccatgtactgttccatgtctgtgctgctgtcaggttctctgtcctcggggcaggtccagaggctgcgggcctcctgctgttcccactgcacctccaccagccggtagagctccatggctgtcgtggcatcttctactgatgagtgcccgtgctggcccacctggatcttcttgtgcagcagctgcagggccaggtcctttagagagacccgggcccgggtgtggaggccgggctcgctgaggaagtttgggacataggtggtatcccgggtctggctccgagggtggacatacttgagcgcctggaagtcgttgtgcagcgcgtgccccaccaccaccttgcccttcaggagcttaaggatctctttctgggccacctggaaggggacagccttgcgcatgtgctgccgagtgatgccactccagcgggtacggtagtcagcgatgggcatctcaggcctgatgtacttgtcatagaggacatcgccatggtagctcacaatggaacagcgggccagctcgcttacccgccctcggggtcccgtgcccaccatctcacagtcgatagccacacacttgctgggcaagggccctgaggctttcccgggagcaggccttctgctgcatggggcactgccagatccagccctcagacactgcttcccactgctggcagcttcagttgctgtcgctgccccgaaaggggtgggcagtggggaggaccctggttctggaggcatgctcagcagcccctgctcctgcagcaaggccttccgggccatgaaccgctggtgctgtcggctccttctcttgtgcctcttccgaagcacatccttggcatttgggatggtgagggaagggcacaggcactgagcagactcaggggcctcccggggtaccattccagtcagctcactgcttggggcaagggaagcctggggagtaatcttccaatggggcagcagcctgaagccccgcgtgtctcttccggtctgcacgtggcgtccggaaagccggcagctcccacatgcccgggcaagcccggctccgactccgct

SEQ ID NO: 440842 - DNA, 1119 bp, Homo Sapiens
  misc_feature (160)..(184): n is a, c, g, or t
  misc_feature (282)..(282): n is a, c, g, or t
gggaaccgttcttgttcgggcgggggggagcaagtttatttgggccccagtgctgggttccccccaggtagggtttgcacattttgggggctggttgccaggttttttgggttcttcggagcggaggtccagaaaggatggggggccctcccgggtggtnnnnnnnnnnnnnnnnnnnnnnnnnggaggaaggttccatgggctttggtgggatttttttagtgaggaggggcccgggatgggcccaccgggattgttttttgtgaaggcaggtgcagggcncaggtcctttagagaggccccgggcccggggttgggaggcccgggttcgctgaggaagtttggggacataggtggtatccccggtctggctccgaggggtggacatacttgagcggcttggaagtcgttgtgcagaggcgtgccccaccaccaccttgcctttcagggagcttaaggatctctttctgggccacctggaaggggacagccttgcgcatgtgctgccgagtgatgccactccagcgggtacggtagtcagcgatgggcatcgtcaggcctgatgtacttgttcatagaggacatcggccatggtagctcacaatggaaccagcgggccagctcgcttaccccgccctcggggtcccgtgcccaccatctcacagtcgatagccacacacttgctgggcaagggccctgaggctttcccgggagcaggccttctgctgcatggggcactgccagatccagccctcagacactgcttcccactgctggcagcttcagttgctgtcgctgccccgaaaggggtgggcagtggggaggaccctggctctggaggcatgctcagcagcccctgctcctgcagcaaggccttccgggccatgaaccgctggtgctgtcggctccttctcttgtgcctcttccgaagcacatccttggcatttgggatggtgagggaagggcacaggcactgagcagactcaggggcctcccggggtaccattccagtcagctcactgcttggggcaagggaagcctggggagtaatcttccaatggggcagcagcctgaagccccgcgttccctcgtgccgaattcgccacccaggcctcgctc

SEQ ID NO: 440843 - DNA, 923 bp, Homo Sapiens
  misc_feature (731)..(731): n is a, c, g, or t
  misc_feature (744)..(744): n is a, c, g, or t
  misc_feature (807)..(807): n is a, c, g, or t
  misc_feature (820)..(820): n is a, c, g, or t
  misc_feature (882)..(882): n is a, c, g, or t
tgtctgtccgccgcttcttttggtgggcccgctttatcgcaataacaccttcctcttcttcctcttcttctttctcaccacgcctgccatcatcatgaacactatcgacatgtacaacgtcacccgccccatcgagaagctgcagaacccaattgtgacccagttcttcccctctgtgatgctctggggcttcacagtgatactgcctctgattgtctacttctccgccttcctcgaggcccactggaccagatcaagtcagaatctggtcatggtgcacaagtgctacatctttctggtgttcatggtagtcattctgccctctatgggactgaccagtttggatgtctttctccgctggctctttgacatctactatctagagcaagcatccatcaggttccagtgtgtgttcctgccagacaacggcgccttctttgtcaactacgtgatcacggcagctttacttggcacaggcatggagctgctgcgtctggggtcactcttctgctacagcacccgcctcttcttctctagatcagagccagagagagtcaacatcagaaagaaccaggccatagacttccagtttgggcgtgagtatgcgtggatgatgaaacgtgttcagcgtggtgatggcgtacagcatcacttgccccatcattgtgcctttttggggtgctctacctgtgcatgaagcacttgacggatcgctataacatgtactactnctttgcaccaccnaaactgacgagcagatccccatggctggcgtctcccagccatctttgcgcactcttgggtctngtctggatgctgntcttctccatcctgcgggttgggggtctctcacgccatcaccatcttttccctgttcacctnctcatgccatggtgattgcccttgttggcattttctgggga

SEQ ID NO: 440844 - DNA, 1006 bp, Homo Sapiens
ttttccaccacagggccccccctttaagggtcgccactgagcccccccgcggggttttctctccctaaaggggaaaaccacaggcgtttagggggccccaatggtgtcccactttaaccccttaaaggggggcccgcgccggccgcccgaaagcgaaaatgggtcttagggaaaagttttctttgaggggcccaagggcggccccgccaaggccacattagtttcggggtcggcgtgctgttgttgggggagtgccatttaatgggtttttgaccaatttctttctgggtcgtgtttttaaactcccccctccccaggtccagccatggtaaaaaaaaccccacggagttgggcagggccttattaggccagcccaaagccttcagagcactcctggatagccaacagtagcatgtggcggagcttctcaaagctctcataggcaggcagatccagctgattaaaacatgtgtgagctgaaggcaggcgatctgtggacctgtcatctcgatggatctgaaacttctgaatgccattcatgccttcgagggcagcaaagccttgcaggggtaccttggaagtacccgtgacaaactggaggaacttggcacggtcagcttgatcgaaagaacgcaatgctctccagaaccactggatctgaatagagttggactggtacttgtggtattcagtgttggatttcagatcatcgatgtcaatggtgggcagtcctgatataagcagctctaactcctgctcagtgaagatggaaatgaggcgctttggaatgatctcatagaagccttctaagaaagccgccaactgcttgcggatggctcctgtcattctcatctggcataccaggtgtacatactccttcttattctcctctgttaccaagatgttggccccattgggtttgaggtcacgaacttcacaaactccaaacttcttggacctcagtgctgaaggtgagatccctaacttccggggcgtaccagcctgc

SEQ ID NO: 440845 - DNA, 987 bp, Homo Sapiens
  misc_feature (974)..(974): n is a, c, g, or t
ttagcactatcaccgcatgctggtcatgggattcctctaggtcccttagacactccccaagcatgtcccacagctcgtccaaactcagctgttctctgagcagggtaacttcaggtggttctttcttccttgtccttctccccctgtggggttccaatcggaggcaatggattgagtatcttgagcactgggagatggctggtccacatccatgggtgattcctccctccggacagacgcctctgactggctagactcccgacgttgctgcttgttgctgtctccgcgccctttgaccctcacgtaccatttgtataatggcatcagcctcagcctccagctgccgaacagctgcctggatgctgctagctgagcctaaaccggaggaacctagcctgcctgtctgcttggctttcttgttagcccggcgcgtgtcgtcccggagctggatgatgacctgtagttccctcaagaagaacttctgggtagatgtcttggatgtcaacatggacatagaaggcagctggagctcccggcctcccaaaggtcgcttctgagatgccacaattaccacattctcagtcatgtcaaacctgctctgcattttgcccttcagcttggtggtctgtggctgctcctcaggcaggccatcaggagagagggtttcacattgggctcgccgctgctgctcgaggttgtattcccgcagctcggccagcagggtacctatgtgtttacaaagggtataacccagatggcgggctccattcagtagcagcttgagaacagtgtcccgggtcccagagtccccccgggagagctgcagtagtacgttggctgcatcctctaagccttcctcagaacaagagtgggatgtcaacacctctacagagagctgtagctggttttcagtgaggccagaggacaccatcttaaagtctgtactgctgctgcccccatcactcaccttcgcnggagatcccgaga

SEQ ID NO: 440846 - DNA, 962 bp, Homo Sapiens
aagtttgaaaaaaactccattgtgaaaagtgagttatgaagagtgctctttatttgaaacctccacaacacagacgccaatcttgtctcgcattgaatcattagctgtgcacatcaacacattccaagcacaaattaagaaatgcaaacagaacaaaaaaatctttatatatataattttttcccctatccaaaggtttcaagtctcaatgcagcaaatccttctgaacacagaatctgaggagcacactgttcaaacagttgggacagacaggtccctgcaaaggctactgcctttttaaaacacatggggtggggatcatggacggcatggaaaggggagagaaggtgaggaaacaggcggcggggagagaatgagaagaggaacaggtatgcgctggggaagatggggcagctgggacacacacggtgagttggtggatttcatttattggtttttgacaatttctttctggttctttttttaactcccccctccccaggtccaacaatggtaaaaaaaaccccacggagttgggcagggccttattaggccagcccaaagccttcagagcactcctggatagccaacagtagcatgtggcggagcttctcaaagctctcataggcaggcagatccagctgattaaaacatgtgtgagctgaaggcaggcgatctgtggacctgtcatctcgatggatctgaaacttctgaatgccattcatgccttcgagggcagcaaagccttgcaggggtaccttggaagtacccgtgacaaactggaggaacttggcacggtcagcttgatcgaaagaacgcaatgctctccagaaccactggatctgaatagagttggactggtacttgtggtattcagtgttggatttcagatcatcgatgtcaatggtgggcagtcctgatataagcagctctaacctcgtgccgaattcgccacccaggcc

SEQ ID NO: 440847 - DNA, 1743 bp, Homo Sapiens
cacccacccctggatctgaatagagttggactggtacttgtggtattcagtgttggatttcagatcatcgatgtcaatggtgggcagtcctgatataaagcagctctaactcctgctcagtgaagatggaaatgaggcgctttggaaatgatctcatagaagccttctaagaaagccgccaactgcttgcggatggctcctgtcattctcatctggcataccaggtgtacatactccttcttattctcctctgttaccaagatgttggccccattgggtttgaggtcacgaacttcacaaactccaaactcttggacctcagtgctgaaggtgaggtcatagcctagtgtggagacatcattttccagcagataaaccagaccttggtagaagtggtaatcttcactctccatatctgtatatctgactgacttgcccaagatgtgtttgtaaaaggatcgagtaaagtagcactccagaagacggttgtcatatacagctttggccacaatgcgtccgacaaacttgaagtagctgaggtggttggggttgcagtgggaagatggattgatggtgtaggtgactcgatcaccaggtgaggtacggaacaaggcatacatagggttaaacatctctcgagagatgatcatataccactcccgcaggagcccgccagcatcctgcccttcttctccttcaaatactatatacaatcgattcttcatttcttcgggggatttgcgatgcagctcacgataggagtcttcaaacacatggtcacgacggacatgcacagccatgtcttctttccggagcccctcatctaaacgctccagctcttggcggaaatatttgcgcttgacatcaaagtcgaggacacgaatgtagtctaccaggacagcaaaaggcccatcagcaaggtgggtcgtggactgccgtaggatctggtttaacacagtgcggtgagtctctgcaaagcgaaggaacttctgtgtgtcagggggcaggcttgaggagatgtgcatagatgagggctcccgggagaagaatgggtcaagggaggaaggcgtggctggggttaagggggcaggggagagtggaggaggctcgtccttgatgtgtgccagctggctctcacgggtgtctcggacaggaggcttgctctcccgctctgtggcatggaccagaaagaaggcctcgacagcaggctgtagcactagcaccgcatgctggtcatgggattcctctagttcctttagacactccccaagcatgtcccacagctcgtccaaactcagctgctcgctgagcaggggtaactcaggtggtctttcttccttttccttctccccctgtggggttccatcggaggcaatggattgagtatcttgagcactgggagatggctggtccacatccatgggtgattcctccctccggacagacgcctctgactggctagactccgacatttgtataatggcatcagcctcagcctccagctgccgaacagctgcctggattctgttagtctgagcctttaccggaggtactctagcctgcctgtctgtcttggctttctgtgttagcccggcgcgtgtcgtcccggagctggatgttgagctgtagtaccctcaagaagaacttctggctagatgtcttggatgctctacatggatcatagatgtgctactggacgctcccgtccaccgcaatagtcgcttctgagatgtctcactatta

SEQ ID NO: 440848 - DNA, 515 bp, Homo Sapiens
  misc_feature (22)..(22): n is a, c, g, or t
  misc_feature (53)..(53): n is a, c, g, or t
taacaactcccagaaaaaaggnttgtccataataacaactttggcccacaatngcgtcccgaacaaaacttgaaattacctgaggtggttggggttgccagtgggaaaaatggattgatggtgttaggtgactcggatcacccaggtgaggtacggaacaaggcatacatagggttaaacatctctcgagagatgatcatataccactcccgcaggagcccgcccagcatcctgcccttcttctccttcaaatactatatacaatcgattcttcatttcttcgggggatttgcgatgcagctcacgataggagtcttcaaacacatggtcacgacggacatgcacagccatgtcttctttccggagcccctcatctaaacgctccagctcttggcggaaatatttgcgcttgacatcaaagtcgaggacacgaatgtagtctaccaggacagcaaaaggcccatcagcaaggtgggtcgtggactgccgtaggatctggtttaacacagtgcggt

SEQ ID NO: 440849 - DNA, 722 bp, Homo Sapiens
  misc_feature (508)..(508): n is a, c, g, or t
  misc_feature (518)..(518): n is a, c, g, or t
  misc_feature (533)..(533): n is a, c, g, or t
  misc_feature (574)..(574): n is a, c, g, or t
  misc_feature (617)..(617): n is a, c, g, or t
  misc_feature (675)..(675): n is a, c, g, or t
tctggttattgcattaagactagactgtaaggcagcaagggcagaagcagacacctagtgaagaggctactgcaataaataggccataaatcacagcagcttggcctgcagttctcgggtggtattggtgggaagtacttcaattatgaacattgagccaactaccatttgctgattgcctcgatgtggagtgggaggaaataagccttatttgacttaacctgagcacctgggagaagggtattgccatttacagagataagaaatgactatatatggaatcagtttttgaggaaattgagatttggagtttggttagttttgagatgctccttatacatccaattggctgtgttgattcatgtgtctagagttcagggatgagactcatgctggagatttaaatttggaaattgtcagtgtttactgagatggaattacccggaaagcaggtgtagatggagaagaaaagaggctgagatttgaaagacaggagtccagaagacanaaagtgtaantcatttgggtaggancaaaactagtacagtgtagtattagatactatgtgaaaaantgtgcaagaaatgacctgagcctgtttattagttgtattttangtcgtggcttgtgtgtaggctgctgttctgaaaaatattctgaacaaaggcaaataancattttatttattcttattattcttattttaattttttgagatggaa

SEQ ID NO: 440850 - DNA, 1060 bp, Homo Sapiens
  misc_feature (170)..(170): n is a, c, g, or t
  misc_feature (452)..(452): n is a, c, g, or t
  misc_feature (490)..(490): n is a, c, g, or t
  misc_feature (532)..(533): n is a, c, g, or t
  misc_feature (681)..(681): n is a, c, g, or t
  misc_feature (698)..(698): n is a, c, g, or t
  misc_feature (712)..(712): n is a, c, g, or t
  misc_feature (729)..(729): n is a, c, g, or t
  misc_feature (764)..(765): n is a, c, g, or t
  misc_feature (773)..(773): n is a, c, g, or t
  misc_feature (776)..(776): n is a, c, g, or t
  misc_feature (781)..(781): n is a, c, g, or t
  misc_feature (798)..(798): n is a, c, g, or t
  misc_feature (810)..(810): n is a, c, g, or t
  misc_feature (817)..(817): n is a, c, g, or t
  misc_feature (831)..(831): n is a, c, g, or t
  misc_feature (836)..(836): n is a, c, g, or t
  misc_feature (844)..(844): n is a, c, g, or t
  misc_feature (852)..(852): n is a, c, g, or t
  misc_feature (864)..(864): n is a, c, g, or t
  misc_feature (867)..(868): n is a, c, g, or t
  misc_feature (873)..(874): n is a, c, g, or t
  misc_feature (876)..(876): n is a, c, g, or t
  misc_feature (887)..(887): n is a, c, g, or t
  misc_feature (890)..(890): n is a, c, g, or t
  misc_feature (894)..(894): n is a, c, g, or t
  misc_feature (900)..(900): n is a, c, g, or t
  misc_feature (903)..(903): n is a, c, g, or t
  misc_feature (910)..(910): n is a, c, g, or t
  misc_feature (914)..(915): n is a, c, g, or t
  misc_feature (917)..(917): n is a, c, g, or t
  misc_feature (924)..(924): n is a, c, g, or t
  misc_feature (937)..(937): n is a, c, g, or t
  misc_feature (939)..(939): n is a, c, g, or t
  misc_feature (943)..(943): n is a, c, g, or t
  misc_feature (945)..(946): n is a, c, g, or t
  misc_feature (966)..(966): n is a, c, g, or t
  misc_feature (968)..(968): n is a, c, g, or t
  misc_feature (971)..(971): n is a, c, g, or t
  misc_feature (976)..(976): n is a, c, g, or t
  misc_feature (1006)..(1007): n is a, c, g, or t
  misc_feature (1010)..(1010): n is a, c, g, or t
  misc_feature (1013)..(1014): n is a, c, g, or t
  misc_feature (1019)..(1019): n is a, c, g, or t
  misc_feature (1023)..(1023): n is a, c, g, or t
  misc_feature (1034)..(1034): n is a, c, g, or t
  misc_feature (1045)..(1045): n is a, c, g, or t
  misc_feature (1057)..(1057): n is a, c, g, or t
tttgtgccgtacagagatcaatatatataaagtgccggtacaacgctctgaaaaatagttttgtcccaaaatccagcgcctagggtgctccgggcctagcctttgccagtgaggtccaacggctgcaggaatgggggcagcggcagctcgtccagggcctcggggaagcngcctggagagatggcggtgaccagcacctgcatggcgcgcgcgaagagcgagggcggcgccaggcccgccagccactggaacttgtcctcacccagcagccgctgccagcgcggccggtcgcccaccagctcctggcgggccgagccggcggcacccacgggggtgtacagcgccaggaggtccagcagcagcaggcggcgctggcgcggctccccgggagctgaggcgggggctccggcggcggagggagtggccccggcgtcgcggcccagctggcgcanagcagctcgagaggcgtgaggccgccgccgtcccgcanaccgggcgaggcgccgtggcccagcagcaggaagaggcactnngggcgcgccactcacaggccacgtgcagcgacgtgccaccgccctccacgcggctgcagccacgccggtccagcacgcgcgcccgctcctcggccgggaagtcgcgcaaggtgcgcaggatgcggcgcagaatgcccacgcggttgtngcgcactgccagcgccncgtgcggcccgggngccgcgcacaggcggangccggcactgggcggtgcgagcgcgcgccgcgggnncgtggccngcnggtantgcgcgtacgctttggnggtcgtgcacgngcgcgtngagcagcgcctcanagggngagtaggnggcggcgngccgcgctcgtnccnntgganngnctcgctggcgngcntatnctccancangcacccnggtnncnggtcgcnccccgcctggtanangggnannacgacttgggggcctgcttntnggntgggnggcggcgggcccgaaggctcgggccggcgnncgngcnnccccnggcngcggggttccncggattctggnggggggggttcntgg

SEQ ID NO: 440851 - DNA, 1001 bp, Homo Sapiens
  misc_feature (597)..(597): n is a, c, g, or t
  misc_feature (632)..(632): n is a, c, g, or t
aaagaagggaaagcttttgtactatgaaccgctgcgttatataagcaggctggtacggtcctggaattccccgggatatctgtcgacccacgcgtctggggtgtcccaccaattctggaatgagcccaaactgagacgcagtgggacctgagttctagtgcctggctctgccgtggcttgactgaccttggagaattggagaagcttgtgccctgctggaaagtgtggatggcagtacccgcttcatctagtagtcggggagatcaagagaggtatgggacctgaagaggatggcagactgtgcagtgcggtgcacaccggtctccagtgttgttttcaccctcctgtctcctcccaggagctaacgtataaagctgaggctccggccagtggactgtgatatacccacatccccggaactaggtgatcgcggtgcaggaaccaggtgtgccttcgcgggatccatgccttgaggcccaggaacgccccgccgccagcatgccgtgggacgcgcggcgtgcctggggggtggcagcggacggcgggcccgaggcctcggtgcgcggcgcgctcgcgagcgcagaagcagtgccgcangtcgtcgttacgccttactaccaggcggtgcgcgncctgctacccgtgtggctgctggaggatattgcgcgccaagagaaggccttccactgggacgagcgcgggacgcaggcagacagactaagctcgccctcttgaggacgcatgggtctaacgccgcttcgtgcaagaacaaccaaggcgtacgctgcattatccctgctagggccactgtttcccgcaggcgcggcggctcagaaacagccagatgcccggattaccgtggttgagcgggataccggggccgaaaagtggcagcatgcattgggctaacaacacgttgggattttgggcaggatcatgggcacttgggaattccggccgggaaggggagcacgatttgacgggtgattacacaatgcaag

SEQ ID NO: 440852 - DNA, 845 bp, Homo Sapiens
  misc_feature (307)..(475): n is a, c, g, or t
  misc_feature (602)..(767): n is a, c, g, or t
  misc_feature (789)..(789): n is a, c, g, or t
gatactattgatccagaggtgaccagactagcctcactggagataataggtgacattattatgcaaagtggtttcagttcccttgtcttgtttttggaatagtataagaggcctacaatacgaataaataaggcccatcacaagcctcaccaaaggacaaaactaatccacttctgaagaaggctctttgttgggccagatcaaatccttggacagaactgtactcttaatctctgtagtgaaagtggggggtagtttaagaatttattaaccttctaccttgagcaatccctcagaagtaagaggnnnnnnnnnnnnnnnnnnnnnnnnnnnnnnnnnnnnnnnnnnnnnnnnnnnnnnnnnnnnnnnnnnnnnnnnnnnnnnnnnnnnnnnnnnnnnnnnnnnnnnnnnnnnnnnnnnnnnnnnnnnnnnnnnnnnnnnnnnnnnnnnnnnnnnnnnnnnnnnnnnnnnnnnnttgtgacctgtccctgtcctaccttaactgatcaatcgaccttgtgacagtcttcttctggacaatgggtcttatcatctccccaccatgtaccttgtgaccccctcctctgctaacaatagataannnnnnnnnnnnnnnnnnnnnnnnnnnnnnnnnnnnnnnnnnnnnnnnnnnnnnnnnnnnnnnnnnnnnnnnnnnnnnnnnnnnnnnnnnnnnnnnnnnnnnnnnnnnnnnnnnnnnnnnnnnnnnnnnnnnnnnnnnnnnnnnnnnnnnnnnnnnnnnnnnnnnnatgtgcttgacaaaaggggaangggtgggattttgtcccttctgggttacaatatgtttctggctcacctcatttttt

SEQ ID NO: 440853 - DNA, 1470 bp, Homo Sapiens
  misc_feature (74)..(113): n is a, c, g, or t
  misc_feature (714)..(714): n is a, c, g, or t
  misc_feature (776)..(776): n is a, c, g, or t
  misc_feature (871)..(871): n is a, c, g, or t
  misc_feature (875)..(875): n is a, c, g, or t
  misc_feature (881)..(881): n is a, c, g, or t
  misc_feature (886)..(886): n is a, c, g, or t
  misc_feature (889)..(889): n is a, c, g, or t
  misc_feature (894)..(894): n is a, c, g, or t
  misc_feature (919)..(919): n is a, c, g, or t
  misc_feature (954)..(955): n is a, c, g, or t
  misc_feature (961)..(962): n is a, c, g, or t
  misc_feature (966)..(966): n is a, c, g, or t
  misc_feature (968)..(968): n is a, c, g, or t
  misc_feature (974)..(974): n is a, c, g, or t
  misc_feature (985)..(985): n is a, c, g, or t
  misc_feature (1004)..(1004): n is a, c, g, or t
  misc_feature (1010)..(1010): n is a, c, g, or t
  misc_feature (1018)..(1018): n is a, c, g, or t
  misc_feature (1020)..(1020): n is a, c, g, or t
  misc_feature (1024)..(1024): n is a, c, g, or t
  misc_feature (1031)..(1031): n is a, c, g, or t
  misc_feature (1034)..(1034): n is a, c, g, or t
  misc_feature (1042)..(1042): n is a, c, g, or t
  misc_feature (1045)..(1045): n is a, c, g, or t
  misc_feature (1047)..(1048): n is a, c, g, or t
  misc_feature (1051)..(1051): n is a, c, g, or t
  misc_feature (1055)..(1055): n is a, c, g, or t
  misc_feature (1058)..(1058): n is a, c, g, or t
  misc_feature (1066)..(1066): n is a, c, g, or t
  misc_feature (1070)..(1071): n is a, c, g, or t
  misc_feature (1074)..(1078): n is a, c, g, or t
  misc_feature (1081)..(1081): n is a, c, g, or t
  misc_feature (1084)..(1096): n is a, c, g, or t
  misc_feature (1099)..(1099): n is a, c, g, or t
  misc_feature (1102)..(1105): n is a, c, g, or t
  misc_feature (1107)..(1107): n is a, c, g, or t
  misc_feature (1113)..(1113): n is a, c, g, or t
  misc_feature (1116)..(1117): n is a, c, g, or t
  misc_feature (1143)..(1144): n is a, c, g, or t
  misc_feature (1153)..(1153): n is a, c, g, or t
  misc_feature (1161)..(1161): n is a, c, g, or t
  misc_feature (1193)..(1193): n is a, c, g, or t
  misc_feature (1197)..(1197): n is a, c, g, or t
  misc_feature (1259)..(1259): n is a, c, g, or t
  misc_feature (1277)..(1277): n is a, c, g, or t
  misc_feature (1282)..(1282): n is a, c, g, or t
  misc_feature (1316)..(1316): n is a, c, g, or t
  misc_feature (1332)..(1332): n is a, c, g, or t
  misc_feature (1380)..(1380): n is a, c, g, or t
  misc_feature (1384)..(1384): n is a, c, g, or t
  misc_feature (1439)..(1439): n is a, c, g, or t
  misc_feature (1442)..(1443): n is a, c, g, or t
  misc_feature (1467)..(1467): n is a, c, g, or t
gcccccggtgacagccggtacggccccgggtttgggcaacctcgattacgggcggcctccagccccgccagcannnnnnnnnnnnnnnnnnnnnnnnnnnnnnnnnnnnnnnngttccggccgcggaccccactctctgccgttccggctgcggctccgctgccggtagcgccgtcccccgggaccacccttcggctggcgccctcccatgctctcggccacccggagggcttgccagctcctcctcctccacagcctctttcccgtcccgaggatgggcaactcggcctcgaacatcgtcagcccccaggaggccttgccgggccggaaggaacagacccctgtagcggccaaacatcatgtcaatgtgcaacagaacagtcgaacctttcccagagggaacacagatggctgtatttggaatgggatgtttctggggagctgaaaggaaattctgggtcttgaaaggagtgtattcaactcaagttggttttgcaggaggctatacttcaaatcctacttataaagaagtctgctcagaaaaaactggccatgcagaagtcgtccgagtggtgtaccagccagaacacatgagttttgaggaactgctcaaggtcttctgggagaatcacgacccgacccaaggtatgcgccagggggacgaccatggcactcagtaccgctcgggcatctacccgacctctggccaagcanatgggaggcagccctggagcttcaaagagaactaccaaaaggttctttcagagcacggcttncggccccatcactaccgacatccgggaggtacagactttctactatgcggaagactaccaccagcagtacctgagcaagaaccccaacccccacncccncccccngggcnccngcgtnccccccccagtgggtattaaaaaanaattgcccccacatggtggccccccgaggtcccannaaaaanncttncnacaaantgggcaacgcntgtgtgaatcacaaccctngcattnaaagtgcncnaagnacaaagnaanaaaaacanaangnnccnaccnaanaaaaaacnaaannagnnnnnaanacnnnnnnnnnnnnnganacnnnncncctaanaanntatggtgggagtggagctgtgcggtnncctgtgtcntctggggnctgagtgaagatagcagggatgctgctgttcncccntcttggtagaagctaaggtgtgagctgggaggttgctggacaggatgggggaccccagaagncctttatctgtgctcccngcccnccagtgccttacaatttgcaaacgtgtatagccncagtgactcattcgcngaaatccttcgctttaccaaatctagacatacataagggactttctcncccntttcagccctctctgtgcagagaaaagatgtgagtccgcttgatgaattctaatnctnntgcttagagctgatgagaaatgcntgt

SEQ ID NO: 440854 - DNA, 1452 bp, Homo Sapiens
  misc_feature (1226)..(1349): n is a, c, g, or t
ctacgcgcttcccagctcgacgtgtataccagcggcgaggctatgttcctacagccgtactttagtaccagcttgacaagaagatgggtacgagcaagctgcgcccctagagggatctctagaggcgtcgacacttgtttcttgtacccttcaaccaatggactgtaggtttttattaaaacaaacatttctcatagctctaagcaaagcattagaattcatcaagcggactcacatcttttctctgcacagagagggctgaaaagggagagaaagccccttatgtatgtctagatttggtaaagcgaaggatttcagcgaatgagtcactgaggctatacacgtttgcaaattgtaaggcactggcgggcagagagcacagataaaggacttctggggtcccccatcctgtccagcaacctcccagctcacaccttagcttctaccaagaagggtgaacacagcatccctgctatcttcactcagaccccagaagacacaggaaaccgcacagctccactcccaccataacttattaggagataagtcacattttatcaacttgccatcgcgcctcctatagattatacttcggtaaacccaatctgtataaattcctttgtactttgtgcactttaaatgccacgattgtgaatcacaccagcattgcgcatttgttgaaagcatttttactgggaacctcaaaggccccgccatgtggggagcaattatttgtttaatacccactgggcaggacacgccggtgccccccaagccgcagtagccattgggggttcttgctcaggtactgctggtggtagtcttccgcatagtagaaagtctgtcccctcccggatgtcggtagtgatggggccgaagccgtgctctgaaagaaccacactctgactgtccactggtccatgtgagatgaagtcttcaagtctgccaagcacagttcatccaatattaatattcagcatgattcactgcgtcaggtttttcttgagcaacgtcacttatttcctgcatctctgtttcgccgtctgagccagcagaaggccgatcgaggatcttgaggcccagcaggtccggaacgacaagggggcagggtccccgccaagacgggtgggttagaccagccagctcagaggcagccagttttcttgcaggggttaggaatgagaatgaggagccattctaatgtcagttttgacaattttttgtannnnnnnnnnnnnnnnnnnnnnnnnnnnnnnnnnnnnnnnnnnnnnnnnnnnnnnnnnnnnnnnnnnnnnnnnnnnnnnnnnnnnnnnnnnnnnnnnnnnnnnnnnnnnnnnnnnnnnnnnnnntgtatcagatactgtgccttggtccctgacattctcagctcaccctcgtaccgcacaggcggaaagctcgcagactgcattccccagattctgctgccccgct

SEQ ID NO: 440855 - DNA, 991 bp, Homo Sapiens
ttgggtgttttcccgcagagatatttttctcctccggttctttagggcgcaacactggtttgaaaacctgtgggtatttcttgggactcaggcggccacattgctggccaaaggtcggtaatgccgccggttcagtggcgccatgtcgtttcgcctggggcgcaaacctggctcgggttcgtgattctcgccaggagcctctggcacagttctctcaaaactcatgtgttctggcgggtacaccaactcgggcgacttcggcatgccagtttttttcggagcagacttcttaataagtaggatttgaaagtatagcctcctcgcaaacccaacttgagttgatacactcctgttcaagacccagaatttcctttcagctccccagaaacatcccattccaaatacagccatctgtgttccctctgggaaaggttcgactgttctgttgccattgacatgatgtttggatttcttgtttgcccttcaagcgaagtctggtgtcttcagcttgcctttctggtcttcagtgttgtcactaattggttctgaacacattccgaaggatgtctttctgatttgatttgaaagcaggtttgtattgatgaacaaactttattttgtagaaaattaatattccctctaattagaaatttgccttgccatcttctatattaatcctgtctctcatggtataatcatacatgcaaaaaatcaaatatagtatttcccaaatgcatggacactatggaagcttcgttttgaaaaaggcttttatttcccttaatactggtgactaaacgtcattgtatgtaccaacactttcaaatagcccaagagacttaaaaagccttctaagtttgaaaaccaaaaagttctgagtttttctgtaccccaggacggttttctttcctgaagctcaagccgagaaagcagacaaaagaagctgatttgactgagctgtgccaagtcttgcctttttttctttcctcag

SEQ ID NO: 440856 - DNA, 438 bp, Homo Sapiens
  misc_feature (22)..(22): n is a, c, g, or t
  misc_feature (43)..(43): n is a, c, g, or t
  misc_feature (55)..(55): n is a, c, g, or t
  misc_feature (86)..(86): n is a, c, g, or t
  misc_feature (91)..(91): n is a, c, g, or t
  misc_feature (98)..(98): n is a, c, g, or t
gaccttgaagccgttccccggnaaaacttcatgtgatgctggntggtacaccgantcggaacggacttcctgcatggcccagtttnagccngagcagncttctttaataagtaggatttgaagtatagcctcctgcaaaaccaacttgagttgaatacactcctttcaagacccagaatttcctttcagctccccagaaacatcccattccaaatacagccatctgtgttccctctgggaaaggttcgactgttctgttgccattgacatgatgtttgggttctgaacacattccgaaggatgtctttctgatttgatttgaaagcaggtttgtattgatgaacaaactttattttgtagaaaattaatattccctctaattagaaatttgccttgccatcttctatattaatcctgtctctcatggtataatcatac

SEQ ID NO: 440857 - DNA, 1425 bp, Homo Sapiens
  misc_feature (7)..(7): n is a, c, g, or t
  misc_feature (33)..(33): n is a, c, g, or t
  misc_feature (40)..(41): n is a, c, g, or t
  misc_feature (46)..(46): n is a, c, g, or t
  misc_feature (51)..(51): n is a, c, g, or t
  misc_feature (54)..(54): n is a, c, g, or t
  misc_feature (62)..(62): n is a, c, g, or t
  misc_feature (69)..(69): n is a, c, g, or t
  misc_feature (88)..(89): n is a, c, g, or t
  misc_feature (91)..(92): n is a, c, g, or t
  misc_feature (106)..(107): n is a, c, g, or t
  misc_feature (133)..(133): n is a, c, g, or t
  misc_feature (147)..(147): n is a, c, g, or t
  misc_feature (151)..(151): n is a, c, g, or t
  misc_feature (159)..(159): n is a, c, g, or t
  misc_feature (170)..(170): n is a, c, g, or t
  misc_feature (188)..(188): n is a, c, g, or t
  misc_feature (195)..(195): n is a, c, g, or t
  misc_feature (210)..(210): n is a, c, g, or t
  misc_feature (214)..(214): n is a, c, g, or t
  misc_feature (216)..(216): n is a, c, g, or t
  misc_feature (223)..(223): n is a, c, g, or t
  misc_feature (226)..(226): n is a, c, g, or t
  misc_feature (231)..(231): n is a, c, g, or t
  misc_feature (236)..(236): n is a, c, g, or t
  misc_feature (276)..(277): n is a, c, g, or t
  misc_feature (280)..(281): n is a, c, g, or t
  misc_feature (291)..(291): n is a, c, g, or t
  misc_feature (298)..(298): n is a, c, g, or t
  misc_feature (306)..(306): n is a, c, g, or t
  misc_feature (313)..(313): n is a, c, g, or t
  misc_feature (343)..(343): n is a, c, g, or t
  misc_feature (346)..(346): n is a, c, g, or t
  misc_feature (350)..(350): n is a, c, g, or t
  misc_feature (367)..(367): n is a, c, g, or t
  misc_feature (370)..(370): n is a, c, g, or t
  misc_feature (379)..(379): n is a, c, g, or t
  misc_feature (394)..(394): n is a, c, g, or t
  misc_feature (397)..(397): n is a, c, g, or t
  misc_feature (418)..(418): n is a, c, g, or t
  misc_feature (431)..(431): n is a, c, g, or t
  misc_feature (443)..(443): n is a, c, g, or t
  misc_feature (454)..(454): n is a, c, g, or t
  misc_feature (462)..(463): n is a, c, g, or t
  misc_feature (466)..(466): n is a, c, g, or t
  misc_feature (513)..(513): n is a, c, g, or t
  misc_feature (525)..(525): n is a, c, g, or t
  misc_feature (532)..(532): n is a, c, g, or t
  misc_feature (1000)..(1000): n is a, c, g, or t
  misc_feature (1010)..(1010): n is a, c, g, or t
  misc_feature (1020)..(1020): n is a, c, g, or t
  misc_feature (1030)..(1030): n is a, c, g, or t
  misc_feature (1052)..(1052): n is a, c, g, or t
  misc_feature (1099)..(1099): n is a, c, g, or t
  misc_feature (1106)..(1106): n is a, c, g, or t
  misc_feature (1209)..(1218): n is a, c, g, or t
  misc_feature (1221)..(1221): n is a, c, g, or t
  misc_feature (1240)..(1240): n is a, c, g, or t
  misc_feature (1248)..(1248): n is a, c, g, or t
  misc_feature (1302)..(1302): n is a, c, g, or t
  misc_feature (1333)..(1333): n is a, c, g, or t
  misc_feature (1370)..(1370): n is a, c, g, or t
  misc_feature (1419)..(1420): n is a, c, g, or t
  misc_feature (1424)..(1424): n is a, c, g, or t
gacatcnttctcttacatattttaacataaggnaagaatnntgccnaccgnggngggacggngattcanccaatgaataacatatcanngnnaacaaggggggganntcatgcagaaattacatacaagaganagggagagaatatncggngggcaaancggagtaaggnacattgacctagcatgtngcctggnttatttagggatgcnatancnttttacnganatggnatgtnctcaagtactgggaggccaagtaattcaagagagggaggnnggnncgccagccanggccggnggccaaanaggcgcnaaaccttttcacctctcgcataggaatttngtnaacnttttaggcatgtctccnggngcccttacnggatcaacgacatgnggnggcgataccgctatggaaaanatgagctctgagnaaattgcatgtngaccagaaggnaatatacnngcncccgtttccagatgccgatacaatggctgtaggcgtcattgggtgcngggattcggganacggggnagatcttgcagcagtccacacagctatcggggagctttcatcccaatgctgacagcccatgtgcaaggagatgagatctaaatcagataggtatagagaccatgcgagcgcgagatgtgaatgaagcaaggactcctgaagaaggggaacttgacactgtactgcccacatgctatgcttctcttctgtattcgtagtgagtctagtgccaagtgtagcctgtgatagtctttgatttttaatattctttgagcttaatgggcactgcagtggtttaatcaggtcttgggatcccgacaggtgtttcccccaggtccattaggagtcttctgttacttttagagatcgtttttatagtgtaatatactaattttcctttaatttaggctcaggtttctgggactttggtccacctcagtttgcagatttcacaagcaaattattttacgtttcttttctacagacatnaccccttatntgggatgtgngaaaaatttntacaggaagtagacttttttcngaggtaagtattttataactcttccggcttataaaatcttggttacncggagtntagcccttgcaggcaatagggacaatcacaaatcccattccttggtttggcttgtgcagccaggctatcatctgtggccatgtcgtataaccttaaattgggnnnnnnnnnnctnatttggtttttttccttanatattatngaaacttctttgaagttggagcttcaaaactaaacctaccgggaatcacttgcntttagcactcagctgggccataaaaacacangtaatatgaagaaaacgtgtaaatacgtttgttgacnaaaatcattgtcatctgttatcatatatcaacactgttcgttcccaccnntctng

SEQ ID NO: 440858 - DNA, 1147 bp, Homo Sapiens
aagttttccgggaaggtttttctcgaaggttttttcccccattcctaattggggcccccccggaaagatggggccgggattttgttttccagcccagcttggtgccgccaggcggccccacccaaagggtaatttcgatttcgttgttccctcttgtacccaagtggtcctcccagggtgaaaagcgccgttcgttgggggttcaggatggcgcccagtttcccgttcgcccgcgaaaatggaaagccgtcatcagttggcaaacaccagcaggccgcgtgacgttgcgccagccgatttcttccgggcaggcggcgacctgcatcatggcgtccagcccaccctcgggtgcatccaggtttccggaaatcagctgcttcccgacctcggtctgaaactggttggagttgttggtcagcttcagcacgtgcctgaaggcaaacgggggctggcactctttctccttgttggggcatgggtttcgcagcttatcagggtgcgtgttcacgaacggcagcacggtcttgtccacgaaggacccgaagccaatgcggccggactcggtgatctcgttgagggcccggagcaggtcgccacctagcttcttgacattcctgaggtcatcaagcatggagtaggagaggtccatcagatagtacaggtcgatggggtagcccttggcccgccggaaggtcacgttgaacgctgctgcctggcctggtcgcaggtaaagcgtcactttttgtggggacagctgcttctggcccccattgtggtcttcctgggtttcagcgaggcttgtggggtccatgatgtcgtcagccgcacagcccctcatgagcagctgtggccgggtgtcgcagcgaatggagtcaggatcccccggccctgtgaagttcagcttctggcaccaggtgcagccgggccccgactcgatgcattcccggcagctgctgaccttgaacttcgtgcactcctgagagaggacgcacccgagggagagcagccccaccagggcgagcagtggggggcgcaggcccagcatgtccctcggtgtgctggagtcctcggcggtgctcctggctgggcgtgggggctttgctaccagtctgccctgggatcccgggaattccggaccggtaccagc

SEQ ID NO: 440859 - DNA, 1426 bp, Homo Sapiens
  misc_feature (11)..(11): n is a, c, g, or t
  misc_feature (25)..(25): n is a, c, g, or t
  misc_feature (31)..(31): n is a, c, g, or t
  misc_feature (38)..(38): n is a, c, g, or t
  misc_feature (93)..(93): n is a, c, g, or t
  misc_feature (538)..(538): n is a, c, g, or t
  misc_feature (654)..(654): n is a, c, g, or t
  misc_feature (676)..(676): n is a, c, g, or t
  misc_feature (692)..(692): n is a, c, g, or t
tattgactgangaaaactaaagtgntaagangtatggntagtagcaaccactgaattctgctggaattctctatttcttctttttcactttangcacaaaagaaataaaattatagaccattagggagctagttgcttttagttccttcaacaaaaactgcatagtttagcagttgcacagcattaaatatatacaactttgcaaaatcctggaagttttaaactttgtgttgacttcaaaggctaatgtaatcacctacactggtcggattcagagtttcttttcccttttctgccaccctggtatttggctaactctgcttgtaatactttcactttagatctttcttgttctaatgcagcatgaagtgaagtcacctgaatagtgagctcattcttgatactttgtgattcatcaacttgcagaagtatttctgccttatctttcatttcaccttcctgaagcattttcaataattgtgcatttcttgcctttacttccttatactttgcctcccattgagtgattacatttttnagcttctggatttcagcatctttcctttcaagctctaactttagtctttcaattcttccatctttcagaaccacttcctcagtctttttactaatgtgatcttccgaatgaaaatnttttagtgatactgtgagaggnctgtcttttccctgangatctttcttttatcttttttattcataactttggactgagttgaagtattttcagcatcttcatactcctttttgtgctcttcatattctagtttacttagtaacaatgccttctcaagatctgcttcaaacatttcagatgtcagctgctcatctctttgtctccactcttgccaattttcttctcgtgaatccttctgtactgggtttgacaatggaagatcatgttgagcgttacaaacagcatgggaggatttctggggaattttcttaaaagcaagattcctgagctcatttgcttcactctgttgctgttcttcgttttgttcttcttttctctctttttttctcatttgtagttgacttgcttcctaaagtttgagactttccagtatttcgacctttaccttttccaggttcagaatcagagccactgccactatccacttgtaacagggcaaaacgagaagcggtggtgggaacagaactaagtactgctgaggccatcgtaaagatttttcttttaaaatacttctgtcaagaataatttctcattcatgaatgaaagccaaatttcacccataggctgttaaccgatgctccgaaacttattcgcaaagtacatagagaaagaaattgcgctgggcgaaacctaactcgggcagagaagcggcttcaaaaccgggcctcccgtgccgccggctcggccctcctctccctcctcccccccgct

SEQ ID NO: 440860 - DNA, 551 bp, Homo Sapiens
  misc_feature (362)..(423): n is a, c, g, or t
tcccccctttttttcctcatttgtagttgacttgcttcctaaagtttgagactttccagtatttcgacctttaccttttccaggttcagaatcagagccactgccactatccacttgtaacagggcaaaacgagaagcggtggtgggaacagaactaagtactgctgaggccatcgtaaagatttttcttttaaaatacttctgtcaagaataatttctcattcatgaatgaaagccaaatttcacccataggctgttaaccgatgctccgaaacttattcgcaaagtacatagagaaagaaattgcgctgggcgaaacctaactcgggcagagaagcggcttcaaaaccgggcctcccgtnnnnnnnnnnnnnnnnnnnnnnnnnnnnnnnnnnnnnnnnnnnnnnnnnnnnnnnnnnnnnngaggccgcactgggcgttgggactggtctgggtcaagtgtcggcagagctgggggcaggctcgcgccgggcgggggtcgcggtcggcccgcaggctgggcactaacgggtcccggggcgccggggcgg

SEQ ID NO: 440861 - DNA, 1110 bp, Homo Sapiens
aaagtccatagattttaatgaaatttctattcctgtctctgagcggctgctgtgctttgtctgggtcccccaggggacaagagtcaggctggaatgagacctctgtctgccaggcctttgtggaggcctgggaggagaaaggccaaaggctttgatgcttgggaccgatgcccggccactcagctccagacaccagggatctggcaagggggtggggcaagggccagacagaccaacagccttggggtcctggcgagagctcgccaagaccagatctgaagctggctgggccaaagcagctgaggcggcagcggcagacaggtgcgctgtggcagaagccagagcctactcggtgaccagcccttcaggctggggcttggggtgctgcactggacatgggtgtggaagctggcccttccctggggctgcactgaagctgccgtccccagcggtgggtagccgactggcctcgaggtctaaggtagggctccagaggaggtgcaggcaggcagcactggagaggtgcaaccccgcagaggggaagcgggggtctgaggcccctgtgtggaggacccccaagggccgctgcctgtggttgggagagacacaagaaggccccacagatgcctgcagctcctgctccatggccttcttctgttcctttagctctgccagggtgggctccagggctgcctcagaggggtggcaaggcctcaaatactcctcttccaggcagcgctgcaggatgaggatctccctctccaaggtgtgacactcctcctccagaaggcccctcaggtgtctggccacctggtcaatgttggacacgttcagttggtccttgatgatgctgagatctctgtgaccgctgcttccctctccccacctccgcccgcagctccaggctcaggtccaccgccgcctcccccagaatcctcttcacttcgcgtcgctcccggagcggaacgtgctcctccaccagctcccacagcgagggggagtgccggagcatgacccaccgacgccgccgtccccggctcggacctacgggccgcaggtcagagtgcgggaggtaccgcgggcccgccggcaacgctcaccaaacccgct

SEQ ID NO: 440862 - DNA, 687 bp, Homo Sapiens
ggggtattatagactctagctttggcttggttcttgccctgcacagatggtttgtgctcggagaccgtgtagcaactgccggagcttcctgtgcgcaaagaggtcctttatgagacgtcggtgcgcacagaagagaagaggggtcagagatggggcgggacctgtgggctcgagagatcgagcctcttggacgcagtgcccgtaacatcgccaacctgcaaggagatctgggataccttgcgactggtgtgaggcgagtgtccggaatgcttggtggtcctgggggagtgagggagagggcggagtcaaaggggagaccaggataggatctcgggagttacccggcagggccagggacccgcaggaggtgggaaatcacccgagtcgtggggcaggccaggggcgtggcccaccttccctctccccacctccgcccgcagctccaggctcaggtccaccgccgcctcccccagaatcctcttcacttcgcgtcgctcaccggagcggaacgtgctcctccaccagctcccacagcgagggggagtgccggagcatgacccaccgacgccgccgtccccggctcggacccgtgctctgccgctggtcccctacggctgggattgcccgttccggaactgccagtccttggcgctctcttctgcccggcttttggccgactcgatgccg

SEQ ID NO: 440863 - DNA, 1102 bp, Homo Sapiens
  misc_feature (729)..(729): n is a, c, g, or t
  misc_feature (732)..(734): n is a, c, g, or t
  misc_feature (741)..(741): n is a, c, g, or t
  misc_feature (751)..(752): n is a, c, g, or t
  misc_feature (754)..(754): n is a, c, g, or t
  misc_feature (757)..(757): n is a, c, g, or t
  misc_feature (764)..(765): n is a, c, g, or t
  misc_feature (772)..(772): n is a, c, g, or t
  misc_feature (774)..(811): n is a, c, g, or t
  misc_feature (817)..(817): n is a, c, g, or t
  misc_feature (819)..(819): n is a, c, g, or t
  misc_feature (824)..(824): n is a, c, g, or t
  misc_feature (828)..(828): n is a, c, g, or t
  misc_feature (848)..(848): n is a, c, g, or t
  misc_feature (850)..(850): n is a, c, g, or t
  misc_feature (853)..(853): n is a, c, g, or t
  misc_feature (861)..(862): n is a, c, g, or t
  misc_feature (864)..(864): n is a, c, g, or t
  misc_feature (872)..(872): n is a, c, g, or t
  misc_feature (874)..(874): n is a, c, g, or t
  misc_feature (878)..(878): n is a, c, g, or t
  misc_feature (909)..(909): n is a, c, g, or t
  misc_feature (929)..(929): n is a, c, g, or t
  misc_feature (953)..(953): n is a, c, g, or t
  misc_feature (958)..(958): n is a, c, g, or t
  misc_feature (967)..(967): n is a, c, g, or t
  misc_feature (969)..(969): n is a, c, g, or t
  misc_feature (975)..(975): n is a, c, g, or t
  misc_feature (983)..(983): n is a, c, g, or t
  misc_feature (1049)..(1049): n is a, c, g, or t
  misc_feature (1094)..(1094): n is a, c, g, or t
  misc_feature (1099)..(1099): n is a, c, g, or t
cactttgtttttttaactacagggtttttttgaggtactgtacaacagcatttttactgaacaagtgttactgtactttaacacacttcaccttaaaccgcgataacacaaccctaaccacttacatttaaacacggggtttaacacacttttactttaaacgggcttacaactcaactctacaaccacattgaaacttactaactgtgttttaacggactaaacacacatctgtgcacatatacacaaacacttgacaatcttcatgcctttcaccttcatcctttcttatataaaagaattaaaggaaacagaggtattaataaaccaataagtgttttaatttttcccaaataattgatgctaagtgggaaactgtgactaaaaactcatacatgcctaacgtctttgtccttagtacagctcttttattctcaaatgaggtaagttgaacacctcacaaacatgatgtaaacacactgggtcttcttctagcagctttcaaagaacacgtgagggaaactttgttctgatcaactcatttctcgggggttatatggcaccgagctttggttttgggtacaaaaggtatctttgtttttgaggaactcatagtctatgatggaaagtcagatatactgtaaacagatactttaagcatagaatagagttcactaatttggtcatggtaaagttttgagtgtctacttcattcttagcagttttttnttnnncattggncattaccatnntntanttcacanngtcacanannnnnnnnnnnnnnnnnnnnnnnnnnnnnnnnnnnnnnttgctncnttatngatnttctaagttccagaaaggananacnttgaaganntnattacagntnttanaatgttatgagaggaaagtataggtccatgngtagatgttgctagatttanttatatataaataatacaaaggtncccanttaaatttnanttttanatacacgntgaataactttagtatatccaggtcttatacactcctatattttaagtagaacatctaatttgggnaagtcagataggcaaatatacactattaactatgtaaacgggtgnttatnaag

SEQ ID NO: 440864 - DNA, 1332 bp, Homo Sapiens
  misc_feature (243)..(243): n is a, c, g, or t
caataactttattctttacaaaatatacaaataaataaaacaattcaacttttaaaagtattaccatatgcaagaagaaggtattgctatcaccattctaaattaccacaatgcattcatttcctgttcccttatctttcaactctagtggcaaagtaaagactgaattgaaattaagctgcactacaacatcattaccagggatagacacataaacaaagtcatttccccctccggaatgcntggggtcgtccggagacgtgacaaagaggcgtctgctgcgttttgcactcaggcacatccttgcctgaggcggcgtgccaaggacctggctgagaatccacactctctgctcctgcattttgcacctctgagaaagaaaatgaaaacaacattcatcctattacaaaaatacacaaaaaccaagcacagctggaagtggaaaggaggttaagacaggagagatgtgaagaatgaaaaatggcaacgtgattcaccgtgtttggtcatgaagatggtgtatttcacctcagagttggagaagtttactccccattttgtcctaaaatgaactattagacaaaccatagttaaactgagaggtaataaagttttatttggacattcttcaatttgaaattcaaagtgaatcaaacacgggctgattgagttttcttttgtcctgtttttcaaaataaatggtgtgctaaacaaatagtattttagagaatatttaatcatctttggaaagctttctgtgagcctttaaaaaggactttagctgcatctatttgcttataaacaatatttattttacaattattatatttataaaagtaaatctaccataactggtcttggcaattaccttagtttaaggtaatttagattaccttttataattaaaagtaaaaactcacatttatttttttaaagactggtattaattcaagctgggactatctcatttaattctgaattggtcagtttttgatttatgtattcttctaggctactcttttatttatctaaaaacagtaccagagagatccacatattaaaaaaggactcaaacatttttatttgcagtttgatgaattcacattatgcatatgcctctggcactagcagacaaaatcaaaaggtgattacagctgggtgtggtagctagcatgcacctgtagtccttgatgcttaggaggattgcttgagcctaggagttcaaggccagtttgggcaacatagtgagagagttccatgcaagtgttagctagccaatagaaggtccttaaatgtttgttaaatactatttaatgaagagaatatttcaaa

SEQ ID NO: 440865 - DNA, 635 bp, Homo Sapiens
tctttccaataactttattctttccaaaatatccaaataaataaaacaattcaacttttaaaagtattaccatatgcaagaagaaggtattgctatcaccattctaaattaccacaatgcattcatttcctgttcccttatctttcaactctagtggcaaagtaaagactgaattgaaattaagctgcactacaacatcattaccagggatagacacataaacaaagtcatttccaaataaggaatgctggatctccagagaagtgacaaagaggagtctactgagttttgcactcaggcacatccttgcctgaggaggcgtgccaaggacctggctgagaatccacactctctgctcctgcattttgcacctctggacaaaggcctaaacttgagttatcaaaatagcgaactggatgaggtgatggtaaagactttgatcggctatcaaaaaaacaagattttggtgattcctttggcacaggatcttgtaaattccgttccttgcattgagagggtgtaatttgtttctttttagaagctgttccagtcactttaggagactttggagaattctcacaagttacttgtttgtgagcctctcttttaagggttctttccttccaagttttgcc

SEQ ID NO: 440866 - DNA, 1755 bp, Homo Sapiens
  misc_feature (1522)..(1522): n is a, c, g, or t
  misc_feature (1549)..(1549): n is a, c, g, or t
  misc_feature (1551)..(1587): n is a, c, g, or t
  misc_feature (1601)..(1601): n is a, c, g, or t
  misc_feature (1664)..(1664): n is a, c, g, or t
aacaattatcaaacgttaagaacaaagacagggataaattgcttacatttcaacctctggagattgaggtaactttttgtgtctgggtcttgtcaacatctaatttttttccatccattctgttacactttgtattttctaactggagaaaagagtgaggaacagaatgttttaaatctggtgcaaaagaactatatctgctggatgagccttgaaagcagtcttggcctgttagggcttacaaagtaaattacaaagtgatccagttcaaagtttgcttagttacaacaaagcacctttaaaaaaaatacattttaaaaaacattccaagccaattggaagacatcattgggttcttactttaagacatctcctggaataactgttcaaatgcaggttttagaaacaatgcaggaatcttgctttaaagatgaaaaagggaatgggccagcttcccttactcaaggagttgagggaccttggaggatgaaggcgagtatgtgacactggagaaaagtggaccaggcatgtcttttgctttgatctggagggagggctgcctgatgcaggccggctcccagtggggcaggcctcgctgcagaatgcccagtagtactgcggccaaggggacagttaggagacttcatctaaagcatgaaacctagctcctctacacacaaattcctatggaaatacctttgtgtacagtgtcttacattttcctattagtcagaaagaaggagagaatgagtgagtgcttgaaatgtgtcatactgttttaggatcaagactaggaattaggagccaggttgacaaggactttttctgagagttgggtgagggtaaagcttttctataatcaagctcaatacaccaaggaaactggatccagaattcctaaactttaaaatggtactgtctgcggagtggagtatggatggttatgtcaaagtcatagttcatcctatccagatgtagcattcatggtaaacttttaagtgctaagcaaggaattatttactgattggttttaaagagagcagaaaacacccaagtgtagaatgtctactgtttgctacctagaaatcttttccattcctctttcatacattccaacccactggaagtctttagaggtattttgatttaaagtatacttaaattaggatttcttaaagaaaacatagggagaaaactttacatgcaattaaaaatggactttcctgtgatttgtttttaatcattcatttggagaagaggcatgacctttgtatttcactaagtttaaagcaagagcaactgatgattaaatgttgctttttaataaggtttttaacttgaaaatttgaaaatatttaatgttgaaagacttcaattagggctattagagttatatctccctgtcgtaggcagcttcttcggagaagtgaaatataacattactcagtggacggagaagtctgttttgttacagagacatgcctcttcagaggtcaggaggttttgagtacctatccttgcncactcatacagaaaatccaaagttggngnnnnnnnnnnnnnnnnnnnnnnnnnnnnnnnnnnnnnccccaaaccacctnttaattcctcccttccttttttctttccctatttgcaatcatattctccccttggttcttttnctcttttgccctccttgtgggcaggctttgaaatcattcagactgggttcattaccatattattattctttgagaaagccctgtaatgttt

SEQ ID NO: 440867 - DNA, 255 bp, Homo Sapiens
  misc_feature (193)..(193): n is a, c, g, or t
  misc_feature (199)..(199): n is a, c, g, or t
  misc_feature (224)..(224): n is a, c, g, or t
cgggtgcttggtaaacgaaaagcaaacttctttattgtacacagtacagaatataacgcagcttggcaggatgcatacggccctgcgcaggggaaagtatttcaaatcagctggcaggttcaagcctttctgcactgtagactttccacactctggaaaagaagcaaacaaacaaaccccaaagaacccccgnaaaaancaaaaaccatccgggaggtgcatgngtccaatgggaatgcaaccgtgatgccgctg

SEQ ID NO: 440868 - DNA, 1055 bp, Homo Sapiens
  misc_feature (473)..(473): n is a, c, g, or t
  misc_feature (484)..(484): n is a, c, g, or t
  misc_feature (571)..(572): n is a, c, g, or t
  misc_feature (574)..(589): n is a, c, g, or t
  misc_feature (841)..(842): n is a, c, g, or t
  misc_feature (846)..(846): n is a, c, g, or t
  misc_feature (848)..(848): n is a, c, g, or t
  misc_feature (853)..(853): n is a, c, g, or t
  misc_feature (857)..(857): n is a, c, g, or t
  misc_feature (860)..(860): n is a, c, g, or t
  misc_feature (865)..(865): n is a, c, g, or t
  misc_feature (895)..(895): n is a, c, g, or t
  misc_feature (902)..(902): n is a, c, g, or t
  misc_feature (911)..(912): n is a, c, g, or t
  misc_feature (916)..(916): n is a, c, g, or t
  misc_feature (940)..(940): n is a, c, g, or t
  misc_feature (953)..(953): n is a, c, g, or t
  misc_feature (971)..(972): n is a, c, g, or t
  misc_feature (978)..(978): n is a, c, g, or t
  misc_feature (985)..(985): n is a, c, g, or t
  misc_feature (988)..(988): n is a, c, g, or t
  misc_feature (995)..(995): n is a, c, g, or t
  misc_feature (998)..(999): n is a, c, g, or t
  misc_feature (1006)..(1006): n is a, c, g, or t
  misc_feature (1029)..(1029): n is a, c, g, or t
  misc_feature (1037)..(1037): n is a, c, g, or t
  misc_feature (1039)..(1039): n is a, c, g, or t
  misc_feature (1045)..(1046): n is a, c, g, or t
  misc_feature (1049)..(1049): n is a, c, g, or t
  misc_feature (1052)..(1052): n is a, c, g, or t
gaatacatactcgcttcacatgttttattttggtgtacattcttctagaaccaggttcatttttccagttttgtagaaaaatagatgttccagccaccttttacttaactgtctagtcttttaagaccaatcagtatgttccctggaaagatgaataagtctcatgactaattttttaaaaattctttaagacaaagaaataactttctttttttactcccaaagcacagtatctcaacagcagcagccaacatggggttttagcagcttaactttaccccctaaataaagctttgtataaaccagtgattttactacaaaaaacactgtccttgaaagaaaggagtggcagtcagacatcaatgcaaaacttggaatgattagataataaacatggcacttacaaaaggtagcttattagaatattccacttaagaagaggttacttttctgtccctccttgccccctcganaaacaaaaaanagaggaaggacctttcctttaacaattccccttgaatgtgggtttatgaaatgtcagaaatgccttgtacccaaaacaagtgcttcnnannnnnnnnnnnnnnnnccttgtgctggcggctcttggcgcggttcgggtatgtatttttctgccatctaagactgcaagagttcttatattcagtagctctctggtttaagacgacctccatctccttcgcttacaaaacgctttctgccccttgaaggacaaagatctctgagttgtttggaaattattccagcctgaaaacattcttctacaaaccgctccagcacagagtatgaatgtgggacatcccgattaatgtccggaatnncatngnaaatnctcncanaaccncttttcatttggtcaacagtaatggtagangacatcnaaagggacnntaanaaatccaaatcatcttaaatgtcnttccccgttgacnctaaacccttaaaatagnncaaatncagccanggngaaatgnggnnttcagtncctaaggcatgtcagctcagaangtcccaanantaattnnttnttntca

SEQ ID NO: 440869 - DNA, 1150 bp, Homo Sapiens
  misc_feature (677)..(750): n is a, c, g, or t
  misc_feature (896)..(959): n is a, c, g, or t
  misc_feature (983)..(984): n is a, c, g, or t
gcagagactactgaattagaaatatacattttttcaggcacagatggaacatttacaaccacatactaggccatagagcaaatcttaaacaaatgccagaggattcatatgtattcattttctacagctgctacaacaaattaccacaaacttagtggttgaaaacaacccaaatgtattatgttacagctctacaggtcagaagtctaaaacaggcctcaccaggctacaatcagtgatggcaggtacagctgcccctggaggctgaagggtcaaatccatctccttgccccttccagcttctagaagccgcccacatactgaggctcatggccttcttcttccaacttcaaagtcagcaacatcttgatccttcttatgcagctgcctctctggcgctgtctcctctgcctctttgccacttacaaggatgcttgtgattacactgggtctacctggaaatggctggtgacagaaaagtcctcagggccacagcactttctgcggtgggaattcaggtgccttgcctgatggtgacaaggctggttttgcataaacagctctctgaatcacacccagatgtggcttctgacttgagtggacccccatgaagagctgcagagggggctgtattcccagctactcagaaggctgaagtgagaagatcacttgagtcnnnnnnnnnnnnnnnnnnnnnnnnnnnnnnnnnnnnnnnnnnnnnnnnnnnnnnnnnnnnnnnnnnnnnnnnnngaccttgcaggtccttatccgtgatggctcacaattcctgggaagccacaaggaaaccaaattctagtagcaactcagagtcagcattcattagcaggtcacagggccataaggatgccaagaaggaatttgtccctctccttgtnnnnnnnnnnnnnnnnnnnnnnnnnnnnnnnnnnnnnnnnnnnnnnnnnnnnnnnnnnnnnnnntgcactggagccccgaggatcgtnngcccactgcactccaacccctgtgtgtcccctcctattacagcccaaagatccctgtgcagctccgattttattcgcatccttgtgatcttctctggaatgttccttgttttcaccctggccggggcctggcagccacaactgcagtcccatcctcttgtcccgct

SEQ ID NO: 440870 - DNA, 1802 bp, Homo Sapiens
  misc_feature (279)..(287): n is a, c, g, or t
  misc_feature (1559)..(1559): n is a, c, g, or t
ccgcggtggggggggtgcgccgcgaaaggctgggtcggagttgtggactctggtggtccgcgggcgtgccggctacagcgcccgggggcgcgggcgttttcttgtcatcgccgcgggggcgcggtgaagtagggcggggccgtgacgtgggcggggcgggggtcggcagggacttcgcgggggattgcgtgttcaaggaagcctagtgggtggcgcggggcatacttttcggaggtggatccgcggggcgaggtcatggcggggatagggttggggacnnnnnnnnncatgtgcccgtggcctgggtggcccgcggcccaaagggaggttcgggaaggcttgtggagggccggggcggccggcaggattatgccgcgggttggggcctcgtcgttgtaggggtggtcatctgtcactttattttgcccgtcttgtagcatgtgggtctttcgcagcaggaagtgtgttttacaaccagagcccccgccctcctgcagcgcaggcgcagctggctgggctcctgcttcccactctccacctcatccatatttgtcctcgtccctgccagtctcgaaaaggcactctgtcacgtgtacacaggaaagggccctgacaagaggatgggactgcagttgtggctgccaggtctcactctcccttggatggtcggcggggtgggggtggaggccagggctgtagtgcagctcccgcaggtgctggctcagggggagcaggcaggctccggttttcggtaatcctcctggatggggatggtgctgccctcctcctccctggggcagctgtaacgacaaggctctgcaggctccacaggactttctcctttgtttgatctgtatttgcttcgttgagtgttgcgagcagtgcccggggcagggtgaagacagggagcattcgatgggtagatggcaagggtgcgcttgggggaggggtgtcaggagcacgccagttgatctatatttccttcgttgatggaggaacagggccccggccagggtgaaaacaaggaacattccagagaagatcacaaggatgcgaataaaatcggagctgcacagggatctttgggctgtaataggaggggacacacaggggttaggggagggtctagcccttggctccctcagcccagccctcctgtcaccttgcctctcccctttcccccaccttattctatcccacccgccaccgttggccaactcctctcctaaacagtggactctgctttttcccctcctcttatccctaatcctaggagctttctgtctggcttccctcctggcccctcgtgtatgcattctctctagcggtggggattaaggagaaaactcacgtggccagtgggtagagagagtccgggcaggcagctgcctgaagtcagccagagtctgcatgtgcccagctgtcctggcctccagcatctctggaaaaacagagacagaatgagtagcagcaggggaccccatagggcacatctgaaggcctgagaggtgctggatgggatgggaaggcagaaacaggctgaccttatctaggggtangagtggggaatacctggttggggtaattccccctacccccccgtgttgtgccccaaagagttgccctggaaatttacctcctgtgccattaaaaccctttgcttttgttcccccccgcgcttggaaattgcaatttgcacccaattctcgggctcctgatggccaaccctccgaccttacctgatgtgttaaaggggaattggtcctgtggccataccgggcccttttccctaagggcgcgtt

SEQ ID NO: 440871 - DNA, 890 bp, Homo Sapiens
  misc_feature (262)..(474): n is a, c, g, or t
  misc_feature (739)..(841): n is a, c, g, or t
tttttaattggtgggggaaaatcccaagcccatttgtgtcaggggccagggattttcctttggaaaacaacttatggccatgtttccctttccctttgggggcccgcgggcccaaaaacgaagggttttggaaagctttttgggggggccagagccgcaccgacgaagggggcggtttgttgttatttttggaaccgaagccagggttcggtttttaaattaaacctttaaggtcttagggttccatgtacaccaatgtgcnnnnnnnnnnnnnnnnnnnnnnnnnnnnnnnnnnnnnnnnnnnnnnnnnnnnnnnnnnnnnnnnnnnnnnnnnnnnnnnnnnnnnnnnnnnnnnnnnnnnnnnnnnnnnnnnnnnnnnnnnnnnnnnnnnnnnnnnnnnnnnnnnnnnnnnnnnnnnnnnnnnnnnnnnnnnnnnnnnnnnnnnnnnnnnnnnnnnnnnnnnnnnnnnnnnnnaaccctccccagcagcttctttaaccccctccatttcccttttggcggagacccttgtcatcactcctctctaccaccagtgctctcccctcctgcactgtcccaggcttcctcattcttcccttgcaggtccttatccatcatggctcacaattcctgggaagccacaaggaaaccaaattctagtagcaactcagagtcagcattcattagcaggtcacagggccataaggatgccaagaaggaatttgtccctctccttgtnnnnnnnnnnnnnnnnnnnnnnnnnnnnnnnnnnnnnnnnnnnnnnnnnnnnnnnnnnnnnnnnnnnnnnnnnnnnnnnnnnnnnnnnnnnnnnnnnnnnnnncagccacaactgcagtcccatcctcttgtcagggccctttcctgtgtcc

SEQ ID NO: 440872 - DNA, 839 bp, Homo Sapiens; identical to SEQ ID NO: 324840

SEQ ID NO: 440873 - DNA, 947 bp, Homo Sapiens
  misc_feature (159)..(184): n is a, c, g, or t
  misc_feature (871)..(883): n is a, c, g, or t
gaaaatttggcagcttgaacctttatttttagtatttttttaaaaagcataattagaaactttcaatacagaaatactcctagcaaaccattgaaaagtggtgtttgtttgacaggaatttcacatcaggtccactaggacgtcggtccagccctgagnnnnnnnnnnnnnnnnnnnnnnnnnnttcatgcgtgtaacagtgggacaggcacactgtcatgaccaaaatcaccccaatacctggggctgatgttcagctgccagaagccatgggggcttctagcctgggctggaagcccccaggaacccccctcttattgcttgaatttgcaagcacaccctcgctggcctcgcctgatcgctcagaggccagcatgccccccgcccaccggcacaggagccccaggcaccgtgcatcctcagggcccgtggccaaccaggacaggcccaaggacggagaccccggttctgctcctgccgcccccgcccccgaccagatgaggctgcctgctggtcagccctgcagccccctccacaggaccctccttcccaggcccatgggggctcccccaccccatcccgggggctccaaagggaaggccttgtccaaaatcaccaggtttttgggagttttgggcaagggggaaaacctgtgaacaaaaaaacccccagtttttattggtaaaaaaccccatccccaggggttaacattggaaaactggcaggggtgaatcctgggatggggaattgtccaatacaggggctttcccctgggaattccgccttaggaagggggaaattctaggggagaccacctcgcggggggtggaaacttcgggttttttccatggggaatttggattccctgtannnnnnnnnnnnnaatggagtggttccctgccgcggggtgtcggggcaaccctcctataagggccagagcacctctg

SEQ ID NO: 440874 - DNA, 1568 bp, Homo Sapiens
  misc_feature (1488)..(1524): n is a, c, g, or t
attgtctatcgatatggtctcatagagaagacatgaagaatgcttatgtggtagtttgtgctaggtttcagagtactctatacgtagcaactggttcaaaatactgctctgtttcaaagcatacagtttagatgtatcttctctgatgatgggaacattttcattttgttcatgagctgtcaggtcactttcactgtcagatagtgtacacaggagagtgtcattttcataggttggaaaataatactccagttgatcccagcgtctttctatcggggagcagcgaagtgtgtttagtttcttccatgtgagttcttaagtgtgctttggatttgaacttcacatggcagccataacatgggcattggtgaacttgcctccgaataaaattgaccagtttcacttgctgatagaaatgtaatccaagttccgactttattttgagaagatcaaattagtgtgcatcctccatgaggacatacaacttctcaattgcttctgcttgcttttcacaaaataagcagagtgcagaggcagggtgttcttcccaatcagaccagtcatcttcctgatggtccagcaactcccgatcatcttccaactgaacttcttcccacgattttccaagttccaaataattgatgacataaaatctgtcatattctctgttcttaggattaatcttacgatgctgttttttcctcatgtgatctttaagtgtatttttgtccctgaaggtcttctcacagtacaagcactgcaaattgtcaagctttttctgtaatgtacacaaaaattcattgcagtttacaatgttgtctggcaatccaatgttgaaagcatgttctctggccatgtggttcaaaataacagatctgtttccaaggaattcttcattgcaaaacatacaaacgccatgaaaattggtatcatttcgttcttgctgctgttgttccagaatttctctcagtctctgtttctgaagctcttctctaagaattctatcttctggtaaaacgtcacataacaaaaaataattctcttgttcttcaaatggagcagtggaattaattcttattacactacaaaaatctgtgatgggctgttcagtgaaccttttcctccaatataaaatgtacctttggaaatcagcaaccaacttgacatcagctatgacaatcttatgctcaataatcatgtgcttcagaagtttgtcttgttcagccacaggaaaatgttcttcacagaaaatacaaggcacagatggagaaccttctaaagtggtggtgccacctggactttctggcagggaaagcggctccaggatacaatccttactgtccccataacctacacccccgactgtgctgcagctcccatcacggtcttcctgcattcgggcgacagccccctgggtcttggaagcagccattacccggcagaaaacccgctctcgacgaattcgagctcggccgatttggcctgatnnnnnnnnnnnnnnnnnnnnnnnnnnnnnnnnnnnnncgccgccaccgcgataacggggtccccatatgtcgtcatcctct

SEQ ID NO: 440875 - DNA, 1238 bp, Homo Sapiens
  misc_feature (817)..(817): n is a, c, g, or t
  misc_feature (1001)..(1001): n is a, c, g, or t
  misc_feature (1220)..(1220): n is a, c, g, or t
attttccccccataaaccccggaaaggatggcaagaaaaaattttccattcagattctagttttccatgtattcaaaaaatggaataagagtttaaaaagttggtttacccaactttagtttcagaattgacatcaggcattttcttattttaaaagtccacccttcagagaagataagaaatttctgaagtccacctttggaatcttttgggattcattctgactaagtaccatttttagttgagagaagtgtttctttgttttgctggtgttctttgaggagcaagtagatactgactgtccagatgtaggtgttctgaaaaccgatgctgggctcttgcctttcgagccagacatgtcatgatttgggtttgcagtccttctctctggtgtcttcaggctgagtttacttgtaggagtggcaggattgctcttcaatgttgacacaaagcttctacttttaccatgatgtttcactgttctgttgcatgttttacaagtgatcaacaatacacttttggagtctttgaactttttcaccatttttgcttctttaaaactgagtgtatagtttctcgcttctcgattaagaagtttctgtattttgggtgtcaacctggctttgggtttgagacgcactcgagagttatccagaaccaacagctggaaacagtatggacacgtttcttcaaaagtgctcttatcatcgtgcgacgaagtgtaggcccagaggaggtagcgggcttggcccgggcagctgtcgtgcagtccccgcgctgcagcctcaaggtagtgcttctgtctcatcgccgccgncgctgccgctggctcgccgcgggaaccaggtgagaaaatagggcgccggaagtcggcttcccagcgtccccgtcgttggtgtccggactcaagctgcttccggaaacaggcaccgtaggcagacaggttccggtttccttcgcgtccagtctggcttggaggcgtgcccagccgggaggcggcnccacccgcccgccgcgtccccgccccctcagttccaccccttggcctgccgggtcctctcaggcacccagcggagtttcgagtcagacttgagctcgggcgtagcggctagaccgggctgtggcgatagagtccaaaggtgaggctcccacccgcctctccatcttcctcccgcctcgcctcctctctgacagcccttttgtgattgccctgccgcacntcgccctccacattcgcc

SEQ ID NO: 440876 - DNA, 1271 bp, Homo Sapiens
  misc_feature (1192)..(1192): n is a, c, g, or t
agagagagaagatcggggggctgaaatccatcttcatcctaccgctccgcccgtgttggtggaatgagcgttgcatgtgtcttgaagagaaaagcagtgctttggcaggactctttcaccccccctgaaacatcaccctcaagaaccagctaatcccaacatgcctgttgttttgacatctggaacagggtcgcaagcgcagccacaaccagctgcaaatcaggctcttgcagctgggactcactccagccctgtcccaggatctataggagttgcaggccgttcccaggacgacgctatggtggactacttctttcagaggcagcatggtgagcagcttgggggaggaggaagtggaggaggcggctataataatagcaaacatcgatggcctactggggataacattcatgcagaacatcaggtgcgttccatggatgaactgaatcatgattttcaggcacttgctctggagggaagagcgatgggagagcagctcttgccaggtaaaaagttttgggaaacagatgaatccagcaaagatggaccaaaaggaatattcctgggtgatcaatggcgagacagtgcctggggaacatctgatcattcagtttcccagcccatcatggtgcagagaagacctggtcagagtttccatgtgaacagtgaggtcaattctgtactgtccgcacgatcggagagtgggggactaggcgttagcatggtggagtatgtgttgagctcatccccgggcgattcctgtctaagaaaaggaggatttggccccagggatgccgacagtgatgcaaacgaccaaggtgacaagaaggacaagggtacgtttgatggagataagctaggagatttgaaggaggagggtgatgtgatggacaagaccaatggtttacccgtgcagaatgggattcgatgcagacgtccaagattttagccgtacccctggtaattgcccgaactctgctcaatgaagtggatcttctgggtccaaaccagaatggttctgagggcttagcccagctgaccagcaccaatggtgccaagccctgtggaggatttcccccacatggagatcccatagtgtccccttgggaccccatggaaacatgtggggcatggaagcctctttcagttttgattaattcagggcacggcaggtcacctgtgggaactccancaagccagccaactggggggggaactcttttggacctaacaaatttccccaaacaaccagtctggtttccccaaagaac

SEQ ID NO: 440877 - DNA, 1241 bp, Homo Sapiens
  misc_feature (16)..(16): n is a, c, g, or t
  misc_feature (21)..(22): n is a, c, g, or t
  misc_feature (32)..(32): n is a, c, g, or t
  misc_feature (94)..(94): n is a, c, g, or t
  misc_feature (130)..(130): n is a, c, g, or t
  misc_feature (134)..(134): n is a, c, g, or t
  misc_feature (378)..(378): n is a, c, g, or t
  misc_feature (385)..(385): n is a, c, g, or t
  misc_feature (387)..(388): n is a, c, g, or t
  misc_feature (391)..(394): n is a, c, g, or t
  misc_feature (399)..(400): n is a, c, g, or t
  misc_feature (403)..(403): n is a, c, g, or t
  misc_feature (407)..(408): n is a, c, g, or t
  misc_feature (411)..(411): n is a, c, g, or t
  misc_feature (417)..(417): n is a, c, g, or t
  misc_feature (426)..(426): n is a, c, g, or t
  misc_feature (428)..(428): n is a, c, g, or t
ctcgacactgttttgncgaanngacggcagantctccacagcacatttggagagcgctcacagccacagtttgcggcgcttgcaggagatcacntagccaggtccagtaggaatagtcgcctccaccagntccntcacgcgaggcacagccttctcggggtgctccacctgcatccgcttccggcccacatagatgaggtcccagtccaggccctcccgctccacatcccgcatgaggttcatcagacgtctcttgaagaagatctcaaaacgcaggtcatcctcaaacacaagcgatttctgcagcccccggtccaccacctccttccagatgttgtagtggctcaggaagcagcccagctcacccttggtgagggnccggccntnntannnntcccnntanccanncancatctntatccccancncctccacctggctggtgttcatgtctttgccgtccacggcttccaccagccggcactcgatctcctgtgcctgcagcgcccgcagcatgcgctcccgccggtcctgccgccgcctcaggttgatcatgaagacctcgtcgaagcccatcttgtccggtgtcttggtgggagccgagatgaagcgggagggctctgcgggcgggtgcttcaccatgacctccagctgcacatgcatgaagctctcggcctcatcctggagggtgctgtgggcgcgcaatggcactggcaagaatccgtactcctccttgttgcacacatacatctgaacctctgcctgcttgcaggagaaggcaaagacgatgatgtcgtcaaaggaccaggtgtagtcagggtgaggtgggtagaaggccaggttcctggacgccgccttccgcaggtcgatcaggaaggtcgagtgcaccatgggaactgcaaagcagccccggcggtctcgcttgcggatagggatgtaggcaggtgtgcgcttgtagtagccctgggaagtcattccacaccagaagttggagtacgcagcccgggaatccagcatgggggcgaccaccgtcttgttctcagcgatgagcaggctcagtgtgtcagggttgaggatcaggttgtccgcatctacaaacaggatgtaatcagcccacatgtctcgagctgatttcagggctgcctggcgcaacttcatgacatgctcgtagcgtgagtcagaccagttttcgggcttcctcgtccgggtaggacctgggctcctctgctggccgccactcc

SEQ ID NO: 440878 - DNA, 1166 bp, Homo Sapiens
tctaaaaggcactttttaagggaccttggagtttgtcctcaaacagctcaacccccacaggcgaggctggtcctagcacccctaccagacagctagtcagtgagaggggtccaacctccccccagcttttccctggaagtggggcagggtcagcagggaattctgggggtgaagctcatggtccaggagccttctggtgcccagagggtagaggagtggaaggcctgggggtgctcagccccactgtatcctggacaggctgggccggcttgcaggctggtctccatggaggctcagaaggaaagtgtgcaagagcaggttaggaagggaaaccaagtcagggaagggccccagccggggctagtggtctgttcactgcccagcgggcactctcagcagcaccccgcagcactccgcttcacatggcatggcttgcagaagagatagttgttcagggggtagcagccttggtccgtgggctcgacagacaggaggatcctgcagtcctcacacctgtagcaattttcatggaagtttcttcccatgcattcgattttgaaggcatctttcccatcccgagggatgatgggattttcacagatgctgcagacgggggcgaatttcctgtagaagtcgtccaggcagtacatctcgttttggctgcccagggcaaagctctcatccccaatgcaccgggcgcaggtcacacacgtgaagcaggaggggtggaaggcctggcccagggccctgatgatgtggtcccggaccacctcgccacacttgccgcacctctccagtgtgtcctggtagcagggttcgcagaggggtcgcccatccttctggtagaagctctgcccagccagctggcggcggcaggtgcggcacgtgaagcactgggcatggtactgcctcttcatggcctccacagccagctctcggggggacacggtcttgtggcagaaggcacagatgtctccattgaagagctgcataggtgcagccggcactgtggctgcagctctgccaggggttgtccaggggctgggcctccccgccaagccagcctcgggtgtcttcatgggggcaggagcctcccaggggcggccacgccgggcatcacaaactgcctgcctcacttcctccgccacggccacatcgcggcgcgg

SEQ ID NO: 440879 - DNA, 1627 bp, Homo Sapiens
  misc_feature (549)..(549): n is a, c, g, or t
ggtaccggtccggaattcccgggatggcggcgcggggcgggcgcagcgggggtcggggcgctgggagcccgttgggccgcgaacgcagccgccacgccggggccgccgagatcgggtgcccgggatgagcctcatccggaaaaagggcttctacaagcaggacgtcaacaagaccgcctgggagctgcccaagacctacgtgtccccgacgcacgtcggcagcggggcctatggctccgtgtgctcggccatcgacaagcggtcaggggagaaggtggccatcaagaagctgagccgaccctttcagtccgagatcttcgccaagcgcgcctaccgggagctgctgctgctgaagcacatgcagcatgagaacgtcattgggctcctggatgtcttcaccccagcctcctccctgcgcaacttctatgacttctacctggtgatgcccttcatgcatacggatctgcagaagaatcatggggatggagttcagtgaggagaagatccagtacctggtgtatcagatgctcaaaggccttaagtacatcncactctgctggggtcgtgcacagggacctgaagccaggcaacctggctgtgaatgaggactgtgaactgaagattctggattttgggctggcgcgacatgcagacgccgagatgactgggctacgtggtgacccgctggtaccgagccccccgaggtgatcctcagctggatgcactacaaccagacagtggacatctgggtctgtgggctgtatcatggcagagatgctgacagggaaaactctgttccaggggaaagattacctggaccagctgacccagatcctgaaagtgaccggggtgcctggcacggagtttgtgcagaagctgaacgacaaagcggccaaatcctacatccagtccctgccacagacccccaggaaggatttcactcagctgttcccacgggccagcccccagggtgagtctcagagcccgctccccaggggcctctcagcgtatcccagagggcgggctctcccagcccctggtgtgaggctcttggctctgcccctgcagctgcggacctgctggagaagatgctggagctagacgtggacaagcgcctgacggccgcgcaggccctcacccatcccttctttgaacccttccgggaccctgaggaagagacggaggcccagcagccgtttgatgattccttagaacacgagaaactcacagtggatgaatggaagcgtaagagctggggcctcgggcttcctcgcctccgcctgcagcctctcttccttgcttcctccatctttgtgcctggcctctgccagccctacctgccacctccttcttggtgggcattgtctcctgggtgcttctttctccttgagctgacttcgctctccatgctgtctctgaaggggggtggactttctcgccacagcacctctttacgcaccttaaaccatgctgcctttctcagagcacatctacaaggagattgtgaacttcagccccattgcccggaaggactcacggcgccggagtggcatgaagctgtagggactcatcttgcatggcaccaccggccagacactgcccaaggaccagtatttgtcactaccaa

SEQ ID NO: 440880 - DNA, 869 bp, Homo Sapiens
  misc_feature (646)..(646): n is a, c, g, or t
  misc_feature (679)..(679): n is a, c, g, or t
gcagaagatcatggggatggagttcagtgaggagaagatccagtacctggtgtatcagatggctcaaaggccttaagtacatccactctgctggggtcgtgcacagggacctgaagccaggcaacctggctgtgaatgaggactgtgaactgaagattctggattttgggctggcgcgacatgcagacgccgagatgactggctacgtggtgacccgctggtaccgagcccccgaggtgatcctcagctggatgcactacaaccagacaggccaaatcctacatccagtccctgccacagacccccaggaaggatttcactcagctgttcccacgggccagcccccaggctgcggacctgctggagaagatgctggagctagacgtggacaagcgcctgacggccgcgcaggccctcacccatcccttctttgaacccttccgggaccctgaggaagagacggaggcccagcagccgtttgatgattccttagaacacgagaaactcacagtggatgaatggaagcagcacatctacaaggagattgtgaacttcagccccattgcccggaaggactcacggcgccggagtggcatgaagctgtagggactcatcttgcatggcaccgccggccagacactgcccnaaggaccagtaatttgtcactaccaaactcagncccttcttggaatacagccctttcaagccaaagaacgaaggggtcccttctccttaatggggggaaaagggggcctagttaaatgccaaatttccaaaaattcccggttgggggaaaaaaataaacctttggaatcctaaaaagggcccccgttaaaatgggcccctctttgggaaaaaccccccctgga

SEQ ID NO: 440881 - DNA, 1197 bp, Homo Sapiens
  misc_feature (788)..(861): n is a, c, g, or t
  misc_feature (1047)..(1074): n is a, c, g, or t
gcagtcaaatgcatttattttgtagcttaagcaagacaggtggtgaacaaattcataatgaaaatgccacccagaggttaacagcttgccatgcatgcaactgtgtgcgcaaaatcaagttgttttaataccagtgtgcagctttgattcctccatgaaattaaagctgtgttgctcacttgtttacataactcaggccaccctgaatatctgctagtggggaatttacaacccactgaccatctcagctcaaagccagatgactatcacctacacatctgccaaggtaatagcatggcaaatagtatttttcttgttctgtagccaatggcacagatacaccaacacagagatacccagaaggcacctcctctcattcagctgacaagcttcctaacatttcttggggacaagagtaccatacatgtactacgaattggtacttattctgaggcaggggatggctgtctccaggttagagcatgggtggttggaagttctcagaagagctgtttcagcacaacccaccagaaacattggccaccatgactgtgtaagatgagtctcctgacattctggtaggcaaccaagatcgcctgactaaagcttggctcaattagggttaagtggaaggtacagagatttgagagagcctacaagagatacgaggcagtaccctagtttatactgttttatgtatagctcagcctcatctgaaggcaaagtcataaattcacaaaatattagaggtgggatggatcactctagacctgtcaacctacagttannnnnnnnnnnnnnnnnnnnnnnnnnnnnnnnnnnnnnnnnnnnnnnnnnnnnnnnnnnnnnnnnnnnnnnnnnatggtaggctaatcctcacccaagaatgctgacaataggtatttggccaaatttttcaacaagcaaaacgagctagtataaatcagaggtgtccaatcttttagcttccctgtgccacactggaagaagagttgtcttgggccacacataaagtacactaacactaacgatagctgacgagctttnnnnnnnnnnnnnnnnnnnnnnnnnnnnctcatgttttaataaagtttaaaatttgtattgggccacattcaaagctgtcctgggacacatgccacgggttggacaagcttggtgtaaatactttaatactcccaaagctccaaatgtatt

SEQ ID NO: 440882 - DNA, 893 bp, Homo Sapiens
  misc_feature (41)..(70): n is a, c, g, or t
  misc_feature (194)..(221): n is a, c, g, or t
  misc_feature (412)..(485): n is a, c, g, or t
agccccctttagaagagagctgagctgattaagctgagtgnnnnnnnnnnnnnnnnnnnnnnnnnnnnnnaatacatttggagctttgggagtattaaagtatttacaccaagcttgtccaacccgtggcatgtgtcccaggacagctttgaatgtggcccaatacaaattttaaactttattaaaacatgagnnnnnnnnnnnnnnnnnnnnnnnnnnnnaaagctcgtcagctatcgttagtgttagtgtactttatgtgtggcccaagacaactcttcttccagtgtgggcacaggggaagctaaaagattgggacacctctgatttatactagctcgttttgcttgttggaaaaatttgggccaaatacctattgtcagcattcttgggtgaggattagcctaccatnnnnnnnnnnnnnnnnnnnnnnnnnnnnnnnnnnnnnnnnnnnnnnnnnnnnnnnnnnnnnnnnnnnnnnnnnntaactgtaggttgacaggtctagagtgatccatcccacctctaatattttgtgaatttatgactttgccttcagatgaggctgagctatacataaaacagtataaactagggtactgcctcgtatctcttgtaggctctctcaaatctctgtaccttccacttaaccctaattgagccaagctttagtcaggggatctgggttgtctaccagaattgtcaggagactcatctttcacagtcatggtggccaatgtttctggtggggttgtgcttgaaacagctcttttttggaactttcaaccacccatgctttaacccggagacaagctttcccttgccttaaaataaggtcccattttgggagtacattttatgggaccttttggtcccccaggaaattgttagga

SEQ ID NO: 440883 - DNA, 506 bp, Homo Sapiens
accggctagcgcccagtgctgggattacaggtgtgagccactgcgccgggcctggcaactcactttcaagctggctgggcttggctcctcacatttgtgcattctgaacacaggctgcagggacagctgctacccccagggaaagctcttttcgtggtgaagggagaagcataaaaaggcaagctgcattgtgcatatgcatatctgtgtctctccttatgttgtgtcatccaatatcccattggccaaagcacgtcacatagccaagctccaaatcaagggtcagagaagtaaatgatatctttttcctgaggggaactgcaacactacagggcaatggacacagccacagggaggggtgaagaattcaggtggacaatgcaatgaaccatgctgatgtttcctggagctgggatcttcaggagcctgtgcttggctgtgcccatccagtcaccaaggaggaacccccctactgcagagctgactgggcgctcagccgggccagt

SEQ ID NO: 440884 - DNA, 2111 bp, Homo Sapiens
  misc_feature (44)..(169): n is a, c, g, or t
  misc_feature (173)..(196): n is a, c, g, or t
  misc_feature (228)..(228): n is a, c, g, or t
  misc_feature (253)..(539): n is a, c, g, or t
  misc_feature (545)..(556): n is a, c, g, or t
  misc_feature (558)..(595): n is a, c, g, or t
tttatttattatttaatttagttttagagacagggtcttgtccnnnnnnnnnnnnnnnnnnnnnnnnnnnnnnnnnnnnnnnnnnnnnnnnnnnnnnnnnnnnnnnnnnnnnnnnnnnnnnnnnnnnnnnnnnnnnnnnnnnnnnnnnnnnnnnnnnnnnnnnnnnnnnaggnnnnnnnnnnnnnnnnnnnnnnnngcctcacactctgccaagtctcaatgcctggntaattttaaaaattattttgtagannnnnnnnnnnnnnnnnnnnnnnnnnnnnnnnnnnnnnnnnnnnnnnnnnnnnnnnnnnnnnnnnnnnnnnnnnnnnnnnnnnnnnnnnnnnnnnnnnnnnnnnnnnnnnnnnnnnnnnnnnnnnnnnnnnnnnnnnnnnnnnnnnnnnnnnnnnnnnnnnnnnnnnnnnnnnnnnnnnnnnnnnnnnnnnnnnnnnnnnnnnnnnnnnnnnnnnnnnnnnnnnnnnnnnnnnnnnnnnnnnnnnnnnnnnnnnnnnnnnnnnnnnnnnnnnnnnnnnnnnnnnnnncataannnnnnnnnnnngnnnnnnnnnnnnnnnnnnnnnnnnnnnnnnnnnnnnnntaaaccttggctcaagcaatcctctcaccttggcctccagagtgttgggattacaggtgtgagccactgcatctggcttgagtttttatttaaagccccaaacattaatgagtccctgctgtgtgctgatacccacaactgacagcttatggccacacggtctgtaggatagacaagcccataaataattctgtacacaatggtaaaacaagaactgctgttgatgtgtgtaccagaagggcagtgacatcagcctggagagttggcctgggcctggcagggagtaaggaaagaattctgggtgcagaagacagcaaataccaaggcctaaaaaagaatgaattatttgctgtttgggaaatggaagcccacgctgagtgctgaagcacagggactctgcgcaggaagaggaggggaagcaagaaatgaatttgggtccttgtgatggcagtggctgctgccatcacgctgtgtggctagggctgcacacttcatggagccggtggaagccccgtccctcatgagttgggactggagccgcaaaccgctgctgcagacccaggccttctgctctatggagcaggcaggagccccaccctcttgggcagggctacagccacccaaactgcagctgtggatccgagcctctctgctcctgggggagccgggaacaggcagaatttgcccttccagatgcagctgcagccgcgcaggcaggagccagggacaagtgggagccctgcctcttccaagttggcggggtgggagctcccaggtgcagctgtggctgcccccccaggcacaggacgagggcatctctgtagcctgcaccatcggccatcccaggaaggacagcccccttcaccctccatccctgcaagctcaggggtgtctgcttccactgcctggcctctctccactccagcaactgctctgatcttggaggggagtcggagccaagacctgcagccatgaatggcagcaggaggaagggggtggggtccccagtaaggccccaccctcaggccagggagggccttaattctgggggctgggctgccagtccctctgaccagagtggaaactcgtggagccttttctgggcctgccaatggcccaatcagcacacagcttcttccccgctgaggtccataaaaaccctaggctcagccagagcagcgcagagaatagccagaggatgaagatggtagagacgaggggacaggatgaccagctgcagagagcagtaccctctctgctgatagctggagacggtggggtgaccagctacagagaggagtaccttctccgctgaaagctacagagaccacctgccagcagagaggagctacactcttctgcgagcttcagagacctgcagagacattggaataacttgctgcggagaggagccactctctccagggcctcctctctgttgagagctgaatgattgagctcatgggacaatctgtctccagagaggagctacccactcctctgactcttctaacac

SEQ ID NO: 440885 - DNA, 1563 bp, Homo Sapiens
  misc_feature (33)..(33): n is a, c, g, or t
  misc_feature (42)..(44): n is a, c, g, or t
  misc_feature (105)..(105): n is a, c, g, or t
  misc_feature (117)..(117): n is a, c, g, or t
  misc_feature (121)..(121): n is a, c, g, or t
  misc_feature (585)..(585): n is a, c, g, or t
  misc_feature (595)..(595): n is a, c, g, or t
  misc_feature (607)..(607): n is a, c, g, or t
  misc_feature (643)..(643): n is a, c, g, or t
  misc_feature (647)..(647): n is a, c, g, or t
  misc_feature (649)..(649): n is a, c, g, or t
  misc_feature (651)..(651): n is a, c, g, or t
  misc_feature (653)..(655): n is a, c, g, or t
  misc_feature (657)..(657): n is a, c, g, or t
  misc_feature (659)..(659): n is a, c, g, or t
  misc_feature (662)..(662): n is a, c, g, or t
  misc_feature (665)..(665): n is a, c, g, or t
  misc_feature (674)..(676): n is a, c, g, or t
  misc_feature (1013)..(1071): n is a, c, g, or t
  misc_feature (1382)..(1428): n is a, c, g, or t
  misc_feature (1478)..(1478): n is a, c, g, or t
gtattgtgtatatcacagtaaacaaaacagtcntgttttcannngaggagactcacaaatacatatttaaactatgataggtactataaagaaaaagagtgccantgtaagaataantaantggggccaccaaattttgattggggcttgggtcagggatgacttctttgaaggagttccatttaaattcaggtctgaatttgtttaagtaggagtcagtctgttgaaaatccttaacatgtcaattgttctttatgcttttgaagttcagctgcaatttactcctttatggtctgtggtggacattttttggcatctttgccaagtacatacctttgagaacatagcctacaaagatggggttctggcagccatgtctgctttacaaaacaaaaaggcctgactacataactgccctgtctggtcaaaggtgattgtgccaagagtacacaagcggacataattcgaaccaatcagtttctttctcctggggtttgggattcatagatactaattagtctctgtttgttcttgaagtgaggctgggtaaacctggattacgttcccaaaaaagcagtgaaaacngctctgccgngattataaagcngctttgtggagagaagcagagatggaagagcctgtnaccngngngnnnangntgncgnaaggggccnnncacttggcttcctgttgatgtattaggtacctatttgtgtccttcatgcgatcttactgctctctgtgtccttgggttgtataagattatctccttgtgttgtgtgtatacatataaagagaaaaggtagctgaagcagtcaggaacaggaggacaaaggaatggagatgtgggaaagcaaggtatttgaggaatggcaactagtgtctgcttcgcagagtgaatagagaagagtagaaaatgaagtctgagaggaagactggaaccaaattatctacattatatgtagggacctgctggtgaatgctacattttattaatccttttagtctccagnnnnnnnnnnnnnnnnnnnnnnnnnnnnnnnnnnnnnnnnnnnnnnnnnnnnnnnnnnngcaaacaggaaagcagtttggaaaatgacaatcactttttatgttgaattctccttttagatgacgagtttccttttctgtgcataaaagaaaatcatgaagatgccaagagagataatcccacttaatctttgttaaactcaaaggctgttaagtatctcacgcatgtgggaattttatgtcggcttaaatgaagatttaagggttatatgaatccaatgagagcaaggtgtgctgaatggctatatactttctatgcataagtactttctttgtttctttttttgagacagagatatactctcactctnnnnnnnnnnnnnnnnnnnnnnnnnnnnnnnnnnnnnnnnnnnnnnnacccgtcctacgtaataagcgattatactgactaaagctaccaagaggcntggtatacacgcgtgccaacatgcccgggtgaggtttgagttggttgttgactaggggcgggggttgtacatgtgtaacaagctg

SEQ ID NO: 440886 - DNA, 1703 bp, Homo Sapiens
  misc_feature (8)..(8): n is a, c, g, or t
  misc_feature (22)..(22): n is a, c, g, or t
  misc_feature (25)..(25): n is a, c, g, or t
  misc_feature (41)..(53): n is a, c, g, or t
  misc_feature (81)..(81): n is a, c, g, or t
  misc_feature (166)..(166): n is a, c, g, or t
  misc_feature (168)..(168): n is a, c, g, or t
  misc_feature (243)..(243): n is a, c, g, or t
  misc_feature (293)..(293): n is a, c, g, or t
  misc_feature (300)..(302): n is a, c, g, or t
  misc_feature (308)..(310): n is a, c, g, or t
  misc_feature (318)..(318): n is a, c, g, or t
  misc_feature (322)..(322): n is a, c, g, or t
  misc_feature (325)..(325): n is a, c, g, or t
  misc_feature (329)..(330): n is a, c, g, or t
  misc_feature (339)..(339): n is a, c, g, or t
  misc_feature (341)..(341): n is a, c, g, or t
  misc_feature (343)..(343): n is a, c, g, or t
  misc_feature (345)..(345): n is a, c, g, or t
  misc_feature (347)..(347): n is a, c, g, or t
  misc_feature (349)..(350): n is a, c, g, or t
  misc_feature (362)..(362): n is a, c, g, or t
  misc_feature (393)..(394): n is a, c, g, or t
  misc_feature (410)..(410): n is a, c, g, or t
  misc_feature (438)..(438): n is a, c, g, or t
  misc_feature (445)..(445): n is a, c, g, or t
  misc_feature (565)..(565): n is a, c, g, or t
  misc_feature (1404)..(1404): n is a, c, g, or t
  misc_feature (1552)..(1552): n is a, c, g, or t
  misc_feature (1606)..(1606): n is a, c, g, or t
  misc_feature (1650)..(1650): n is a, c, g, or t
  misc_feature (1673)..(1673): n is a, c, g, or t
ccagactngttttcaaaatggncanctcttaatcatattcnnnnnnnnnnnnnattcttttggtttcctttccactcattnaataaattattaacataattggttaactaattggttaacacaacccctcctcaattctggggataagattatgcctcatttcgangnaggggaaaggcttgacggtgaaattgaaatgcaaagaacagagttcaaggctcatggttaggttgttattcccanaaaaaaatacaaaccagcaatggtgctattctgagcccttatccacaggnggttagnnnccaaannngactctgncgcnagncaannaaaaaaaanananananannccagaccctganagaacttgtttggccaaatctattctatttnnaaagaagctgtaagancttttcttcttctgttccctcacaaacnaatctgngtatgacaacatctttctgctgccctactcggtaaattcggtcacaagcttgatcttcaagtgatggattccagtgcatgtccaaaagggagaggtgatttcctccagtcaggttttttncaacacctccggccaagagagagattagcattacctgagggcctctggagtggttaaatgcctctaccaagtccattctctgcttgggattgacagagccatcgatggtggcataagtcagtccatgcttcttcaggtgcaatgctacaactttcagcatgttggtccactgagagacaatgacactcttttgggatgctgaatttctttgaattgcctccaattctgccaacagagatgaaatcttggtgctctctcgcatgccttcaaaaagctccatcttgaagaaggtgccgttaagggaaacagtggaagatggctctgagtcacggagttctgacaaggtcaaagcactgagctgttcttccagggaaaggacaagaccttcacccttcagttccattggatccagggccgacttcagtaaagaaagatgacagcaacactggcggagtctcagcaactgggacagtatgtggacggtgctggatctcggtgagtctgctgcctccgagtgtctaggctcctcagacccaaactccagtgccactctactgaatggattattagggcttcttccagattggttgcctctactttcatgtctttttagataggattgcagagctgaccttgatcttgcaaaaaacacattgtaaacagtctcttcatcttcagaaagctttaaatggtgcaactgaaatttacgctggggcagtatcaccaaaggtctgccagtagagtccagctggtcttttgttctcctcagcaaaaggctcttggttaaaatacttaaccgttctcctcctttctttgagccattgtcaacctgactcctncacagattgaactcatcaaatggagagcaacggagaaacttcagcagcgaatacatatccaataagttgttttgaatgggggttccagtgacagcccaacgggcacaggcttgtagcttacacacagctatggaagtctgcactcggngattcttacattgtgagcttcatccatatgattcgagcccagctattcgaagcnaggtgttgagtgcccctcacatgagggttgcactgggatctctngctcttgcttgttggggaatctncttggcaccaggctatagtagtgatcacga

SEQ ID NO: 440887 - DNA, 1059 bp, Homo Sapiens
taattggtttaacccaaaaccccctcccttaaaaattttttggggggaaagattatgcctcattttggaggaaaggtggaaaaaggctggcccgggggaaattggaaatgcaaaggaaccagagtttcaagggctcatggttagggttgttattccccagatcctaattcaaaaccagcaatggttgctattctgagcctttattccacaggaggttagatcccaaaaaaggactctgaggtcagccaaggtgagcttggtgacagattctccagaccctgatagaacttgtttggccaaatctttctttttttcttggagctgtaagatcttttcttctactgttccctcacaaacaaatctgtgtatgacaacatctttctgctgccctactcggtaaattcggtcacaagcttgatcttcaagtgatggattcctgttagaagacagctaaagctcaaaggaactgacatactagatcagaaatggcaaactatgggccatgggccaaatccagcccacagcttgtttttgtagctaaaaattattgttacagttttaaagggatttaagaaaagaaagcaaagcaaaacaaaacacacacatcatgtgacagagaactatgtggcctgaaaagcctcaaagaaaaaaaatctgtcgatccctgtcctaagctatactggcctaagacaagctggtgccagataccttcttgcctagtttctagtgagaaactagggtcagactgttaataatagctcttagcactatcatcagttgacaactcttaagtaacagaggtgaaaccaaaactcaggtctggtctctaggtagctagatgtccttgggcaagttatttaacctcagtcctctaggcttcagattgctacttggaaattgaagggccagctaatgatcttgactagctgcctttttcaacttgaatattctgtgattcgattaaggagacttaatttgtttccttctttattgattccccattgtaactccaaatttagtttctcacctcgtgccgaattcgccacccaggcctcgctc

SEQ ID NO: 440888 - DNA, 1200 bp, Homo Sapiens
  misc_feature (1200)..(1200): n is a, c, g, or t
caagtcgacggtaccggacatatgcccgggaattcgggccattaacggccggggaggaggatgaaggcttgggagttgatctctctttcattggctctcatgcttttgctcgaatggaaggagatattgacaagcaaagaaaactgatccttcaggggacaattatcagaggcagctctgcagaagcagcatcaaagaaattataatcgctggttatgtcaagcaagatctgaggatctgtctgatattgcttctctaaaagccttataccaaacaggtgttgataactgtggtcgaacagtgatggtggtagttggaagaaacattcctgtaacattaatagatatggacaaggctctcttatatttcattcatgtaatggatcacattgctgtgaaggagtatgtattagtgtattttcacaccctgaccagcgaatacaatcacctggactccgacttcctgaagaaactctacgatgttgttgatgtcaagtacaagaggaatttgaaggctgtttattttgtacatcccacatttcgttcaaaggtgtcaacatggttttttaccaccttttctgtctcaggactgaaggacaaaatccaccatgtggacagcctccaccagctgttttctgccatatcaccaggacagatttactttcctccttttgtccttgaatatgatgccagggaagacgggccttactatacatcatatcccccatcaccagatttgtgacctgccatctttcagtgcttcttggttcccaggatgccacttcctccacgaatagctacctgttgaagtgatattcattgttgctgtacagatccagagagccttttgtccccacctctctggtatttttttattgactgtatattttctggcacataagcaatctaaaaatggtaggccattctgaactgcacacattttaaatttgtatatttatatgaaatggaaatgttcatttttagattgttaatagaaattggggagcaacttttgagtatctttagtttcctgaaggacaccgaattctccattagataaaccaccaagactgttcacatcatctctctaacattgcacgcttcctttgtgtacttaagtgattctcgaaatatacagaaccaatgtatgctaaccagatgccccgctcttgcttcagatccatggtgttaataccatgtn

SEQ ID NO: 440889 - DNA, 862 bp, Homo Sapiens
  misc_feature (263)..(263): n is a, c, g, or t
  misc_feature (335)..(335): n is a, c, g, or t
  misc_feature (351)..(364): n is a, c, g, or t
  misc_feature (371)..(371): n is a, c, g, or t
  misc_feature (378)..(378): n is a, c, g, or t
  misc_feature (381)..(383): n is a, c, g, or t
  misc_feature (404)..(406): n is a, c, g, or t
  misc_feature (409)..(409): n is a, c, g, or t
  misc_feature (411)..(412): n is a, c, g, or t
  misc_feature (414)..(414): n is a, c, g, or t
  misc_feature (416)..(416): n is a, c, g, or t
  misc_feature (418)..(418): n is a, c, g, or t
  misc_feature (425)..(428): n is a, c, g, or t
  misc_feature (431)..(431): n is a, c, g, or t
  misc_feature (433)..(433): n is a, c, g, or t
  misc_feature (450)..(450): n is a, c, g, or t
  misc_feature (459)..(460): n is a, c, g, or t
  misc_feature (464)..(464): n is a, c, g, or t
  misc_feature (506)..(506): n is a, c, g, or t
  misc_feature (545)..(545): n is a, c, g, or t
  misc_feature (547)..(547): n is a, c, g, or t
  misc_feature (549)..(549): n is a, c, g, or t
  misc_feature (583)..(584): n is a, c, g, or t
  misc_feature (605)..(605): n is a, c, g, or t
  misc_feature (729)..(729): n is a, c, g, or t
  misc_feature (758)..(758): n is a, c, g, or t
  misc_feature (773)..(773): n is a, c, g, or t
  misc_feature (788)..(788): n is a, c, g, or t
  misc_feature (857)..(857): n is a, c, g, or t
ttgcactgcagctagatattttattattatgtagattaaacaaatttgctacagagtgcagcaagataacctcactgaggaataagattttcataatggaacttgttacagggagttaaatattttcttaatgttatacagtacatattttcaaaatgaacattatcactgaaatagtttgctaacaattgttagcaattaatgttttatacacacttaattttactgttaagtatgtggctctccaaatcttactacatganatgttaagcttaaacgtaagataatcccctaagatggagactcaagacatcaaaactttgatcattattgcncctatttttctacacnnnnnnnnnnnnnngaaaganagacccnccnnntttccctcgtaatcccccccnnnccngnncngncnggtcgtnnnnttncngactcattggctttgancataacacnntctncaatgaacatttttttgtgaactgctgttcagctttacaaanatgtgaaatgaaatttgcttaactattatcatgcgaatnanantccttcacaatcactttttcgtatgttttttaanntgttcttaatatttccctaancctttctggtgccatttaatcaatgacaaaaatacaaagctattccttattctttatgttatagattttaaaacatgcctttgtactgctgaaacagaaattatgtgtttgggagaaccgagcnaaggaaacatttcaaaaccaatgtatgtngatcccacctgagcngctttgatatatganagcctctcataattactggtgtaactattgttgtaaatgaagaatagttgaatatggagagattaaganacaat

SEQ ID NO: 440890 - DNA, 890 bp, Homo Sapiens
  misc_feature (3)..(3): n is a, c, g, or t
  misc_feature (285)..(285): n is a, c, g, or t
aanccaaagcagagccactggggccatgaagaaggagtgaggggtgagcagggaaggaggttcccgcctggttcatgaagacatagatggcaccccctactttctctttcttctggaagtagtagggggcgcccaccaggaggtcctgccacccatcattgttcaggtctgccagggcaattgcgctgccaaaataggcgcccacctgcgagccttccagcacctgcctcctcggcaggtctccgcctgcctcctggcatcagcaagaacaccgcgcccatatgntcggtgccgtggggcacctgtcacaatggtgatgtttttggggtgcaggatgaggctgcctacctgcatcgtgtacccaatatagaggtttccttggtcctctgggtccttgtaactatactcagataagtcccactccttgcgctgaatcatgtagctgtttcctttccagttgtaggcaccgggggcgccgaagtacacagtgttctgggtgaagccaccgctggtgcccagctggcacatgcccgtctccaggtagtctgtgttgctattgcacatctcgttgtggtaggtctgccagtcatcactggagtccagctctaggtcattgcctcgcacgtagcacttgcccaccatgcgccgctggtcttctgaccctgaccacagcacctgggtgtagcggtgggcacagaccagaactctgcctgcagggccctggctggccacagtcactccaagccacatgtcctcaataatgtgatggccagggtcatttttcactgtgatgttcatccgctcacagtcatccttgtgggcagtgagtgggcacaggtacacagcaccagtccggttggtgtagccatcgggcacagcgagctcccggg

SEQ ID NO: 440891 - DNA, 1523 bp, Homo Sapiens
tcaagcctggagctaaatgtgccacattctgtgtaagggaagaagaaatggcaggatggctggacacctctcccagcaattctacaccaagacaaaataaaactggaaacattagctctttgaatgctcccctctccttgttgaaaatccctcttaaggtgctttatccaaagacttttatggaaataaattttgtgttggaaactcactatctgctgtagaggaaacatcgtgtaaagcaggccatcaactatgttttagtattgacatttcaaaaaggcctcatagctcccatgccaccatcccacgcccatccagtccacagtctccattcagccaccaaagggattttcctaaaatgcaattctgatcatgactctatcctgatttaaaggctccagtggctccaaaccccttccatgacaagtctagctcctccacacttcctaccagtttccttaggattcagccctgcctacctatgaagggacccctcaacccctgagcttccacatcatgctctggcaatgccacgttgctcagcggaacccatcatggcatttcatgcgtccacacctttgcacattcttccctcattgtggcatgccctgccaatcctttcattctactggaaatttactctttgttttaaaaccttagcagccattgcttctctcagggtttctctggtccccaagatagttaattgatgctttcttatgccaccttggtacccttgcctgttttgcaatttgtctatacacctcctatgctcatgaacttcttgagggcaggaactatgcctatcctcatgcctggcccttgacccaagctcaatgcatgtttttggaatgcatgaggaatgaaccaactgacaggttcatctatcaatagaaagtgggcccatggcataaattcccagaataatgctgcagcaagactccacccaatgaggcctaagtgaggcctcattgtcaagggaatagagtgtgttgaatgcagaggcaatcaacatcacccccgaagtagaacaactcgcacacaaaaggctgcatcagaggtcgtgttcaccattctcacaacatcgtttgccacttattattctagtcataatgatggctctctttcaacgtcagcataatgcctggtgctcagtggatccttaacaaataccatgtaaggataaatgaataagtgtgaaatctactttttaaaagaaggcatcaagggattggcttttaaaggcatttcccatatgacagatttttctgaggcatgagtgggttgtccctcctaaaatttgacccaatcaggaagtagaacagagatggagcctggggtagcagttaggaatctgcactagagagacacagtgtcaggtttaccttggtcctaggtcagtttccttccttctcaagaaatagccaactatggatggtatttcccgccccaaccagaaggctcttgcctctcctttgtcagaggcacacagtagcatcaccacagtccacattgaccaggaa

SEQ ID NO: 440892 - DNA, 1020 bp, Homo Sapiens
  misc_feature (46)..(93): n is a, c, g, or t
  misc_feature (169)..(192): n is a, c, g, or t
  misc_feature (258)..(311): n is a, c, g, or t
  misc_feature (349)..(406): n is a, c, g, or t
  misc_feature (503)..(515): n is a, c, g, or t
tttctctctttccttttaaaacaaaaaaaaagaggggtttttgttnnnnnnnnnnnnnnnnnnnnnnnnnnnnnnnnnnnnnnnnnnnnnnnnaagaagaaagggatctcttcttgttgtttttaaaaaaaagggtgttttccccccacgagaggggggaggaggtctnnnnnnnnnnnnnnnnnnnnnnnnggaattttattgagggggccccttctctcctcaggggagaagaaaaatttcccccctccctccacnnnnnnnnnnnnnnnnnnnnnnnnnnnnnnnnnnnnnnnnnnnnnnnnnnnnnnttttttaaaccaaaccccccagggtggttttacacaannnnnnnnnnnnnnnnnnnnnnnnnnnnnnnnnnnnnnnnnnnnnnnnnnnnnnnnnncatttaaaaaatttgaattttttaaaagagggtctcaaagaatcccctttggaaacccttccccggggggaaaattttccccgttcgccaacccctnnnnnnnnnnnnntttccctttttttaagaggggcctctcaggaggccttagcacaatggaacttgtgggtggggaagggcttcgaaaatttgggcttcttggtgctttcaagggtttccaacagggttgagtccttccgttgctgaagaaggagctgttgaactccgctaagatgcccctctagactcatgcccgttggactcattgccactggacccattgctgttggcatcggtgtcatcggccaggctggggcctgggcaaggccggtgctgtgggggcccaggggatgggacgcccccaggacaaaatgattccccaggcctggggtcccctcccccatcagccccttctagggggccactcatgtctgggccatggggagaacagaacagagaaggcagagaggccaccacggatgcacgagggggcctggaggcttggctgagggagtgaggtggaagatctaagtctctgagggttgagaagttcgatccagggaattccggaccggtcc

SEQ ID NO: 440893 - DNA, 886 bp, Homo Sapiens
  misc_feature (17)..(17): n is a, c, g, or t
gtccactctaaaaaacnccatttgacagggtttattcagaaggttagaaaaggcaataaaggcatctgcagtatctaagttcaagatcaacactgctgctatgaaggacatgccctggacataacccacatctggccggtaacaagtataagcgcccaaaatactgtgcaaccatgtcatggatatggaccaccttgctggaaaatgcagagattaggaaatgttctagaaatgtcccagtttaataagctccagactggcttctctgtctgctgctgaaaaaccagcatcttcgttctccacttcagagcctcctgtgctaagggaccgccacctctccttggctcgggcaagacagatgtcaaagagctcgtgggtgatatttaactcgttgccaatggctaagctccagactttgcctctcacacttggagggattccctgccaccataaatctcgaacttttctagagcaccacattgtttcccagttaggtaagatctcattattccaggtgagcacagcgtttccaatgctttcctcgactctgcatctttcttccagctgcttcttccttcgctgggcttctttcagctctcgctttttggcctgaaccaccatttcttcatactgctgtctgtgcttctgagcttcttcagctggttttgctgggagatttgctggtctgtcctcgaggatgagtgcggtggtggaaagtggttcaaagtcaagattcttcctcacattctgctttggagagggtggcttgctaggtcttccagccttgtcttcatattccatgaacgccgggtccttagaggcgcgcggccggaggcatccatgcccagcgcccacgcgtccgcgacgcctggtcgacgatatgata

SEQ ID NO: 440894 - DNA, 921 bp, Homo Sapiens
aaatggcgcaaataattttcggcaaatttcttcaaagaaatatttccaattcagcaaaataagtcaacataaggccatggtccactctaaaaaacgccatttgacagggtttattcagaaggttagaaaaggcaataaaggcatctgcagtattttagttcaagatcaacactgctgctatgaaaggacatgccctggacataacccacatctggccggtaacaagtataagcgcccaaaatactgtgcaacatgtcatgatatggaccaccttgctggaaaatgcaggagattaggaaaatgttcttagaaatgtccagttttaataagctccagactggcttctctgtctgctgctgaaaaaccagcatcttcgttctccacttcagagcctcctgtgctaagggaccgccacctctccttggctcgggcaagacagatgtcaaagagctcgtgggtgatatttaactcgttgccaatggctaagctccagactttgcctctcacacttggagggattccctgccaccataaatctcgaacttttctagagcaccacattgtttcccagttaggtaagatctcattattccaggtgagcacagcgtttccaatgctttcctcgactctgcatctttcttccagctgcttcttccttcgctgggcttctttcagctctcgctttttggcctgaaccaccatttcttcatactgctgtctgtgcttctgagcttcttcagctggttttgctgggagatttgctggtctgtcctcgaggatgagtgcggtggtggaaagtggttcaaagtcaagattcttcctcacattctgctttggagagggtggcttgctaggtcttcccctcgtgccgaattcgccacccaggcctcgtttctttgtttttgactttttgtggtggtg

SEQ ID NO: 440895 - DNA, 1972 bp, Homo Sapiens
  misc_feature (524)..(544): n is a, c, g, or t
tttcttttgaaaaggaaagatatatatatttaatatataaaagaaaatgctaaatctgacataattatattcttaaaaacattccatttatttacagatgtataaaaaggtgaattattggtctattgagatcatgcttcttatagtgttagggtgagagctcactgtcttccacgttcctcaactcctctcactcaacttcacctttcataatcacacatgtaatattcatagatcagttccccctagggtaaggttaaagggtaggagtttttggagattttagatttctgtcaagactgcaggattgttctgaagactaagccctcctcaaattatccctgacaacacctagttctaagaggtcttgagaacacagtatcttgggggttagaatggtatctgcagccttccccctaaaacgcctggaatcatccctcatttccatcttcgtacaactctcatcaagagtcaaatggtatctccaatcaagaatcattacctgtttacctatattcttcttnnnnnnnnnnnnnnnnnnnnnggaagtgttaagctaaaatggtccttcttttcctgaggattgttcactcacttgcctgctccttggctgaccctcaaaagccacaaagagagtcttgggaaatcaggaggaaatgtaggggaacgacaagcaagaaaataacgggaaactgctatacctggattaaagtactagcatctctaaggacaattattagcaggggagacaggtgctggactccttggctaaggcattgaatgaaatctgctgggtaaagagtggaaggataagaagctgaggagcactctttacctacttcaggcttctttagtaacctttagaggagggaaggttaagtgctgatgagcagatctagaaaggcaagcagcacaaaaccaacaagaatttgctcccactgcaattttcagaagaagttcttccaccgttttcaatctgttgattaccagagttaacagaaagggaaccaaccatggaaataataattcactggctagatccaatccaaagttggtcttacaacctaggtctgaagatatgctgagtgggatttgggataaagaagacaggagatatagaagaaatagcatcacctaggcacggcccaggcactggaagctcttgtgttagtgttttaacaacacaagcaaatcctgtcaatgaagacagaacaggggttacattcccaaaatataattatttaagaaaggcaaaatgcagcagcctaaatccccagtcctatacagtttcagaatagtgattccttgaccccctaggagtttcccaagagacccctcaagtgcaccatgattatttacaaactagataggaaacatcatttctatactcaatacaaatctcatcttctaggttgaaaacttcagcctttgagaaatctatgaaaacaactatacaaaaatataaatatctttacagactgtcagtccttcatatcctgacagttaatgagtgaaaaagctctacagatcattggatccatggttgcagataaaaaatatatcttgtgattcaaatactgccttatttccctggtaaagagtgcctactgtgacttttctttacatcctgtgcaggtaatagtgaatgaaaccttcaagcaccaggaggctggtttgatttgggaaatttccagccccgatgattttttattttggccactgtctctggtctggggagataatgcattttattttagctgtctcttgagtaacgtaatttgtggaaggggtagggctccctctatgcctacctccaaaatatatactcccagtaaaaatctctggtactgtgaaatgagcttttcaatgcccacaaaaataataagggagaactactattttttaagatctcaaaataattaataataaaagttaaaagcatcatcccgggaattccggaccggtaccatcc

SEQ ID NO: 440896 - DNA, 1825 bp, Homo Sapiens
  misc_feature (86)..(122): n is a, c, g, or t
  misc_feature (170)..(410): n is a, c, g, or t
  misc_feature (412)..(428): n is a, c, g, or t
  misc_feature (710)..(718): n is a, c, g, or t
  misc_feature (797)..(861): n is a, c, g, or t
ttgcccacaaggaccaaaatattcaaacttttatcccctgaagtaatttctgaaggtagaattcccgaaggagtccctgggagatnnnnnnnnnnnnnnnnnnnnnnnnnnnnnnnnnnnnnccacctgcagcccggggggggtggtcaacgcctataattccagcactnnnnnnnnnnnnnnnnnnnnnnnnnnnnnnnnnnnnnnnnnnnnnnnnnnnnnnnnnnnnnnnnnnnnnnnnnnnnnnnnnnnnnnnnnnnnnnnnnnnnnnnnnnnnnnnnnnnnnnnnnnnnnnnnnnnnnnnnnnnnnnnnnnnnnnnnnnnnnnnnnnnnnnnnnnnnnnnnnnnnnnnnnnnnnnnnnnnnnnnnnnnnnnnnnnnnnnnnnnnnnnnnnnnnnnnnnnnnnnnnncnnnnnnnnnnnnnnnnnttccaacttcctcttttaggcgtcttcttaaggaaggaagtgtccgcgtgaacacgagaggcctcagatccagaagcacaagccgtgcatgaaaacaccaaaagactcactgcagggagcaaaggcagccaggccctgccaaaccagagggggccctggcaccggcgaccacagagcgctgggggaggcatcgcacccaagggcacacacgcaggaaaaccggggtgagaacatagagctacttttccttcggtattttcagaattagtctgtcctaagagnnnnnnnnntacatggtgaacatcactcacttgaggacttcccataagcaaggagaagtcgctccccactgaatgtgtgatttctcgnnnnnnnnnnnnnnnnnnnnnnnnnnnnnnnnnnnnnnnnnnnnnnnnnnnnnnnnnnnnnnnnnctccgtcaagtccagctgctgcttcaaggactggatttctctttctttctgatccacctcccatttgagattttccatctcttggtttcccacgggctgtttgctgagctgctcgtcccggctgcttttgccaggagctggagctgtgccccgggcttgggccaagctttgcttgggaactgtgctatctcttgggaatgtttcccctcccgaatctgaaggtcgtcggcttcggcctgcagcttctgcaccaggtgttccttggcctgcagctctttcttcacctcactcagctccaaggaggccgccttgaagtggcggcggttatgcccggcttccaccttggcagcagccacctgctccttgaggctgttcaccttctccctctccttctctagtgaggcctgcagggcctggacaagatgcttcatctggcgatcctcctcttctttgcgctgcaaaactgcctgcacctgaaggttcaactggactaggtctgcctccctcttggccaaagctgtttctaggatgctgttgtgttcccgcagagctgcgttggactgaccgaggcccgtaagcttccctttctcgtgctctaattcaagagccaacttcttgtttgactcctcaaggcgttttatcttcttcctaaagcctctggattcttgaagctcgtcctccagctccagcaccttctcccgggactcctccagctcctggctggtcagcgctatgacctcctgcagttccttttccagcagcgtcttgctatgactgacagcctgcagctccgcctccagggcctggatcctttcatgtagagccaggctgctgtcactgctgccaccctgggctcggagctggcccagctccgcgtccgcagcctccttggccgcaagggcctcctgcaggcggcggctgaagatgcccacggcgttccctcgtgccgaattcgccacccagg

SEQ ID NO: 440897 - DNA, 791 bp, Homo Sapiens
  misc_feature (87)..(87): n is a, c, g, or t
  misc_feature (255)..(255): n is a, c, g, or t
tttattctttaagaaaacttttgtcccccataccagaattctttaaaaatagaccaattatataaaattttatctattgtttcttangacatttaaataagttaacacacagtgaaaagcgtggcattagttgtcttcttcctcatcccctttaattactggagtaccatccagctttttcagtttgggcactctcttggttgcttcttcaatccagttattctcagcagaatgtttctcttccaagggattgcntacaaacaccaggtcttcgaggcatggcagttctgccagcttcacaaactcagcccagtcttttaccaggttattagacatgtagagaatcttcaatttcttcattatgtggatccctttcaacttctcaataaaattgtaggagatccacagttcttctaatgtgtcccctactgcctccagtccatttaagttctttatgttgtttcttcctaaagataatatcctcaagttttttaagccattcaggttggcaattttttcaatgcagtttgtagacagtgaaagcttctcgcaattagcaagcatggacaaggatgcatccatcttctctatagggggaatctgggcataaagttttatctctttggcttcagatggcctctggccagttttctcttcccatctcgctaaggcttctttgattgttgttgctttcgccattccggcggttgctgactgtcactgctctggttgctagggcccccccggccgtaatggccgaattcccgggcatatgtccggacccgtcgact

SEQ ID NO: 440898 - DNA, 892 bp, Homo Sapiens
atattttcagtatattaaaaaggaacagtacaaatgctgtggtattaaaaaggatccttatttttcaacaaatgaacttttataaacaattctgtaatgaaatgaaaacagtatcttaatacaagcttttgttaaacaagattttaaaattttaaaattagaaaacgttaagattaaactctttcaaaggttcaaacaaaaaaacaacctgtacaatctccattacatgtgtctttgtacacagtctgggcactttgaaaatgttaaagtttttaacgtttgactgacagaagcagcacttaaaggcttcatgaatctattttccaaaaaagtatgctttcagtaaaacattttaccattttatctaactatgcactgacatttttgttcttcctgaaaaggggaatttatgctaacactgtatttttaatgtaaaaatatacgtgtagagatattttaacttcctgagtgacttatacctcaaatgggatttaatgaacaatttctaaattttagaatgaaacagtatgtgtaaatctacacatgtatgttcaactagggtaaagctcaagagcatgtcacagaatttatacctaaattatataagaagttaagcaatgcctttatccccaaactttaccaataagccttctcaaatagaatgttagtaacagtgaatcactgaaaaagttctcatttttgaatttaactaaaataccagtagccattttagactgtcaatctggatgttttcttgattcactaggcagaaatttcttgcatacaaaaagattacaaataatttaaatatctgctttatcatacaactttaacccctccttaagtgtctaaatgattggaattgttcccttctttggcttaacccttcctt

SEQ ID NO: 440899 - DNA, 1567 bp, Homo Sapiens
  misc_feature (1424)..(1424): n is a, c, g, or t
  misc_feature (1434)..(1434): n is a, c, g, or t
agcgatcgcgctgggccgcgctcccgggagcccagggcctgcagcggccggggcgccccgaggtctgctcattgtgtttttcaggaaaaaggaagggaaagggtgttacaaggaaaggctatcggtaacaactgacctgccacaaagttagaagaaaggattgattcaagaaagactataatatggatttagagctcgacgagtattataacaagacacttgccactatgagaataatactgctgccactcggaattctgatttcccagtctgggatgactataaaagcagtgtagatgacttacagtattttctgattgggctctatacatttgtaagtcttcttggctttatggggaatctacttattttaatggctctcatgaaaaagcgtaatcagaagactacggtaaacttcctcataggcaatctggccttttctgatatcttggttgtgctgttttgctcacctttcacactgacgtctgtcttgctggatcagtggatgtttggcaaagtcatgtgccatattatgccttttcttcaatgtgtgtcagttttggtttcaactttaattttaatatcaattgccattgtcaggtatcatatgataaaacatcccatatctaataatttaacagcaaaccatggctactttctgatagctactgtctggacactaggttttgccatctgttctccccttccagtgtttcacagtcttgtggaacttcaagaaacattttggttcagcatttgctgagcagcaggtatttatgtgttgagtcatggccatctgatttcatacagaattgcctttaactaatctctttattgctagttccagtataattctgcccttagtttgtcttactgtaagtcatacaagtgtctgcagaagtataagctgtggattgtccaacaaagaaaacagacttgaagaaaatgagatgatcaacttaactcttcatccatccaaaaagagtgggcctcaggtgaaactctctggcagccataaatggagttattcattcatcaaaaaacacagaagaagatatagcaagaagacagcatgtgtgttacctgctccagaaagaccttctcaagagaaccactccagaatacttccagaaaactttggctctgtaagaagtcagctctcttcatccagtaagttcataccaggggtccccacttgctttgagataaaacctgaagaaaattcagatgttcatgaattgagagtaaaacgttctgttacaagaataaaaaagagatcctcgaagtgttttctacagactgaccatactgatattagtattttgctggttagttggatgccactacacccttttcatgtggtaaactgattttaatgacaatcttatttcaaataggcatttcaagttggtgtattggcattngacattaggntggccatgatgctcccggtggtcttaattccactcttatatggctttccctaataattggtttttaaggtttttttaatgtgtcccttataccccgggtgtttatggttgaatctttttctttgttatcaagg

SEQ ID NO: 440900 - DNA, 2093 bp, Homo Sapiens
  misc_feature (1339)..(1339): n is a, c, g, or t
catcatcataatcatttattttttgttttcttaaatgaagcataataaacagttaaaattctcagaaaaatcatctatagttgagtgtaaaactcccctaaatcagtcttctagggccacacggagcagaagcagcttcccacccaagcacctctgaactgtgcgtgaggaggcacaattcagggttgtttctcgagaacactcattggaaaacaattcactactgcacgaagagggccaaagatctgcagagaaatgtgaagcaagtgttttgcactttttatccaaatattgattaggttttaaagcaactgatcacttgctggacagctcagccacgggatgccacgccttggagtcctgggaaggaggagaagcaccaagtcctttacggtatgagatgggcactgaatgaggctttatggtggggtttcccacagacgtgaccttcgtttgcttctgtaggtgctccacccattcctgcagatcctgctggttgttgcacgacactaatatccgctcaatcatgctccctgatatttcaaatgcatttctatgattttcactgtcctcaagctttgtgattgtcattcctgtcgttgggagctttccctgatagataaagccactcatcctaggactggcagacaacattagcaaaacatttggggagagtagaagatatctttcattcttttcctcacttccggcacactggatcagggcctggggcatgtaagtgacgttgcccagagttttaatgtcatcgccctcccagttccgggtggcttccgtcaggatctgcagctcaagctctttcctcttccggacttcttgacattgggctgaaaggtttttgaaggcagccatggatttttgaatatcttgtctatctgtatgataatcctccatgtgtctctcgagctctttgagcagcgtagggtatttatccaggcgcatgaagggtttgctcaggcccgtggtcagcacgagaatcccagggctgctggcacctttggtctccatgaactcccccaactcctcactgtgttccgtgaggacattcactgcagaagggtgattggcacaatacgtgaggtacagggttttcatctgtggcatcaggtttaaaaagcagcctccgactctctgctgagcttcgggcaacttggtgcattcttctaaagactgtacgagcatttgctggaaagaacatatttcttctagatttcccattaaatatgaaatgtttgctgaacttaacttctcactggtctgcaatggccgtaggtacgttgaaagcacagtctgaagttctttagaatattcattttctgtntctaaaatattctgtagcaccaacattgtaatagcttttgtttatggcagtcgtatccaaatccttttgggagggctcttcagtgttcctgattttgggagacacaggcttctcgctggcccttgacctcgcgcactgtagttgctggggaaccagccggtccggccgttgagtgtgccctcccaccagcctccctcttccacacgggtgacatggatgacgtctccttttgagaaggaaagctcgtcctcattggtctgctggaagttaaactttgctcttactaccagttgattgttgctattatcggtcatgtccaaactccgatactggccctggaacagttttgaagtccgagtgtgcaaagactgtgatccaagggagtcaaaagactttatgcggtgagacgagggccgggcacacacggagtcactccccagcccgatgtctgctgttactttatttagagtcactaaggaactgaggaccttgttaaaattctgcccctgatacaaatcatttgcatcaaacgttttctcgatggtcccggggagcaggcgctccagcagcctgcagaggaccaccccatccttcagcgacgcctgcagaaagccctccgggtccgagatggtttttttgggcgactccagcacccccagagtgatgagccacgtaacggtttgctcggcggaattcatcgctgcggcccgggaggcaggcggggaggggcgcgcgccttcacctcggagctgcg

SEQ ID NO: 440901 - DNA, 1690 bp, Homo Sapiens
  misc_feature (1444)..(1444): n is a, c, g, or t
  misc_feature (1533)..(1533): n is a, c, g, or t
  misc_feature (1604)..(1604): n is a, c, g, or t
  misc_feature (1618)..(1618): n is a, c, g, or t
  misc_feature (1678)..(1678): n is a, c, g, or t
ctctgacacccctcattcaaaggcacctcccaccccgcacctcagccttggcggagaggactcacagcattggacacatttccaccatgctaatggcattttaaatatatttggcaattttcccaattttttactgaagaaaactgtaagtttatacttgaggactgaagtgtgactctgccgattatcaggctttcaagatgaatctggaaaaactcagcaagcctgaactcctgacactatttagtattcttgaaggagagcttgaagcaagggaccttgttatagaagccttaaaggcccaacacagagatactttcattgaagaacgctatggaaaatataacatcagtgatcctttaatggctctacagagagattttgaaacactgaaggagaaaaatgatggcgaaaagcagccagtctgcacaaacccactctctattcttaaggttgtgatgaagcagtgcaagaacatgcaggagcgcatgctgtcccagctggctgctgctgagagcaggcaccgaaaggtgatcctagaccttgaggaagaaaggcagcggcatgcacaggatacggctgaaggagatgatgtcacctacatgctagagaaggaaagagagaggctgactcaacagttggaatttgaaaaatcccaagtgaaaaagtttgaaaaagaacagaagaagctctctagtcagctggaagaggagcgctcccgccacaagcagctctcatccatgctagtgcttgagtgcaagaaagccaccaacaaggcagccgaggaaggacagaaggcaggagagctgagcctgaaattggagaaggagaagagccgggtgagtaaactggaagaagagttggcagctgagagaaagagaggcttgcagactgaggcccaggtagagaagcagttatcagagtttgacatcgaaagggaactactgagagcaaaactgaaccgagaagagaaccggaccataaccctgaaagaagaaatggaaagtttaaagaagattgtgaaggacctagaggcttcccaccagcacagtagccctgatgagcaatttaagaaaccagtaacccgtgtccaaaggcacagcaactgagcctctcatgctaatgtctgtgttttgccaaacagagggttttctagcagaaagaacccatgtgagccacatagtctagatgacaaacactgggctgcctggtcctggcactcctgcttactcatatgcaaaaaccaatggccattgtgacccagagatacaaactaccagggagctgactgcaggcaacaatgtagaaaaccaagtgcctccacgggaaaaatctgtggcattggcccaagagaaaccagtggagaatggtgggtgtcctgtggggattgagactccagtcccaatgcccagtcccctctcttccagtgggagctcactgtctnccagcagcactgcctcctcctctctaacatcctctccttgctcttcgccggtactcactaagcgtttattggggtcatcagctagcagncctggctaccagtcatcgtaccaagtagggatcaaccaacggttccatgcagctcgccacaaatttcagtnccaagcagatcagnaccaacaagcccgggccctacagagcccttcattcagggatttatccccccacctcatanacaactttgccg

SEQ ID NO: 440902 - DNA, 1710 bp, Homo Sapiens
ggagcggcgggggcctggttcggcttcggtttctgcggcttcgggcaggtgctgggctccggtcgcgggcgccaggtgcacagccccagtccgctgcgggcgggcgtcgacatctgccgcgtgagcgcgagctggagctacaccgctttcgtgacccgtggaggccgcttggagctgtcgggctcagccagcggcgcggcgggccgctgcaaggacgcgtgggcctcggaggggctcctcgcggtgctgcgcgccgggccggggccggaggcgttactgcaggtctgggcggccgaatcggcgctgcgtggggagccattgtgggcccagaatgtggtgcccgaggccgaaggggaagacgatccggccggtgaggcccaggctgggaggctacccctgctgccctgcgcccgtgcctacgtgagcccgcgggcgcccttctaccggcctctggctccggagctgcgggcacgccagctggagctgggcgccgagcacgcgttgctgctggacgctgctggccaggtgttctcctggggcgggggcaggcatggacagctgggccatgggaccctggaggcagagctggagccacggctgttggaggcgttgcagggcctagatcatggctgaggtggccgcggggggctggcattctgtgtgtgtgagtgagactggggatatttatatctggggctggaatgaatcagggcagctggcctgcccaccaggaacttggcagaggatggagagactgtcgcaagggaagccacagaactgaatgaagatggttctcaggtgaagagaacgggtggggctgaggatggagcgccctgcccccttcatagctgtccagcccttcccggcattactggatctccccatgggctcagatgcagtcaaggccagctgtggatcccggtcgacacagctgtggtgacacgaacagggtgagctctacatctggggcgtggggtactatatggactagctgggccacgcaggacgacgcaccagcttggatcggtctcgccgtgtggaactactttgtagataagcaactccaagtaaaggctgtcacctgtgggccgtggaacacctacgtgtatgctgtggcagaaagggaagagctgacatgtgtacgtatatgtatatgcaacacctgtgagacccccattcaggtcaaggaaaaccattgcctgcaccccaagggccccatatttgcccctccccatcacagtcctgcccttcaccctcaagcacggtcctaaacttgtctgcactttagaaacacctggagagcattgaaaactctgctgcctaaggtcagcatcaatcaaaacaatgaaatcaatgaaacaatgaaaccagagcttctaggtgtgtggcctggatagtggtagattcaaagctccacccacctcatcccaggtacatttgatgtgcagctgagattggggcacattccaggtcatcgtcttctgtcagtcatttccctgctttcgtttgaattttaccattcttgtatgcagccttatacgacatagttgtgtttgcttttgagtgttagataaatggaatcctgtgtatgtgcttttgtgtcgtttttgtcactcagcattgtataatccatccttgttgggtcctggagttcatttttaatgctatatggtgttctgttgtatgaataatacctcaagtgatacaaaa

SEQ ID NO: 440903 - DNA, 1474 bp, Homo Sapiens
  misc_feature (952)..(952): n is a, c, g, or t
  misc_feature (1046)..(1046): n is a, c, g, or t
  misc_feature (1341)..(1341): n is a, c, g, or t
tttattttctctcctcccccccaccgaccgccacccaccaaacaaggctggtaccggtccggaatcccgggatggaggagcggccgggggcctggttcggcttcggtttctgcggcttcgggcaggagctgggctccggacgcgggcgccaggtgcacagccccagtccgctgcgggcgggcgtcgacatctgccgcgtgagcgcgagctggagcctacaccgctttcgtgacccgtgagcactccccgccccgtccccacttattccagccgcgctccccagtcgcctccccgcaccgctgtggccagtccagtttgtctcccccgttcaggccgccagccccacattctgggttggtccccaattcgaccccttcccaggaacaccccgctccccccatccccgccgcctccattctggccaccctgctccaatccgccccgcaggtggaggccgcttggagctgtcgggctcagccagcggcgcggcgggccgctgcaaggacgcgtgggcctcggaggggctcctcgcggtgctgcgcgccgggccggggccggaggcgttactgcaggtctgggcggccgaatcggcgctgcgtggggagccattgtgggcccataatgtggtgcccgaagccgaaggggaagacgatccggcccgctgagggcacaggctggcgagggcagccactgcgtggcccagaccccccaatggtctaacgtggaaggctccaccggcgcgcgcccctctaccaaaaggagacacttctaggcgtcccagggacaccctcgcgggggttgaccagctaaacagtgtgcggccaacatgggcggaccactcgcggagagcacattagagggcatcgcgcgcagtcgctcggaaaggccaacacacccaaccgtgggtgtgacacaaaccccacgggagtttacagcccaaaccagggtgcgnagggatggcaacccgtaagagcggcccatccccggaaccccatacctcccagaagtaacttcgtcgtctccaatgatccgagctagcgtacgancggaaatatgtaacggtgccagtacagaaaagggagactactgggtgacgcgtacgcgtgcgagcacccgccgcggaatgcacaacgcccctcggcggactccttcatacagcaacggtcggcagcgggtgcgggacccatctacccaaaccgcgcggtccacacgcgcgacccccgctgttcgatcatcgcgcacacacatagaccccttaacgagtagacgggagactgaaaatgtggatggaaggtagcgcatcagaaccagcttaccgctggacgtgggagttttacgtancagcttctcgacgacgcaagagggccgggggaggaggaccagcagaacgggcccctgaggccctcagtgtgcaatagatcaactcgggtggtaaagtgggctgttgtctgatacaagtgtcagtcgctatggt

SEQ ID NO: 440904 - DNA, 668 bp, Homo Sapiens
cgggtgacgataggatcacaagattcctaataaatgtaagtggatggttactcaaggtaaatcccttcatccccttgcccttcattagaatagacagaaactgactgtatacaggctttatttactcctttgtaatgtgccaaaataaaaccccaaggcacaaatcacacaaaccaagtcatgccactgggaccatcgtgtgtcatctgagctagctgggccatgccaactcctactccatcttctgcttttccctgcattcctcacgaatgggagcttctgtgtgagcattcataagacatcctgcattcacgtccactgatgtgttttcttttttaaaaaactacgcacatgttattaggaatgtttcaaccacatagaaaacatataatagaaaccaatatagacaccacatagacgtgggccatgttaacattctaccgtttgctcattttttaaataaaacctttatgaagacattcacatagcatgctttcactcattgaaattgtacaatttgggtttttcatagaatttgcaaccatcaccacattaaatatatttatagaatttgcaaccatcactgcattaagtctacttatagaaattgcaagcatcatcactataaactttagaacatttttatcacctcaaaaagaaaaccccta

SEQ ID NO: 440905 - DNA, 179 bp, Homo Sapiens
aacatgtggagaaaaaaaactttattggtattacagcaaaaaattcacataagatacataaattatgatacctcaaagctagacgcaaataaaatacacctaattatacaaattctatacaattaaatcaagaacattaggaaaatttttttgcaaaaatgtcaaaaaaagatttgatc

SEQ ID NO: 440906 - DNA, 568 bp, Homo Sapiens
cagacatcaaacccatttattctgaatcttaaattatgacttttatcatcaatattttggttacattgttacacaaagaacaaattaacatctggtttgaggtctcctttttgattgctttgggattagtgacatttccttggcatatgcattacacacccatcaactctcagctgtgtcttaataatgttgtacgagatgccaaaacaagaaggatttgtaacagtgctcctggggtacctccaccaatatctttaaccacagtgactttcaggtggcttctcgccaggtgcatgcaggagagtgtcaatgcatccctttcctgggcagatcaaaagaggatccggaggaagaggagctggtctgttggctttgaagcacctgatcactgtgcgctcactcagaggtggatccaaataaattaaatcacccacagagaagtcacagcacacgtggcaaagacatagtatgtttaggggacttggtcattacagcttccattaccaacttatatgattcaggaccactcaggaacaccaggttcttaaaggattcttaagtataaatt

SEQ ID NO: 440907 - DNA, 1009 bp, Homo Sapiens
tttgaataaaatatttttattgattgaacctttgaccctctatcttattacatttagaggcctggcatctttcttgtgagacaagcttaaggacacaaaagaaacacaactttgtgataccactcttctgaaggctacttatagtaataacttcatagatgaacagcatgattcaggtacagtggctttaaacatcaaagcacatttctcattatataaattaaaacgggtggctccagtgccactatcaaagcttaagttatatcttttatctagttctctgaatgtactgaaacagtactttattcgtccaataaataaagcaataaaaattgttcttactgaaaatgaagtagctaggtgctcctgaatttctctccaaaaactaaaacatttaggtcaaaccacttctccggttgagcagtgtattttgatcttgaggattcatggcttgataagtagatagttctaaggcaaaagtagctgagcctgatgttagcgttcgaagcacagttgaataacccataatttctgctaagggaacaaatccaataacaactttgttggtcctggcgagtctgaatttcctgaatgtttcctcttctttgtgccagatctgccaggacagggctgagataatctctagctactgtaacctcaagattcatcatgaggctccaaaactatcttatcagctttcttcagagccttttgcacgcatcttgagacacagcgcagaagtctaagttgtggaggtgccagatgactcgtccggatgttaacgtatttgccactccctgaattggggatccaagcatgtccttggacaatgcgctttgaattcatgtgcagcccctgggacctgcaagcctcatgagacttcagcaccatagggctagcgagagttaatggccgtactataagagagagcatacccacacatacggagcgagagaagacataggacacgaataacgtaagtggtacaggtgtcaaagggaaccacatg

SEQ ID NO: 440908 - DNA, 915 bp, Homo Sapiens
  misc_feature (77)..(111): n is a, c, g, or t
  misc_feature (687)..(699): n is a, c, g, or t
agaactttcaagttcttttattataaaagtctgtacaatgaagtgccagacacagcaatgccattatactgggggannnnnnnnnnnnnnnnnnnnnnnnnnnnnnnnnnncagtttttatttgtaccaaagtaaaactatcaccaactgcctaattctaccagctactgctcaactatgacacacaatactgtcacagagcataagtgctgccatgccacttttacatattctactcacagccaaacattaacattgaataacatattgaagcagctgttaattctaaaatgaaaccagtcagaccactgacttataaaaatatggtactcatatagatttagcattataaagaaggaatatattatttaaaacatttaaatagtgcatatggacatttttgcatgtggtatataaaataaaacattcatataagatacacagtgcacataaaattagatgtttggatacactcctatctggagactgaaggaaattatctgaaatgtacactgcatgatggattcaaataaaaatgatacatcttttggtattttcaatttcacttttctaggtatacattatgaataacctagttgtatcaaaaggaaaccacacaaaaagggcaggatttagtgcttttctttattccccaactacacattcactaccaggtttttccctcannnnnnnnnnnnnagaaaaaggcattgcacacacgggttgaaaatgtgaagtactagaacctgctatttaatttatcaaactactttaatgtgcttaactatggcaataaaagcccagaaagtctagaggttacatggcttcccttcaacctttaataaagaggaggtttgcaaaattccctatcttttatatatggcaatatattgggtcaaatattaagcttaagtt

SEQ ID NO: 440909 - DNA, 779 bp, Homo Sapiens
aagttttatcttttaaatgggatttatttatgtttacataaaggtagcaaatgttacataagttgtttccttaagaacatttattttgtacaatcacattgttatcaagcaagacttatggaaaatttcctgggtccacaacactgaactttgaaactactgtagcattctcttttccaagtttaaacatgactttgtgcactgaagaagtatggcttcgcattgcacagtggtcacatgtgacaacctgacaccaagcgagaagccttttgatgaagaatgttttatcttttgttgagttacaaaatggtactttcatgtgtgtgattatcaaacccatattttttttcagttcatttctgctacaataaaaataaaccagttaaaactaagcagtatagcaatgtaatcgaccaactatctatcatgttatatcttatatacgatgtgttaggtgatattgatgcttaatattacacatctgtcatttaatatactttggtcaatacaaagttagaacatgtatggtcaataaacaaacaaaaagatttccctgaacatcgacgcattgttttaacaatcacataaacttaggttcattcctcagaaagcgtggcgggaattgctgacccattaaaaataaaccccatctactggagaacattttctttcaatatacaccattttaatacattcttctaaatgactactactatatacctgtcttcgttactcgccttaaaacacttatccactttgggacacgatcagtacatgat

SEQ ID NO: 440910 - DNA, 741 bp, Homo Sapiens
gaaagtggatcaaaacactttaataaaatggcagcggctttgtgggatgtctgtggcagacaaaatcaagagccaggagcccgggatgcggagacgggcctcggtctccacatcctggcgggtgctggggccggggctagtacttgagcagccagcgtggcctgtgggtgctcagcgatgtgaagtaggaccaccaccagggcttactcccgtcggccgagggctgcctgcgcgcccggagcgggtcgggctccgtggcctcccccaaagagctggcacctcccagcgggtcgtggggcccagtcctccgcagcccatgaataaagttcttgggtcccatccccagaggttgcagaatgaagtccacacggccagccctcttcatccgggcggggatgatgactttcttgatgactttggcgtagccaggggcttgggcaatgacaatgtggatacctgggggcagcagtctccagtagtcaccatctggggctgtggtgatgtcgtggcgaatgcctttgactgagatccgggcgtttttgactggcttgccgaatttatctgttaccacacctttgatgccccggtgcaccgtcttcacgaacatcaggagttgaccccttgcccgcgctgtcagtgtgtgtccagggcctccttggggggggaacttaacacagcccatcttttaccgggatcttaaagcaacatggtggtccaggtattttaaattcgttcatgtct

SEQ ID NO: 440911 - DNA, 1134 bp, Homo Sapiens
  misc_feature (10)..(10): n is a, c, g, or t
  misc_feature (19)..(19): n is a, c, g, or t
  misc_feature (21)..(21): n is a, c, g, or t
  misc_feature (32)..(32): n is a, c, g, or t
  misc_feature (39)..(39): n is a, c, g, or t
  misc_feature (61)..(61): n is a, c, g, or t
  misc_feature (97)..(97): n is a, c, g, or t
  misc_feature (99)..(99): n is a, c, g, or t
cttccatcgncaaagcatngnccaatgaaganaatcacncccagcctcatcccctcttctngtatcttctgagcaccaggttctcacttatctaatntncgttcagtaccacagctcccctctgcatttccaatatctgcaggtaggtagggcaatgatcgattctcctcttttaatgaccttgggaagtagagaggtagcagcttttggtaagtaccctcttcaagatcagagacagcaaatactactttttcaatggtttccccatgaatctctaggaatcttcttacagtgcgaagtgctatgtgtgttgcatcctctaaaggataaccacgttttgcagaattgatgacacagaagccaacagaagacattgactgctcttttgctagttgaagtacgtttctgtagcagctataaagggaactctcagctgctgtgcgatagcggcttttatatttaggtcccactgtgtgaatgatgaaccgggcagctagattgaatccttttgtcaattttgcttcacctgttcggcaccctttaagtttctggagatcttccttcaaatcaggccctgcaagcatgaagatactttctgacacaggattcttatctgtgagactttcattgctggtattcacaatggctgtacagttcagtaatgccacatctcctttccaaagaaccacttttccattgacgtccttattataaagaaaaggtgatcgaacagtgtcttcctgaaatatttcagctgtagtatcagaggaatttaattcatcttggcatgagtcaccccagcttggtagtgtatccacatccacaaactgggaaggtgcacctaagggatccatggaatgggaactttgatttgtcttttcccaaaatcctcagcaattcaatattcactggagactttagagcactctggtggtcccatccgggcggcgggcggcacggatcaggctcctggtagaaggcggccgagcgacatctccggcgaccctcagcaggagcgcgccgagtacggcgagtcaaagtcccaggagactggagtgaccagctgcaaatgctctgggctgcgaaacaccgctccgctctcgacgaattcgagctcggccgatttggcctgat

SEQ ID NO: 440912 - DNA, 1028 bp, Homo Sapiens
  misc_feature (5)..(5): n is a, c, g, or t
  misc_feature (7)..(7): n is a, c, g, or t
  misc_feature (12)..(13): n is a, c, g, or t
  misc_feature (16)..(16): n is a, c, g, or t
  misc_feature (19)..(19): n is a, c, g, or t
  misc_feature (28)..(28): n is a, c, g, or t
  misc_feature (35)..(35): n is a, c, g, or t
  misc_feature (41)..(41): n is a, c, g, or t
  misc_feature (50)..(50): n is a, c, g, or t
  misc_feature (87)..(87): n is a, c, g, or t
  misc_feature (101)..(101): n is a, c, g, or t
  misc_feature (104)..(104): n is a, c, g, or t
  misc_feature (128)..(128): n is a, c, g, or t
  misc_feature (141)..(141): n is a, c, g, or t
  misc_feature (143)..(143): n is a, c, g, or t
  misc_feature (151)..(159): n is a, c, g, or t
ctccncncccannccnagncccatccgnggatttntgccancagggttgnagcacacacgaggtctctgccacgccccaagcagcancccccaggtcctgntgngggctgttcagccctttgtccccnttgttcattaaantnaaataagnnnnnnnnnggctccacttggtgacttgggtctgtagagggtttctgcttcgttccctgtctggtcatcctggtccatcctgccaaggcatcgtgcgggccagatctggaggctggacccagccacacccactggtcactgcagtttcgtccccagcttgcgttgtctgttcctggcttctgcccgggttaccgtgtactcaaaccagagtacgttgggaatgaggcttgtgtctcggattaggaagaactcggagacaggccaggctgctatcctggggaacagcggggtgaggacctcctgggtgaagatgaaccaggcgatggccatgaggcctccagcgatgcctccatagagcacctggctccaggtgtggtacagcaggtagaccctgctgtaggagactaggaaggccacagcgaggagtcccagggagagcacgtgcctccacagcaagtccaggaacctggcgttgtttgtttggtgcattcttaaatacaggaaaaggaaggaatagacggagaagaaccacataaactgggaatggctggagggcatcccgtacttggtgcccactgctgtgtgggggcctccacagggccgtggctcctggatgacgtttttgatcagccagttgaccccctcgttcagtgccaggcccccaaggaaggagatcgtgtgcagctcccgcttaaatatgatgagggtcacgaaaccgacgatgacaaatacagggctgaggctcaggtaggcaaggaggtggccagagagatcacctgcaggatattcgacgtgggtgagggtcaccggccgccatgaagcggggagcgagcactgtccgtccgctgccatcttacccggagaccgggcctcccgct

SEQ ID NO: 440913 - DNA, 806 bp, Homo Sapiens
  misc_feature (637)..(645): n is a, c, g, or t
aattcccgggatatggcagcggacggacagtgctcgctccccgcttcatggcggccggtgaccctcacccacgtcgaatatcctgcaggtgatctctctggccacctccttgcctacctgagcctcagccctgtatttgtcatcgtcggtttcgtgaccctcatcatatttaagcgggagctgcacacggcccccacacagcagtgggcaccaagtacgggatgccctccagccattcccagtttatgtggttcttctccgtctattccttccttttcctgtatttaagaatgcaccaaacaaacaacgccaggttcctggacttgctgtggaggcacgtgctctccctgggactcctcgctgtggccttcctagtctcctacagcaggcctgtctccgagttcttcctaatccgagacacaagcctcattcccaacgtactctggtttgagtacacggtaacccgggcagaagccaggaacagacaacgcaagctggggacgaaactgcagtgaccagtgggtgtggctgggtccagcctccagatctggcccgcacgatgccttgcaggatggacaggatgacagacagggacgaagcagagacctctacagacccaagtcaccaagtggagccnnnnnnnnncttattttaattttaatgaacaaggtggaccaaagggctgaaccagcccctcaaccaggaccctggggggcctgctgcctgggggccgtggccagagacccttgctgtgctgctgccggcccctggctgtgcagaaagtgccctcggcatgggcacctggg

SEQ ID NO: 440914 - DNA, 504 bp, Homo Sapiens
  misc_feature (86)..(86): n is a, c, g, or t
  misc_feature (433)..(441): n is a, c, g, or t
  misc_feature (449)..(449): n is a, c, g, or t
  misc_feature (481)..(481): n is a, c, g, or t
catcctggtccctacccctgctccaatcccctgggctccacttctgggattgcagagctgagataactgaggtacaggcctcgcgngggagatcagccctgtctaggtgccattcccagggcaggtgctctgattggcccagttcaggtcaatcgctggctactgggtgtgggcatttgcctacttagttgggactacgggtggggtggggacagctgtaggtcactgaacaccagatgtctccacatctgacccccatcctgttttgcaggaacagacaacgcaagctggggacgaaactgcagtgaccagtgggtgtggctgggtccagccttccagatctggcccgcacgatgccttgcaggatggacaggatgacagacagggacgaagcagagaccttttacagacccaagtcaccaagtgggagccnnnnnnnnncttatttnaattttaatggaacaaggttggaccaaagggntgaaaccagcccttcaaccaggg

SEQ ID NO: 440915 - DNA, 572 bp, Homo Sapiens
tttaactgaagagggaacatgatctttattggcttatatgcaaagtttcattttggttttatgcagagtttgcatagttcatgatttgtttctaatgaaaaactagatgtgttgccagtgactgtgaagaagatcaggtgacagtagcaaacagaaaaatctgaagaagaggcataacttttaaagtagaaaggtcagcaagaactgcttcagctgcagccagtgatgtcacctccatcaggttcactgctcggaaagcaaacacggcagctgccagcacagcaagaatttccagagagttgtatcctaggattctatcccataaaagcaagagctgatctgtaggctaagtatccagagaaagctcgaaccatccacttaaatgatatgcgaagtggttgagccccaatttctcgtagatgataaaagagttggggaagataagtttgaagaagagtttcaaacagcagacagagtgacacaataccagaaggatgagaagagatggaatggagtctgaagaaaaaacgcacatacatctcacggaatatctgatacaatttggaaggttc

SEQ ID NO: 440916 - DNA, 2119 bp, Homo Sapiens
  misc_feature (215)..(215): n is a, c, g, or t
  misc_feature (1084)..(1084): n is a, c, g, or t
aaatggaaagtattttattgtcatgattgaatttagattgttacctgtattttgttcaggtttgagacatataaaagaccccacctgtaatagaaaggaatatagacccttgcctcacctgtattgttgtggatgtgttttgtgggtttttcattcgattttacaaaatagggaaaggcacttccagttgtatttagtaggcagttgttgtgaantcactttttctcttataggaggagattcctctctagccatgtttctgttaaagtttcattaattgaagcccaagtttactttttactgtacatacttattttctaattggatttgaaatcagcatgattttgtttgacaaagcaaagtttaagattgaggtcagaaatactttaatggagcaaagacacataccaactttacatgacggtgtgagaaatagtcctataaactggtctcttcatcatttatgctctcactttagatatccaaatattaaaaggcaggctgacctgtatcacacagaattaaggcagtaattttctgcttcagtagatcaagggtagggctaaggcatcctgtggtaattctgattcacagctagatttgggaaacacaaagttagggaatggctatatgtgatttgctagttggagcagtcaaagtcttagctatcaagagttgtgaatttgaatcatggcactaggtcaggggtgctatggattgaaatgaccttagttctcaaggagtgatttgtcctcatttgtcaaatgaggaatgagacacttaccatcatctcaggttgtttcttaaagacctaaatacaaatacaatttgttaaaaacttacagagggcctattttgaatgctttaagatgtaggccaagtaatgtatttttctcttagtgtagaaagttaagagaaaaagagctggtaccataaattttttcaatcttagtgtaaaatctgtatctcattgtaggcttctggtcaatacctatacataacaacttaatgtgatctaaccaactcaactgatagaaagctgaattgttcccagtggacaagtggtatttgatgtttagcaggnttttttgttgttatttttttggtaaactctgtggtaaaatctaaaataatgttaaaaccctaaaagtaactattgaatattctgtaatcttagacatgtatttttcaagctaaccctttgaagaaatgtgttcaaggtaggaaaatataaaattttttggttatttgtaaatttattttttgtgtgtttatatttaatgaaaagatgtaatttcatttgtgatagctgaaaaaaaggctttccataattaagaaaatacctttatcagtagctatgaactctgaaaaataatttttaaaaacttttaagaaaaaaactacttgagtaaaatatttccaagagttgtttaaaaatcttctttaaaacctttacatttctgcctcacttcttttttggtagcattagttgctgatgaaggagatttacaactactttcaacttttttaccactaaaggtttatggtaaatatggcagaaacaatagtttatcagtttcattagattttccataagatttctttgtacctttataggagtgctgcttgggttattcactacaatcacttatttcctatcaaagtttagcacttgctcctggaatcgtgttggagctgaaaccactcctatgtacacattcctataaaccttaattgaatgaaaagctgaatcaggtagactcttaatattttactctttcctgtaaggtgggattttcctgataatctttgttcagtaaaaatttcttttgtagaacagtttgctgagcagtatctggaatagcaggaaggaaatttggggccttaatgggaaaggccatagtgtgaaaatgttttataaattgagtgcaatacgacatggagtatgatgaatggcactccactgcttcctaaaatccaacactttttttgatacctccttttcattcttttttgcctggttctcaatttcattttttaattacctcattgtccttcccctttttcttctctttttgtccagcctggtacctaatagcaaatatagacagtatcttac

SEQ ID NO: 440917 - DNA, 691 bp, Homo Sapiens
  misc_feature (266)..(289): n is a, c, g, or t
agcgaggaggtggatatagaagatactaaaaactataaaaattagatagcagtgcttgcttctttatagatacattagaaatagtgttccaaataacatacttgaatatcatctttgaagtaaacaccatgttagactccctggtgataccactcttgaattggttaatatgtaagaacattgttttttattaccagttgatctctcaaatgaagtgatgactttttccatattctgtgtacccttgagcatgttgtgtctttttnnnnnnnnnnnnnnnnnnnnnnnnttattttttaaaatgtaaatatttattaccatcagacttggaaaatggaaagtattttattgtcatgattgaatttagattgttacctgtattttgttcaggtttgagacatataaaagaccccacctgtaatagaaaggaatatagacccttgcctcacctgtattgctgtggatgtgttttgtgggtttttcattcgattttacttttttctcttataggaggagattcctctctagccatgtttctgttaaagtttcattaattgaagcccaagtttactttttactgtacatacttattttctaattggatttgaaatcatcatgatttttgttgacaaagcaaagtttaagattgaggtcagaaatactttaatggaacatagacacataccaactt

SEQ ID NO: 440918 - DNA, 897 bp, Homo Sapiens
gtgagcatggggctgtattttaatacaagaaagacattgctctagaacatggctcgcctttgcttcagggcctagcagtttattttagccataagggtaagggagcaggtcagaaatgacttttagtgtaatcctatctgtaattaaaaatacaaatgctgtcataagatcaaatgttatcaaaaatcagtatttaaaattaaatttacccccaaatttctttcaaaaaagttgtaatgttctttttcagtgaagcctttgcactgctagagctgaagaatgtgatcaatcggcttgttgaataatcccgcacagtaggtattccgctgaagccaactctagctgggggctcgagagcgaaagacacagatggggccctgccgcccctcgaagagtcggatgggcgcgcccgtccccggtgcatcaagaggctggcccggccaggggcgaggggctcgcaccgaaccccgcgcacctcgccgcgggcggggctgggccgtagtcggctcgatttaaggctggtatccaaggctgcggccggtcaggcgaggcgaggcgaggcgaggcgacgtgagcgagggtgcttagggagaacagccgctggcagctcaatgctgggtggctaacgctcgacggtgcccggcagcaacccggccgacaccccgacccggatcccgagctgcgtcgcggacgatgccgcgggcccgtcccggactacgactcccgacgggctctgcgatcgctccggggcggcccagcgtgcactgcgccggccagtttgacagccgggcgccctactcggctagctctgctcccagcgagggacgctggccttctcgcggctttcccccgatatctctctttattccagctgcctgaaactcggatcccgggaat

SEQ ID NO: 440919 - DNA, 1309 bp, Homo Sapiens
  misc_feature (1093)..(1115): n is a, c, g, or t
cggaactttgactttatttttcagattgtactagttttttaattaatgtcatttttcttttccaggatccaatctaggataccacactgaattagtcgtcatgcctaattagcctctggtctgtgatagttccacagtctttctttttcataaccttgacagttttgaggagtactggtcaggtgttttgtagaatattcctcaatttgggtttgtctgatgttttcctcatggttagagtggggttatagatttttaggaagaataccagaggtgaaggtccttctcactgcatcatgtcaggagttacatgctatcagcttgatggtgtattaactttggacacttggttaaggtagtgtgtgttggttttttgctgctgaaaattactgttattttccctttccatacttctgttctttggaaaacagtcactaagtccagtcatgggaggtggtgggtgggaaagattacattcaaccccctggaagtgggaatatccatatgtagtatttggaatttttctatatggaaaatttgtttctccctcccaccctaatttgtttacatcagtatggactcatgtatattttgtattttgggtaacacagtatttattttgttgcttaagttgtccagcttggctattaggagttctgccaggttggctactatgtccctttgatgtgcccatccttttgatttttgagcacttcttactttctggcactacaagatgctccaggttcatcttggatattccctgccccaaccctagaatccctagaatcaacccctgctccaaagagccctggttccttttgttggagaatcatacttagaaaccaagatctgggcattagatgtgcttgttgctactgggatgtcactgtttgtagcagagttgagaaatatgtatgtatattaatccatgcatatgtacacatctataattatttatgtgtgtacaaagctaaacatgagtttgtactgccgtcttcaactcaaaatttgtcccaaaattttgtggcatatgtttagattttaaagttgatattttccctattgacagaataaactcattaaaagagcnnnnnnnnnnnnnnnnnnnnnnnggcaagaactaactttcagcagctctttgcaagaaatgtaatattgatactttaaaataatactgccttcaaatgatgcctgtctctttaaaatcttttgacatagttcttccaggcccagatatggctgtatttattacatagatggagaaactgagcacagagctgtaatgaagacagaactgaagtgaggc

SEQ ID NO: 440920 - DNA, 2096 bp, Homo Sapiens
  misc_feature (1492)..(1492): n is a, c, g, or t
tttaaaatcaattattttatttctaccatcaggtaatgaaaaggactaggatccatctataccatcagatgatttttggatgaagcaattctgaaccgggtaatagaactgcttgggaaagcccaactttttctggaaacaaaagattaacatttgtcccttcataatctcagtgaatacaatatacgataaattccaaggaattcaaatttaactagcattcattaggttgatgaaactaactctataaattacatttgatttagctgtacaaaaacattaagatgaacacaaacaagaatagtatatgcaagggtctactttttacttcacaatagaccacaaggaagtaatacttatactcctaaaacagaggcagttacaaatttgcagaaaccacaaactgaaataaactgacatatataaaacagagagaaatttggctaatattttaatatcccaatgaagaatctgaaaaacactctctatgaagaacttcgggaatccactcttcaacagaaaagcctgcccattaatgacactccaagaagtgtcatgatatatgcgattcactttcaagtcttcagcaaactaaaaatagagttatgagacttaaacagataatagacagtgaaagcaaatatgacaaacaaattattatatgataaacaacccgttaacaaaggaaggtagatggaaagtatgtggttattctttgcattttttcagcttttctctatgttgaaaactcttatgatacaaaatttggaaatgaacatacattctaagcttaaaagtataactgaaattagtctcttttccccttaaatattaaacatatttcagtaataattatattttatttgaggattttcaatgaactataaaaccaatcaatagagttgagatagacatagaattacctttgaatataacagaagctcctgaatatgaacaagaagggcttcttttgaagaaagaagagcccgcttcctgggctcagaatttcttgtttcagcagcctgaatttattccactggaatccatcaaagtatcaaaaccacgcagattcaattagagtcagtcaactcacagtaagcaaagttagttcttggcttttccttttttaacaggaagttgacctgtagcttccaaatacttattaatgacgtcttcttgtgtggatggtaaacatggctgatacctgctatactccattgtgtattctccctttccctctgtgcatgacctaagttcagtggaataaccaaacatatcatttagagggacatctgcatacagtgtaaaatagtcctcaactccatcttgcccagtgattaccccatggcgtcggttaattcctgcaattacttgtccctgaaattcatttggagctacaacttccacagccataataggttcaagaatacataatgttgcatttgccaaggcttgtttaagagcaccttctcctgctcggatgaaagagatntcattagaatcaaccatgtggtgtgctccatcttgcaggacaaaccggagcccagagagcttgtgaccagaaagagggcccttctcgcaggcatctaaaaaccccttttctacagcaggcacaaactgctttggaatatttgatccgaatgtttcatctgaaaattccaatttagtgtagtcctctgggtccagaggctccaggacacctattacttttccatactggcctgcaccacctgattgtttttttatgtgtaaagtcaaacgggacaggggcggtaatggtctctcgaaaggcaacttttggctttcctgtgatacaaggacagccatactctctttccagcctctgagcatagatttccaggtgtaattctcccattccagatataactgtctctttgttctcagtgtcaaagtatactttaaatgtgggatcttctcttgtaaacctgccaataccttttgaaaatttttccagatcgttcttgttagaaggcttcattgctattgaaatgacaggatcaggaacatgaattgactccatagaaagggcgctgtgggctttgtctgtgaatgtgtctccactagcacagtccatg

SEQ ID NO: 440921 - DNA, 1852 bp, Homo Sapiens
  misc_feature (1726)..(1734): n is a, c, g, or t
ctcctagcagcgtttattgtcgcccactctgcctgacccagtgttgggcataaggaaaacagagggaaagagttaaccaccctggagagagttccagcctcaaggaggagccaggcaggctacagaagtctcacagtgagggcgtggtcctgcaggttgacagaagttagaggacagatcagggaaggctgcctggaagaggtggctttgggttcatccaggccccctgcccacgtgtgcctgggtctgcccacaggacagaggctgatgggaaatcctacgtaaagtaccaggtcatcggcaagaaccacgtggcagtgcccacacacttcttcaaggtgctgatcctggaggcagcaggtgggcaaattgagctccgcacctacgtgatgcccaacgcacctgtggatgaggccatcccactggagcgcttcctggtgcccatcgagagcattgagcgggcttcggggctgctctttgtgcccaacatcctggcgcgggcaggcagcctccaaggccatccacggcgggcagtaagtgagggtggagcccagtgagactgtgggtgtgtgcaggaccggggagtattaaaggtggtgatttttggagacaattctggtggcgtccgtcccaagtgacctgcagagcccctggtttcactgctgcttcactgatgtcctcggccccttagaactttcaggtgtgccgggcacccgcctgggtgaggccaggctgcagggcggccagggagatgaggatggcttcctccgtgcggatggtacggctaccctggccaggacaggtattgacgtacaggtcaaagaggacactgggttcagccacctccaggttggggtcagcatccgctccagcttccagaccctggaggcccccgaacaccacaagagcatgcctgaagttgggaagctgggcagaggccacatctgagccgcgctctgacgtcccgatggtcaggtcatacccatcttggaagggggcctcagcaaacacagcactgaggcaggaagccagtcggacggtgtagccccagtagagaccagctttggtgcgagggtcctgcgatgataccactttgccatggtaggtcttgcagtctgggtgctgctgctggttcagtcgcacagtcacccgaagcccgggctccaggttcttgtcaatcttcacctcctttttcatgccacagttgacaaaggagccgtggcctggccgggtgggccgatccaccacgatgccctctcggaactcggattcctcatcctgacgcatgtggtgggggctgtccagggggttcaggagccctgcaaactgtagatcctggtgcttggggaagaacgccttcctcaggtactgtggacactccaggtactgcaggatccgggccagctgtacgcacgcctgccccttcttcccaactcctgtgaattccccctccacagtcttggcatcctggccctcctcatcaaacaccacgatctcatccacacagaagatggcacaggctctggcaatctgaccggccaagtaggtgcgaagctccggcgactgagcattgtccaggatggagcccggcagggctacgctcagtgtgtagggccgcccgcggtcctccttctctgccgctgcctcctcctcttccaggcgctttgcctgttcctcctgtgcccgctgccgctccagttttttcatcagcttgagatccttccannnnnnnnnctcctctttcttctgttgcttccattttcgccactcaatcctttggccgtgttcacccgggccgcacggccgcttcctgccgcgctccgccatgttccgcacacaccgtcggatcccg

SEQ ID NO: 440922 - DNA, 1616 bp, Homo Sapiens
ttttttcattttgaaaaatgtttatttaccttaccttttcttggccaagtcaattgctttggtcatctgcacaaagattctaaacactggctttcagcatttctttttccaagcaaatgaaatttatcataacaagacagagctctgattttagtctctgtggagtctgggctctgatgacctaggctagtcatcatctaagcctggaatgactgtttgggacccccatggccagcttgaagctttccttcctcagccactctgggcccctgaagaggtcacatgcatctgtggcagagactgtattataacaaagttgtttaccccaaagtcagcaaacacatgtacctagaactcatcccaattgtaggttgctcaccagacaggttacacgatgtgcaccagttaacatgccataggaaaattacattccaagaaaaaggaatgctataagaaacaagaaaaaacaaaagcacccaaaagcagctctccctcctttgatctgatggtctgcagaggtcctcaaatccacacactgccactcttcaagaccaaccgtccactgggccttcttaatctcatccaaagtcgcattcacaactttgacaggagcttgggttcttcatgtggcagctgcaaccatgtagtgtcttctcacttgcagaactctaacctcaagtctctcatgagtccccaaattccaggaagcataaaaaaacagcaaagcacacgagtatacttccaaactttgaaaatacaataagatcacaggaacaaatatgaccacgcagcagcgtacgtactgtataggccatattcctttacgtgggacattaatgaaaagctgtcttttccaaactgaatgcgcctattaataaaaaaatacacctgaccatctaatgctgaagtcatccgccaggatggtactggaaattgagtggctaatgtggagaaaacgcaggcagaaaaacaggggagacaaaacgaaaggctctcttggtttgagcctgtccaagcagccacgactccttatcaggtgaacacagttcgtcagttggccacccagcgcctttccaaccgcgggacactccccggccgcgctccgctccagacccgcgcaggcctcgccggctcagcaagcactcgcagccggcgatccgctggtgcagctccacgatccgcctgcccatccgcgccgcctccgcagccttcctctctgcttcggcgcacagccgagccacccgctcctcagcctccgcacgcgggcggggtgctggggcccgggcgccccgctcctctgcctccacctcactcttgatggcgtcgagcaggctctggatctccagcagcttcctgcgggcccgccagtgcgcccgggcgcgctcgcgctccagggaggccaggttctcgcggccggcgcggggcgcggggctcagcgggctgcccggctcctcgcggggctcccgcgcctcgtccgcgtccacgggccgcatcacgccgccgcctcttccagcccgcggggcacgccggggcttgctcaccagcagcgagcgcggaagcctcgctgtcaccaacgaccagactagcaacagctgccccaactttccgcagcgaga

SEQ ID NO: 440923 - DNA, 887 bp, Homo Sapiens
  misc_feature (12)..(12): n is a, c, g, or t
aggctggtccgnccgggggtatggcatctcgctgcggaaagttggggcaacctgttgctagtctggtcgttggtgacagcgaggcttccgcgctcgctgctggtgagcagccccggcgtgccccgcgggctggaagaggcggcggcgtgatgcggcccgtggacgcggacgaggcgcgggagccccgcgaggagccgggcagcccgctgagccccgcgccccgcgccggccgcgagaacctggcctccctggagcgcgagcgcgcccgggcgcactggcgggcccgcaggaagctgctggagatccagagcctgctcgacgccatcaagagtgaggtggaggcagaggagcggggcgcccgggccccagcaccccgcccgcgtgcggaggctgaggagcgggtggctcggctgtgcgccgaagcagagaggaaggctgcggaggcggcgcggatgggcaggcggatcgtggagctgcaccagcggatcgccggctgcgagtgctgctgagccggcgaggccgcgcgggtctggagcggagcgcggcggggagtgtcccgcggtggaaggcgctgggtaggcagggaggggagcgcagagccgtgccacgctctccgcggagttggtttcattcttttttcataggtggccaactgacgaactgtgttcacctgataaggagtcgtggctgcttggacaggctcaaaccaagagagcctttcgttttgtctcccctgtttttctgcctgcgttttctccacattaggccactccaatttccagtaccatcctggccggatgacttcagcattagatggtccgggtgtatcttttattaactaggcgcattcagtttggacactgaccagcttatcattcatgttccac

SEQ ID NO: 440924 - DNA, 273 bp, Homo Sapiens
cattccttctatgaggactctacatttttattattaacactctgatagactggtttggaaaatttttctgtaaggtatattataggaaacaaaattgtaaaggtatttgcagtattaccatttctaagcttttaaatttttttaaaattacttttatttgtataaccaaaattagatgggtttctgccagagtagcattccttctatgaggactctacatttttattattaacactctattttactgtatttgctttcctactctggaaaggg

SEQ ID NO: 440925 - DNA, 485 bp, Homo Sapiens
tccactataaaattttaataacattaattatcataaaaatacaaaagaaagccatccactaaaattagtaccccaaaacactttatattagttaactagctacagattaacagttgttggtgtgcaaagttgcatacatacttgacttctcatctggtctaatttcttccttgaatcctgcatcccattttctaaataggtgcagtgacgcgatgaagcatccagcagagcttttgttgctgatcctttgtttaagacatcatctcgtttttgttgaagctgtctcacagctacttctctttctgctttctctttttcatattggcattttttttctttcgaatgattcagttcattcaccaacattttattgtcttcttctagtaagagacggtgctttctgcactcagcttgaaggttttctactctagcatcacatctggcttgaaataagattgctttttcttgatgtcagtttgttgcga

SEQ ID NO: 440926 - DNA, 920 bp, Homo Sapiens
  misc_feature (643)..(643): n is a, c, g, or t
  misc_feature (646)..(646): n is a, c, g, or t
cccccttccccctccacttcccgccccccatagccgtgtacggaggggcgatggtaccgagcccggtattcccgggatgggagcccgagtcggcggcgctcgcggcccatcgtggggcccgagctgtgcgcctcggctcggagcccggaccgggcgggggcgccgacgtgcctcagcctgccttcgcgagggaggcgggagtgagcagaaaggcttagggcccagggggcggggaaggggggccgggcctggatccggcggggaggccgagccggaggccggaccgtggctcgcgctgtccccgggacgcggatcgaacgttggcggcgcggatcgcacgtcggcggccggtggaacgcgggagctgggcggcgcgcggactggggccatggcgtctgtgcaggcgtcccgccgccagtggtgctacctgtgcgacctgcccaagatgccgtgggccatggtgtgggacttcagcgaggccgtgtgtcgctgctgcgtgaacttcgagggcgcggaccgcatcgaactgctcatcgatgccgcccgccagctcaagcgcagccacgtgcttcccgagggccgctcgcccgggcccccggccttaagcacccggccaccaaggacctggcggcggcagcgaacnagngggccccagctgccgcccccgcaggcccagccccagccgtcagggaccggcggcggcgtgtcgggccaggaccgctatgacagggccacatcatcaggccgcctccccctgccctcgcccgccctggagtacactctgggggtcccgcctggccaatgggctgggccgtgaggaggccgtggctgagggggcgcgaagggccttgcttggctccatgcctggcttgatgcccctgggctgctggcagctgcagtgtctggcctcggaagccgag

SEQ ID NO: 440927 - DNA, 1511 bp, Homo Sapiens
  misc_feature (66)..(66): n is a, c, g, or t
  misc_feature (145)..(145): n is a, c, g, or t
  misc_feature (155)..(155): n is a, c, g, or t
  misc_feature (1284)..(1285): n is a, c, g, or t
  misc_feature (1288)..(1288): n is a, c, g, or t
  misc_feature (1290)..(1291): n is a, c, g, or t
  misc_feature (1293)..(1307): n is a, c, g, or t
  misc_feature (1310)..(1310): n is a, c, g, or t
  misc_feature (1312)..(1312): n is a, c, g, or t
  misc_feature (1317)..(1318): n is a, c, g, or t
  misc_feature (1329)..(1329): n is a, c, g, or t
  misc_feature (1340)..(1340): n is a, c, g, or t
  misc_feature (1351)..(1352): n is a, c, g, or t
  misc_feature (1355)..(1356): n is a, c, g, or t
  misc_feature (1360)..(1363): n is a, c, g, or t
cacaatttgattcatgcagctgatgttcacttcaaactgtggcattacataatgcttcatacaggntatcatgcactggctcactgtaactggtaaattttagtcaatgggtctttgtctgactgtccattcatgtattatgagncatacagggnacaacaaacaactttcacattcagacaaggtcagatgttgccattttgtataatgttcgctctgtccttgagaatcaccacgtgagtgcagcttatcgacttatgcaagaagaagaaatgaatatcttgataaatttatccaaagatgactggagggatcttcggaacctagtgattgaaatggttttatctacagacatgtcaggtcacttccagcaaattaaaaatataagaaacagtttgcagcagcctgaagggattgacagagccaaaaccatgtccctgattctccacgcagcagacatcagccacccagccaaatcctggaagctgcattatcggtggaccatggccctaatggaggagtttttcctgcagggagataaagaagctgaattagggcttccattttccccactttgtgatcggaagtcaaccatggtggcccagtcacaaataggtttcatcgatttcatagtagagccaacattttctcttctgacagactcaacagagaaaattgttattcctcttatagaggaagcctcaaaagccgaaacttcttcctatgtggcaagcagctcaaccaccattgtggggttacacattgctgatgcactaagacgatcaaatacaaaaggctccatgagtgatgggtcctattccccagactactcccttgcagcagtggacctgaagagtttcaagaacaacctggtggacatcattcagcagaacaaagagaggtggaaagagttagctgcacaagaagcaagaaccagttcacagaagtgtgagtttattcatcagtaaacacctttaagtaaaacctcgtgcatggtggcagctctaatttgaccaaaagacttggagattttgattatgcttgctggaaatctaccctgtcctgtgtgagacaggaaatctatttttgcagattgctcaataagcatcatgagccacataaataacagctgtaaactccttaattcaccgggctcaactgctaccgaacagattcatctagtggctacatcagcaccttgtgcttttcgatatctgtttcaatggcattttgtggcatttgtctttaccgagtgcccataaaattttctttgagcagctaagnnaangnngnnnnnnnnnnnnnnnggngnggggnnggggaaggggnggccggaaganaggagaagagnnagnnaccnnnnggggggccccgcctttaaagaatcccctgggggggcgccacagtttaccggcacccactctttttttgtggaaagaggggcgccccattaggggggggcttaataatagacgtagagcccctgggcccccctttttttaaacaccccc

SEQ ID NO: 440928 - DNA, 789 bp, Homo Sapiens
  misc_feature (680)..(734): n is a, c, g, or t
tcttgttcctttggattctgatttttcactttctgcccatagagctgcagatccagacaaagttctttgaagttgtccacggttcccttgtttagactgaagatgggtcaatgagaaatgggattggctggtcaggtgtctcagttattaacttggtcattaattcctcaaacaggggaccgatcttgttcttctccaggtaagcctggatccgggtttgcggatgagacgccatggggaacagatgggaccgcgaagagagtgcagggagaacgcgcggctgtgcgcctccgctggggacaaccctccttttacccggactggggccgggacaggagctccggagcctcggctgccctgcgtggctggctcggccccggccgcgggcgtgggtggcagcccggggagccacgcgcgcgtggggcgctgagagccggaagcctgggcgcagcgccgccaactcagacaactccgaggcgaggggagaactcattcatcgcgttctccgcctcgcgcccaccctcgccgctctccgcagcgcccggcgcagtggggaaattcgaggcagaggttcctttctcctctgggcggcagcagcaggaatcagggggcgggaggcgagctgtgtcgaggggcgcacgcgggcggacaggggccgcggggctcgaactcgccaccgnnnnnnnnnnnnnnnnnnnnnnnnnnnnnnnnnnnnnnnnnnnnnnnnnnnnnnncctcctttccccggtgacggaacaaacagcccgggctgctccccgaggctccgct

SEQ ID NO: 440929 - DNA, 1029 bp, Homo Sapiens
  misc_feature (201)..(201): n is a, c, g, or t
acccttctcccccacgttaccaccttccctatttccccatgtcttatttttattatctttccaccaaattagttttccttcatgtgggctgtgctttttaccagtaagatgttgttttgcagaagtagtagtctgatttctataaatgtttaaaaaatttaaagtatagagtgctagattaagttgcatctgaggagtggntacactccttactgtctcccccttctttttgtttaaccaattgagctttgagtgttctattagttctttcaattatggcctgtccttgggaattatagagaattcctattgtatgtgtaattttccactgatttaagaatttttgaactgctttactacagtaacctggcccattgtctgttttaactttttctggaactcccatgacaggaaaacaagataataaatgtcttttaacatgggaagtactttctcctgtctggcaggttgcccatatgaaatgtgaataagtatcaactgttacatggacatatgataatcttccaaatgaaggtacgtgcgtgacatccatttgccataacgcattaggacatagacctctgggattaactcctgcctcttgagtgggcaggtgtagagacttgacactgggtgcaatgttgtacaatatcttttgcctgtttccatgtgacatcaaatttgttttttaatcctgctgcatttacatgagtcaaagcatgaagtttttgtgcttttatgaatgcagatgataccagtaagtcagcttgttcatttgctttagtcaaaggccctggtaaattagtgtgtgctcgaatatgagtaatataaaatgggaaatttctttttcttacagtttgttgtaataaattgaatagctggtttaaatgatcgtccgtgctatatttaattagagctgtctcaacatcccttgtagcctgtactacatatgcagaatctgatataatattgataggttggtcaaaatcttgatcccgggaattccggaccggtaccagcctgcttttt

SEQ ID NO: 440930 - DNA, 871 bp, Homo Sapiens
cttaaatagtggcaactggtatttattacaattatatacagtcctatcttccgttctgaggtctatacatgatcacacaaatgaacatgtgtttcctggggggaaggacagagctggctgttggtcaggaaggccctgctgcctggctcctcctccggagtgagcccccatctcgccatgggattagctgaaccattacacggcaagcgggggcatcggaagcgcagcgtggtttcatttgtctgggaggacgacggggcatgagtggggttggggctggggacaggcacctgacgggtccagggccgggcccagggagggagggggatggcagacaccagagggaccgcagctcctcctccactgaggagtcgggaggcagtagggacgctagctctggccatgcgtggtgtcacggtagtcaagacactcagcaaacacaccctgggcaaggcgtctgtccgggagagggggctggggaggggcttgggccccgaggcttcgctgccttcagcctgacttgagatcaaagccaaaggcagctgcccccggggcttgggccgtgccttggtcctttcgcccaggctagaggaggcccagtgtccagaagtttttttccccaaactgccaacagcccccagtgcagctgaggacaggtctgcgcctttaattaggcatccaacctgccctcaccaggcccgaagggggaagtcaagctttggccccgctacgttaaacctcacaggccctccctcaaggcctcaatgtaataaacctctgcccttattcccccccagccatattttctattttcactcgttcctgcggaagtttcccttactttataatgcgacctggcccatactccgcc
